United States Patent Application Publication US 2024/0271122 A1 - sequence listing, part 5

SEQ ID NO: 7879 - DNA, 1188 bp, Saccharomyces cerevisiae
atgttgagaactcaagccgccagattgatctgcaactcccgtgtcatcactgctaagagaacctttgctttggccacccgtgctgctgcttacagcagaccagctgcccgtttcgttaagccaatgatcactacccgtggtttgaagcaaatcaacttcggtggtactgttgaaaccgtctacgaaagagctgactggccaagagaaaagttgttggactacttcaagaacgacacttttgctttgatcggttacggttcccaaggttacggtcaaggtttgaacttgagagacaacggtttgaacgttatcattggtgtccgtaaagatggtgcttcttggaaggctgccatcgaagacggttgggttccaggcaagaacttgttcactgttgaagatgctatcaagagaggtagttacgttatgaacttgttgtccgatgccgctcaatcagaaacctggcctgctatcaagccattgttgaccaagggtaagactttgtacttctcccacggtttctccccagtcttcaaggacttgactcacgttgaaccaccaaaggacttagatgttatcttggttgctccaaagggttccggtagaactgtcagatctttgttcaaggaaggtcgtggtattaactcttcttacgccgtctggaacgatgtcaccggtaaggctcacgaaaaggcccaagctttggccgttgccattggttccggttacgtttaccaaaccactttcgaaagagaagtcaactctgacttgtacggtgaaagaggttgtttaatgggtggtatccacggtatgttcttggctcaatacgacgtcttgagagaaaacggtcactccccatctgaagctttcaacgaaaccgtcgaagaagctacccaatctctatacccattgatcggtaagtacggtatggattacatgtacgatgcttgttccaccaccgccagaagaggtgctttggactggtacccaatcttcaagaatgctttgaagcctgttttccaagacttgtacgaatctaccaagaacggtaccgaaaccaagagatctttggaattcaactctcaacctgactacagagaaaagctagaaaaggaattagacaccatcagaaacatggaaatctggaaggttggtaaggaagtcagaaagttgagaccagaaaaccaataa

SEQ ID NO: 7880 - DNA, 1188 bp, Artificial Sequence
  Description of Artificial Sequence: Synthetic polynucleotide
atgttgagaactcaagccgccagattgatctgcaactcccgtgtcatcactgctaagagaacctttgctttggccacccgtgctgctgcttacagcagaccagctgcccgtttcgttaagccaatgatcactacccgtggtttgaagcaaatcaacttcggtggtactgttgaaaccgtctacgaaagagctgactggccaagagaaaagttgttggactacttcaagaacgacacttttgctttgatcggttacggttcccaaggttacggtcaaggtttgaacttgagagacaacggtttgaacgttatcattggtgtccgtaaagatggtgcttcttggaaggctgccatcgaagacggttgggttccaggcaagaacttgttcactgttgaagatgctatcaagagaggtagttacgttatgaacttgttgtccgatgccgctcaaagtgaaacctggcctgctatcaagccattgttgaccaagggtaagactttgtacttctcccacggtttctccccagtcttcaaggacttgactcacgttgaaccaccaaaggacttagatgttatcttggttgctccaaagggttccggtagaactgtcagatctttgttcaaggaaggtcgtggtattaactcttcttacgccgtctggaacgatgtcaccggtaaggctcacgaaaaggcccaagctttggccgttgccattggttccggttacgtttaccaaaccactttcgaaagagaagtcaactctgacttgtacggtgaaagaggttgtttaatgggtggtatccacggtatgttcttggctcaatacgacgtcttgagagaaaacggtcactccccatctgaagctttcaacgaaaccgtcgaagaagctacccaatctttgtacccattgatcggtaagtacggtatggattacatgtacgatgcttgttccaccaccgccagaagaggtgctttggactggtacccaatcttcaagaatgctttgaagcctgttttccaagacttgtacgaatctaccaagaacggtaccgaaaccaagagatctttggaattcaactctcaacctgactacagagaaaagttggaaaaggaattagacaccatcagaaacatggaaatctggaaggttggtaaggaagtcagaaagttgagaccagaaaaccaatga

SEQ ID NO: 7881 - DNA, 594 bp, Saccharomyces cerevisiae
atgtctgtttgtttagccatcacaaaaggtatcgcagtttcttctataggcctctactctggtcttttggcttccgcttcattgattacatctactactccactagaggttttaacaggatcccttactcccactttaaccactttgaaaaatgcggccaccgccttgggagcgtttgcgtcaactttcttttgtgtgagctttttcggcgctcctccctcattgagacacccctacttactctatggtatgcttgtagctccattatcttcatttgttctaggatgtgcctccaactatcagtctagaaagtacagtaaagtctctaaggaatcttctttatttcccgaagacagcaaactcgctgcttccgaactgagcgattctattattgatttaggtgaagacaaccatgcttcagaaaatacacctcgagacgggaagcctgcagcaaccacagtatcaaagccggcagaggcattgcacaccggtcccccaatccatactaaaaatctaattgcagcaactgctattgctattgttggctttgtacaagccgttattggcgtttatggggaaggacaatttatctag

SEQ ID NO: 7882 - DNA, 594 bp, Artificial Sequence
  Description of Artificial Sequence: Synthetic polynucleotide
atgtctgtttgtttagccatcacaaaaggtatcgcagtttcttctataggcctctactctggtcttttggcttccgcttctttgattacatctactactccattggaggttttaacaggatcccttactcccactttaaccactttgaaaaatgcggccaccgccttgggagcgtttgcgtctactttcttttgtgtgagctttttcggcgctcctccctctttgagacacccctacttactctatggtatgcttgtagctccattatcttcttttgttttaggatgtgcctccaactatcagtctagaaagtacagtaaagtctctaaggaatcttctttatttcccgaagacagcaaactcgctgcttccgaattgagcgattctattattgatttaggtgaagacaaccatgcttctgaaaatacacctagagacgggaagcctgcagcaaccacagtatccaagccggcagaggcattgcacaccggtcccccaatccatactaaaaatttaattgcagcaactgctattgctattgttggctttgtacaagccgttattggcgtttatggggaaggacaatttatctga

SEQ ID NO: 7883 - DNA, 2670 bp, Saccharomyces cerevisiae
atgatgcctgatgacaattcaaactcgtccactcaaaactcaagcgcattatacaaggacctgaggaaagaatatgaatctcttttcactttaaaggaagattctgggttagagatttcaccaatattcaatgtccttccacctaaaaaggattatcctgactactacgcagtgatcaagaaccctgtatctttcaatactttaaaaaagcgtattccacattatacagatgctcaacagtttatgaacgatgttgtccagattccatggaatgccaagacttacaatacaagagattcaggaatttataaatacgccttagtccttgagaaatatttaaaggacacaatctatccaaatttaaaagaaaaatatcctcaattagtgtatcctgatttgggtcctctacccgatgaaccaggttatgaagagtttcaacagaaattaagagaaaaagctgaggaagtagcgagagctaatgcagccagagccgagtcgagctcttcaatgaattcaacagaagcagccagaagattaagaaagactcgtacttccgtcaaaagagaatcagaaccaggaaccgatacaaataatgatgaggactatgaggcgacggatatggatatcgataaccctaaggatgctgattttcctgatttgataagaaagccactaataaatattaatccatatactcggaaaccattaagagacaacaggtccactactccatctcactcaggcacccctcagccgttaggcccaaggcatagacaggtatccagaactcaggtaaagcgtgggagacccccaatcatcgacttaccgtatattcaaagaatgaaaaatgttatgaaagtactaaaaaaagaggtgctagatagtggaattggtctaactgatctttttgaaagattgcccgatagacacagagatgcaaattactacatcatgattgctaatccaattagtcttcaagacataaataaaaaggtaaagactcgtcgttataaaacgttccaggagttccagaatgattttaatcttatgttaaccaactttagaatttcgcacagaggtgatcctgaaagcataaaaatttcaaatatcttagaaaagacctttactagtctggcaagattcgaactatccaaacctgatagaagtttcattccagaaggcgagctaagataccctctagatgaagtcattgtaaataatatatcataccacgtgggagattgggcacttcttcgaaatcaaaatgatcctcaaaaacctatagtgggccaaatattcaggctatggaagacaccagatgggaaacaatggttaaacgcttgttggtattacagacccgaacaaactgtgcatagagtggatagattgttttacaaaaacgaagttatgaaaacaggtcagtaccgtgatcatttagtgtcaaacttagttgggaaatgctatgtgattcactttactagatatcaacgtggtaatcccgatatgaaattggagggtcccttgttcgtttgcgaattccgttataatgaatccgataaaatttttaacaagattagaacctggaaggcttgcttaccagaggaaattcgtgatttggacgaagctaccattccggtaaatggtagaaagttcttcaaatatccttcccccataagacatctactaccagctaatgcaacgccgcatgatcgcgttcctgaaccaacgatgggatccccggacgcgccaccattggtcggtgccgtttatatgagacctaaaatgcagcgtgacgatttgggggaatatgcaacctctgatgactgtcccaggtatattatcagacccaacgattctcccgaagagggacaagtggatatagaaacaggtacgatcaccacaaacacgccaacagcaaatgctcttcctaaaacaggatactcaagtagtaaactatccagtttaagatataacaggtcatctatgtctttagaaaaccaaaatgctattggccagcaacaaataccactgtcaagagttggttcccctggcgcgggaggcccgcttactgtacaaggtttaaagcaacaccaattgcaaaggttacaacagcagcaacatcaataccaacaacagaaaagatcccaagcatcacgttataatatcccaacaataatcgatgatttaacatcgcaggcatcaagaggtaatttgggtaatataatgatcgatgcagcctcctcgtttgtcttacctatctctataaccaaaaacgtagatgttttgcagcgtactgatctgcacagccaaaccaagagatctggaagagaagagatgtttccatggaaaaaaacaaagggtgaaatattatggttcagaggacctagtgtgatagtaaatgaacgaataataaattcaggtgacccacacctaagcctgccactgaataggtggtttaccactaacaagaaaagaaaactagaatacgaagaagttgaagaaaccatggaagatgtgactggaaaggacaaagatgatgatggcttagaaccggatgttgaaaatgagaaagagtccttgccaggcccatttgtccttggattaagaccctcggctaagttcacggcgcacagactctctatgctgcggcctccttcgtcgtcttcatga

SEQ ID NO: 7884 - DNA, 2670 bp, Artificial Sequence
  Description of Artificial Sequence: Synthetic polynucleotide
atgatgcctgatgacaatagcaactcttccactcaaaactccagcgcattatacaaggacttgaggaaagaatatgaatctcttttcactttaaaggaagattctgggttagagatttctccaatattcaatgtccttccacctaaaaaggattatcctgactactacgcagtgatcaagaaccctgtatctttcaatactttaaaaaagcgtattccacattatacagatgctcaacagtttatgaacgatgttgtccagattccatggaatgccaagacttacaatacaagagattctggaatttataaatacgccttagtccttgagaaatatttaaaggacacaatctatccaaatttaaaagaaaaatatcctcaattagtgtatcctgatttgggtcctttgcccgatgaaccaggttatgaagagtttcaacagaaattaagagaaaaagctgaggaagtagcgagagctaatgcagccagagccgagagcagctcttctatgaattctacagaagcagccagaagattaagaaagactcgtacttccgtcaaaagagaaagtgaaccaggaaccgatacaaataatgatgaggactatgaggcgacggatatggatatcgataaccctaaggatgctgattttcctgatttgataagaaagccattgataaatattaatccatatactagaaaaccattaagagacaacaggtccactactccatctcactctggcacccctcagccgttaggcccaaggcatagacaggtatccagaactcaggtaaagcgtgggagacccccaatcatcgacttaccgtatattcaaagaatgaaaaatgttatgaaagtattgaaaaaagaggtgttggatagtggaattggtttgactgatctttttgaaagattgcccgatagacacagagatgcaaattactacatcatgattgctaatccaattagtcttcaagacataaataaaaaggtaaagactcgtcgttataaaacgttccaggagttccagaatgattttaatcttatgttaaccaactttagaatttctcacagaggtgatcctgaaagcataaaaatttctaatatcttagaaaagacctttactagtttagcaagattcgaattatccaaacctgatagaagtttcattccagaaggcgagttaagataccctttggatgaagtcattgtaaataatatatcttaccacgtgggagattgggcacttcttagaaatcaaaatgatcctcaaaaacctatagtgggccaaatattcaggctttggaagacaccagatgggaaacaatggttaaacgcttgttggtattacagacccgaacaaactgtgcatagagtggatagattgttttacaaaaacgaagttatgaaaacaggtcagtaccgtgatcatttagtgtctaacttagttgggaaatgctatgtgattcactttactagatatcaacgtggtaatcccgatatgaaattggagggtcccttgttcgtttgcgaattccgttataatgaatccgataaaatttttaacaagattagaacctggaaggcttgcttaccagaggaaattcgtgatttggacgaagctaccattccggtaaatggtagaaagttcttcaaatatccttcccccataagacatttattaccagctaatgcaacgccgcatgatcgcgttcctgaaccaacgatgggatccccggacgcgccaccattggtcggtgccgtttatatgagacctaaaatgcagcgtgacgatttgggggaatatgcaacctctgatgactgtcccaggtatattatcagacccaacgattctcccgaagagggacaagtggatatagaaacaggtacgatcaccacaaacacgccaacagcaaatgctcttcctaaaacaggatactctagtagtaaactttccagtttaagatataacaggtcttctatgtctttagaaaaccaaaatgctattggccagcaacaaataccattatctagagttggttcccctggcgcgggaggcccgcttactgtacaaggtttaaagcaacaccaattgcaaaggttacaacagcagcaacatcaataccaacaacagaaaagatcccaagcatctcgttataatatcccaacaataatcgatgatttaacatctcaggcatctagaggtaatttgggtaatataatgatcgatgcagcctcctcttttgtcttacctatctctataaccaaaaacgtagatgttttgcagcgtactgatttacacagccaaaccaagagatctggaagagaagagatgtttccatggaaaaaaacaaagggtgaaatattatggttcagaggacctagtgtgatagtaaatgaaagaataataaattctggtgacccacacttgagcttgccattgaataggtggtttaccactaacaagaaaagaaaattagaatacgaagaagttgaagaaaccatggaagatgtgactggaaaggacaaagatgatgatggcttagaaccggatgttgaaaatgagaaagagtccttgccaggcccatttgtccttggattaagaccctctgctaagttcacggcgcacagactctctatgttgagacctccttcttcttcttcttga

SEQ ID NO: 7885 - DNA, 564 bp, Saccharomyces cerevisiae
atgcgcaatgggaagatattatgctgccattgcttttacaataaaggtgatcatgaagacgacgaaggaggccgcagcatagagagtctgtgcgccgtgaacttagccgagggtcttaatccaaggacaaatgggcctggcaaggactctttctcattttcaacatccggttctaagccatcatcatctttgtcctttccagtcacatcttccatggtttcttcaacttcttcgtattctagttttcttttcttgttagtggtaaaccacctattcagtggcaggcttaggtgtgggtcacctgaatttattattcgttcatttactatcacactaggtcctctgaaccataatatttcaccctttgtttttttccatggaaacatctcttctcttccagatctcttggtttggctgtgcagatcagtacgctgcaaaacatctacgtttttggttatagagataggtaagacaaacgaggaggctgcatcgatcattatattacccaaattacctcttgatgcctgcgatgttaaatcatcgattattgttgggatattataa

SEQ ID NO: 7886 - DNA, 564 bp, Artificial Sequence
  Description of Artificial Sequence: Synthetic polynucleotide
atgcgcaatgggaagatattatgctgccattgcttttacaataaaggtgatcatgaagacgacgaaggaggccgcagcatagagagtttatgcgccgtgaacttagccgagggtcttaatccaaggacaaatgggcctggcaaggactctttctccttttctacatccggttctaagccatcttcttctttgtcctttccagtcacatcttccatggtttcttctacttcttcttattctagttttcttttcttgttagtggtaaaccaccttttcagtggcaggcttaggtgtgggagccctgaatttattattcgttcttttactatcacattaggtcctttgaaccataatatttctccctttgtttttttccatggaaacatctcttctcttccagatctcttggtttggttgtgcagatctgtacgctgcaaaacatctacgtttttggttatagagataggtaagacaaacgaggaggctgcatctatcattatattacccaaattacctcttgatgcctgcgatgttaaaagctctattattgttgggatattatga

SEQ ID NO: 7887 - DNA, 1449 bp, Saccharomyces cerevisiae
atgcctgactatgacaattacactacgccattgtcttctagatatgcctccaaggaaatgtcagcaacgttttctttgagaaacagattttccacatggagaaaactatggttaaatttggctattgctgagaaggaattgggcttaactgttgttacagatgaagcaattgagcaaatgcgcaaacacgtcgaaatcactgatgatgaaatcgcaaaagcttctgctcaagaagccattgtaagacatgatgttatggcacatgttcatacatttggtgaaacttgtccggctgctgcgggtatcattcacttaggtgctacttcctgtttcgttacagacaatgctgatctaatctttattagggacgcctacgatattattattccaaaacttgttaacgtcatcaacagattggctaagtttgctatggaatacaaggatttgcctgtattgggttggactcactttcaaccagcacaattaacgaccttgggtaagagagctactttatggatacaagagctattgtgggatttgagaaactttgaaagagctagaaacgatatcggtctacgtggtgttaagggtactactggtactcaggcatcattcttggccttattccatggtaatcatgataaagttgaagcccttgacgaaagagtaactgaattattaggtttcgataaggtatatccagtcactggtcaaacctactcaagaaaaattgacattgacgtgttggctcctttgtcttcttttgctgctactgcacacaaaatggctactgacataagattattagccaacctgaaggaagttgaggaaccttttgagaaatcacaaatcggatcctctgctatggcttacaagagaaacccaatgcgttgtgagagagtgtgctccttggctagacacttaggttccttgtttagtgacgccgttcaaactgcatccgttcaatggttcgaaagaactctggatgattctgctattagaagaatttctttaccaagtgcatttttaaccgcagatattctattatctactttgttgaacatctcatccggtttagttgtgtatccaaaggttatcgaaaggagaattaagggtgaactaccttttatggctactgaaaatatcatcatggctatggtagaaaagaatgcctccagacaagaagtacatgagcgtattagagtgctctctcatcaagccgcagcagtagtcaaggaagaaggtggggaaaatgatttaattgaacgagtaaagagggatgaatttttcaagcctatctgggaagaattagattctttactggaaccatccacttttgttggtagagctccacaacaagttgagaaatttgttcaaaaagacgttaacaatgctttacaacctttccaaaagtacctaaacgatgaacaagtcaagttaaatgtttag

SEQ ID NO: 7888 - DNA, 1449 bp, Artificial Sequence
  Description of Artificial Sequence: Synthetic polynucleotide
atgcctgactatgacaattacactacgccattgtcttctagatatgcctccaaggaaatgtctgcaacgttttctttgagaaacagattttccacatggagaaaattatggttaaatttggctattgctgagaaggaattgggcttaactgttgttacagatgaagcaattgagcaaatgcgcaaacacgtcgaaatcactgatgatgaaatcgcaaaagcttctgctcaagaagccattgtaagacatgatgttatggcacatgttcatacatttggtgaaacttgtccggctgctgcgggtatcattcacttaggtgctacttcctgtttcgttacagacaatgctgatttgatctttattagggacgcctacgatattattattccaaaacttgttaacgtcatcaacagattggctaagtttgctatggaatacaaggatttgcctgtattgggttggactcactttcaaccagcacaattaacgaccttgggtaagagagctactttatggatacaagagttattgtgggatttgagaaactttgaaagagctagaaacgatatcggtttacgtggtgttaagggtactactggtactcaggcatctttcttggccttattccatggtaatcatgataaagttgaagcccttgacgaaagagtaactgaattattaggtttcgataaggtatatccagtcactggtcaaacctactctagaaaaattgacattgacgtgttggctcctttgtcttcttttgctgctactgcacacaaaatggctactgacataagattattagccaacttgaaggaagttgaggaaccttttgagaaatctcaaatcggatcctctgctatggcttacaagagaaacccaatgcgttgtgagagagtgtgctccttggctagacacttaggttccttgtttagtgacgccgttcaaactgcatccgttcaatggttcgaaagaactttagatgattctgctattagaagaatttctttaccaagtgcatttttaaccgcagatattttattatctactttgttgaacatctcttccggtttagttgtgtatccaaaggttatcgaaaggagaattaagggtgaattaccttttatggctactgaaaatatcatcatggctatggtagaaaagaatgcctccagacaagaagtacatgagcgtattagagtgctctctcatcaagccgcagcagtagtcaaggaagaaggtggggaaaatgatttaattgaaagagtaaagagggatgaatttttcaagcctatctgggaagaattagattctttattggaaccatccacttttgttggtagagctccacaacaagttgagaaatttgttcaaaaagacgttaacaatgctttacaacctttccaaaagtacttgaacgatgaacaagtcaagttaaatgtttga

SEQ ID NO: 7889 - DNA, 1320 bp, Saccharomyces cerevisiae
atgaaacggttcttactcagtcgaagacagagacaccttcgtatgatttgctttcacaatataagtctctttagagctaatggtgactccaaattgatcaaggaatatggtgatggatttataccatgtttctttatcttggaatccataagaggggagctgctttatgtgagcgaggtacaatcaggttctttgcgtaaactctcttttcaggaattaccaaaactaactggtgcatctactatgattgtcctaaaattggtaggactagttccgagtgatattttgtgtaccataagttcagataaaaatggtatcattgacgataaatggtgcgttttatgtacctacacgatagatcttaacaagttacaacccataaatgaagacacagttctaattacaggcaccaacgcaccagtacttgatttaatagatggatcctacacattggctgcagaaaaaattaagccactaaagggccttgttagttctcacaaaaggaatataagtcaagtcaagatcaaattttcattggcatatagctctttactaaaattaaacaaactattggagtattcttcccaagtccatgaggaaatcaatgaaatttccagcaaaatagaagatgactttttgtcactcaagaatcaaaatcattggtatatgagaacagtacagaagtccatagaaacgctagaaaaggaagtcctacaaaggaaaaaaagcaagaaaaatatagaaatggcgcaactcgagagtaatgatactatcaaccattctaaaacagaactgtctctgatgtcgcaggacgagtctataaatgatgactatggaagcatatattctagatttgtgcaaataaaagataggttggaccaactgaggtttaagaaactgtatcagctgatagggatcttccattcaacggatttatttaattcagatagaggctatatttactttgaaaaaccttctagcgtaaatgatgttattaataggctcaagctaaaacctttgaatatagagatattacttagacaagccggcgaatccacaaagcacagagaatatgtaaacagccagttgggttattaccttttatttctccatttgacagccatccaaattttcaaggctcctttaccctatagactaatgtattatggtagtacatcagtgatcgacagtcaatatccgttgtatttcactgatcaaatgatttctaagcatcaagcaaagctgattaaagccatacattattttaatgctgatatattgcaatttaaacagattctggagaattaccgtccaacatag

SEQ ID NO: 7890 - DNA, 1320 bp, Artificial Sequence
  Description of Artificial Sequence: Synthetic polynucleotide
atgaaaagattcttactcagtagaagacagagacaccttcgtatgatttgctttcacaatataagtctctttagagctaatggtgactccaaattgatcaaggaatatggtgatggatttataccatgtttctttatcttggaatccataagaggggagttgctttatgtgagcgaggtacaatctggttctttgcgtaaactctcttttcaggaattaccaaaattaactggtgcatctactatgattgtcttgaaattggtaggattggttccgagtgatattttgtgtaccataagttctgataaaaatggtatcattgacgataaatggtgcgttttatgtacctacacgatagatcttaacaagttacaacccataaatgaagacacagttttgattacaggcaccaacgcaccagtacttgatttaatagatggatcctacacattggctgcagaaaaaattaagccattgaagggccttgttagttctcacaaaaggaatataagtcaagtcaagatcaaattttctttggcatatagctctttattgaaattaaacaaacttttggagtattcttcccaagtccatgaggaaatcaatgaaatttccagcaaaatagaagatgactttttgtctctcaagaatcaaaatcattggtatatgagaacagtacagaagtccatagaaacgttagaaaaggaagtcttacaaaggaaaaaaagcaagaaaaatatagaaatggcgcaactcgagagtaatgatactatcaaccattctaaaacagaattatctttgatgtctcaggacgagtctataaatgatgactatggaagcatatattctagatttgtgcaaataaaagataggttggaccaattaaggtttaagaaactttatcagttgatagggatcttccattctacggatttatttaattctgatagaggctatatttactttgaaaaaccttctagcgtaaatgatgttattaataggctcaagttgaaacctttgaatatagagatattacttagacaagccggcgaatccacaaagcacagagaatatgtaaacagccagttgggttattaccttttatttctccatttgacagccatccaaattttcaaggctcctttaccctatagattaatgtattatggtagtacatctgtgatcgacagtcaatatccgttgtatttcactgatcaaatgatttctaagcatcaagcaaagttgattaaagccatacattattttaatgctgatatattgcaatttaaacagattttagagaattaccgtccaacatga

SEQ ID NO: 7891 - DNA, 1737 bp, Saccharomyces cerevisiae
atgatccggttaccgaggctgtatcaaaggtacctattatacttggtagtttttgtagtgattgccctattttacttcctacaggcgccaagagttgaagagcacattggtttcgaccttgcactcccgatatcacacgttgataatctatggttccaaaataaaggtctagagggattctcaaatgacgataagctagttgtaaatataggctatgacgaatgttttcatattggtcgtttttatgaaggatgttttaatcggcatgaacttaaatcaactttaactgatgggcaccaatacttacaaaggaaaagaattcataaagacttgagaggttcctttggacgcaggtggtttggaaagtcagaatacctttactatgatgtgttataccctgctttggtggactactttggatccaacctagaaaagctaaatgttgaggcagtaactggaatttccaaatatcctaaagacaaatcgctaccctttatggatgtatccatcacattcgagcctattagcatagaactattgcagaaaaggagctacataagcgatattaacattctctttggtgttgattgcatccagccgatagcaaattggactcttcaaaaagaatttcccttagtaaaataccgctacagcgaacctgcttatttgacttacaaattcgttggtactcgtcctgtagacacaggagctcaacggctgcaagaaactgatgaaggaaagttcaaaattgttcagttggcggatctccacttgggtgtgggggagtctgaatgtatcgatgagtatccaaagcatgaagcttgcaaggcagatccaaaaacggaaactttcgttcaacaagttcttgacattgaaaaaccgcagttggttgtttttactggtgaccaaatcatgggtgatagatctattcaagactctgaaaccgtattattaaaggcggtagcacccgtcattgcaagaaaaattccgtgggcaatggtatggggaaatcacgacgacgagggaagcttaacgcgctggcagttatccgaaatagcttcagtactaccatattcccttttcaagtttagtccccatgatacacacgataatacgtttggcgttggtaattatatttatcagattttttcgaacaatgatacagaagtcccagtaggtacactttattttctggactcacataaatattctacggttggtaaaatttatcctggatatgattggattaaggaatcacagtggaaatacattgaagattatcatgatgtgaacttgaagttcaaaacaggtctttcaatggcattttttcacatcccactgccagaatacttgaatattgaatccaagacacatcccggagagaaaaatcccctcattggaatgtacaaagaaggtgttactgcacctaagtataattctgaggggataacaactttggataggttaagtgtggatgtcgtcagttgcggacatgaccattgtaacgattactgtcttcgagatgactctacgccgaacaaaatctggctatgctatggcggtggaggtggagaaggtggttatgctggctatggaggtacagaaagacgtatccgtatttatgaaattaatgtaaatgagaacaatatacacacatggaaaagattaaatggcagtccaaaagagatttttgattttcagtctatgttggacggtaattctccagaatctgtttaa

SEQ ID NO: 7892 - DNA, 1737 bp, Artificial Sequence
  Description of Artificial Sequence: Synthetic polynucleotide
atgatcagattaccgaggttatatcaaaggtacttattatacttggtagtttttgtagtgattgccttattttacttcttacaggcgccaagagttgaagagcacattggtttcgaccttgcactcccgatatctcacgttgataatttatggttccaaaataaaggtttagagggattcagtaatgacgataagttggttgtaaatataggctatgacgaatgttttcatattggtcgtttttatgaaggatgttttaatagacatgaacttaaatctactttaactgatgggcaccaatacttacaaaggaaaagaattcataaagacttgagaggttcctttggacgcaggtggtttggaaagtctgaatacctttactatgatgtgttataccctgctttggtggactactttggatccaacttggaaaagttgaatgttgaggcagtaactggaatttccaaatatcctaaagacaaatctttaccctttatggatgtatccatcacattcgagcctattagcatagaattattgcagaaaaggagctacataagcgatattaacattctctttggtgttgattgcatccagccgatagcaaattggactcttcaaaaagaatttcccttagtaaaataccgctacagcgaacctgcttatttgacttacaaattcgttggtactcgtcctgtagacacaggagctcaaagattacaagaaactgatgaaggaaagttcaaaattgttcagttggcggatctccacttgggtgtgggggagtctgaatgtatcgatgagtatccaaagcatgaagcttgcaaggcagatccaaaaacggaaactttcgttcaacaagttcttgacattgaaaaaccgcagttggttgtttttactggtgaccaaatcatgggtgatagatctattcaagactctgaaaccgtattattaaaggcggtagcacccgtcattgcaagaaaaattccgtgggcaatggtatggggaaatcacgacgacgagggaagcttaacgcgctggcagttatccgaaatagcttctgtattgccatattcccttttcaagtttagtccccatgatacacacgataatacgtttggcgttggtaattatatttatcagattttttccaacaatgatacagaagtcccagtaggtacactttattttttggactctcataaatattctacggttggtaaaatttatcctggatatgattggattaaggaatctcagtggaaatacattgaagattatcatgatgtgaacttgaagttcaaaacaggtctttctatggcattttttcacatcccattaccagaatacttgaatattgaatccaagacacatcccggagagaaaaatcccctcattggaatgtacaaagaaggtgttactgcacctaagtataattctgaggggataacaactttggataggttaagtgtggatgtcgtcagttgcggacatgaccattgtaacgattactgtcttagagatgactctacgccgaacaaaatctggttgtgctatggcggtggaggtggagaaggtggttatgctggctatggaggtacagaaagacgtatccgtatttatgaaattaatgtaaatgagaacaatatacacacatggaaaagattaaatggcagtccaaaagagatttttgattttcagtctatgttggacggtaattctccagaatctgtttga

SEQ ID NO: 7893 - DNA, 297 bp, Saccharomyces cerevisiae
atggcagttagtaataataataataataataatagtaaagaacgcacccaaaatataaaagaagtggaggaaaagttgggcgagaatccaaagattactttaaaagggggagggaaaactaaaatcatggattttgaacagttacgcaagccccattgcgtaagacccagtgcaagatttccagttgaagatactgccggtggtttattgagaacgggtggccacaggcctcagataagtgatgaagaagtctctaaaaggcaccatgaacagtctcatggacaagaagatcattaa

SEQ ID NO: 7894 - DNA, 297 bp, Artificial Sequence
  Description of Artificial Sequence: Synthetic polynucleotide
atggcagttagtaataataataataataataatagtaaagaacgcacccaaaatataaaagaagtggaggaaaagttgggcgagaatccaaagattactttaaaagggggagggaaaactaaaatcatggattttgaacagttacgcaagccccattgcgtaagacccagtgcaagatttccagttgaagatactgccggtggtttattgagaacgggtggccacaggcctcagataagtgatgaagaagtctctaaaaggcaccatgaacagtctcatggacaagaagatcattga

SEQ ID NO: 7895 - DNA, 2154 bp, Saccharomyces cerevisiae
atggaacagacacaaacagcagagggcactgacttactaattggtgacgaaaagaccaacgatttaccttttgtgcagttatttctggaggaaataggatgcactcaatacctggatagctttattcagtgcaaccttgtcacagaagaagaaattaagtatctcgacaaggatatcctcattgctttgggtgtaaacaaaataggagacagactcaaaattttaaggaagtcaaaatcgttccagagagataaacggattgaacaggtgaatagattgaaaaacctgatggaaaaagtaagctctctatccactgctacgctatcgatgaattcagaattgattcctgaaaagcactgtgttatatttatcttaaacgatggttccgctaagaaagttaatgtaaatggttgctttaatgcagattctattaagaaaaggctaatcagaagattgccacatgaattattagccacaaactccaatggagaagtaactaaaatggtccaagattatgatgtgtttgtcttagattataccaagaacgtactgcatttgctatatgacgtggaattagtcactatttgccacgcaaatgatcgtgttgagaaaaataggctaatttttgtttccaaagaccaaacaccaagtgataaagctatatccacatccaaaaaactatatctaagaacgttgagtgcattgagccaggttgggccatcctcgtcaaatttgttggcacagaacaaggggatttcgcataacaatgctgaagggaaactccggatcgacaacacagaaaaggacagaattagacagatttttaatcagaggcctcctagcgaatttatttctaccaatttggccggatattttcctcatacagacatgaagcggttgcaaaagacgatgagagagtcatttcgccattcagcaaggctaagcattgctcaaagaagacctttaagtgcagaatcaaataatatcggtgacatactattgaaacactcaaacgctgttgatatggccctattacaaggattagatcagacaagattaagcagtaaacttgacacaactaaaattccgaagcttgcccataaaaggccagaagataatgatgccatatctaaccagttagaactattaagtgtagagtctggtgaagaagaagatcacgatttctttggggaggacagtgacattgtttcattaccgacgaaaattgccacgcccaagaattggttaaaaggtgcttgcattggatcaggcagttttgggagtgtttacttgggcatgaatgctcacactggtgaactaatggcagtaaagcaagtggagataaaaaataataacattggtgttcccacagacaacaataaacaagccaattctgatgagaataatgagcaggaggaacaacaagagaaaatagaagatgttggggcggtaagtcatccaaaaaccaatcaaaatattcacagaaagatggttgatgctttacagcatgaaatgaatttattgaaggagttacatcatgagaacattgttacttattatggtgcttctcaagaaggcggaaatttaaatatttttcttgaatacgttcctgggggttcggtttcctccatgctgaataattacggtccatttgaggaatcactgattactaatttcactaggcaaatactgattggggttgcgtatttgcataagaagaacattattcacagagatatcaagggtgcaaatattttgattgatatcaaaggttgcgtaaaaattactgattttggtatttcaaaaaaattatcacctttgaataaaaaacaaaataagagagcttctttgcaaggttccgtattctggatgtcaccagaggtggtcaaacagaccgctactactgctaaagcggatatatggtctacaggatgtgttgtcattgaaatgtttaccggtaagcatcctttcccagatttttctcaaatgcaagcgatcttcaaaataggcacaaacacgacccccgagataccttcctgggctacgtcagaaggaaagaatttcttaagaaaggcatttgagttggattatcaatacaggcctagtgcccttgaattgctgcagcatccatggctggatgcacacataatttga

SEQ ID NO: 7896 - DNA, 2154 bp, Artificial Sequence
  Description of Artificial Sequence: Synthetic polynucleotide
atggaacagacacaaacagcagagggcactgacttattgattggtgacgaaaagaccaacgatttaccttttgtgcagttatttttggaggaaataggatgcactcaatacttggatagctttattcagtgcaaccttgtcacagaagaagaaattaagtatctcgacaaggatatcctcattgctttgggtgtaaacaaaataggagacagactcaaaattttaaggaagagtaaatctttccagagagataaaagaattgaacaggtgaatagattgaaaaacttgatggaaaaagtaagctctttatccactgctacgttatctatgaattctgaattgattcctgaaaagcactgtgttatatttatcttaaacgatggttccgctaagaaagttaatgtaaatggttgctttaatgcagattctattaagaaaaggttgatcagaagattgccacatgaattattagccacaaactccaatggagaagtaactaaaatggtccaagattatgatgtgtttgtcttagattataccaagaacgtattacatttgttatatgacgtggaattagtcactatttgccacgcaaatgatcgtgttgagaaaaataggttgatttttgtttccaaagaccaaacaccaagtgataaagctatatccacatccaaaaaactttatttaagaacgttgagtgcattgagccaggttgggccatcctcttccaatttgttggcacagaacaaggggatttctcataacaatgctgaagggaaactcagaatcgacaacacagaaaaggacagaattagacagatttttaatcagaggcctcctagcgaatttatttctaccaatttggccggatattttcctcatacagacatgaagagattgcaaaagacgatgagagagtcttttcgccattctgcaaggttgagcattgctcaaagaagacctttaagtgcagaaagtaataatatcggtgacatattattgaaacactccaacgctgttgatatggccttattacaaggattagatcagacaagattaagcagtaaacttgacacaactaaaattccgaagcttgcccataaaaggccagaagataatgatgccatatctaaccagttagaattattaagtgtagagtctggtgaagaagaagatcacgatttctttggggaggacagtgacattgtttctttaccgacgaaaattgccacgcccaagaattggttaaaaggtgcttgcattggatctggcagttttgggagtgtttacttgggcatgaatgctcacactggtgaattgatggcagtaaagcaagtggagataaaaaataataacattggtgttcccacagacaacaataaacaagccaattctgatgagaataatgagcaggaggaacaacaagagaaaatagaagatgttggggcggtaagtcatccaaaaaccaatcaaaatattcacagaaagatggttgatgctttacagcatgaaatgaatttattgaaggagttacatcatgagaacattgttacttattatggtgcttctcaagaaggcggaaatttaaatatttttcttgaatacgttcctgggggttctgtttcctccatgttgaataattacggtccatttgaggaatctttgattactaatttcactaggcaaatattgattggggttgcgtatttgcataagaagaacattattcacagagatatcaagggtgcaaatattttgattgatatcaaaggttgcgtaaaaattactgattttggtatttccaaaaaattatctcctttgaataaaaaacaaaataagagagcttctttgcaaggttccgtattctggatgtctccagaggtggtcaaacagaccgctactactgctaaagcggatatatggtctacaggatgtgttgtcattgaaatgtttaccggtaagcatcctttcccagatttttctcaaatgcaagcgatcttcaaaataggcacaaacacgacccccgagataccttcctgggctacgagtgaaggaaagaatttcttaagaaaggcatttgagttggattatcaatacaggcctagtgcccttgaattgttacagcatccatggcttgatgcacacataatttga

SEQ ID NO: 7897 - DNA, 657 bp, Saccharomyces cerevisiae
atgacacaatataatttcattatagatgcttcagcttttgaaaagggtctaggcaacatcaagaggtggtgctcggactgtacagaagctgtgactttgaacttttatattccaacattcacattaaatgaattggatttccttcaacaaaggcgtaaaagttttgcagctcgagaatccttgaagtttatcgatagattagatgattctaaatttgctaatttgaaagtttttatcgaatttcccgaagttttagacattattttatggtcagatgtaatggaacataatgatagttctggaaagattaatattgcaaaattgcctaagagattaaagaatttgttgaaaagttgtatttacaaatgctacctagaaggaaatgaggggctacattggtttttaattagtgaagatcctcaaatccgggaaatggccatgcaatgcaatattccttcctgttcaattgttgatgtagattcaatcttgtccaaggacatgaatgataaatcatttagagaaagtgaaaaattcaataatatgatgctaaaaaatggcactaaggaagaaagcgaaaacggtagagaaattatcaggactaacttcaataaaacagtttacgcttctagaggtacaggcgaattgtggtccccataa

SEQ ID NO: 7898 - DNA, 657 bp, Artificial Sequence
  Description of Artificial Sequence: Synthetic polynucleotide
atgacacaatataatttcattatagatgcttctgcttttgaaaagggtcttggcaacatcaagaggtggtgctctgactgtacagaagctgtgactttgaacttttatattccaacattcacattaaatgaattggatttccttcaacaaaggcgtaaaagttttgcagctagagaatccttgaagtttatcgatagattagatgattctaaatttgctaatttgaaagtttttatcgaatttcccgaagttttagacattattttatggtctgatgtaatggaacataatgatagttctggaaagattaatattgcaaaattgcctaagagattaaagaatttgttgaaaagttgtatttacaaatgctacttggaaggaaatgaggggttgcattggtttttaattagtgaagatcctcaaatcagagaaatggccatgcaatgcaatattccttcctgttctattgttgatgtagattctatcttgtccaaggacatgaatgataaaagttttagagaaagtgaaaaattcaataatatgatgttgaaaaatggcactaaggaagaaagcgaaaacggtagagaaattatcaggactaacttcaataaaacagtttacgcttctagaggtacaggcgaattgtggtccccatga

SEQ ID NO: 7899 - DNA, 258 bp, Saccharomyces cerevisiae
atgcctcaaaaaccacttaaagttactaagaaagccaaggacccccgtagggtcacaaagaaacaaaaaaatttgagaaaagctgccccattgcaattgaaatcaaaaaagaaatctttgcaacatctgaagaaattgaaaaagagctcttcccttaccgaaaccactgaaagattagttgcgagtaaagtcgggcatttggagttgttgagaggtactagaaaggagttggaaaaaggtaagaagaactctaaatga

SEQ ID NO: 7900 - DNA, 258 bp, Artificial Sequence
  Description of Artificial Sequence: Synthetic polynucleotide
atgcctcaaaaaccacttaaagttactaagaaagccaaggacccccgtagggtcacaaagaaacaaaaaaatttgagaaaagctgccccattgcaattgaaatctaaaaagaaatctttgcaacatttgaagaaattgaaaaagagctcttcccttaccgaaaccactgaaagattagttgcgagtaaagtcgggcatttggagttgttgagaggtactagaaaggagttggaaaaaggtaagaagaactctaaatga

SEQ ID NO: 7901 - DNA, 330 bp, Saccharomyces cerevisiae
atgtctgcctttgttactaaagctgaagagatgatcaaatctcatccatatttccagttatccgccagctggtgccccgactgcgtctatgctaattccatttggaataagttgaatgtacaggacaaagttttcgtttttgatattggttcacttccaagaaacgaacaggaaaaatggagaattgcgttccaaaaagttgttggtagcagaaacttaccaacgatagttgtcaatggtaaattctggggtactgagagtcaattgcatagatttgaagcaaaaggcactcttgaggaggaattgactaaaatcgggcttctgccttga

SEQ ID NO: 7902 - DNA, 330 bp, Artificial Sequence
  Description of Artificial Sequence: Synthetic polynucleotide
atgtctgcctttgttactaaagctgaagagatgatcaaatctcatccatatttccagttatccgccagctggtgccccgactgcgtctatgctaattccatttggaataagttgaatgtacaggacaaagttttcgtttttgatattggttctcttccaagaaacgaacaggaaaaatggagaattgcgttccaaaaagttgttggtagcagaaacttaccaacgatagttgtcaatggtaaattctggggtactgagagtcaattgcatagatttgaagcaaaaggcactcttgaggaggaattgactaaaatcgggcttttaccttga

SEQ ID NO: 7903 - DNA, 333 bp, Saccharomyces cerevisiae
atggtcaaaggacgtcattcaaaacgcaaagggaatttccacattattttacgtaatgcttcgctgttacaaagacagaaacttgacaaatcaaggtcaactggatcgttgctcgaaagtcgccgtcagccatgcgttttactttcgtttgcaaaactctttctcttgtgtatcgtatttagcccgaaattagactataccaaaaaaaagaccaagattcttaagcttcatcaatcctttggaactgcaactattcttacaatctttcatttacatggctcaagaagtgttgctgctcaaaatttcattctatttcatgattatttacattaa

SEQ ID NO: 7904 - DNA, 333 bp, Artificial Sequence
  Description of Artificial Sequence: Synthetic polynucleotide
atggtcaaaggacgtcattctaaacgcaaagggaatttccacattattttacgtaatgcttctttattacaaagacagaaacttgacaaatctaggtctactggatctttgctcgaaagtcgccgtcagccatgcgttttactttcttttgcaaaactctttctcttgtgtatcgtatttagcccgaaattagactataccaaaaaaaagaccaagattcttaagcttcatcaatcctttggaactgcaactattcttacaatctttcatttacatggctccagaagtgttgctgctcaaaatttcattttatttcatgattatttacattga

SEQ ID NO: 7905 - DNA, 393 bp, Saccharomyces cerevisiae
atgactcgctcttccgttttagctgatgctttgaatgccattaataacgccgaaaagaccggtaaacgtcaggttctattgagaccttcttccaaggttatcatcaagtttttacaagttatgcaaaagcatggttacattggcgaattcgaatacattgacgaccacagatctggtaagattgtcgtccaactgaacggtagattgaacaaatgtggtgttatttccccaagatttaacgttaagattggtgacattgaaaaatggaccgccaacttattgccagccagacaattcggttacgttattttgactacttctgcgggtattatggaccatgaggaagctagaagaaagcacgtttccggtaaaatcttgggttttgtctattaa

SEQ ID NO: 7906 - DNA, 393 bp, Artificial Sequence
  Description of Artificial Sequence: Synthetic polynucleotide
atgactcgctcttccgttttagctgatgctttgaatgccattaataacgccgaaaagaccggtaaacgtcaggttttattgagaccttcttccaaggttatcatcaagtttttacaagttatgcaaaagcatggttacattggcgaattcgaatacattgacgaccacagatctggtaagattgtcgtccaattgaacggtagattgaacaaatgtggtgttatttccccaagatttaacgttaagattggtgacattgaaaaatggaccgccaacttattgccagccagacaattcggttacgttattttgactacttctgcgggtattatggaccatgaggaagctagaagaaagcacgtttccggtaaaatcttgggttttgtctattga

SEQ ID NO: 7907 - DNA, 1797 bp, Saccharomyces cerevisiae
atgacaaagaggagaaacctctttatggttggttcttccttcacaatagatcatttacctccagaaatatggctttgtatttctaagctggtcgggacgtctgacctgcataacttgtgtttaattaacagaagattgtatttgacaattacaagtgatgaaatttggaaaagaagatgctatgaccgatggataaatcgagaaagcttagatattttaactggtaatgattacgattctatacccgtctctcaatggtattcttactatttaagaagagcaaaatgggagaataaaattttttgtctattatgggggttaactgaagaaacaaatccccaacatttcagagagaaatatttgcatatcctccaatttagacattacaaactggctacatttctgcataggattataaaacaaggctacatacctgataaaagaccacttgatttaatcacgtatgcaaactatctgttgaaaaatgtgcgacataagtacgtatttcctttattttatcccacaaatgccgctgaattgaaaaatcttaataatatggcctcaagggatgctgaaatgatatatttaagattatctgccattgatacgtcttttgatgacttactagatgctagagaattcatattaaatggaatatgttccgatctactacaaaagtataaaaaaattgaagagtttttgaaattacgaccggtgactagggtttccaagttaatctcaatcagtactgactatctggactgcttcacacaacctcatgattcagtgggtcaaacaaatgatagggccacaggaagggagctacatagagaggatttcatgttactaagagtatattcccgagaaggacgaggttataaaactatcattctagcaataatacaggctatcactaagagatataacgttgattcatatcttgctcgagatcatttggtggtgtctgaaccagactttccagatggacgggcatttgttaccgtgaatgaggatttccagccatacatttttgataaagaggaccttttgagcgtttggtcgaacaacttccataacgcagaaaattttgaaagtacagttttaccagcattattagaaccaatatcgatacaacatcttctgacggagttctttcgagaactgctgcgatgcaagcccaggccatttgagggatatccaaacagagcacacggattacgcgatatgtttccatacggaaaagtggaagttcccagagatgtgacgatgtattttgcatttatatacgatcttttcgatggcatgtttgaatctggaatgacaagtttacggggccagatgttgagagatttactgaactacgttaacgctaataattttggtgatttgaatatcatcattggacaaaatgctcttaaggaaccaaatgactgctggtccaacaagagggattacgttcttcttgatgacaataataagattggatatttctatacggatattgaaactgaggatactttatgtgccttaaaccaatatgaagtggacggcaaagtttttataacaacaatagatatcttgggtgatataagagtacgcctggctgaaggactaacgccttttcagggagataatgataagttgtgggagagcttttcttccgttgttccacgaactgactggggactttttttcaaaggctatgacaaagaaaggcgtagaatgcaattaaacccttacatagaggaaaagctttccaatctagcgaatgatgaacagcctttacataatttatag

SEQ ID NO: 7908 - DNA, 1797 bp, Artificial Sequence
  Description of Artificial Sequence: Synthetic polynucleotide
atgacaaagaggagaaacctctttatggttggttcttccttcacaatagatcatttacctccagaaatatggctttgtatttctaagttggtcgggacgtctgacttgcataacttgtgtttaattaacagaagattgtatttgacaattacaagtgatgaaatttggaaaagaagatgctatgacagatggataaatagagaaagcttagatattttaactggtaatgattacgattctatacccgtctctcaatggtattcttactatttaagaagagcaaaatgggagaataaaattttttgtcttttatgggggttaactgaagaaacaaatccccaacatttcagagagaaatatttgcatatcctccaatttagacattacaaattggctacatttttacataggattataaaacaaggctacatacctgataaaagaccacttgatttaatcacgtatgcaaactatcttttgaaaaatgtgagacataagtacgtatttcctttattttatcccacaaatgccgctgaattgaaaaatcttaataatatggcctctagggatgctgaaatgatatatttaagattatctgccattgatacgtcttttgatgacttattagatgctagagaattcatattaaatggaatatgttccgatttattacaaaagtataaaaaaattgaagagtttttgaaattaagaccggtgactagggtttccaagttaatctccatcagtactgactatttggactgcttcacacaacctcatgattctgtgggtcaaacaaatgatagggccacaggaagggagttacatagagaggatttcatgttattaagagtatattccagagaaggaagaggttataaaactatcattttggcaataatacaggctatcactaagagatataacgttgattcttatcttgctagagatcatttggtggtgtctgaaccagactttccagatggaagggcatttgttaccgtgaatgaggatttccagccatacatttttgataaagaggaccttttgagcgtttggagcaacaacttccataacgcagaaaattttgaaagtacagttttaccagcattattagaaccaatatccatacaacatcttttgacggagttctttagagaattacttagatgcaagcccaggccatttgagggatatccaaacagagcacacggattacgcgatatgtttccatacggaaaagtggaagttcccagagatgtgacgatgtattttgcatttatatacgatcttttcgatggcatgtttgaatctggaatgacaagtttaagaggccagatgttgagagatttattaaactacgttaacgctaataattttggtgatttgaatatcatcattggacaaaatgctcttaaggaaccaaatgactgctggtccaacaagagggattacgttcttcttgatgacaataataagattggatatttctatacggatattgaaactgaggatactttatgtgccttaaaccaatatgaagtggacggcaaagtttttataacaacaatagatatcttgggtgatataagagtacgcttagctgaaggattaacgccttttcagggagataatgataagttgtgggagagcttttcttccgttgttccaagaactgactggggactttttttcaaaggctatgacaaagaaaggcgtagaatgcaattaaacccttacatagaggaaaagctttccaatttggcgaatgatgaacagcctttacataatttatga

SEQ ID NO: 7909 - DNA, 1974 bp, Saccharomyces cerevisiae
atgcttaaatctggtagactcaactttctcaagttgaatatcaattcacgattactatactcaacgaaccctcaactgactaagaaggtcattggtatcgacctgggtaccacgaatagtgctgttgcatatatccgtgattctaacgacaaaaaatcagctacaatcatagaaaatgatgaaggacaacgaaccacaccatctatagttgcctttgatgtcaaaagctcgccacagaataaagatcaaatgaaaactcttgtagggatggcagctaaaaggcaaaatgctattaattctgaaaacactttctttgctacaaagagacttattggccgtgcattcaacgacaaggaagttcagcgagatatggctgttatgccatataagattgtcaaatgtgagtcaaatgggcaagcctatctcagcacgtctaatggtctcattcaatcaccaagccagatagcatctatattactgaaatacctgaaacaaacttcagaagaatacttaggcgaaaaggttaatttggcagttattacagttccagcatattttaatgattctcaaaggcaagccacaaaagatgccggcaagttagctggcctaaatgttttgagagttattaacgaaccaactgcggccgccttaagctttggaattgatgataagaggaataatggattaattgcagtttacgatttgggtggtggtacatttgacatatccatcttggacattgaagatggcgtgtttgaggttcgtgctactaatggtgacacgcatttaggtggagaagattttgacaacgtcattgtaaactatattatagataccttcattcatgaaaaccctgaaattacacgggaagaaattacgaagaacagggagacaatgcaaaggttaaaagatgtttctgaaagagctaagatagatttatcccatgtgaagaaaacttttatcgaacttccatttgtatacaaaagcaaacatctacgagtgccaatgacagaggaagagctggataatatgactttgtcattaatcaacaggactatcccacctgtgaagcaagcattgaaagatgccgatatcgaaccggaggatatagatgaagtaatccttgttggtggtatgacccgtatgccaaagattagatctgttgtaaaagatctttttggtaagtctccaaattctagtgttaacccagatgaaacagttgctttaggagcagctattcaaggtggtattctatccggtgaaataaagaatgtcttacttttggatgtgacaccattgacattagggattgaaacatttggaggagcgttctcacccttgatacctagaaatacgacagttccagtaaaaaaaacagagatatttagtactggtgttgatgggcaagcgggtgttgatatcaaagtttttcagggtgaaagagggttagtgcgtaacaacaagttgattggtgatttgaaacttacaggaatcacccctttgcctaaaggcattccccaaatatatgttacttttgatatcgatgcggatggtatcatcaacgtatctgccgctgagaaaagtagtgggaaacaacaatccattactgtaataccaaattctgggttaagcgaagaggaaattgcaaaacttattgaagaagcaaatgcaaatagggcacaagataacttgatcaggcaaaggttagagcttatctctaaggctgacattatgataagtgatactgagaatttatttaaaagatatgaaaaactgatttctagcgaaaaagagtattctaatatcgtagaggacatcaaagctctgagacaagctataaagaattttaaggctaacgaaaatgacatgtcaattgatgtaaacggaataaaaaaagctacggatgcgctacagggtagggcattaaaattattccaaagcgcaacaaaaaaccagcagaatcaaggtaaataa

SEQ ID NO: 7910 - DNA, 1974 bp, Artificial Sequence
  Description of Artificial Sequence: Synthetic polynucleotide
atgcttaaatctggtagactcaactttctcaagttgaatatcaattctagattattgtactctacgaaccctcaattgactaagaaggtcattggtatcgacttgggtaccacgaatagtgctgttgcatatatccgtgattctaacgacaaaaaatctgctacaatcatagaaaatgatgaaggacaaagaaccacaccatctatagttgcctttgatgtcaaaagctctccacagaataaagatcaaatgaaaactcttgtagggatggcagctaaaaggcaaaatgctattaattctgaaaacactttctttgctacaaagagacttattggccgtgcattcaacgacaaggaagttcagagagatatggctgttatgccatataagattgtcaaatgtgagagcaatgggcaagcctatctcagcacgtctaatggtctcattcaatctccaagccagatagcatctatattattgaaatacttgaaacaaacttctgaagaatacttaggcgaaaaggttaatttggcagttattacagttccagcatattttaatgattctcaaaggcaagccacaaaagatgccggcaagttagctggcttgaatgttttgagagttattaacgaaccaactgcggccgccttaagctttggaattgatgataagaggaataatggattaattgcagtttacgatttgggtggtggtacatttgacatatccatcttggacattgaagatggcgtgtttgaggttcgtgctactaatggtgacacgcatttaggtggagaagattttgacaacgtcattgtaaactatattatagataccttcattcatgaaaaccctgaaattacaagagaagaaattacgaagaacagggagacaatgcaaaggttaaaagatgtttctgaaagagctaagatagatttatcccatgtgaagaaaacttttatcgaacttccatttgtatacaaaagcaaacatttgagagtgccaatgacagaggaagagttagataatatgactttgtctttaatcaacaggactatcccacctgtgaagcaagcattgaaagatgccgatatcgaaccggaggatatagatgaagtaatccttgttggtggtatgacccgtatgccaaagattagatctgttgtaaaagatctttttggtaagtctccaaattctagtgttaacccagatgaaacagttgctttaggagcagctattcaaggtggtattttatccggtgaaataaagaatgtcttacttttggatgtgacaccattgacattagggattgaaacatttggaggagcgttctctcccttgatacctagaaatacgacagttccagtaaaaaaaacagagatatttagtactggtgttgatgggcaagcgggtgttgatatcaaagtttttcagggtgaaagagggttagtgcgtaacaacaagttgattggtgatttgaaacttacaggaatcacccctttgcctaaaggcattccccaaatatatgttacttttgatatcgatgcggatggtatcatcaacgtatctgccgctgagaaaagtagtgggaaacaacaatccattactgtaataccaaattctgggttaagcgaagaggaaattgcaaaacttattgaagaagcaaatgcaaatagggcacaagataacttgatcaggcaaaggttagagcttatctctaaggctgacattatgataagtgatactgagaatttatttaaaagatatgaaaaattgatttctagcgaaaaagagtattctaatatcgtagaggacatcaaagctttgagacaagctataaagaattttaaggctaacgaaaatgacatgtctattgatgtaaacggaataaaaaaagctacggatgcgttgcagggtagggcattaaaattattccaaagcgcaacaaaaaaccagcagaatcaaggtaaatga

SEQ ID NO: 7911 - DNA, 537 bp, Saccharomyces cerevisiae
atgcctgcgtatcactcgactttccctgtagatcctaacactgaccgcatggtagggaactttgcgcttctgcccttgaacactaagttcaggggtcctgcataccccagcaattccgattacgatattatcgacgagtgcttggacctatttcgtgccaattccttcttcaagaattttgaaattaaatcacccgccgacagagtgctcatctacggaattctctttatcaatgattgcctagcccatttgaaaataacaacgtcatttaacgaagccgtcaaagtgttaaccaatgtggccttggacaactttactttaccaggtacaccgggtttccctctgaataatgtttaccaagttccagtacaagatcataattcgatggacttgttgaagacttatattcagcaattccgtcaagaattggcaatgagactattagaaagagtctatagctctacagattctaaggaatatccctcaaagttttggttggcgttcacaagaagaagattcatgaacaaatctctataa

SEQ ID NO: 7912 - DNA, 537 bp, Artificial Sequence
  Description of Artificial Sequence: Synthetic polynucleotide
atgcctgcgtatcacagtactttccctgtagatcctaacactgaccgcatggtagggaactttgcgcttttgcccttgaacactaagttcaggggtcctgcataccccagcaattccgattacgatattatcgacgagtgcttggacttatttcgtgccaattccttcttcaagaattttgaaattaaaagtcccgccgacagagtgctcatctacggaattctctttatcaatgattgcttagcccatttgaaaataacaacgtcttttaacgaagccgtcaaagtgttaaccaatgtggccttggacaactttactttaccaggtacaccgggtttccctttaaataatgtttaccaagttccagtacaagatcataattctatggacttgttgaagacttatattcagcaattccgtcaagaattggcaatgagattattagaaagagtctatagctctacagattctaaggaatatccctccaagttttggttggcgttcacaagaagaagattcatgaacaaatctttgtga

SEQ ID NO: 7913 - DNA, 4071 bp, Saccharomyces cerevisiae
atgagcgaaaccaacgttgacagcttaggggacagaaatgacatatactcccaaatatttggtgtagaaaggaggccagattccttcgctacttttgatagtgactcgcacggagacataagttctcagctgctgcctaatagaatcgaaaatatccagaatctaaatgttctgctttctgaagacattgctaatgacatcattattgccaagcagaggagacgttctggagttgaagccgccatcgatgattctgatataccaaataacgaaatgaaggggaaaagctcaaattacattttatcgcagcagactaatattaaggaagttccagatacacaaagtttgtctagtgctgataatacacctgtgagcagtccaaagaaggcaagagatgccacatcttcccatcccattgttcatgctaaatcgatgtcccatatatattcaacgagtaatagtgctagtagacaagccaagcactataatgaccaccctttgcctccaatgtctccaagaaatgaagtttaccagaagaataaaagtactacagcttttgtgcctaagaggaaaccttcgctcccgcaactagcacttgctggtcttaagaagcagagcagtttttccaccggcagtgcatcaaccactcctacacaggctagaaaatcgcctttgcaagggtttggtttcttttcgagaccaagttccaaagacttgcacgaacagcaccaacatcaccagcatattcagcataataatattaacaatcataataataataatactaataataatggcgcacattatcaagtgggtagtagtaacagtaattaccctcaacattcacattctatatcatctagatcgatgtcgttgaactcatctactctaaaaaatattgcatcatcttttcaatcgaagacttctaacagcaggaaagctacgcaaaaatatgatataacttccaacccattctcagatcctcatcatcatcatcatcatcatcactcttcaaacagtcacagtagcctaaataatgtccacgggtctggaaactcctcaagtgttatgggaagctcgtctaatattgggttgggtcttaaaacgagagtttcttccacctcattagctttaaaaagatacacttcggtttcaggaacttctctatcttctccacgtagaagtagtatgacacctttgtcggcatctagacctgttatgagcgcttcatcaaaaaaacctcaggtatatccagctttgttgtcaagagtcgccacaaaatttaaaagttcgatacaactcggggaacataagaaggatggattagtttaccgtgacgcatttacagggcagcaggcagtcgatgtcatctgtgctatcattagaacttctgatagaaacttagccttgttatttggtagatcactagatgcacaaaagctgttccatgatgtggtatacgagcacaggttaagagattcaccacatgaagtttacgaatttacagataactcaagatttacaggaacaggttccacaaacgcccatgatccactgatgctactcccaaactcatcatcttttaattccgggaaccactcttatccgaattccggaatggttccatcaagttcaacttcatctttgaatagtgatcaggcaactttgacagggtcgaggctacatatgagtagttcattgtcccagcaaaagaaccctgcagccattcataacgtcaatggtgtgtttacattactggcggaatgctattcccctacgtgcacaagagacgctttgtgttactctatttcgtgtccaagacgtcttgagcaacaagcaaggttaaatctgaaaccaaatggcggcctgaaacgtaatatatcaatggcattggatgatgatgacgaagaaaagccatcttggacaagttccgtatctaaagaggattgggaaaacttaccaaaaaaggaaataaaaagacaagaggctatttatgaagtttatatcacggagaagaactttgtaaaatcattagaaattacaagagacacattcatgaagactttggctgaaacaaatattatttcagcagatattagaaaaaatttcatcaagcatgtttttgcacatataaacgatatctattcagtgaatagacgttttttgaaggctttaactgataggcaaagaagttcaccagttgtgagaggaattggggacattgttttaagattcattccattttttgaaccatttgtttcatatgtcgcttcaagaccatatgcgaagtacttgattgaaacccaaagatcagtcaatccctattttgctagatttgatgacgatatgatgagctcctccttacgtcatggtattgattcgtttttatctcaaggtgtttcaagaccaggtcgatatatgctattggtcaaagaaatcatgaaatctactgaccccgagaaggacaaaagtgattatgaagatttaagcaaagccatggatgcattaagggattttatgaaaaggattgatcaagcaagtggtgctgcacaagatagacatgatgtaaaattgttgaaacaaaagattcttttcaaaaacgaatacgttaatttaggattaaatgacgaaaggagaaaaattaaacatgaaggtatactatcacggaaggagttgtcaaaatcggacggaacagttgttggtgacatacaattttatcttctagataatatgctcttatttttaaaggccaaagcagttaataaatggcaccagcataaggtattccaaaggcccattccattgccattgttatttgcatgtccaggtgaagatatgcctgcgttgaggaaatatattggagaccacccagattgttcaggaactgtaattcaaccagaatacaacacgagtaatcctaaaaacgcaataactttcttatactacggtgccaagcagagatatcaagttacattatatgctgcgcaatacgctggattgcaaacgcttttggaaaaaataaagcaaggacaagcagctattataagcaaaacggagatgttcaatgtaacgaaaatgagcgataggttcttcgattacaccaacaaaattaacagtgttacttcctgtgatgggggtagaaaacttctgattgcaacgaactctggattgtatatgagcaacattaaaagacagcagaataaagatcatagacataaaagctctgcttttttttcaactccaatccaactagtacaaagaaataatatcactcaaattgctgtattagaagaattcaaatcaatcatacttttaattgataaaaaattatacagttgtccgctgtcattaatcgaagcagaaggtaatgggacatctttcttcaaaaagcatcacaaggaactgatcaatcatgtgagtttcttcgcagaaggagattgcaatggtaagagattaatcgtgactgcacacagttcatcgcattcaattaagtacttcgagcatgaacatccattattggccgaaaaaaatggtagtggtagcggtaacaaaaaaagtctcaagaaaaaaatcaccgaggttatttttgattctgaacctgtctctatttcatttctcaaggccaacctatgcattggctgtaaaaagggttttcagatcgttagcatttcacagaatgctcatgaatccttgttagatccggccgatacatcattagagtttgcactaagggatactttgaaaccaatggcaatctatcgtgtgggaaatatgtttttgctgtgttacacagaatttgccttctttgtcaataatcagggttggagaaagaaagaatcgcatattattcattgggagggagagccccaaaaatttgcaatttggtacccgtacatcttggcattcgacagcaacttcattgagatcagaaagattgaaactggcgaattaattcgttgcgtccttgctgataagattcgacttctacaaacaagtactcaagaaatcctgtactgctacgaggattatcgcgggtatgatacagttgcgtcgttagatttctggggttaa

SEQ ID NO: 7914 - DNA, 4071 bp, Artificial Sequence
  Description of Artificial Sequence: Synthetic polynucleotide
atgagcgaaaccaacgttgacagcttaggggacagaaatgacatatactcccaaatatttggtgtagaaaggaggccagattccttcgctacttttgatagtgactctcacggagacataagttctcagttattgcctaatagaatcgaaaatatccagaatttgaatgttttactttctgaagacattgctaatgacatcattattgccaagcagaggagacgttctggagttgaagccgccatcgatgattctgatataccaaataacgaaatgaaggggaaaagcagtaattacattttatctcagcagactaatattaaggaagttccagatacacaaagtttgtctagtgctgataatacacctgtgagcagtccaaagaaggcaagagatgccacatcttcccatcccattgttcatgctaaatctatgtcccatatatattctacgagtaatagtgctagtagacaagccaagcactataatgaccaccctttgcctccaatgtctccaagaaatgaagtttaccagaagaataaaagtactacagcttttgtgcctaagaggaaaccttctctcccgcaattggcacttgctggtcttaagaagcagagcagtttttccaccggcagtgcatctaccactcctacacaggctagaaaatctcctttgcaagggtttggtttcttttccagaccaagttccaaagacttgcacgaacagcaccaacatcaccagcatattcagcataataatattaacaatcataataataataatactaataataatggcgcacattatcaagtgggtagtagtaacagtaattaccctcaacattctcattctatatcttctagaagtatgtctttgaactcttctactttgaaaaatattgcatcttcttttcaatccaagacttctaacagcaggaaagctacgcaaaaatatgatataacttccaacccattcagtgatcctcatcatcatcatcatcatcatcactcttccaacagtcacagtagcttgaataatgtccacgggtctggaaactcctccagtgttatgggaagctcttctaatattgggttgggtcttaaaacgagagtttcttccaccagtttagctttaaaaagatacacttctgtttctggaacttctttatcttctccacgtagaagtagtatgacacctttgagtgcatctagacctgttatgagcgcttcttctaaaaaacctcaggtatatccagctttgttgtccagagtcgccacaaaatttaaaagtagtatacaactcggggaacataagaaggatggattagtttaccgtgacgcatttacagggcagcaggcagtcgatgtcatctgtgctatcattagaacttctgatagaaacttagccttgttatttggtagatccttggatgcacaaaagcttttccatgatgtggtatacgagcacaggttaagagattctccacatgaagtttacgaatttacagataactctagatttacaggaacaggttccacaaacgcccatgatccattaatgttgctcccaaactcttcttcttttaattccgggaaccactcttatccgaattccggaatggttccatctagttctacttcttctttgaatagtgatcaggcaactttgacagggtctaggttacatatgagtagttctttgtcccagcaaaagaaccctgcagccattcataacgtcaatggtgtgtttacattattggcggaatgctattcccctacgtgcacaagagacgctttgtgttactctattagttgtccaagacgtcttgagcaacaagcaaggttaaatttgaaaccaaatggcggcttgaaacgtaatatatccatggcattggatgatgatgacgaagaaaagccatcttggacaagttccgtatctaaagaggattgggaaaacttaccaaaaaaggaaataaaaagacaagaggctatttatgaagtttatatcacggagaagaactttgtaaaatctttagaaattacaagagacacattcatgaagactttggctgaaacaaatattatttctgcagatattagaaaaaatttcatcaagcatgtttttgcacatataaacgatatctattctgtgaatagacgttttttgaaggctttaactgataggcaaagaagttctccagttgtgagaggaattggggacattgttttaagattcattccattttttgaaccatttgtttcttatgtcgcttccagaccatatgcgaagtacttgattgaaacccaaagatctgtcaatccctattttgctagatttgatgacgatatgatgagctcctccttacgtcatggtattgattcttttttatctcaaggtgtttctagaccaggtagatatatgcttttggtcaaagaaatcatgaaatctactgaccccgagaaggacaaaagtgattatgaagatttaagcaaagccatggatgcattaagggattttatgaaaaggattgatcaagcaagtggtgctgcacaagatagacatgatgtaaaattgttgaaacaaaagattcttttcaaaaacgaatacgttaatttaggattaaatgacgaaaggagaaaaattaaacatgaaggtatattatccagaaaggagttgagtaaaagtgacggaacagttgttggtgacatacaattttatcttttagataatatgctcttatttttaaaggccaaagcagttaataaatggcaccagcataaggtattccaaaggcccattccattgccattgttatttgcatgtccaggtgaagatatgcctgcgttgaggaaatatattggagaccacccagattgttctggaactgtaattcaaccagaatacaacacgagtaatcctaaaaacgcaataactttcttatactacggtgccaagcagagatatcaagttacattatatgctgcgcaatacgctggattgcaaacgcttttggaaaaaataaagcaaggacaagcagctattataagcaaaacggagatgttcaatgtaacgaaaatgagcgataggttcttcgattacaccaacaaaattaacagtgttacttcctgtgatgggggtagaaaacttttgattgcaacgaactctggattgtatatgagcaacattaaaagacagcagaataaagatcatagacataaaagctctgcttttttttccactccaatccaattggtacaaagaaataatatcactcaaattgctgtattagaagaattcaaatctatcatacttttaattgataaaaaattatacagttgtccgttatctttaatcgaagcagaaggtaatgggacatctttcttcaaaaagcatcacaaggaattgatcaatcatgtgagtttcttcgcagaaggagattgcaatggtaagagattaatcgtgactgcacacagttcttctcattctattaagtacttcgagcatgaacatccattattggccgaaaaaaatggtagtggtagcggtaacaaaaaaagtctcaagaaaaaaatcaccgaggttatttttgattctgaacctgtctctatttcctttctcaaggccaacttatgcattggctgtaaaaagggttttcagatcgttagcatttctcagaatgctcatgaatccttgttagatccggccgatacaagtttagagtttgcattaagggatactttgaaaccaatggcaatctatcgtgtgggaaatatgtttttgttatgttacacagaatttgccttctttgtcaataatcagggttggagaaagaaagaaagtcatattattcattgggagggagagccccaaaaatttgcaatttggtacccgtacatcttggcattcgacagcaacttcattgagatcagaaagattgaaactggcgaattaattcgttgcgtccttgctgataagattagacttttacaaacaagtactcaagaaatcttgtactgctacgaggattatcgcgggtatgatacagttgcgtctttagatttctggggttga

SEQ ID NO: 7915 - DNA, 1038 bp, Saccharomyces cerevisiae
atgaacactaccacatctactgttatagcagcagttgccgaccagttccagtctttgaactcttcttcttcatgtttcttgaaggttcatgttccttccattgagaacccattcggtattgaattatggccaattttctccaaagtgtttgaatactttagtggctatccagctgagcaattcgagtttattcacaataagactttcttggctaacgggtatcatgctgttagtattattatcgtttattacattattatctttggtggccaagctatcttacgcgccttgaacgcctctccattaaagtttaaattgcttttcgagatacacaacttgtttttgacttctatttctctagttttatggttgctgatgttagaacagttggttcctatggtttatcacaacggtctattctggtctatctgctctaaggaagccttcgcaccaaaattagttactctttactatttgaactatttgaccaaattcgtagaattgattgacactgtgtttttagttttgagaagaaagaagttattgtttttgcacacttaccatcacggtgccaccgctttgttgtgctacactcaattaattggtcgtacttctgttgaatgggtagttatcctactaaacttgggtgttcacgttatcatgtactggtactacttcttgagttcatgtggtattagagtttggtggaagcaatgggtcactagattccaaattattcaatttttgattgacttggtatttgtttactttgctacctatacattctatgctcacaaatacttggacggtattttaccaaacaagggtacttgttatggtactcaggctgctgctgcttatgggtatttgattctaacatcttatttgcttttgtttatttccttctacatccaatcttacaagaaaggtggtaaaaagacagtcaagaaggaatctgaagtttccggctccgttgcatccggttcttctactggtgtcaagacctctaacaccaaggtctcttccaggaaagcttaa

SEQ ID NO: 7916 - DNA, 1038 bp, Artificial Sequence
  Description of Artificial Sequence: Synthetic polynucleotide
atgaacactaccacatctactgttatagcagcagttgccgaccagttccagtctttgaactcttcttcttcttgtttcttgaaggttcatgttccttccattgagaacccattcggtattgaattatggccaattttctccaaagtgtttgaatactttagtggctatccagctgagcaattcgagtttattcacaataagactttcttggctaacgggtatcatgctgttagtattattatcgtttattacattattatctttggtggccaagctatcttacgcgccttgaacgcctctccattaaagtttaaattgcttttcgagatacacaacttgtttttgacttctatttctttggttttatggttgttgatgttagaacagttggttcctatggtttatcacaacggtcttttctggtctatctgctctaaggaagccttcgcaccaaaattagttactctttactatttgaactatttgaccaaattcgtagaattgattgacactgtgtttttagttttgagaagaaagaagttattgtttttgcacacttaccatcacggtgccaccgctttgttgtgctacactcaattaattggtcgtacttctgttgaatgggtagttatcttattaaacttgggtgttcacgttatcatgtactggtactacttcttgagtagttgtggtattagagtttggtggaagcaatgggtcactagattccaaattattcaatttttgattgacttggtatttgtttactttgctacctatacattctatgctcacaaatacttggacggtattttaccaaacaagggtacttgttatggtactcaggctgctgctgcttatgggtatttgattttaacatcttatttgcttttgtttatttccttctacatccaatcttacaagaaaggtggtaaaaagacagtcaagaaggaatctgaagtttccggctccgttgcatccggttcttctactggtgtcaagacctctaacaccaaggtctcttccaggaaagcttga

SEQ ID NO: 7917 - DNA, 2706 bp, Saccharomyces cerevisiae
atgagagcgatggacacacaggtacagagtgctgaaagaggattggtgttgcctcccatgaattcaactgtatcgtcggcgacggcggctacgacggccacaaatacggatacagatacagatggagatagagatgaggaaagggagtcgttagcagaggatggtagcgaatgggtgcccgcatatatgcttaccagagacaggtcacgctacttgggccattttctgggtgtagacaagatgctggaggcagtaaaatgcaagtactgcggtgtgataataagacggcaaggaaacagcataagcatggcggaagcctcgcaaactcatttgtggagcacgcataagatagacccgaatgccaattactatagcggatggacgggcgtagaagcaggttctacttttatggtcagaccacctttgaagaaccatcaaggcggtagcgccacaacgaacagcattgctaacctgctggaaatagacgaggactttttgaagagaactagggaaaaagaaatggccttgcctcttgtgcagtcgcttgcgatcataattgcatcagaaaacttgcctctgtcgttcgtagacaacactgccgtacgccttttgatcaatcagaacgccaactcactaagcttcattgaccatgacttaattctgaatgctatcaggtccatcgcatataatctcgatagaatcattcaaaggacagctttgcgaaacaattccgatttgtcgttgattatcgacaaaaactacttactaatggacccaaccgatagatctaatcagttatcaaacaggttgaagaaccaattatttgaaatgcaaaaaatcaattttttctctctaagccactccgtttggaataacacgatatctatattgagtattcagtactatgatgattttcattcccaagtaaagactttaccccttatcatccaaaacttacatgaatataacaatgaccccaaactatctattccagctcaactgctcaaaatctcacaagaattacctggtttacaaaatactgtgatttctatcactctaccaagatctcaaatagtagatctactaaacgtaatggatagccaaccctttttcccgaatacgtatacgaatgctaaaaactattatcacaattgcattatttccataataaattctgcgatattgccattgttcggtacgcctaaatccgccgatattacgcatccgagacaatcatcattctccaaagaacctttgactttattggactctctaattgatttgtcaaatatagatatttcgaattccattttttccagaatcaattcttttttggatgatttacaatctaattcgtggcagttagataaattccgttcattgtgtgaaaaatttggcttcgaattcgtttgttcgaaattcgatttatcccgttactctaccgccaccgtttcactgcaaacttttttgaaccttcgtcccataatagaagaatatcaatcttctatccaaattgaaaaattcaacgaaatcgactttcaaataatagactatttattaattactttgaattccatcaatagaatactaaagttctttacttcttccaaaagcttaaactttacctatgttttgttcgccataatgtctattgaaaagcatctgttgtccaccttgggcagcctacaatttcaacggttaattgcaccatttgaaacatttttgtctaaaattcaagaattcaaaaccattttattttcagacgatatgaaccttttagcaatgttcttgtgtcctgcgattttattcgaaagagaagtcctggaatattcttttcataccatttcactttctgaaatagtcgacaaactttctacatcaattttcagtttattgaaaaggtttttgaatttacacacaataggcaacgttaacaacagtcataatacttccaatcatagcaacatgaacattcacactgataatcagacgaacaacatcaacaatagaagcggcaacaacagcgacaataatgataacgaacatgataacgacaacgacaaccactcgaattcaaatacgcccgcatcaagaatagatatagatcctactggtggagaaaattctgtattaccggaacaacaaccacagaatagcaataataacctatcatttggttctcttagcgatacccatcatttatcggactctaccatatcaaaggaaatagatagtatctttttacaaatcattcaagaggacttatatgattacttgagtacagtaaactccatcgtacccatatcttacaggtcgtattgtgaacaaagcaatttcattagagatagtggccgtttcaagaagagaataataacagaggactctattattggagagctagaacaaccaatgaacttcattgaagagttacttgatatccatgttcctgtgtgtaacgcgttctggtcccaatacttagataatgatgctgggccgataattagaattttgttcaagataatgcaatgtcagtcatcttcctccattaggggagagtactcatttttaaatgacttcattcccagagtacatcccgatttaactcaagagattattaaaattaaattattcaatgatcaattcgtggcaagtaaagtggattacgacttggacactttacaaactgcaagtcagtatcttccatag

SEQ ID NO: 7918 - DNA, 2706 bp, Artificial Sequence
  Description of Artificial Sequence: Synthetic polynucleotide
atgagagcgatggacacacaggtacagagtgctgaaagaggattggtgttgcctcccatgaattctactgtatcttctgcgacggcggctacgacggccacaaatacggatacagatacagatggagatagagatgaggaaagggagtctttagcagaggatggtagcgaatgggtgcccgcatatatgcttaccagagacaggtctcgctacttgggccattttttaggtgtagacaagatgttagaggcagtaaaatgcaagtactgcggtgtgataataagaagacaaggaaacagcataagcatggcggaagcctctcaaactcatttgtggagcacgcataagatagacccgaatgccaattactatagcggatggacgggcgtagaagcaggttctacttttatggtcagaccacctttgaagaaccatcaaggcggtagcgccacaacgaacagcattgctaacttattggaaatagacgaggactttttgaagagaactagggaaaaagaaatggccttgcctcttgtgcagtctcttgcgatcataattgcatctgaaaacttgcctttatctttcgtagacaacactgccgtacgccttttgatcaatcagaacgccaactctttaagcttcattgaccatgacttaattttgaatgctatcaggtccatcgcatataatctcgatagaatcattcaaaggacagctttgagaaacaattccgatttgtctttgattatcgacaaaaactacttattgatggacccaaccgatagatctaatcagttatctaacaggttgaagaaccaattatttgaaatgcaaaaaatcaattttttctctttaagccactccgtttggaataacacgatatctatattgagtattcagtactatgatgattttcattcccaagtaaagactttaccccttatcatccaaaacttacatgaatataacaatgaccccaaattatctattccagctcaattgctcaaaatctctcaagaattacctggtttacaaaatactgtgatttctatcactttaccaagatctcaaatagtagatttattaaacgtaatggatagccaaccctttttcccgaatacgtatacgaatgctaaaaactattatcacaattgcattatttccataataaattctgcgatattgccattgttcggtacgcctaaatccgccgatattacgcatccgagacaatcttctttctccaaagaacctttgactttattggactctttgattgatttgagcaatatagatatttctaattccattttttccagaatcaattcttttttggatgatttacaatctaattcttggcagttagataaattccgttctttgtgtgaaaaatttggcttcgaattcgtttgttctaaattcgatttatcccgttactctaccgccaccgtttctttacaaacttttttgaaccttcgtcccataatagaagaatatcaatcttctatccaaattgaaaaattcaacgaaatcgactttcaaataatagactatttattaattactttgaattccatcaatagaatattgaagttctttacttcttccaaaagcttaaactttacctatgttttgttcgccataatgtctattgaaaagcatcttttgtccaccttgggcagcttacaatttcaaagattaattgcaccatttgaaacatttttgtctaaaattcaagaattcaaaaccattttattttctgacgatatgaaccttttagcaatgttcttgtgtcctgcgattttattcgaaagagaagtcttggaatattcttttcataccatttctctttctgaaatagtcgacaaactttctacatccattttcagtttattgaaaaggtttttgaatttacacacaataggcaacgttaacaacagtcataatacttccaatcatagcaacatgaacattcacactgataatcagacgaacaacatcaacaatagaagcggcaacaacagcgacaataatgataacgaacatgataacgacaacgacaaccactctaatagtaatacgcccgcatctagaatagatatagatcctactggtggagaaaattctgtattaccggaacaacaaccacagaatagcaataataacttatcttttggttctcttagcgatacccatcatttaagtgactctaccatatccaaggaaatagatagtatctttttacaaatcattcaagaggacttatatgattacttgagtacagtaaactccatcgtacccatatcttacaggagttattgtgaacaaagcaatttcattagagatagtggccgtttcaagaagagaataataacagaggactctattattggagagttagaacaaccaatgaacttcattgaagagttacttgatatccatgttcctgtgtgtaacgcgttctggtcccaatacttagataatgatgctgggccgataattagaattttgttcaagataatgcaatgtcagtcttcttcctccattaggggagagtactcttttttaaatgacttcattcccagagtacatcccgatttaactcaagagattattaaaattaaattattcaatgatcaattcgtggcaagtaaagtggattacgacttggacactttacaaactgcaagtcagtatcttccatga

SEQ ID NO: 7919 - DNA, 1032 bp, Saccharomyces cerevisiae
atgagtaatgcaaacaatagtgctatgaaccacatcacgttgcctcccatctcgtcatttgacaaccttatcaaggcagccgagagacaatataatggcgaggcttcgtccgcctcgacacatccgacactgcctaatatgaacattagtaacggcagtggcagtgcgggcgcatcatcgtcgatgctgagctatcagttgcttccgcactccaatgatgtgtcccggtcgaactccagctcgagcttccttccctccgtgcagcagcctacggaaggttccgcttctgcatcggaaacttcttcatctgcatcaccttcacgttccatttcaccaattttaaaagtggctggtccttcatctgttggcggtgccggggtgagtaccccccatagcaccaaaatcaataagccaaggaaaaagaagcaatgtccaatttgtcgtaatttttatgccaatctgaccacgcacaaggcaacgcacttgacgccagaggatcggcctcacaagtgtcccatctgccaccgcgggttcgccaggaacaatgacttattgaggcataagaaaagacattggaaggatgagatactgtcccaatcgggagtactttcgaaccataatgatggtaagggaggatccgtttctcccaatgatgatgatacccatgaaaaaatgacaccgatgaattctgtcacagattatgcacaattgaaatcgttgcatcaaatcaagggcacattcaagtgcccattcaactccaccttaatacaattggacatggatatgtacccgtataaactgaaacctttaaattttgagacttccaattgtcaccagacgggggtgttctcacgttgcgacaccttcaaaaaccatttaaaggctttgcattttgaatacccgccaggcacgaagaaaaaggatagaaatgttgttcctggtagatgtaagcattgcggcctgaagttcgagaacgttgacgtttggctcaacgaacacgtaggtaaacaatgcggctataaataccattga

SEQ ID NO: 7920 - DNA, 1032 bp, Artificial Sequence
  Description of Artificial Sequence: Synthetic polynucleotide
atgagtaatgcaaacaatagtgctatgaaccacatcacgttgcctcccatctcttcttttgacaaccttatcaaggcagccgagagacaatataatggcgaggcttcttccgcctctacacatccgacattgcctaatatgaacattagtaacggcagtggcagtgcgggcgcatcttcttctatgttaagctatcagttgcttccgcactccaatgatgtgtccagatctaactccagcagcagcttccttccctccgtgcagcagcctacggaaggttccgcttctgcatctgaaacttcttcttctgcatctccttctcgttccatttctccaattttaaaagtggctggtccttcttctgttggcggtgccggggtgagtaccccccatagcaccaaaatcaataagccaaggaaaaagaagcaatgtccaatttgtcgtaatttttatgccaatttgaccacgcacaaggcaacgcacttgacgccagaggatagacctcacaagtgtcccatctgccaccgcgggttcgccaggaacaatgacttattgaggcataagaaaagacattggaaggatgagatattatcccaaagtggagtactttccaaccataatgatggtaagggaggatccgtttctcccaatgatgatgatacccatgaaaaaatgacaccgatgaattctgtcacagattatgcacaattgaaatctttgcatcaaatcaagggcacattcaagtgcccattcaactccaccttaatacaattggacatggatatgtacccgtataaattgaaacctttaaattttgagacttccaattgtcaccagacgggggtgttctctcgttgcgacaccttcaaaaaccatttaaaggctttgcattttgaatacccgccaggcacgaagaaaaaggatagaaatgttgttcctggtagatgtaagcattgcggcttgaagttcgagaacgttgacgtttggctcaacgaacacgtaggtaaacaatgcggctataaataccattga

SEQ ID NO: 7921 - DNA, 729 bp, Saccharomyces cerevisiae
atggaagttttaaagaacattagaatttatcctttgtcaaacttcatcacatcaaccaagaactatataaacctaccaaatgaattaagaaacctaattagtgaagagcaggagagtaaactagggttcttgcacatcattgaaagtgattttaaaccttcggtagcgctgcaaaagttggtgaattgtactacgggggacgaaaagatcctaatcatagatatagtatcaatatggtcccaacaaaagcaaagacagcatggcgcgatctacatgaattcgctatcttgcataaacatcacgggattaatcgtatttctagagttactgtatgactctcccatggatgcgttaaggaggtgccaggttgataatttcaactttcaattacgaggaatagtaatcgacaatttgtctttcttgaattttgaaagcgacaaaaactatgatgtaataaatttatcgaaatttgaaaaactgtttaagattctaaggaaactaagagaatttttgggctgctggatcatcaccaaaagttttcccacagacttctataatggtatcgaaaacaccttagttgataagtggtcaatcaagaggaaaagcggcgttacactgtaccccacaaaactacctgattcatacatgaagggaatggatctgataatctacagagaagttgttgacggcaggccacagtacagaaggatagccgcacttgaagaatga

SEQ ID NO: 7922 - DNA, 729 bp, Artificial Sequence
  Description of Artificial Sequence: Synthetic polynucleotide
atggaagttttaaagaacattagaatttatcctttgtctaacttcatcacatctaccaagaactatataaacttaccaaatgaattaagaaacttgattagtgaagagcaggagagtaaattggggttcttgcacatcattgaaagtgattttaaaccttctgtagcgttgcaaaagttggtgaattgtactacgggggacgaaaagatcttaatcatagatatagtatctatatggtcccaacaaaagcaaagacagcatggcgcgatctacatgaattctttatcttgcataaacatcacgggattaatcgtatttttggagttattatatgactctcccatggatgcgttaaggaggtgccaggttgataatttcaactttcaattaagaggaatagtaatcgacaatttgtctttcttgaattttgaaagcgacaaaaactatgatgtaataaatttatccaaatttgaaaaattatttaagattttaaggaaattgagagaatttttgggctgctggatcatcaccaaaagttttcccacagacttctataatggtatcgaaaacaccttagttgataagtggtctatcaagaggaaaagcggcgttacattgtaccccacaaaattacctgattcttacatgaagggaatggatttgataatctacagagaagttgttgacggcaggccacagtacagaaggatagccgcacttgaagaatga

SEQ ID NO: 7923 - DNA, 1047 bp, Saccharomyces cerevisiae
atgccaactctagtaaatggaccaagaagagactctaccgaagggtttgataccgatatcatcactcttcctagattcataatcgagcaccagaagcaatttaagaacgctactggtgatttcacattagtactgaatgccttgcaattcgcgttcaaatttgtatctcacaccatcagacgtgctgaattggttaacttggttgggttagcaggcgcttccaacttcactggtgaccagcaaaagaagttggacgttctaggtgatgaaatatttatcaatgccatgagggctagtgggatcatcaaggtccttgtatctgaagaacaggaagacttgatcgtttttcccacaaacacgggctcatacgcagtgtgttgtgatcctattgatggctcctcaaatttggacgccggtgtctccgttggaactatcgcgtctatattcagactgctaccagactcatcaggtactataaacgacgtactgagatgtggtaaagaaatggtagccgcttgctatgccatgtacggatcctctacgcatctagtattgacattgggtgatggagttgatgggtttaccttagacacaaacttgggcgaattcatcttgactcatcctaacttaagaattccgcctcaaaaggccatctactcaattaatgaaggtaacaccctctactggaacgagactataagaacatttattgagaaagtcaaacaaccccaagcagacaacaacaacaagcctttctcggctaggtatgttggatccatggttgctgatgttcacaggacgtttctttacggtggccttttcgcatacccttgcgacaagaagagccccaacggaaaactgaggttgctttatgaggccttcccaatggctttcttaatggaacaagcagggggaaaagcggtcaacgatcgcggagagagaatcttggatttggtgccaagtcatatccatgacaaatcttctatttggttgggttcttcaggtgaaattgacaaatttttagaccatattggcaagtcacagtag

SEQ ID NO: 7924 - DNA, 1047 bp, Artificial Sequence
  Description of Artificial Sequence: Synthetic polynucleotide
atgccaactttggtaaatggaccaagaagagactctaccgaagggtttgataccgatatcatcactcttcctagattcataatcgagcaccagaagcaatttaagaacgctactggtgatttcacattagtattgaatgccttgcaattcgcgttcaaatttgtatctcacaccatcagacgtgctgaattggttaacttggttgggttagcaggcgcttccaacttcactggtgaccagcaaaagaagttggacgttttaggtgatgaaatatttatcaatgccatgagggctagtgggatcatcaaggtccttgtatctgaagaacaggaagacttgatcgtttttcccacaaacacgggctcttacgcagtgtgttgtgatcctattgatggctcctctaatttggacgccggtgtctccgttggaactatcgcgtctatattcagattattaccagactcttctggtactataaacgacgtattaagatgtggtaaagaaatggtagccgcttgctatgccatgtacggatcctctacgcatttggtattgacattgggtgatggagttgatgggtttaccttagacacaaacttgggcgaattcatcttgactcatcctaacttaagaattccgcctcaaaaggccatctactctattaatgaaggtaacaccctctactggaacgagactataagaacatttattgagaaagtcaaacaaccccaagcagacaacaacaacaagcctttcagtgctaggtatgttggatccatggttgctgatgttcacaggacgtttctttacggtggccttttcgcatacccttgcgacaagaagagccccaacggaaaattgaggttgctttatgaggccttcccaatggctttcttaatggaacaagcagggggaaaagcggtcaacgatcgcggagagagaatcttggatttggtgccaagtcatatccatgacaaatcttctatttggttgggttcttctggtgaaattgacaaatttttagaccatattggcaagtctcagtga

SEQ ID NO: 7925 - DNA, 1443 bp, Saccharomyces cerevisiae
atgtcctccaaccgtgttctagacttgtttaagccatttgaatctttcctgccggaagtgattgctccagaaaggaaggttccatacaaccagaaacttatctggacaggcgtttctctactgatctttttgattctgggccagattccgctgtacgggatcgtgtccagtgagacttccgaccctctgtactggctacgtgccatgctggcctccaaccgtggtactttactggaattgggtgtttcgcccatcatcacttcatctatgattttccaatttttgcagggtactcagcttttacaaatcagacctgagagcaagcaggacagagagctgttccaaattgctcaaaaggtgtgcgctattattctgatcttgggccaagcccttgtggtcgtcatgacaggtaactacggtgccccttcggacctcggattgcccatctgtttgttgttaatctttcaattgatgtttgcatcgctgattgtgatgttattagacgaattgctatctaagggttacggcttgggttccggtatttctctgttcacggcaaccaatattgccgaacaaattttctggagagcgtttgctcctactacagtcaattccggtcgtggtaaggagttcgaaggtgctgtgattgcctttttccatcttttggctgtcagaaaggacaagaaaagagcccttgtcgaggccttttaccgtaccaatctacctaatatgttccaagtgttgatgaccgtggccatcttcctctttgttttatatttacaaggcttccgttacgaattgcccatcaggtcaaccaaagtgagaggtcaaattggtatctaccccatcaaactcttttatacttccaacaccccaatcatgttgcagagtgcattgacttctaacattttcttgatctctcaaatccttttccagaaatacccaaccaatccattgattcgtttgatcggtgtttggggtatcaggccgggcacccagggccctcaaatggccttgagcgggttggcctactacatccaaccattaatgtctttatccgaagctcttctggaccctatcaagaccatcgtctacatcacatttgttcttggttcatgcgcagtattttccaagacatggatcgaaatctccggcacttccccacgtgacattgccaaacaattcaaagatcaaggcatggtcattaacggtaagagagaaacctccatttacagagaattgaagaagatcattccaactgctgctgctttcggcggtgctaccatcggtgctctttctgttggctccgacctactaggtactttaggttctggggcatccattttgatggctactaccaccatctacggctactacgaagctgccgccaaggaaggtgggtttactaagaacctcgttccaggattttctgatttgatgtga

SEQ ID NO: 7926 - DNA, 1443 bp, Artificial Sequence
  Description of Artificial Sequence: Synthetic polynucleotide
atgtcctccaaccgtgttttggacttgtttaagccatttgaatctttcttgccggaagtgattgctccagaaaggaaggttccatacaaccagaaacttatctggacaggcgtttctttattgatctttttgattttgggccagattccgttgtacgggatcgtgtccagtgagacttccgaccctttgtactggcttcgtgccatgttggcctccaaccgtggtactttattggaattgggtgtttctcccatcatcacttcttctatgattttccaatttttgcagggtactcagcttttacaaatcagacctgagagcaagcaggacagagagcttttccaaattgctcaaaaggtgtgcgctattattttgatcttgggccaagcccttgtggtcgtcatgacaggtaactacggtgccccttctgacctcggattgcccatctgtttgttgttaatctttcaattgatgtttgcatctttgattgtgatgttattagacgaattgttatctaagggttacggcttgggttccggtatttctttattcacggcaaccaatattgccgaacaaattttctggagagcgtttgctcctactacagtcaattccggtcgtggtaaggagttcgaaggtgctgtgattgcctttttccatcttttggctgtcagaaaggacaagaaaagagcccttgtcgaggccttttaccgtaccaatttacctaatatgttccaagtgttgatgaccgtggccatcttcctctttgttttatatttacaaggcttccgttacgaattgcccatcaggtctaccaaagtgagaggtcaaattggtatctaccccatcaaactcttttatacttccaacaccccaatcatgttgcagagtgcattgacttctaacattttcttgatctctcaaatccttttccagaaatacccaaccaatccattgattcgtttgatcggtgtttggggtatcaggccgggcacccagggccctcaaatggccttgagcgggttggcctactacatccaaccattaatgtctttatccgaagctcttttggaccctatcaagaccatcgtctacatcacatttgttcttggttcttgcgcagtattttccaagacatggatcgaaatctccggcacttccccacgtgacattgccaaacaattcaaagatcaaggcatggtcattaacggtaagagagaaacctccatttacagagaattgaagaagatcattccaactgctgctgctttcggcggtgctaccatcggtgctctttctgttggctccgacttattgggtactttaggttctggggcatccattttgatggctactaccaccatctacggctactacgaagctgccgccaaggaaggtgggtttactaagaacctcgttccaggattttctgatttgatgtga

SEQ ID NO: 7927 - DNA, 273 bp, Saccharomyces cerevisiae
atgcttgttgtttggcaaaagttgccgaaagaaagaatgagagagaacgacaaagagaatgagagagaacacgtaaagcgaaaaatctggagcgctgccgcgccgggtaacaagtgtgaagagagagagagatgtaaggaagatgaatacattcaatacattctagcttatagcaagctttcagcaggctcaattgcttatagcggtataactgcaacaagagtgaaaattaatatggtgacgaacgacggattcggtagtacagtgttataa

SEQ ID NO: 7928 - DNA, 273 bp, Artificial Sequence
  Description of Artificial Sequence: Synthetic polynucleotide
atgcttgttgtttggcaaaagttgccgaaagaaagaatgagagagaacgacaaagagaatgagagagaacacgtaaagagaaaaatctggagcgctgccgcgccgggtaacaagtgtgaagagagagagagatgtaaggaagatgaatacattcaatacattttggcttatagcaagctttctgcaggctccattgcttatagcggtataactgcaacaagagtgaaaattaatatggtgacgaacgacggattcggtagtacagtgttatga

SEQ ID NO: 7929 - DNA, 1227 bp, Saccharomyces cerevisiae
atgtcctttgatagacagttgaccgaagaccaggaggtcgtccttaagcaaatttggacacaccttttccatctgtggcaagttcccgtggatggaactcatattttccctaataactccctccactcctcgtccacccctgctaagaagaagaaatcatcctggtttagcaagcttcagtcctcagaccatacacaggactccagcgaagccgctgaagcggcacacctctatgaaaagggcaagatacacaaggcactagccaatctagacccgcaaacgaccaagaagcagttctggcacgatatcaagaatgaaactccagacgccaccattttgaagtttatcagagccagaaagtggaacgcagacaagaccatcgccatgttgggtcacgatttgtactggcgcaaggacactattaacaagatcataaacggtggcgaaagagctgtgtatgagaataacgagaccggtgtcattaagaacctggaattgcaaaaggccaccatccagggttacgacaatgacatgaggccagtcatccttgtgagacctagattacatcattcttccgaccaaactgaacaggagctggaaaaattctccctgttggtcatcgagcaatcaaagcttttcttcaaagaaaactaccccgcatccaccaccatcttgttcgatctgaacgggttctccatgtccaatatggactatgcccccgtcaagtttctaatcacttgttttgaggctcactacccggaatctttgggccatctacttatccataaggccccttggatctttaacccgatttggaacatcatcaagaattggctggatccggtcgtcgcgtccaagattgttttcactaagaatatcgacgaattgcacaagtttatccaaccccaatacatccctaggtatctgggcggagaaaatgacaatgatttggatcattacactccaccagatggctctttggacgtccatctgaaagacaccgagactcgcgctatgatcgaaaaggagagagaagaattggtcgaacaattcttgactgtcactgcccaatggattgaacaccagccattgaacgatccagcatacattcaactgcaggagaaaagagtacaactttccaccgctctttgtgaaaactactccaagttagatccgtacatcagatcaagatccgtttatgactacaatggttctctaaaagtttga

SEQ ID NO: 7930 - DNA, 1227 bp, Artificial Sequence
  Description of Artificial Sequence: Synthetic polynucleotide
atgtcctttgatagacagttgaccgaagaccaggaggtcgtccttaagcaaatttggacacaccttttccatctttggcaagttcccgtggatggaactcatattttccctaataactccctccactcctcctccacccctgctaagaagaagaaatcttcctggtttagcaagcttcagtccagtgaccatacacaggactccagcgaagccgctgaagcggcacacctctatgaaaagggcaagatacacaaggcattggccaatttggacccgcaaacgaccaagaagcagttctggcacgatatcaagaatgaaactccagacgccaccattttgaagtttatcagagccagaaagtggaacgcagacaagaccatcgccatgttgggtcacgatttgtactggcgcaaggacactattaacaagatcataaacggtggcgaaagagctgtgtatgagaataacgagaccggtgtcattaagaacttggaattgcaaaaggccaccatccagggttacgacaatgacatgaggccagtcatccttgtgagacctagattacatcattcttccgaccaaactgaacaggagttagaaaaattctccttattggtcatcgagcaatccaagcttttcttcaaagaaaactaccccgcatccaccaccatcttgttcgatttgaacgggttctccatgtccaatatggactatgcccccgtcaagtttttgatcacttgttttgaggctcactacccggaatctttgggccatttgcttatccataaggccccttggatctttaacccgatttggaacatcatcaagaattggcttgatccggtcgtcgcgtccaagattgttttcactaagaatatcgacgaattgcacaagtttatccaaccccaatacatccctaggtatttgggcggagaaaatgacaatgatttggatcattacactccaccagatggctctttggacgtccatttgaaagacaccgagactcgcgctatgatcgaaaaggagagagaagaattggtcgaacaattcttgactgtcactgcccaatggattgaacaccagccattgaacgatccagcatacattcaattgcaggagaaaagagtacaactttccaccgctctttgtgaaaactactccaagttagatccgtacatcagatctagatccgtttatgactacaatggttctttgaaagtttga

SEQ ID NO: 7931 - DNA, 2202 bp, Saccharomyces cerevisiae
atgagtcttatactagatgatatcatcctctcactaacgaatgctaacgaacgaacgccaccacaggcccttaaaaccactttaagcctgctatacgaaaaatcaaaacaatatggtctttcttcgccgcaactacaagcacttgtaaggttactctgtgaaacttccataatagacacagttacaaaagtgtacatcgtcgaaaattgctttttacctgatggctacttgacgaaggaacttcttttggagattattaaccatctcggtacgccaacggtattctctagatatcgcatacaaacgcctccggtcctacaatctgcgttgtgcaaatggttagtgcatgtttatttcctatttcctgtacattcagaacgagaacacaatatatccagttctatctggttacatttatggcaattctcgttcttacagaagtggataactcccctggttatttggcaagccacgacgcccgttgatgtcaaaccttggaagttgtctattatcaagagatgcgctatgcatccaggttaccgggacgctcccggtagtgcgacgcttattttgcaacgatttcaatgtctcgtgggcgcatccagtcagattactgaatcaataattaccatcaattgcaatagaaagactttgaaaagtcatcgaaacttaaaattggatgcgcatttcctatccattttgaaaagaatattatccagagcacatcccgctaattttcccgctgacactgtccaaaacacaattgacatgtacttgagtgaaattcatcaattaggtgctgattctatatacccacttcgacttcaatcacttccagaatatgttccctctgacagtacggtctctctttgggatgtcacttcattggaacaattagctcaaaactggccacaattgcatattcccaatgatgtagattacatgatgaagccatctttaaacagcaatgttttactgccgcgaaaagtcatgtctagggattctctcaaacacttgtactctagtatcattctcattaaaaatagccgcgatgagtcgtcatcaccatacgaatggtgcatttggcaattgaagcgatgctttgcacatcagatagagactccgcaagaagttattcccattattatttcggtgtcctcaatggataataaactgtcttctcgcattattcaaacgttttgtaatttgaaatacttaaaactcgatgagcttacgttgaaaaaggtttgtggcggaatcttgccattatggaagcctgaactaatcagtggtacaagggaatttttcgttaagtttatggccagtatttttatgtggagtacacgagatggtcacgacaataattgcacattttctgaaacttgtttttacgttttacaaatgattacaaactgggttttagatgataaattgatagcactcgggttgacactactgcatgacatgcaaagcctgctaactttggacaaaatctttaacaatgctacttcaaacagattttctacgatggctttcatcagctcgttagatattttaactcaactgtcgaaacaaacgaagtcggattatgcgatccaatatttgattgtgggccctgacatcatgaataaagtgttcagttcggacgatcctttgctattatcagctgcgtgcaggtacttggttgctacgaaaaataaattgatgcaatacccgtcaacaaacaaattcgttcggatgcagaaccaatatatcatggatttgacaaattatctttacaggaataaagttctgtcatccaaaagtttgtttggagtctcaccagatttctttaagcagattttggagaatctttatatcccaactgcagacttcaagaacgctaaatttttcacgataactggtataccagcgctatcctacatatgtattattattctaagacgactggaaacggccgaaaataccaaaataaaattcaccagtgggatcataaatgaagagacgtttaacaatttctttcgagttcatcatgatgagattggccagcatggttggataaagggcgttaataacattcacgacttgagagtaaagattttaatgcatttgagtaacactgctaatccatatagagacattgcagcattcttgtttacatatttgaagagtctctcaaagtatagcgttcaaaattcttag

SEQ ID NO: 7932 - DNA, 2202 bp, Artificial Sequence
  Description of Artificial Sequence: Synthetic polynucleotide
atgagtcttatattggatgatatcatcctctccttgacgaatgctaacgaaagaacgccaccacaggcccttaaaaccactttaagcttgttgtacgaaaaatctaaacaatatggtctttcttctccgcaattacaagcacttgtaaggttactctgtgaaacttccataatagacacagttacaaaagtgtacatcgtcgaaaattgctttttacctgatggctacttgacgaaggaacttcttttggagattattaaccatctcggtacgccaacggtattctctagatatcgcatacaaacgcctccggtcttacaatctgcgttgtgcaaatggttagtgcatgtttatttcttatttcctgtacattctgaaagagaacacaatatatccagttctatctggttacatttatggcaattcagtttcttacagaagtggataactcccttagttatttggcaagccacgacgcccgttgatgtcaaaccttggaagttgtctattatcaagagatgcgctatgcatccaggttacagagacgctcccggtagtgcgacgcttattttgcaaagatttcaatgtctcgtgggcgcatccagtcagattactgaaagtataattaccatcaattgcaatagaaagactttgaaaagtcatagaaacttaaaattggatgcgcatttcttatccattttgaaaagaatattatccagagcacatcccgctaattttcccgctgacactgtccaaaacacaattgacatgtacttgagtgaaattcatcaattaggtgctgattctatatacccacttagacttcaatctcttccagaatatgttccctctgacagtacggtctctctttgggatgtcacttctttggaacaattagctcaaaactggccacaattgcatattcccaatgatgtagattacatgatgaagccatctttaaacagcaatgttttattaccgcgtaaagtcatgtctagggattctctcaaacacttgtactctagtatcattctcattaaaaatagccgcgatgagtcttcttctccatacgaatggtgcatttggcaattgaagagatgctttgcacatcagatagagactccgcaagaagttattcccattattatttctgtgtcctctatggataataaattatcttctcgcattattcaaacgttttgtaatttgaaatacttaaaactcgatgagcttacgttgaaaaaggtttgtggcggaatcttgccattatggaagcctgaattgatcagtggtacaagggaatttttcgttaagtttatggccagtatttttatgtggagtacaagagatggtcacgacaataattgcacattttctgaaacttgtttttacgttttacaaatgattacaaactgggttttagatgataaattgatagcactcgggttgacattattacatgacatgcaaagcttgttgactttggacaaaatctttaacaatgctacttctaacagattttctacgatggctttcatcagctctttagatattttaactcaattatccaaacaaacgaagagtgattatgcgatccaatatttgattgtgggccctgacatcatgaataaagtgttcagtagtgacgatcctttgttattatctgctgcgtgcaggtacttggttgctacgaaaaataaattgatgcaatacccgtccacaaacaaattcgttagaatgcagaaccaatatatcatggatttgacaaattatctttacaggaataaagttttatcttccaaaagtttgtttggagtctctccagatttctttaagcagattttggagaatctttatatcccaactgcagacttcaagaacgctaaatttttcacgataactggtataccagcgctttcctacatatgtattattattttaagaagattagaaacggccgaaaataccaaaataaaattcaccagtgggatcataaatgaagagacgtttaacaatttctttagagttcatcatgatgagattggccagcatggttggataaagggcgttaataacattcacgacttgagagtaaagattttaatgcatttgagtaacactgctaatccatatagagacattgcagcattcttgtttacatatttgaagagtctctctaagtatagcgttcaaaattcttga

SEQ ID NO: 7933 - DNA, 2685 bp, Saccharomyces cerevisiae
atgctgtctcgaccttcaagccgattcctatccactaaaaggggccctggacctgcagtgaaaaaattaattgcaattggggagaaatggaaacagaagacaacccgtggcttgcctaagcaggatactctgaatagcgggtcgaaatatattctgtgccagtttccatatccttctggggcgcttcacataggacatctccgagtttatgtcattagcgactctttgaatagattttacaaacaaaaagggtacaacgtgatacatccgatgggatgggatgcttttgggttacctgccgagaacgctgctatagaaagaagcattaatccggccatatggactagggacaatattgcaaaaatgaaacaacaaatgcaaagtatgctggcaaattttgattgggacagagaaataactacatgtgatcccgaatactataaattcacccaatggattttcttaaaactttttgaaaatggcttagcttatcgtaaagaagcagaaattaattgggatcccgttgatatgacagttttggctaatgaacaagtggatgcccagggccgttcttggagatcaggggctattgtggaaaagaagcagctaaaacagtggtttttgggaataacgaaattcgctcctaaattgaaaaagcacttgaaccaactgaaggactggccttccaacgtgaagcaaatgcaaaaaaattggataggcgaatctgtgggtgcagaattagtgttcaaagttgcggaccccaaatttgaaaacttgattgtctttacaacaagaccggaaactctttttgctgtacagtatgttgctctcgcattagaccacccaattgtacaaaaatactgcgaggaaatgccggatttaaaagagtttatacagaaaagtgatcaattaccaaacgatacgaaggaaggatttcagttacctaacataaaggccgtaaatcccttaactaaagaggaagtccccatatttgcagctccatatgtggtcagcagctatggttcagcacctagtgcagtaatgggttgtccaggacacgataaccgagattttgagttttggcaaacaaattgtcctggtgaacatatcaagacgtgcatagcacctttttttgacgatgcttcaaaagtaactgaacaggaaagacaaagaataattgatactgtcccgttcacatctactgacggtgtcctaaccaaagaatgcggagaacactcaggagttctcactgtagtggcaaggaaatcgataatggggatgttgaatagcgaaggactgtctaagagcgtcgttagatacaaaattagagattggctgataagtagacaaagatactggggtactccaatacccatcattcactgcgacaactgtggacctgtccccgttccagaaagtgatctacctgtcaagctaccagaacttgaaggcttggatacaaaagggaatccgctgtccacaatcgatgaatttgtaaatgtcgcctgtccttcatgcgggagccctgcgaaaagagaaactgacaccatggatacttttatcgatagttcttggtattatttcagattcttggatcccaaaaacacttcaaaaccatttgatcgtgaaattgcaagtaaaaatatgccggttgatatttatattggtggagtagaacatgctatcttacacttgttatactcaaggtttattgctaaatttctcggatctatcaatgcatggagcgaccctgctggcatcttcgaaccattcaaaaaactggtgacacaaggaatggttcaagggaaaacctatgttgaccccgattctggtaaatttttgaagcctgacgagttaacctttgtaaatgactctccagatggcaacacagtgattattaaatcaaatggcaaggttccggtagtctcttatgaaaaaatgtcgaaatctaaatacaatggtgcagatccaaatgaatgtattttaagacatggacctgatgctacgagagcacatatcctcttccaaagtccaattgcagatgccctgaattgggatgaatccaagattgttggtatagaacgttggttgcagaaggttcttcatttgaccaaaaatattctcagtctcgagaaggatttggcaataagtaaagactacaagaccccgaccgacttaaatgatgcagaagtgaaatttcacaacgatttccaacgcttcttgaaatcaattacggaatcatttgaagttaatctatcgttaaacactgtaatatctgattatatgaagctaaccaatattttagaaagtgcattgaaaaaaggtgaagtaaggaatgaaatgatagtacagaatttacaaaagttggtaaccgttatatatcctgctgtcccgtcaatttcagaagaagctgcagagatgatcaactcccaaatggaatggaaccaataccgctggccagaagttgagcgcactactgagtccaaattcaaaaagtttcaaattgtggtaaatggcagagtcaaattcatgtacacggctgacaaaaactttttgaaattaggtagggatgctgttattgaaactttgatgaacttaccggaagggagaatgtatttgatgaataaaaaaatcaaaaaatttgtcatgaaattcaatgtgattagtttcttattccacaagtaa

SEQ ID NO: 7934 - DNA, 2685 bp, Artificial Sequence
  Description of Artificial Sequence: Synthetic polynucleotide
atgctttctagaccttccagcaggttcttatccactaaaaggggccctggacctgcagtgaaaaaattaattgcaattggggagaaatggaaacagaagacaacccgtggcttgcctaagcaggatactttgaatagcgggtctaaatatattttgtgccagtttccatatccttctggggcgcttcacataggacatctcagggtttatgtcattagcgactctttgaatagattttacaaacaaaaagggtacaacgtgatacatccgatgggatgggatgcttttgggttacctgccgagaacgctgctatagaaagaagcattaatccggccatatggactagggacaatattgcaaaaatgaaacaacaaatgcaaagtatgttagcaaattttgattgggacagagaaataactacatgtgatcccgaatactataaattcacccaatggattttcttaaaactttttgaaaatggcttagcttatcgtaaagaagcagaaattaattgggatcccgttgatatgacagttttggctaatgaacaagtggatgcccagggccgttcttggagaagcggggctattgtggaaaagaagcagttgaaacagtggtttttgggaataacgaaattcgctcctaaattgaaaaagcacttgaaccaattgaaggactggccttccaacgtgaagcaaatgcaaaaaaattggataggcgaatctgtgggtgcagaattagtgttcaaagttgcggaccccaaatttgaaaacttgattgtctttacaacaagaccggaaactctttttgctgtacagtatgttgctctcgcattagaccacccaattgtacaaaaatactgcgaggaaatgccggatttaaaagagtttatacagaaaagtgatcaattaccaaacgatacgaaggaaggatttcagttacctaacataaaggccgtaaatcccttaactaaagaggaagtccccatatttgcagctccatatgtggtcagcagctatggttctgcacctagtgcagtaatgggttgtccaggacacgataacagagattttgagttttggcaaacaaattgtcctggtgaacatatcaagacgtgcatagcacctttttttgacgatgcttccaaagtaactgaacaggaaagacaaagaataattgatactgtcccgttcacatctactgacggtgtcttgaccaaagaatgcggagaacactctggagttctcactgtagtggcaaggaaatctataatggggatgttgaatagcgaaggattatctaagagcgtcgttagatacaaaattagagattggttgataagtagacaaagatactggggtactccaatacccatcattcactgcgacaactgtggacctgtccccgttccagaaagtgatttacctgtcaagttaccagaacttgaaggcttggatacaaaagggaatccgttatccacaatcgatgaatttgtaaatgtcgcctgtcctagctgcgggagccctgcgaaaagagaaactgacaccatggatacttttatcgatagttcttggtattatttcagattcttggatcccaaaaacacttctaaaccatttgatcgtgaaattgcaagtaaaaatatgccggttgatatttatattggtggagtagaacatgctatcttacacttgttatactctaggtttattgctaaatttctcggatctatcaatgcatggagcgaccctgctggcatcttcgaaccattcaaaaaattagtgacacaaggaatggttcaagggaaaacctatgttgaccccgattctggtaaatttttgaagcctgacgagttaacctttgtaaatgactctccagatggcaacacagtgattattaaatctaatggcaaggttccggtagtctcttatgaaaaaatgtccaaatctaaatacaatggtgcagatccaaatgaatgtattttaagacatggacctgatgctacgagagcacatatcctcttccaaagtccaattgcagatgccttgaattgggatgaatccaagattgttggtatagaacgttggttgcagaaggttcttcatttgaccaaaaatattctcagtctcgagaaggatttggcaataagtaaagactacaagaccccgaccgacttaaatgatgcagaagtgaaatttcacaacgatttccaacgcttcttgaaatccattacggaaagttttgaagttaatttatctttaaacactgtaatatctgattatatgaagttgaccaatattttagaaagtgcattgaaaaaaggtgaagtaaggaatgaaatgatagtacagaatttacaaaagttggtaaccgttatatatcctgctgtcccgtctatttctgaagaagctgcagagatgatcaactcccaaatggaatggaaccaataccgctggccagaagttgagcgcactactgagtccaaattcaaaaagtttcaaattgtggtaaatggcagagtcaaattcatgtacacggctgacaaaaactttttgaaattaggtagggatgctgttattgaaactttgatgaacttaccggaagggagaatgtatttgatgaataaaaaaatcaaaaaatttgtcatgaaattcaatgtgattagtttcttattccacaagtga

SEQ ID NO: 7935 - DNA, 3345 bp, Saccharomyces cerevisiae
atgatttcgactacgattagtggtaaaagacctatagagcaggttgatgatgagctactttcactgactgcgcagcaggaaaacgaagagcagcagcagcagagaaaacgcagacgtcatcaatttgcccccatgacacagtttaacagcaatacactagatgaagacagcgggtttaggagctcctctgacgtggccacggcggatcaagataactttttggaagagtcaccttcaggatatattaagaaagtgatcttgcgaaactttatgtgccatgaacattttgaacttgagcttggttctaggctgaattttattgttggtaataatggtagtggtaaaagtgcaattttgaccgccattactattggtttgggagccaaggctagcgagactaacagaggttcctctttgaaggatttgattcgtgaaggttgttattctgctaaaatcatccttcatctggataatagcaagtatggtgcttatcagcaaggtatttttggtaacgaaattatagtagaaaggataattaagagagatgggcccgcttcttttagtttaaggtcggaaaacggcaaggaaattagcaataagaaaaaggatattcagacggtagtggactatttttctgttcctgtaagcaaccccatgtgtttcctgtcacaagacgctgctaggtctttcttaactgctagtacctcacaggataagtatagccattttatgaagggtactttacttcaagaaattaccgagaatttgctttacgccagtgctattcacgatagtgcacaagaaaatatggctctgcacctggagaatttgaagtctttgaaagctgaatacgaagatgccaaaaaactgttaagggaattaaatcagacttcagacttgaacgaaaggaaaatgcttttgcaagcgaaatcgttatggatcgatgttgcccataatacagatgcttgtaaaaatttagagaatgaaatcagtggcattcaacagaaagttgatgaagttactgagaaaattaggaataggcaagaaaagattgaaagatatacatctgatggtactactattgaagcgcaaattgatgcaaaggtcatttatgttaatgaaaaagatagtgagcatcaaaatgcaagggaactgttaagagatgtcaaaagcaggtttgaaaaggagaaaagcaaccaagcagaagcacaaagcaatatcgatcaaggtagaaaaaaagtagatgctttgaataaaacaattgcgcatttagaagaagaactcacgaaggaaatgggcggtgataaagatcagatgagacaggagcttgaacagttagaaaaagctaatgaaaaattgagagaggtaaacaattctttagttgtaagtttgcaagatgtgaagaatgaggaaagagacatccaacatgaacgtgagtctgaattgaggacaatttcacgcagcattcaaaacaaaaaagtggaattgcagaatattgctaagggtaatgatactttcttaatgaattttgatcgtaacatggatcggctcttaaggacaatagagcaaagaaaaaacgagttcgaaactccggcaattggacctctgggttcccttgtaacaattagaaaaggttttgagaagtggacacgttctattcaaagggctatttcatcttcgctaaatgcatttgttgtgtcgaatccaaaggataacaggttatttagagacattatgaggtcgtgtggcataagaagtaatatacccattgttacttattgcttgagtcaatttgattattcgaaaggtagagcgcatggaaattatccaactattgtggatgcactagaattttcaaagcctgaaattgaatgcttattcgttgatttaagtagaattgaaagaatagtgttaattgaagataaaaacgaagccagaaatttcttgcaacgaaatcccgtgaacgtgaatatggctttatcgctaagagatagacgtagtgggttccagctctctggcggatatcgactagatacggttacttatcaagataaaattagattaaaggtcaactcttcatccgacaatgggactcaatatttaaaggacttgattgaacaagagaccaaagaattacaaaatatacgggaccgttacgaggaaaagctaagtgaagtgaggtcaagattaaaggaaatagatggcagactcaagagtaccaaaaatgaaatgagaaaaactaattttaggatgacagaattaaaaatgaatgttggcaaagtagttgatactggtatattaaattcgaaaataaatgagaggaaaaatcaagaacaagccatcgccagttacgaagccgctaaagaagaattagggctgaaaattgagcaaattgcacaggaagctcagccaattaaagagcaatacgattctacgaaattagcattggtggaagcacaagatgaactgcaacaattaaaagaggacatcaacagtcgtcaatctaaaattcaaaaatacaaagatgataccatttactacgaggataaaaaaaaagtctacttagaaaatataaagaaaattgaagttaacgtagcagctttaaaagaaggtatacagaggcaaattcaaaatgcttgtgcattttgttcaaaagagcgaattgagaatgttgatttaccagatacacaagaggagattaagcgtgaattggataaagtctcgagaatgattcaaaaagctgaaaaaagcctaggattatcgcaagaggaagtcatcgcattatttgagaagtgtaggaataaatataaagaaggtcaaaagaagtacatggagatagacgaagcactgaacaggttacataattccctcaaagctcgtgatcaaaactataaaaatgcggaaaaagggacttgttttgatgcagatatggattttcgcgcatcattgaaagtaaggaagttctcgggaaacctttcctttattaaggataccaaaagtttagaaatatacatcttgactactaacgatgagaaggcaagaaacgttgacaccttgtctggtggtgaaaaatcgttttcccaaatggcgctgttattggctacatggaagccgatgcggtcaaggattattgcgttggacgaattcgacgttttcatggaccaggttaacaggaagattggtactactctcatagtgaaaaaactaaaggatattgccagaactcaaactattatcattactcctcaagatatcgggaaaattgcagatatcgatagttctggtgttagtatccacagaatgagagaccctgagagacagaataattccaatttttataattaa

SEQ ID NO: 7936 - DNA, 3345 bp, Artificial Sequence
  Description of Artificial Sequence: Synthetic polynucleotide
atgatttctactacgattagtggtaaaagacctatagagcaggttgatgatgagttgctttctttgactgcgcagcaggaaaacgaagagcagcagcagcagagaaaacgcagacgtcatcaatttgcccccatgacacagtttaacagcaatacattagatgaagacagcgggtttaggagctcctctgacgtggccacggcggatcaagataactttttggaagagtctccttctggatatattaagaaagtgatcttgagaaactttatgtgccatgaacattttgaacttgagcttggttctaggttgaattttattgttggtaataatggtagtggtaaaagtgcaattttgaccgccattactattggtttgggagccaaggctagcgagactaacagaggttcctctttgaaggatttgattcgtgaaggttgttattctgctaaaatcatccttcatttggataatagcaagtatggtgcttatcagcaaggtatttttggtaacgaaattatagtagaaaggataattaagagagatgggcccgcttcttttagtttaaggtctgaaaacggcaaggaaattagcaataagaaaaaggatattcagacggtagtggactatttttctgttcctgtaagcaaccccatgtgtttcttatctcaagacgctgctaggtctttcttaactgctagtacctctcaggataagtatagccattttatgaagggtactttacttcaagaaattaccgagaatttgctttacgccagtgctattcacgatagtgcacaagaaaatatggctttacacttagagaatttgaagtctttgaaagctgaatacgaagatgccaaaaaattattaagggaattaaatcagacttctgacttgaacgaaaggaaaatgcttttgcaagcgaaatctttatggatcgatgttgcccataatacagatgcttgtaaaaatttagagaatgaaatcagtggcattcaacagaaagttgatgaagttactgagaaaattaggaataggcaagaaaagattgaaagatatacatctgatggtactactattgaagcgcaaattgatgcaaaggtcatttatgttaatgaaaaagatagtgagcatcaaaatgcaagggaattattaagagatgtcaaaagcaggtttgaaaaggagaaaagcaaccaagcagaagcacaaagcaatatcgatcaaggtagaaaaaaagtagatgctttgaataaaacaattgcgcatttagaagaagaactcacgaaggaaatgggcggtgataaagatcagatgagacaggagcttgaacagttagaaaaagctaatgaaaaattgagagaggtaaacaattctttagttgtaagtttgcaagatgtgaagaatgaggaaagagacatccaacatgaacgtgagtctgaattgaggacaatttctcgcagcattcaaaacaaaaaagtggaattgcagaatattgctaagggtaatgatactttcttaatgaattttgatcgtaacatggataggctcttaaggacaatagagcaaagaaaaaacgagttcgaaactccggcaattggacctttaggttcccttgtaacaattagaaaaggttttgagaagtggacacgttctattcaaagggctatttcttcttctttgaatgcatttgttgtgagtaatccaaaggataacaggttatttagagacattatgaggagttgtggcataagaagtaatatacccattgttacttattgcttgagtcaatttgattattctaaaggtagagcgcatggaaattatccaactattgtggatgcattggaattttccaagcctgaaattgaatgcttattcgttgatttaagtagaattgaaagaatagtgttaattgaagataaaaacgaagccagaaatttcttgcaaagaaatcccgtgaacgtgaatatggctttaagtttgagagatagacgtagtgggttccagctctctggcggatataggttagatacggttacttatcaagataaaattagattaaaggtcaactcttcttccgacaatgggactcaatatttaaaggacttgattgaacaagagaccaaagaattacaaaatataagagaccgttacgaggaaaagttgagtgaagtgaggagcagattaaaggaaatagatggcagactcaagagtaccaaaaatgaaatgagaaaaactaattttaggatgacagaattaaaaatgaatgttggcaaagtagttgatactggtatattaaattctaaaataaatgagaggaaaaatcaagaacaagccatcgccagttacgaagccgctaaagaagaattagggttgaaaattgagcaaattgcacaggaagctcagccaattaaagagcaatacgattctacgaaattagcattggtggaagcacaagatgaattacaacaattaaaagaggacatcaacagtcgtcaatctaaaattcaaaaatacaaagatgataccatttactacgaggataaaaaaaaagtctacttagaaaatataaagaaaattgaagttaacgtagcagctttaaaagaaggtatacagaggcaaattcaaaatgcttgtgcattttgttctaaagagagaattgagaatgttgatttaccagatacacaagaggagattaagcgtgaattggataaagtctctagaatgattcaaaaagctgaaaaaagcttgggattatctcaagaggaagtcatcgcattatttgagaagtgtaggaataaatataaagaaggtcaaaagaagtacatggagatagacgaagcattgaacaggttacataattccctcaaagctcgtgatcaaaactataaaaatgcggaaaaagggacttgttttgatgcagatatggattttcgcgcaagtttgaaagtaaggaagttcagtggaaacctttcctttattaaggataccaaaagtttagaaatatacatcttgactactaacgatgagaaggcaagaaacgttgacaccttgtctggtggtgaaaaaagtttttcccaaatggcgttattattggctacatggaagccgatgagaagtaggattattgcgttggacgaattcgacgttttcatggaccaggttaacaggaagattggtactactctcatagtgaaaaaattgaaggatattgccagaactcaaactattatcattactcctcaagatatcgggaaaattgcagatatcgatagttctggtgttagtatccacagaatgagagaccctgagagacagaataattccaatttttataattga

SEQ ID NO: 7937 - DNA, 4050 bp, Saccharomyces cerevisiae
atggttgaacatgacaagagtgggtcaaagaggcaggagctaagatcaaatatgcgtaatcttattaccttgaataagggtaaatttaagccaacggcgtctactgcagaaggcgatgaagatgacttatctttcactttgttagactcggtatttgatacattatccgacagtataacatgtgtactcggttctacggatattggtgctattgaagtgcaacaattcatgaaggatggttccaggaatgtgttggcttcattcaacattcagacttttgacgacaaattattatcttttgttcattttgcggatattaaccaattagtctttgtctttgaacaaggtgatatcattacagccacttatgatcctgtcagtttggacccagctgaaactttaattgaaattatgggtactatagacaacggaattgcagccgcgcagtggtcctatgacgaagagacgctggccatggtgactaaagatcgtaacgtggtagttctaagtaaactgttcgaacccatatcggaataccatttagaggtagatgatcttaagatttcaaagcacgtcaccgttggttggggtaaaaaggaaacacaattcagaggtaaaggtgcacgtgccatggaaagagaagcattagccagcttaaaggcatcaggtttggtaggtaaccaattaagagatccgaccatgccctatatggtagatactggtgatgtaaccgcattggacagtcatgaaatcacaatttcttggagaggggattgtgattattttgctgtttcttctgtagaggaggtaccagacgaagatgatgaaacaaaatcaataaaaagaagagctttcagagttttttcccgtgaaggccaattggatagtgcttctgagccagtaactgggatggaacaccagttaagctggaaaccacaaggttctttgattgcgtccattcaaagaaaaaccgaccttggtgaggaggattcagtggatgtgattttcttcgaacgtaacggtttaaggcatggtgaatttgatacaagattacctctagatgagaaggtagaaagtgtatgctggaatagtaactcagaggcactagccgtagtattggcaaaccgcattcagttgtggacgtccaagaattaccattggtatttaaaacaagaattgtacgctagcgacatttcctacgttaaatggcacccagaaaaggacttcacgttgatgttttctgatgctggatttatcaatatcgttgatttcgcttataagatggcgcagggtccgacattagagccgttcgataacggtacctctcttgttgttgatggaaggacagtgaatatcactcctctagctcttgctaatgtccctcctccaatgtactatcgtgattttgaaactccaggaaatgtattggatgtagcgtgcagtttttcgaatgaaatatatgcagcaatcaacaaagatgttctaattttcgcagccgtcccaagtatcgaagaaatgaaaaaaggcaaacatccaagtatagtctgcgaattccccaaatctgagttcacaagtgaggttgactctttaaggcaagttgcatttattaacgattccattgtcggtgtgttgcttgacacagataacctttctagaatagcgcttttggatatccaggatattacgcaaccaactttaataactattgtggaggtctatgataaaatcgttttactaagaagtgactttgattataaccacttggtgtatgaaactcgcgatggtacagtttgccaattggatgcggaaggccagttaatggaaattaccaagtttcctcaattggtacgtgattttagagtaaaaagagtccataacacatcagcagaagatgatgacaactggtctgcagaaagttctgagttagttgcatttggtatcacaaataacggtaagttatttgctaatcaagttcttttggcttcggcagttacttccttggagattaccgattcctttctgttgttcaccacggcacaacacaatttacagtttgtgcatttaaattccaccgatttcaagccattgcctttggtagaggagggtgtggaagatgaaagagtgcgtgccattgaaagaggttccattttagtgtccgttattccatctaagtcttccgttgttttgcaagccacacgtggtaatctagaaacaatttatccaagaattatggtactggcagaggtaagaaagaatatcatggcaaaacgttataaagaggcgtttattgtttgtcgtacacacagaattaaccttgatattttgcatgactatgcgccagagttatttattgaaaacttagaagtatttatcaaccaaatcggaagggttgattatctcaatttatttatttcctgtttgtcggaagatgacgttaccaaaacaaaatataaggaaaccctttattcaggtatctcgaagtcatttggaatggaaccagcaccactgactgaaatgcaaatatatatgaaaaagaaaatgtttgatcccaaaacctctaaagtcaacaaaatatgcgatgctgtgctaaatgttttattaagcaatcctgaatacaagaagaaatacttgcaaacgatcattacagcatatgcatcccaaaaccctcaaaacttatcggctgcactaaaactaattagtgaactagaaaattctgaagaaaaagactcttgtgtaacttacttgtgttttttgcaagacgtcaacgtggtttataaatctgccctatctttgtatgatgtcagtttagcattattagtcgcccaaaaatcacaaatggatcctcgtgaatatctgccatttttacaagaattacaagataatgagcctttacgccgtaagtttttgattgatgattacttagggaactatgaaaaagctttggaacacttgtccgaaattgataaagatggtaatgtttcagaggaagtcatagactatgttgaatctcatgatttgtataagcatggtttagcactttaccgttatgattctgagaagcagaatgttatttataacatttacgcaaagcatttgtcatcaaatcaaatgtatacggatgcggcggtggcgtacgagatgctaggaaagctcaaagaagcaatgggggcataccaatcagcgaaaagatggcgtgaggccatgtccatcgctgttcagaaattcccagaggaagttgagtcagtcgcagaagagttgatatcttctttgacttttgaacatagatatgttgatgctgctgatattcaattggaatatttggacaatgttaaagaagccgtagctttgtactgtaaggcctatagatatgatattgcttctcttgtggcgataaaggccaagaaagatgaactcttggaagaagttgtcgatcccggtttaggcgaaggttttggtataattgcagaattactcgccgattgtaaaggccagattaattcacagttaagaagattgagagagctacgcgcgaagaaggaggagaacccatacgccttttatggccaggaaactgagcaagcggatgacgtttctgttgctccttctgagacgtcaacacaagaatcattcttcaccagatacacaggcaaaactgggggtactgcaaagactggtgcttccagacgtacagctaaaaacaagcgtagggaagagcgtaagcgtgctcgtggtaagaagggaactatttatgaagaagaatatttggttcagtcagtcggaagattgattgagaggttaaaccaaacaaaaccagacgctgtgagagttgttgagggtctttgtagacgaaacatgagagagcaagctcaccaaattcaaaagaactttgttgaagtacttgatttattgaaggctaacgttaaagaaatttattctattagcgaaaaggatagagaaagggttaatgaaaatggggaagtatattatatcccagaaatacctgttccagagattcatgatttccctaagagtcatattgttgatttttga

SEQ ID NO: 7938 - DNA, 4050 bp, Artificial Sequence
  Description of Artificial Sequence: Synthetic polynucleotide
atggttgaacatgacaagagtgggtccaagaggcaggagttaagatctaatatgcgtaatcttattaccttgaataagggtaaatttaagccaacggcgtctactgcagaaggcgatgaagatgacttatctttcactttgttagactctgtatttgatacattatccgacagtataacatgtgtactcggttctacggatattggtgctattgaagtgcaacaattcatgaaggatggttccaggaatgtgttggcttctttcaacattcagacttttgacgacaaattattatcttttgttcattttgcggatattaaccaattagtctttgtctttgaacaaggtgatatcattacagccacttatgatcctgtcagtttggacccagctgaaactttaattgaaattatgggtactatagacaacggaattgcagccgcgcagtggtcctatgacgaagagacgttggccatggtgactaaagatcgtaacgtggtagttttgagtaaattattcgaacccatatctgaataccatttagaggtagatgatcttaagatttccaagcacgtcaccgttggttggggtaaaaaggaaacacaattcagaggtaaaggtgcacgtgccatggaaagagaagcattagccagcttaaaggcatctggtttggtaggtaaccaattaagagatccgaccatgccctatatggtagatactggtgatgtaaccgcattggacagtcatgaaatcacaatttcttggagaggggattgtgattattttgctgtttcttctgtagaggaggtaccagacgaagatgatgaaacaaaatctataaaaagaagagctttcagagttttttcccgtgaaggccaattggatagtgcttctgagccagtaactgggatggaacaccagttaagctggaaaccacaaggttctttgattgcgtccattcaaagaaaaaccgaccttggtgaggaggattctgtggatgtgattttcttcgaacgtaacggtttaaggcatggtgaatttgatacaagattacctttggatgagaaggtagaaagtgtatgctggaatagtaacagtgaggcattggccgtagtattggcaaaccgcattcagttgtggacgtccaagaattaccattggtatttaaaacaagaattgtacgctagcgacatttcctacgttaaatggcacccagaaaaggacttcacgttgatgttttctgatgctggatttatcaatatcgttgatttcgcttataagatggcgcagggtccgacattagagccgttcgataacggtacctctcttgttgttgatggaaggacagtgaatatcactcctttggctcttgctaatgtccctcctccaatgtactatcgtgattttgaaactccaggaaatgtattggatgtagcgtgcagtttttctaatgaaatatatgcagcaatcaacaaagatgttttgattttcgcagccgtcccaagtatcgaagaaatgaaaaaaggcaaacatccaagtatagtctgcgaattccccaaatctgagttcacaagtgaggttgactctttaaggcaagttgcatttattaacgattccattgtcggtgtgttgcttgacacagataacctttctagaatagcgcttttggatatccaggatattacgcaaccaactttaataactattgtggaggtctatgataaaatcgttttattaagaagtgactttgattataaccacttggtgtatgaaactcgcgatggtacagtttgccaattggatgcggaaggccagttaatggaaattaccaagtttcctcaattggtacgtgattttagagtaaaaagagtccataacacaagtgcagaagatgatgacaactggtctgcagaaagttctgagttagttgcatttggtatcacaaataacggtaagttatttgctaatcaagttcttttggcttctgcagttacttccttggagattaccgattcctttttattgttcaccacggcacaacacaatttacagtttgtgcatttaaattccaccgatttcaagccattgcctttggtagaggagggtgtggaagatgaaagagtgcgtgccattgaaagaggttccattttagtgtccgttattccatctaagtcttccgttgttttgcaagccacacgtggtaatttggaaacaatttatccaagaattatggtattggcagaggtaagaaagaatatcatggcaaaacgttataaagaggcgtttattgtttgtcgtacacacagaattaaccttgatattttgcatgactatgcgccagagttatttattgaaaacttagaagtatttatcaaccaaatcggaagggttgattatctcaatttatttatttcctgtttgagtgaagatgacgttaccaaaacaaaatataaggaaaccctttattctggtatctccaagagctttggaatggaaccagcaccattgactgaaatgcaaatatatatgaaaaagaaaatgtttgatcccaaaacctctaaagtcaacaaaatatgcgatgctgtgttgaatgttttattaagcaatcctgaatacaagaagaaatacttgcaaacgatcattacagcatatgcatcccaaaaccctcaaaacttatctgctgcattgaaattgattagtgaattggaaaattctgaagaaaaagactcttgtgtaacttacttgtgttttttgcaagacgtcaacgtggtttataaatctgccttatctttgtatgatgtcagtttagcattattagtcgcccaaaaatctcaaatggatcctcgtgaatatttaccatttttacaagaattacaagataatgagcctttacgccgtaagtttttgattgatgattacttagggaactatgaaaaagctttggaacacttgtccgaaattgataaagatggtaatgtttctgaggaagtcatagactatgttgaatctcatgatttgtataagcatggtttagcactttaccgttatgattctgagaagcagaatgttatttataacatttacgcaaagcatttgagtagtaatcaaatgtatacggatgcggcggtggcgtacgagatgcttggaaagctcaaagaagcaatgggggcataccaaagtgcgaaaagatggcgtgaggccatgtccatcgctgttcagaaattcccagaggaagttgagtctgtcgcagaagagttgatatcttctttgacttttgaacatagatatgttgatgctgctgatattcaattggaatatttggacaatgttaaagaagccgtagctttgtactgtaaggcctatagatatgatattgcttctcttgtggcgataaaggccaagaaagatgaactcttggaagaagttgtcgatcccggtttaggcgaaggttttggtataattgcagaattactcgccgattgtaaaggccagattaattctcagttaagaagattgagagagttacgcgcgaagaaggaggagaacccatacgccttttatggccaggaaactgagcaagcggatgacgtttctgttgctccttctgagacgagtacacaagaatctttcttcaccagatacacaggcaaaactgggggtactgcaaagactggtgcttccagacgtacagctaaaaacaagcgtagggaagagcgtaagcgtgctcgtggtaagaagggaactatttatgaagaagaatatttggttcagtctgtcggaagattgattgagaggttaaaccaaacaaaaccagacgctgtgagagttgttgagggtctttgtagaagaaacatgagagagcaagctcaccaaattcaaaagaactttgttgaagtacttgatttattgaaggctaacgttaaagaaatttattctattagcgaaaaggatagagaaagggttaatgaaaatggggaagtatattatatcccagaaatacctgttccagagattcatgatttccctaagagtcatattgttgatttttga

SEQ ID NO: 7939 - DNA, 399 bp, Saccharomyces cerevisiae
atggattgcccctcaaacgttgtgttattgttgctgcaattagttttgcagcgccaacaaactctagctcatcgagataagtcggttgatttgcaaacgctgttaaaagatcccgtcattgataatgacgtactagtagagttcaagacacacaagttggtgcaattatatggccctcaatactgccgcgacatatctctgagagggctcaaaacaatggttacagatatcttcgcaaacggaatcccaaaaaatgcgcaatcttcagggaatgatcaaccagtgactgtagtggacctggccaattactactacatgcagagaatcaatgagctacagaatacagaacttcctcaattgaaagaggcattgctgacaaggctggagcacatgatctaa

SEQ ID NO: 7940 - DNA, 399 bp, Artificial Sequence
  Description of Artificial Sequence: Synthetic polynucleotide
atggattgcccctctaacgttgtgttattgttgttgcaattagttttgcagcgccaacaaactttggctcatagagataagtctgttgatttgcaaacgttattaaaagatcccgtcattgataatgacgtattggtagagttcaagacacacaagttggtgcaattatatggccctcaatactgccgcgacatatctttgagagggctcaaaacaatggttacagatatcttcgcaaacggaatcccaaaaaatgcgcaatcttctgggaatgatcaaccagtgactgtagtggacttggccaattactactacatgcagagaatcaatgagttacagaatacagaacttcctcaattgaaagaggcattgttgacaaggttagagcacatgatctga

SEQ ID NO: 7941 - DNA, 2643 bp, Saccharomyces cerevisiae
atggaaaaatcgattgccaaaggtttaagcgacaaactatacgaaaaacggaaggctgccgccttggagttggaaaagttggtcaaacaatgcgttctagaaggggactatgatcgtattgacaagataatagacgaactatgcagagactatgcatacgctttgcatcagcccatggctagaaatgcaggattaatgggcttggctgccacagcaattgctttaggaataaacgatgttggccgttacttgaggaatattcttcctccagttctcgcatgttttggcgaccagaatgaccaagtaagattttatgcgtgtgagagtttgtacaatattgcaaagattgcgaagggtgaaatactggtctatttcaatgaaatatttgacgtactctgtaaaattagtgctgatacagaaaactcggtccgaggagcagctgaactattagatcggttgataaaagatattgttgctgaaagagcatccaattacataagcattgtaaataatggatcgcatggtttgcttccagccataaaaacggatccaatcagcggggatgtctaccaagaagaatatgagcaagataatcaattggcgttctctttaccaaaatttattcctttattaacagagagaatttacgccattaaccctgatacgcgtgtttttttagttgactggcttaaagtcttgctcaataccccaggactagagctcatatcgtatctaccatcatttcttggcgggttattcacgttcttgggcgattctcataaagatgtcagaacagttacacacacccttatggactcactacttcacgaagtcgaccgcatttcaaaattacaaactgaaattaaaatgaagagactggaaagactgaaaatgctggaagataaatacaataacagttctactccaacgaaaaaggccgatggtgcacttattgctgaaaagaagaaaactttaatgactgcattaggtgggttatccaaacctctgagtatggagactgatgataccaaattatctaatactaatgagacagatgatgaaagacacttgacaagccaggagcagctgctagatagcgaggcaactagccaagaacctcttcgcgatggcgaagaatatatacctggtcaagatatcaacctcaatttcccagaggttattaccgttcttgtgaacaatttggcatcatctgaggcagagattcaattgattgcattacactggattcaggttattttatccatttctccaaatgtgtttatccccttcctttcaaaaattctttctgtgcttttaaagctattgagcgattcggatccgcatattactgaaattgctcagctggtgaacggtcaattactctcattgtgcagctcatatgtgggaaaagagacagacgggaaaattgcatacgggccaatcgttaatagcttaactctacagtttttcgatagtaggattgatgccaagattgcctgcttggattggctcatcttaatttatcacaaggctccaaaccaaatcttgaaacataacgacagcatgttcctaactttgttgaagtcattatcaaatagagactcggtgctaatcgagaaagctttaagtctcttacagagtttatgttctgactcaaatgataattatttacgtcagtttcttcaagatttattaactttattcaagagagataccaaattggtgaaaactagagcaaactttatcatgagacagatatcttcccgtttatcaccagaacgtgtttataaagtaatttcttcgatattggacaattataacgacacaacgtttgtgaaaatgatgattcagattttaagtacaaacttaataacttcaccggagatgtcgtcgttaagaaacaaacttagaacttgtgaagacggtatgtttttcaatagtttattcaaatcttggtgtcccaaccccgtgtccgtgatatccttatgttttgtagcagaaaattatgagttagcttacacagtgttacaaacttacgcgaactacgagttgaagttaaatgatctagtgcagttggatattttgattcagttgttcgaatcacccgttttcacaaggatgcggttgcaacttttagaacaacagaaacatccgtttctgcataagtgtctatttggtatactgatgattataccacagtcaaaggcatttgaaacattgaaccgcagattgaatagtttgaacatatggacatcccaatcttatgtcatgaacaactatataagacaaagggagaatagtaacttttgtgattccaattctgatatctcgcaaaggtccgttagccaaagtaaactacatttccaggaactaattaatcattttaaggccgtttcagaagaagatgaatattcatcagatatgataaggcttgaccatggtgctaacaataaatcacttctgcttggaagttttttggacggtattgacgaagataaacaagaaattgtcacaccaatctcgcccatgaatgaagctattaacgaggagatggaatctcccaacgataatagttctgtcatattaaaagatagtggcagtctgccattcaaccgcaatgtatccgataaattaaaaaaataa

SEQ ID NO: 7942 - DNA, 2643 bp, Artificial Sequence
  Description of Artificial Sequence: Synthetic polynucleotide
atggaaaaatccattgccaaaggtttaagcgacaaactttacgaaaaaagaaaggctgccgccttggagttggaaaagttggtcaaacaatgcgttttggaaggggactatgatcgtattgacaagataatagacgaattgtgcagagactatgcatacgctttgcatcagcccatggctagaaatgcaggattaatgggcttggctgccacagcaattgctttaggaataaacgatgttggccgttacttgaggaatattcttcctccagttctcgcatgttttggcgaccagaatgaccaagtaagattttatgcgtgtgagagtttgtacaatattgcaaagattgcgaagggtgaaatattggtctatttcaatgaaatatttgacgtactctgtaaaattagtgctgatacagaaaactctgtcagaggagcagctgaattattagatagattgataaaagatattgttgctgaaagagcatccaattacataagcattgtaaataatggatctcatggtttgcttccagccataaaaacggatccaatcagcggggatgtctaccaagaagaatatgagcaagataatcaattggcgttctctttaccaaaatttattcctttattaacagagagaatttacgccattaaccctgatacgcgtgtttttttagttgactggcttaaagtcttgctcaataccccaggattggagctcatatcttatttaccatcttttcttggcgggttattcacgttcttgggcgattctcataaagatgtcagaacagttacacacacccttatggactctttacttcacgaagtcgaccgcatttccaaattacaaactgaaattaaaatgaagagattagaaagattgaaaatgttggaagataaatacaataacagttctactccaacgaaaaaggccgatggtgcacttattgctgaaaagaagaaaactttaatgactgcattaggtgggttatccaaacctttgagtatggagactgatgataccaaattatctaatactaatgagacagatgatgaaagacacttgacaagccaggagcagttgttggatagcgaggcaactagccaagaacctcttcgcgatggcgaagaatatatacctggtcaagatatcaacctcaatttcccagaggttattaccgttcttgtgaacaatttggcatcttctgaggcagagattcaattgattgcattacactggattcaggttattttatccatttctccaaatgtgtttatccccttcctttctaaaattctttctgtgcttttaaagttgttgagcgattctgatccgcatattactgaaattgctcagttggtgaacggtcaattactctctttgtgcagctcttatgtgggaaaagagacagacgggaaaattgcatacgggccaatcgttaatagcttaactttacagtttttcgatagtaggattgatgccaagattgcctgcttggattggctcatcttaatttatcacaaggctccaaaccaaatcttgaaacataacgacagcatgttcttgactttgttgaagtctttatccaatagagactctgtgttaatcgagaaagctttaagtctcttacagagtttatgttctgactctaatgataattatttacgtcagtttcttcaagatttattaactttattcaagagagataccaaattggtgaaaactagagcaaactttatcatgagacagatatcttcccgtttatctccagaacgtgtttataaagtaatttcttctatattggacaattataacgacacaacgtttgtgaaaatgatgattcagattttaagtacaaacttaataacttctccggagatgtcttctttaagaaacaaacttagaacttgtgaagacggtatgtttttcaatagtttattcaaatcttggtgtcccaaccccgtgtccgtgatatccttatgttttgtagcagaaaattatgagttagcttacacagtgttacaaacttacgcgaactacgagttgaagttaaatgatttggtgcagttggatattttgattcagttgttcgaaagtcccgttttcacaaggatgagattgcaacttttagaacaacagaaacatccgtttttacataagtgtttatttggtatattaatgattataccacagtccaaggcatttgaaacattgaaccgcagattgaatagtttgaacatatggacatcccaatcttatgtcatgaacaactatataagacaaagggagaatagtaacttttgtgattccaattctgatatctctcaaaggtccgttagccaaagtaaattgcatttccaggaattgattaatcattttaaggccgtttctgaagaagatgaatattcttctgatatgataaggcttgaccatggtgctaacaataaatctcttttacttggaagttttttggacggtattgacgaagataaacaagaaattgtcacaccaatctcccccatgaatgaagctattaacgaggagatggaatctcccaacgataatagttctgtcatattaaaagatagtggcagtttaccattcaaccgcaatgtatccgataaattaaaaaaatga

SEQ ID NO: 7943 - DNA, 1299 bp, Saccharomyces cerevisiae
atgagctctactttctttacatgcaactgttgtgttattcagttcaagactagtgatttgcaaagatatcacatgaagaccgaatggcacaggtacaacttaaagagaagaattgccaacctgccgccaattggtgcggaacagtttgctgagaaattgcaaatttcagaaaaggaacaagctgaaaatcaggttgatgagtttggtttccctgttctaaagcctgttatgaaccaaagtaacgctttgcctcagaaacagaagaaaccgatcaagtcaaagagaggaagaaaagttggtacgaacttattgaagaggaaagacagggatattgctaaagaaaaacagaatagatcggtgtccccttctggatcaatatcttcacaattatctaatttgacagtaggaacagaaaacacgaatacagattatggtgaagatactgtctctgaatacggtttcactagtgactctaattatgagtatgctactagtgatgaggaactagatatagcggataagccaagtgataaagaaaatgaaaagattaccatcacggaatgtatatattgcgggaaagacaataaagaagtggaaagaaatgtcaaacatatgtttagcgagcatggtcttttcatacctgaaaggtcatatttgattgatctaaacggtttactagagtttttaataaaaatgattgttattgatcataactgtctgtgttgtaactttcatggctccggtttggaaagtataagagcgcatatggcttctaagcgtcattgcaggctgccatatgaaacaaaggaggagcgtcagcttttcgccccattttacgattttacttacgatgatcactctattagcaaaaatcttcagaatgacagagcaattacttccaagctttcatctgtctatggggccaaaaatgatgaagaagatggggaggtagatatcacgttggtctcatccgaaaatgacattaatgcaaactataccaccgtatctattgatgaatctggtttagaacttaccttgccaacaggcgctaggctaggtcatcgtgcgggccagaggtactatagacaaaatttaccttcgcagccaaaccctaacgaaagcagaagaacgattacagctgctgatagaaggatggtcagtggtgttaccgagaagcaatataagaagggtatgaagaaaatgcaacaattggagaaaaatgccattaatacgcagatccgtcgcgaaattaaaagggttaactttcaaacacattacagggatgagttgttgcaatag

SEQ ID NO: 7944 - DNA, 1299 bp, Artificial Sequence
  Description of Artificial Sequence: Synthetic polynucleotide
atgagctctactttctttacatgcaactgttgtgttattcagttcaagactagtgatttgcaaagatatcacatgaagaccgaatggcacaggtacaacttaaagagaagaattgccaacttaccgccaattggtgcggaacagtttgctgagaaattgcaaatttctgaaaaggaacaagctgaaaatcaggttgatgagtttggtttccctgttttgaagcctgttatgaaccaaagtaacgctttgcctcagaaacagaagaaaccgatcaagtccaagagaggaagaaaagttggtacgaacttattgaagaggaaagacagggatattgctaaagaaaaacagaatagatctgtgtccccttctggatccatatcttctcaattatctaatttgacagtaggaacagaaaacacgaatacagattatggtgaagatactgtctctgaatacggtttcactagtgactctaattatgagtatgctactagtgatgaggaattagatatagcggataagccaagtgataaagaaaatgaaaagattaccatcacggaatgtatatattgcgggaaagacaataaagaagtggaaagaaatgtcaaacatatgtttagcgagcatggtcttttcatacctgaaaggagttatttgattgatttgaacggtttattggagtttttaataaaaatgattgttattgatcataactgtttatgttgtaactttcatggctccggtttggaaagtataagagcgcatatggcttctaagcgtcattgcaggttaccatatgaaacaaaggaggagcgtcagcttttcgccccattttacgattttacttacgatgatcactctattagcaaaaatcttcagaatgacagagcaattacttccaagctttcttctgtctatggggccaaaaatgatgaagaagatggggaggtagatatcacgttggtctcttccgaaaatgacattaatgcaaactataccaccgtatctattgatgaatctggtttagaacttaccttgccaacaggcgctaggcttggtcatcgtgcgggccagaggtactatagacaaaatttaccttctcagccaaaccctaacgaaagcagaagaacgattacagctgctgatagaaggatggtcagtggtgttaccgagaagcaatataagaagggtatgaagaaaatgcaacaattggagaaaaatgccattaatacgcagatccgtcgcgaaattaaaagggttaactttcaaacacattacagggatgagttgttgcaatga

SEQ ID NO: 7945 - DNA, 171 bp, Saccharomyces cerevisiae
atggctcacgaaaacgtctggttctctcacccaagaagatacggtaaaggctcccgtcaatgtcgtgtttgttcttcccacaccggtttgatcagaaagtacggcttaaacatctgtcgtcaatgtttcagagaaaaagctaacgacattggtttcaacaaattcagataa

SEQ ID NO: 7946 - DNA, 171 bp, Artificial Sequence
  Description of Artificial Sequence: Synthetic polynucleotide
atggctcacgaaaacgtctggttctctcacccaagaagatacggtaaaggctcccgtcaatgtcgtgtttgttcttcccacaccggtttgatcagaaagtacggcttaaacatctgtcgtcaatgtttcagagaaaaagctaacgacattggtttcaacaaattcagatga

SEQ ID NO: 7947 - DNA, 3084 bp, Saccharomyces cerevisiae
atgggcgtatctcttttagcttcttcttctgcatttgtaactaaaccactcctcactcaattggttcacctctcacctatcagtctcaatttcaccgtaagacgcttcaagccattcacgtgcttatcacgctattacacaacaaatccttataatatgacatccaattttaagacattcaatctggactttttaaagccggatttagacgaaagatcgtatcggtttattgagctacctaataagctgaaggctctgttgatccaggacccaaaagcagataaagcagcagcgtcgctagacgtcaatattggcgcctttgaagatccaaagaacctacctggattggcgcatttctgcgagcatcttttattcatgggctctgagaaatttccagacgaaaacgaatactcgagctatttaagcaagcacggtggttcatccaatgcctacacagcatcgcaaaacacaaattatttttttgaggttaatcaccaacatttatttggtgcgctagacaggttttcagggtttttctcttgtcctcttttcaacaaggactctactgataaagagatcaacgccgttaacagcgaaaacaaaaagaacttacagaatgatatttggagaatttaccaattagacaagtctttgaccaatacaaaacatccatatcacaaattttctacaggaaacatcgaaactttgggcacattgccaaaggaaaatggactaaatgttagagatgaactgttaaaattccataagaatttttactccgctaacctaatgaagctatgtattcttggtagagaagaccttgatactctctctgattggacttatgatctcttcaaggatgtagccaataacggtcgtgaagtacccctttatgcggaacctattatgcagcctgagcatttgcaaaaaataattcaagtccgtcctgtgaaagatttgaaaaaactagaaatctctttcactgtccctgatatggaggaacattgggagtccaagccaccgaggatattaagtcatttaatcggccatgaagggtccggttcattactagcacatttgaaaaaattgggctgggccaatgagctatctgctggtgggcatactgtgtccaaaggaaatgctttttttgctgtcgatatagatttaacagacaacgggttgacacactatcgcgatgttattgtcttgatcttccagtatattgaaatgttgaaaaactcactacctcaaaaatggatattcaatgaactgcaagatatctctaatgctaccttcaagtttaagcaagctggtagcccatcttccacagtttcatcattggcaaaatgcttggaaaaggattacattcctgttagcagaattttagccatgggtttgttaacgaaatatgaacctgatttgcttacccaatatacggacgctctggtcccggaaaattctcgtgttactctgatctcaaggagtttagaaacagattctgctgaaaaatggtatggtactgcgtataaagtggtagattatccggcagatttaataaaaaacatgaaatcgccaggtttgaaccctgctctgactttgccacgtccaaatgaattcgtttcaacaaatttcaaggttgataaaattgacggtataaaaccattagatgaacctgttttgttattatccgatgacgtcagcaaattatggtacaagaaggacgaccgattctggcaaccacgaggctacatttacttgtcttttaaacttccacatacgcatgcaagcatcattaatagtatgctttctacgctatacactcagctggccaacgatgccttgaaagatgtacaatatgatgctgcttgtgccgatcttcgtatatcattcaataaaactaatcaaggcctcgccattaccgcgtctgggttcaacgaaaaattgatcattctattaacaaggtttttacaaggcgttaattcattcgaacctaagaaggatcgttttgagattttgaaagataagaccatacgtcacttgaaaaaccttttatatgaagttccttattcacaaatgtcgaattactacaatgctataataaatgaacgttcttggtcaactgcagaaaaattacaagtctttgaaaaattgacctttgaacaattgatcaacttcatacccaccatttacgaaggcgtttattttgaaactttaatccacggaaacataaaacatgaagaagcattggaggtggattctctgatcaagtctttgattccaaacaacattcataatctgcaggtttctaacaaccggttgagatcctacttacttcctaaaggcaaaactttcagatatgaaactgctttgaaagactcccagaatgttaactcatgtattcaacatgtcacccagctagatgtctattcagaagacctatctgccctcagcggattatttgcgcaattgattcacgagccatgttttgataccttaagaacaaaagagcaattgggctacgttgtttttagttcgagtttgaacaatcacggtacagcgaacattaggatcttgattcagtcagaacataccacgccatatctagaatggagaataaacaatttttatgaaacttttggccaggttttgagggatatgccagaagaggactttgaaaaacacaaagaggcgttatgcaacagtctattgcaaaaattcaagaatatggccgaggaaagcgccagatacacagcagcaatttacttaggtgattacaatttcacacatcgtcaaaaaaaggctaagctcgttgctaacattacaaagcagcaaatgatagatttttatgagaattatataatgagcgagaacgcatcgaagttgattctacatttgaaatctcaagtggaaaacaaagagctcaatgaaaatgaattggacaccgctaagtatccaactggccagttgatcgaagatgtcggggcattcaagtcgacgctgtttgtagctcccgttcgtcaaccaatgaaagacttcgagatttccgcgcctcctaagctgaataatagttctgaatcagagtga

SEQ ID NO: 7948 - DNA, 3084 bp, Artificial Sequence
  Description of Artificial Sequence: Synthetic polynucleotide
atgggcgtatctcttttagcttcttcttctgcatttgtaactaaaccactcctcactcaattggttcacctctcccctatcagtctcaatttcaccgtaagacgcttcaagccattcacgtgcttatctcgctattacacaacaaatccttataatatgacatccaattttaagacattcaatttggactttttaaagccggatttagacgaaagatcttataggtttattgagcttcctaataagttgaaggctttattgatccaggacccaaaagcagataaagcagcagcgtctttggacgtcaatattggcgcctttgaagatccaaagaacttgcctggattggcgcatttctgcgagcatcttttattcatgggctctgagaaatttccagacgaaaacgaatactccagctatttaagcaagcacggtggttcttccaatgcctacacagcatctcaaaacacaaattatttttttgaggttaatcaccaacatttatttggtgcgttggacaggttttctgggtttttctcttgtcctcttttcaacaaggactctactgataaagagatcaacgccgttaacagcgaaaacaaaaagaacttacagaatgatatttggagaatttaccaattagacaagtctttgaccaatacaaaacatccatatcacaaattttctacaggaaacatcgaaactttgggcacattgccaaaggaaaatggattgaatgttagagatgaattattaaaattccataagaatttttactccgctaacttgatgaagttatgtattcttggtagagaagaccttgatactctctctgattggacttatgatctcttcaaggatgtagccaataacggtcgtgaagtacccctttatgcggaacctattatgcagcctgagcatttgcaaaaaataattcaagtccgtcctgtgaaagatttgaaaaaattagaaatctctttcactgtccctgatatggaggaacattgggagtccaagccaccgaggatattaagtcatttaatcggccatgaagggtccggttctttattggcacatttgaaaaaattgggctgggccaatgagctttctgctggtgggcatactgtgtccaaaggaaatgctttttttgctgtcgatatagatttaacagacaacgggttgacacactatcgcgatgttattgtcttgatcttccagtatattgaaatgttgaaaaactctttgcctcaaaaatggatattcaatgaattacaagatatctctaatgctaccttcaagtttaagcaagctggtagcccatcttccacagtttcttctttggcaaaatgcttggaaaaggattacattcctgttagcagaattttagccatgggtttgttaacgaaatatgaacctgatttgcttacccaatatacggacgctttggtcccggaaaattctcgtgttactttgatctccaggagtttagaaacagattctgctgaaaaatggtatggtactgcgtataaagtggtagattatccggcagatttaataaaaaacatgaaatctccaggtttgaaccctgctttgactttgccacgtccaaatgaattcgtttctacaaatttcaaggttgataaaattgacggtataaaaccattagatgaacctgttttgttattatccgatgacgtcagcaaattatggtacaagaaggacgacagattctggcaaccaagaggctacatttacttgtcttttaaacttccacatacgcatgcaagcatcattaatagtatgctttctacgttgtacactcagttggccaacgatgccttgaaagatgtacaatatgatgctgcttgtgccgatcttcgtatatctttcaataaaactaatcaaggcctcgccattaccgcgtctgggttcaacgaaaaattgatcattttattaacaaggtttttacaaggcgttaattctttcgaacctaagaaggatcgttttgagattttgaaagataagaccatacgtcacttgaaaaaccttttatatgaagttccttattctcaaatgagtaattactacaatgctataataaatgaacgttcttggtctactgcagaaaaattacaagtctttgaaaaattgacctttgaacaattgatcaacttcatacccaccatttacgaaggcgtttattttgaaactttaatccacggaaacataaaacatgaagaagcattggaggtggattctttgatcaagtctttgattccaaacaacattcataatttacaggtttctaacaacagattgagatcctacttacttcctaaaggcaaaactttcagatatgaaactgctttgaaagactcccagaatgttaactcttgtattcaacatgtcacccagttagatgtctattctgaagacttgtctgccctcagcggattatttgcgcaattgattcacgagccatgttttgataccttaagaacaaaagagcaattgggctacgttgtttttagtagtagtttgaacaatcacggtacagcgaacattaggatcttgattcagtctgaacataccacgccatatttggaatggagaataaacaatttttatgaaacttttggccaggttttgagggatatgccagaagaggactttgaaaaacacaaagaggcgttatgcaacagtttattgcaaaaattcaagaatatggccgaggaaagcgccagatacacagcagcaatttacttaggtgattacaatttcacacatcgtcaaaaaaaggctaagctcgttgctaacattacaaagcagcaaatgatagatttttatgagaattatataatgagcgagaacgcatccaagttgattttgcatttgaaatctcaagtggaaaacaaagagctcaatgaaaatgaattggacaccgctaagtatccaactggccagttgatcgaagatgtcggggcattcaagtctacgttgtttgtagctcccgttcgtcaaccaatgaaagacttcgagatttccgcgcctcctaagttgaataatagttctgaaagtgagtga

SEQ ID NO: 7949 - DNA, 339 bp, Saccharomyces cerevisiae
atggattggctgaaaaatacaacaattgtagtgttattcagtcattcaactgacaaaagtaacaaacacaagaaacgtcaagtccagtgcaatatgcgaaagaacactttagatatggtcactataggtatcgcatgccttgtgggagtctacacgggcacgagatttttcgagcccattgttatcgatagattgcgtaaggatggaaacttgagaacggacattcccatcccagaatacgacgaggacggaaatctgttaaaggtcacgccgtctttatcatccacaccagctgcaccacctacaccacctacacctcctactccaccacaacagtaa

SEQ ID NO: 7950 - DNA, 339 bp, Artificial Sequence
  Description of Artificial Sequence: Synthetic polynucleotide
atggattggttgaaaaatacaacaattgtagtgttattcagtcattctactgacaaaagtaacaaacacaagaaacgtcaagtccagtgcaatatgagaaagaacactttagatatggtcactataggtatcgcatgccttgtgggagtctacacgggcacgagatttttcgagcccattgttatcgatagattgcgtaaggatggaaacttgagaacggacattcccatcccagaatacgacgaggacggaaatttattaaaggtcacgccgtctttatcttccacaccagctgcaccacctacaccacctacacctcctactccaccacaacagtga

SEQ ID NO: 7951 - DNA, 717 bp, Saccharomyces cerevisiae
atgcgtgccaccactttattatcttcagtcgtttctttggcattgttgtcgaaggaagtcttagcaacacctccagcttgtttattggcctgtgttgcgcaagtcggcaaatcctcttccacatgtgactctttgaatcaagtcacctgttactgtgaacacgaaaactccgccgtcaagaaatgtctagactccatctgcccaaacaatgacgctgatgctgcttattctgctttcaagagttcttgttccgaacaaaatgcttcattgggcgattccagcagcagtgcctcctcatccgcttcttcatccagcaaggcctcttcttctaccaaggcttcttccagtagcgcttcctcctctaccaaggcttcttccagtagcgcttcctcctctactaaagcttcttccagcagcgctgccccatcttctagcaaggcttcttccaccgaatcctcttcttcctcttcttcttccaccaaggctccttccagtgaagaatcctcttccacttatgtctcttcgagcaagcaagcttcctccactagcgaggctcactcttccagtgctgcctcttcgaccgtgtcccaagaaacagtctcctctgctctaccaacttctaccgccgttatttctactttctctgaaggttctggtaatgttctagaggcaggaaaatccgttttcattgctgctgttgccgctatgttaatctaa

SEQ ID NO: 7952 - DNA, 717 bp, Artificial Sequence
  Description of Artificial Sequence: Synthetic polynucleotide
atgcgtgccaccactttattatcttctgtcgtttctttggcattgttgtccaaggaagtcttagcaacacctccagcttgtttattggcctgtgttgcgcaagtcggcaaatcctcttccacatgtgactctttgaatcaagtcacctgttactgtgaacacgaaaactccgccgtcaagaaatgtttggactccatctgcccaaacaatgacgctgatgctgcttattctgctttcaagagttcttgttccgaacaaaatgcttctttgggcgattccagcagcagtgcctcctcctccgcttcttcttccagcaaggcctcttcttctaccaaggcttcttccagtagcgcttcctcctctaccaaggcttcttccagtagcgcttcctcctctactaaagcttcttccagcagcgctgccccatcttctagcaaggcttcttccaccgaatcctcttcttcctcttcttcttccaccaaggctccttccagtgaagaatcctcttccacttatgtctcttctagcaagcaagcttcctccactagcgaggctcactcttccagtgctgcctcttccaccgtgtcccaagaaacagtctcctctgctttgccaacttctaccgccgttatttctactttctctgaaggttctggtaatgttttggaggcaggaaaatccgttttcattgctgctgttgccgctatgttaatctga

SEQ ID NO: 7953 - DNA, 1557 bp, Saccharomyces cerevisiae
atggctccaaaaatttcaatatccttaaacccaccgtacaacggggagttttatagctctaatgatcaaatgtcagggatagttagtcttcagttaacaaaagcgctatctataaggaaaatttccgtcattctaaaaggattctcagagaccttaacaaaaattgatcaagagtacatgtttcaacagaatggcatgatgatgccgggccaagacaacaaatcctttcatacattaatgaaattcgaacagagagttttccctccagataatgtatggaatgctcttgatggctcctccaagccgttcaaagttaaaccaggttcatataattatagctttcaatttgacaagtttcccagaaagcctgaatgtctgaaaaatcatacggcaaagacagtagcgtttgtgacaagaagtaatgcccgactcccacctacgttcaatagtcattggcaagaatttaataaaatcgataatctggatttgtatttttactcttttggaaaagttatatatatggtgcaagttcaattagagctagggaaatcttcatcttggtttaagccattccataaactgataagggaaatcgagacgttcgaatttatacctgagccaaaagatcttattatagaacctgatgaagatgacaatgaagaacttaatgccttcagtaacaatagtagaggaaatagtatggtcaccaacaatgaatttttcaatagttcaaatttaaaggtgccatcaaaggacgtcaaagtcgttaatggagtcggatatataaaaagtgacaggaacttttctcaagctaattctatattgatagaaaacggcgacattagatcgagaccggtatcatcagtcacatcaacaagacaatctactcgcctagtaaatggtatgaaagttttcccatctacttataaaatggggttgcctgatggggaaagcaatatgagaatagaggttagaagtcgagatttgaagcaaatatacaggaaagactacttgtttaggtctggcagccaaaattttgacaaggtctatgtagtcatggaggggaatatagcaagtttgagcaaaatgcaaattaccccacttaaactacaactgaacttgctagagactacaacatatttatctcagggaatagcgaacggcaattactcttctttgaagctaatcgagattgatttgaatcagctcaaatccaataaacctcttttggacttaaacgaaatacgagaaaattttgatggttctatgtttgaatgtgaattacggttaaaggatcaccccattttaagaaagttggtatttaatgaagaagactatagacatcgcggcaataggttgtatagtttcaagacatgcacgataaaaagaacattcagtttacagctactgatagaatggggaatcaatggaattaggaagcaatctgaagtaaacattgatcctgttcagatcttttgtcaagttagagagcacgttgaagctgaagctctgcccagatatgtaccgccaccgacatatactgaaatggcgagttaa

SEQ ID NO: 7954 - DNA, 1557 bp, Artificial Sequence
  Description of Artificial Sequence: Synthetic polynucleotide
atggctccaaaaatttctatatccttaaacccaccgtacaacggggagttttatagctctaatgatcaaatgagtgggatagttagtcttcagttaacaaaagcgctttctataaggaaaatttccgtcattttgaaaggattcagtgagaccttaacaaaaattgatcaagagtacatgtttcaacagaatggcatgatgatgccgggccaagacaacaaatcctttcatacattaatgaaattcgaacagagagttttccctccagataatgtatggaatgctcttgatggctcctccaagccgttcaaagttaaaccaggttcttataattatagctttcaatttgacaagtttcccagaaagcctgaatgtttgaaaaatcatacggcaaagacagtagcgtttgtgacaagaagtaatgccagactcccacctacgttcaatagtcattggcaagaatttaataaaatcgataatttggatttgtatttttactcttttggaaaagttatatatatggtgcaagttcaattagagttagggaaatcttcttcttggtttaagccattccataaattgataagggaaatcgagacgttcgaatttatacctgagccaaaagatcttattatagaacctgatgaagatgacaatgaagaacttaatgccttcagtaacaatagtagaggaaatagtatggtcaccaacaatgaatttttcaatagtagtaatttaaaggtgccatctaaggacgtcaaagtcgttaatggagtcggatatataaaaagtgacaggaacttttctcaagctaattctatattgatagaaaacggcgacattagatctagaccggtatcttctgtcacatctacaagacaatctactcgcttggtaaatggtatgaaagttttcccatctacttataaaatggggttgcctgatggggaaagcaatatgagaatagaggttagaagtagagatttgaagcaaatatacaggaaagactacttgtttaggtctggcagccaaaattttgacaaggtctatgtagtcatggaggggaatatagcaagtttgagcaaaatgcaaattaccccacttaaattacaattgaacttgttggagactacaacatatttatctcagggaatagcgaacggcaattactcttctttgaagttaatcgagattgatttgaatcagctcaaatccaataaacctcttttggacttaaacgaaataagagaaaattttgatggttctatgtttgaatgtgaattaagattaaaggatcaccccattttaagaaagttggtatttaatgaagaagactatagacatcgcggcaataggttgtatagtttcaagacatgcacgataaaaagaacattcagtttacagttattgatagaatggggaatcaatggaattaggaagcaatctgaagtaaacattgatcctgttcagatcttttgtcaagttagagagcacgttgaagctgaagctcttcccagatatgtaccgccaccgacatatactgaaatggcgagttga

SEQ ID NO: 7955 - DNA, 840 bp, Saccharomyces cerevisiae
atgcagggcacttttaaaaggttttaccatcccacgcttacgcggatgtccttcttggataaattcctcaagcctatgatggcaacggcttccccaaaggaataccagatcaaacaactggtcaagccaataggcttaacacaagcaccaaggaaaagcaccaaatactcccaggggaactctttgagggatatgtttgattcggaaaagacaaaccacagagttaaagagttggccgttgaattcagcaaatctggactttatgacgtgcaagtcttccaaaagacaaaggggaaattgtttatagctccagtttcatattggaaagaagataaagctttgttttttcctcatttgataggaacggcaatggatggtacgaaacaacagaatatcgaggatatgttaaggggtaaaaccagtatagtgaggttatttagtacagcatctggcgataagttgagtagttcatacttccaaggaatcgtagacgataacaaaaaaactgactacttgactgaagctgatgcgcgtttaagtttaaatgacagtaacgtccaaatcatcgaggtcaatcttgtagaaaacgctgtgaaaagtgctctagtgaaaacgcttgctcgttgggccaatcgcgttccatcctggcgccagccattttatttcgaatgttctagaggccaatggccattttccgtcagggaagagctcttttgcaataatgtcttttctggatacgtctttcttgtggaccagcagttaaaaattaggtgggcagcttgcggggaggctactccatctgaaaaggaagcattgtggaagtttgccaaacgtctgtga

SEQ ID NO: 7956 - DNA, 840 bp, Artificial Sequence
  Description of Artificial Sequence: Synthetic polynucleotide
atgcagggcacttttaaaaggttttaccatcccacgcttacgagaatgtccttcttggataaattcctcaagcctatgatggcaacggcttccccaaaggaataccagatcaaacaattggtcaagccaataggcttaacacaagcaccaaggaaaagcaccaaatactcccaggggaactctttgagggatatgtttgattctgaaaagacaaaccacagagttaaagagttggccgttgaattcagcaaatctggactttatgacgtgcaagtcttccaaaagacaaaggggaaattgtttatagctccagtttcttattggaaagaagataaagctttgttttttcctcatttgataggaacggcaatggatggtacgaaacaacagaatatcgaggatatgttaaggggtaaaaccagtatagtgaggttatttagtacagcatctggcgataagttgagtagtagttacttccaaggaatcgtagacgataacaaaaaaactgactacttgactgaagctgatgcgcgtttaagtttaaatgacagtaacgtccaaatcatcgaggtcaatcttgtagaaaacgctgtgaaaagtgctttggtgaaaacgcttgctcgttgggccaatcgcgttccatcctggcgccagccattttatttcgaatgttctagaggccaatggccattttccgtcagggaagagctcttttgcaataatgtcttttctggatacgtctttcttgtggaccagcagttaaaaattaggtgggcagcttgcggggaggctactccatctgaaaaggaagcattgtggaagtttgccaaacgtttatga

SEQ ID NO: 7957 - DNA, 1449 bp, Saccharomyces cerevisiae
atgggcggctatttggcgatcgtgttcattccccaaactaacacgaagagcatgagagagaaaaaacaaaagtgcttgaaacaggtaagacgtttatcattgatatcaccaaagaaatatataatgccggattctatttttgaacagccctttgtttactgtggtgtttgccacagaagaacatcgcatggagatccattgaggctgacctcatgtgctcatatcctctgttcgcagcattctccattaacatcaaaggtgtgtcctatatgccgttcgagcgatatctccatcattaaccttgtggaatctaaacagctgcctaccgacattaggattttttttgagccactgcccccacttttggagtcgttatataatgtttcccaattccaactgaatgggctttcgaaacagtgtcaatactatcaaaatcattgtttaaagttgagagaaaaatgtgcaagacaacagcagctgctatatcaggccaaaatagagttggattctatggcgattcttaagaaaagaatacaggaattagagtcagttttgaatcataacaatgtttcttcgatgtcagttggtgtgctaccaacaagaaatagccatcaaaatcattaccagccccctccaaccgttgatctgacagttgatgataatagtttagaagaattcgaagccaaatcctttattaaaaagttgaaaaaaaactcttctttgagaaattcttcaaaaaataacaatggaactgtcactccctctacaagtggtcgtgtaaataaaaaccagcctctctttatggagacattgaataatcctaatagaaatagcattcctcctcctggaatgaacccaaacgcaaatagtaatctacctaatatttcgactattgcagaatcaaccaatctgaacagattttcgttctctcctgtgcgtgttgcaaaaggcttcgatggaaagttgccaaatcttgacatcctcacgaataatggctctgtatcttccaaaaatatatcaagattatcttcagcttctctccaaccctcttcgcctctatcttcatcatcaaataggcttattttaccaaatagtaacctcaaagaattgcatcattcaaatacacctttaacaagtacctcgacgcagtttccctcagctttagaaaaattaaaaataacaaggaagagaaataatactatcagcggttcgaatagaataacacacaacttgagctcacacgtaagaagcagtggtcttgccttttcatcttcatcgaactcattgcaacaaagtaaactgccgaaatcaaatatactaaagcggtccaattcaactcagcaactgactaatacacatttgaagagtgataatcatctgccacctcgctcaagtaatactgtgttgggtagtagcaagaaaaacaataagtttagaaggattaggtaa

SEQ ID NO: 7958 - DNA, 1449 bp, Artificial Sequence
  Description of Artificial Sequence: Synthetic polynucleotide
atgggcggctatttggcgatcgtgttcattccccaaactaacacgaagagcatgagagagaaaaaacaaaagtgcttgaaacaggtaagacgtttatctttgatatctccaaagaaatatataatgccggattctatttttgaacagccctttgtttactgtggtgtttgccacagaagaacatctcatggagatccattgaggttgacctcttgtgctcatatcctctgttctcagcattctccattaacatccaaggtgtgtcctatatgccgttccagcgatatctccatcattaaccttgtggaatctaaacagttgcctaccgacattaggattttttttgagccattgcccccacttttggagtctttatataatgtttcccaattccaattgaatgggctttctaaacagtgtcaatactatcaaaatcattgtttaaagttgagagaaaaatgtgcaagacaacagcagttgttatatcaggccaaaatagagttggattctatggcgattcttaagaaaagaatacaggaattagagtctgttttgaatcataacaatgtttcttctatgtctgttggtgtgttaccaacaagaaatagccatcaaaatcattaccagccccctccaaccgttgatttaacagttgatgataatagtttagaagaattcgaagccaaatcctttattaaaaagttgaaaaaaaactcttctttgagaaattcttctaaaaataacaatggaactgtcactccctctacaagtggtcgtgtaaataaaaaccagcctctctttatggagacattgaataatcctaatagaaatagcattcctcctcctggaatgaacccaaacgcaaatagtaatttacctaatatttctactattgcagaaagtaccaatttgaacagattttctttctctcctgtgcgtgttgcaaaaggcttcgatggaaagttgccaaatcttgacatcctcacgaataatggctctgtatcttccaaaaatatatctagattatcttctgcttctctccaaccctcttctcctttatcttcttcttccaataggcttattttaccaaatagtaacctcaaagaattgcatcattctaatacacctttaacaagtacctctacgcagtttccctctgctttagaaaaattaaaaataacaaggaagagaaataatactatcagcggtagtaatagaataacacacaacttgagctctcacgtaagaagcagtggtcttgccttttcttcttcttccaactctttgcaacaaagtaaattaccgaaatctaatatattgaagaggtccaattctactcagcaattgactaatacacatttgaagagtgataatcatttaccacctcgcagtagtaatactgtgttgggtagtagcaagaaaaacaataagtttagaaggattaggtga

SEQ ID NO: 7959 - DNA, 237 bp, Saccharomyces cerevisiae
atgttgtgccaacagatgattagaacgacagctaagagaagtagcaatatcatgaccagacctattatcatgaagaggtcagtacacttcaaagacggtgtgtatgaaaatatcccattcaaagtcaaaggaagaaagacaccttacgccttatctcatttcgggttcttcgctattggatttgctgttccatttgttgcctgctatgttcaattgaaaaagtcaggtgctttttaa

SEQ ID NO: 7960 - DNA, 237 bp, Artificial Sequence
  Description of Artificial Sequence: Synthetic polynucleotide
atgttgtgccaacagatgattagaacgacagctaagagaagtagcaatatcatgaccagacctattatcatgaagaggtctgtacacttcaaagacggtgtgtatgaaaatatcccattcaaagtcaaaggaagaaagacaccttacgccttatctcatttcgggttcttcgctattggatttgctgttccatttgttgcctgctatgttcaattgaaaaagtctggtgctttttga

SEQ ID NO: 7961 - DNA, 2076 bp, Saccharomyces cerevisiae
atgaatagattttggaatactaagaaattttcattaacaaatgccgatggactatgtgctaccttaaatgagatatctcaaaatgatgaagttcttgtggttcaaccaagtgtattgccagtactcaatagtttgctaactttccaagatttgactcaatcaactcctgtaaggaaaattacgttactcgatgatcagctaagtgacgatttaccgagtgccttaggcagcgttccgcaaatggatcttatttttcttattgatgtcagaacatctctccgactccctccacaactgcttgatgctgctcaaaagcacaatttatcatctttgcatataatatactgtcgatggaaaccgtctttccaaaatactttggaggatacagagcaatggcaaaaggatggtttcgatttgaattcaaaaaaaacacatttccctaacgtcattgaatctcagttaaaggagctatcgaacgaatataccctttacccttgggatctcttgcccttcccacagattgatgaaaatgttctattgactcattccctttataacatggaaaatgtaaacatgtattatcccaacttacgttctttgcagagtgccacagagtcaatactggttgatgatatggtcaattcgttgcagagcttgatttttgaaactaatagtatcataacaaatgttgtgtcgataggtaatctgtctaagagatgtagccatcttttgaagaaacgaatcgatgagcatcaaacagagaatgatttattcatcaagggtacgctttatggtgaacgaaccaactgtggactagaaatggacttgattatcttggaaaggaataccgatcctataacgccattgttgacacaacttacgtatgcaggaatactagatgatctatatgaattcaattctggcataaagataaaggagaaagacatgaacttcaattataaggaagataaaatatggaatgatttgaaatttttaaattttgggtcgattgggccgcagttaaataaattggcaaaggaactacaaacgcaatatgatacaaggcataaagccgagagcgtacatgaaatcaaagaattcgttgattccttaggttctttgcaacaaaggcaagcttttttgaaaaatcacacaaccttatcatccgacgttttgaaagtggtagagactgaagagtacggatctttcaataaaatcttagagttagagctggaaattttgatgggaaatacacttaataacgacattgaagatattatactcgagttgcagtaccagtacgaggttgatcaaaagaagattctcagattaatctgtttattgtctctttgtaaaaattcacttcgagaaaaggattatgaatatctaagaacctttatgatcgactcttggggcattgaaaaatgctttcaacttgaatcattggctgagttaggatttttcactagcaaaacgggaaaaactgatttgcatattacaacaagtaagtcaacaagattacagaaagaataccgttatatttcacaatggttcaatacagtacccatagaagacgagcatgctgccgataaaatcacaaatgagaacgatgacttctcggaagccacttttgcttacagtggtgtagtgcccttgacaatgagactggttcagatgttatatgataggtctatcttgttccataattattcctcgcagcagccttttatactgtcaagagaacctagagtttctcaaacggaggatttaattgaacagttatatggagactcacatgcgatcgaagagagtatatgggtcccgggaaccattacaaaaaagatcaatgcaagcatcaagagcaataatagacggtccatagacggatctaatgggacatttcatgctgcagaggatattgcactcgtagtattcctcggaggtgtaacaatgggtgaaatagctataatgaagcatttgcaaaaaatactaggtaaaaaaggtatcaataaaaggtttatcatcatcgccgatggcttgatcaatggcacaaggatcatgaactctatatcttaa

SEQ ID NO: 7962 - DNA, 2076 bp, Artificial Sequence
  Description of Artificial Sequence: Synthetic polynucleotide
atgaatagattttggaatactaagaaattttctttaacaaatgccgatggattatgtgctaccttaaatgagatatctcaaaatgatgaagttcttgtggttcaaccaagtgtattgccagtactcaatagtttgttgactttccaagatttgactcaatctactcctgtaaggaaaattacgttactcgatgatcagttgagtgacgatttaccgagtgccttaggcagcgttccgcaaatggatcttatttttcttattgatgtcagaacatctctccgtctccctccacaattacttgatgctgctcaaaagcacaatttatcttctttgcatataatatactgtcgttggaaaccgtctttccaaaatactttggaggatacagagcaatggcaaaaggatggtttcgatttgaattctaaaaaaacacatttccctaacgtcattgaatctcagttaaaggagttatctaacgaatataccctttacccttgggatctcttgcccttcccacagattgatgaaaatgttttattgactcattccctttataacatggaaaatgtaaacatgtattatcccaacttacgttctttgcagagtgccacagagagtatattagttgatgatatggtcaattctttgcagagcttgatttttgaaactaatagtatcataacaaatgttgtgtctataggtaatttatctaagagatgtagccatcttttgaagaaaagaatcgatgagcatcaaacagagaatgatttattcatcaagggtacgctttatggtgaaagaaccaactgtggattagaaatggacttgattatcttggaaaggaataccgatcctataacgccattgttgacacaacttacgtatgcaggaatattggatgatttatatgaattcaattctggcataaagataaaggagaaagacatgaacttcaattataaggaagataaaatatggaatgatttgaaatttttaaattttgggtctattgggccgcagttaaataaattggcaaaggaattacaaacgcaatatgatacaaggcataaagccgagagcgtacatgaaatcaaagaattcgttgattccttaggttctttgcaacaaaggcaagcttttttgaaaaatcacacaaccttatcttccgacgttttgaaagtggtagagactgaagagtacggatctttcaataaaatcttagagttagagttagaaattttgatgggaaatacacttaataacgacattgaagatattatactcgagttgcagtaccagtacgaggttgatcaaaagaagattctcagattaatctgtttattgtctctttgtaaaaattctcttagagaaaaggattatgaatatttaagaacctttatgatcgactcttggggcattgaaaaatgctttcaacttgaatctttggctgagttaggatttttcactagcaaaacgggaaaaactgatttgcatattacaacaagtaagagtacaagattacagaaagaataccgttatatttctcaatggttcaatacagtacccatagaagacgagcatgctgccgataaaatcacaaatgagaacgatgacttctctgaagccacttttgcttacagtggtgtagtgcccttgacaatgagattggttcagatgttatatgataggtctatcttgttccataattattcctctcagcagccttttatattatctagagaacctagagtttctcaaacggaggatttaattgaacagttatatggagactctcatgcgatcgaagagagtatatgggtcccgggaaccattacaaaaaagatcaatgcaagcatcaagagcaataatagaagatccatagacggatctaatgggacatttcatgctgcagaggatattgcactcgtagtattcctcggaggtgtaacaatgggtgaaatagctataatgaagcatttgcaaaaaatattaggtaaaaaaggtatcaataaaaggtttatcatcatcgccgatggcttgatcaatggcacaaggatcatgaactctatatcttga

SEQ ID NO: 7963 - DNA, 2343 bp, Saccharomyces cerevisiae
atggctcctaaatctagttcttccggttccaaaaagaaatcatcggcaagttctaatagtgctgatgcaaaagcatccaaatttaaattgcctgctgaatttattaccagaccacatccttctaaagatcatggcaaggaaacatgcacagcatatattcatcctaacgtattatcctcgcttgagataaatccgggatcattttgtactgtcggtaagataggcgaaaatggtattttagtaatagctagagcgggtgatgaagaagtacatcctgttaatgttatcaccctttccacaactatacgatctgttgggaaccttatccttggtgatcgtctagaattaaagaaagcccaggtgcaaccaccttatgccactaaggttaccgtggggtccttacaaggatataatattttggaatgtatggaggaaaaagtaattcaaaagctactggatgatagtggcgttataatgcctggaatgatttttcaaaacttaaaaacaaaagcaggtgatgaaagcattgatgtcgtaattacagatgcgagcgatgattcgcttcccgacgtcagccaactagatcttaacatggacgatatgtacggtggattagataacctgttttatctatctccaccttttatattcagaaaaggctccacacatataactttttcgaaagaaacccaggcaaatcgtaaatacaatcttccggagcccttatcctatgcagcagtgggcggcttagacaaggagattgaatcactgaaaagtgctattgaaatacctcttcatcaaccgacgctatttagtagctttggtgtttctccccctcgaggtatacttcttcacggacccccaggtactggtaaaactatgcttttgagagttgtagcaaatacgtccaacgcacacgtcctaaccattaatggcccctcaatcgtctccaaatatcttggtgaaacggaagcggcattaagagatatttttaatgaagcaaggaagtaccagccttccattattttcattgacgaaattgattcaatagcaccaaatagagcaaacgatgactccggtgaagttgagagcagagtcgtggctacattgcttaccctaatggatggcatgggcgctgcaggtaaagtggtggtaattgctgctacaaacaggcctaattctgtcgaccctgctctcaggagacctggcaggtttgaccaagaagtagaaattggtataccagacgttgatgccagatttgacattttaactaagcaattctcaagaatgtcctcggatcgtcacgtattagattctgaagcgatcaagtacattgcttctaaaacgcatggctatgttggtgctgatttaactgctctctgcagagaatcagttatgaagacgatacaacgaggactaggaacagacgccaatattgacaagttttccctaaaagttacattgaaagatgtggagagcgccatggttgatatcagacccagcgcaatgagagaaatcttcttagaaatgccaaaagtttattggtctgacattggcggccaagaagagcttaaaacaaagatgaaagaaatgatacagttgcctttggaggcttcggagacttttgccaggctgggaatttctgcaccaaaaggtgtattactttacgggccgccaggttgctccaagacattaaccgcaaaagctctcgctacagaatcgggtatcaacttcttagctgtgaaagggcctgaaatttttaacaagtatgtaggggaatccgaaagagctataagagaaattttccgcaaagcacgctctgcagctccaagtattatcttctttgatgaaatcgatgcattatctcctgatagagacgggagttccacctctgcagctaatcacgtgctcacatctttactcaatgagattgatggtgttgaagagttaaagggtgtagttattgtagcggcgacgaatagacctgatgaaatagatgctgctcttctaaggcctggtaggttagatagacacatttacgttggccctccagacgtaaacgcccgcttggaaatcttaaagaagtgcacaaagaaatttaatacagaagagtctggagtcgatcttcatgaattggcagaccgtacagaaggttattccggagctgaagttgtgctgctttgtcaagaagcgggcttggctgccataatggaagatttagatgtcgcaaaagtggaattacgtcattttgagaaagcttttaaaggaattgctaggggcattactccagaaatgctctcttattatgaagagtttgctctaagaagcggttcatcttcgtaa

SEQ ID NO: 7964 - DNA, 2343 bp, Artificial Sequence
  Description of Artificial Sequence: Synthetic polynucleotide
atggctcctaaatctagttcttccggttccaaaaagaaaagcagcgcaagttctaatagtgctgatgcaaaagcatccaaatttaaattgcctgctgaatttattaccagaccacatccttctaaagatcatggcaaggaaacatgcacagcatatattcatcctaacgtattatcctctcttgagataaatccgggaagtttttgtactgtcggtaagataggcgaaaatggtattttagtaatagctagagcgggtgatgaagaagtacatcctgttaatgttatcaccctttccacaactataagatctgttgggaaccttatccttggtgatcgtttagaattaaagaaagcccaggtgcaaccaccttatgccactaaggttaccgtggggtccttacaaggatataatattttggaatgtatggaggaaaaagtaattcaaaagttattagatgatagtggcgttataatgcctggaatgatttttcaaaacttaaaaacaaaagcaggtgatgaaagcattgatgtcgtaattacagatgcgagcgatgattctcttcccgacgtcagccaattggatcttaacatggacgatatgtacggtggattagataacttgttttatttatctccaccttttatattcagaaaaggctccacacatataactttttccaaagaaacccaggcaaatcgtaaatacaatcttccggagcccttatcctatgcagcagtgggcggcttagacaaggagattgaatctttgaaaagtgctattgaaatacctcttcatcaaccgacgttgtttagtagctttggtgtttctccccctcgtggtatacttcttcacggacccccaggtactggtaaaactatgcttttgagagttgtagcaaatacgtccaacgcacacgtcttgaccattaatggcccctccatcgtctccaaatatcttggtgaaacggaagcggcattaagagatatttttaatgaagcaaggaagtaccagccttccattattttcattgacgaaattgattctatagcaccaaatagagcaaacgatgactccggtgaagttgagagcagagtcgtggctacattgcttaccttgatggatggcatgggcgctgcaggtaaagtggtggtaattgctgctacaaacaggcctaattctgtcgaccctgctctcaggagacctggcaggtttgaccaagaagtagaaattggtataccagacgttgatgccagatttgacattttaactaagcaattcagtagaatgtccagtgatcgtcacgtattagattctgaagcgatcaagtacattgcttctaaaacgcatggctatgttggtgctgatttaactgctctctgcagagaatctgttatgaagacgatacaaagaggacttggaacagacgccaatattgacaagttttccttgaaagttacattgaaagatgtggagagcgccatggttgatatcagacccagcgcaatgagagaaatcttcttagaaatgccaaaagtttattggtctgacattggcggccaagaagagcttaaaacaaagatgaaagaaatgatacagttgcctttggaggcttctgagacttttgccaggttaggaatttctgcaccaaaaggtgtattactttacgggccgccaggttgctccaagacattaaccgcaaaagctctcgctacagaaagtggtatcaacttcttagctgtgaaagggcctgaaatttttaacaagtatgtaggggaatccgaaagagctataagagaaattttccgcaaagcacgctctgcagctccaagtattatcttctttgatgaaatcgatgcattatctcctgatagagacgggagttccacctctgcagctaatcacgtgctcacatctttactcaatgagattgatggtgttgaagagttaaagggtgtagttattgtagcggcgacgaatagacctgatgaaatagatgctgctcttttgaggcctggtaggttagatagacacatttacgttggccctccagacgtaaacgcccgcttggaaatcttaaagaagtgcacaaagaaatttaatacagaagagtctggagtcgatcttcatgaattggcagaccgtacagaaggttattccggagctgaagttgtgttgctttgtcaagaagcgggcttggctgccataatggaagatttagatgtcgcaaaagtggaattacgtcattttgagaaagcttttaaaggaattgctaggggcattactccagaaatgctctcttattatgaagagtttgctttgagaagcggttcttcttcttga

SEQ ID NO: 7965 - DNA, 3864 bp, Saccharomyces cerevisiae
atgtctgagggattcagtagcagttccatacaggaattatatcaatcgttaaaagaaatcactaacaacgcagacgtagagcttttcgaagatcgcattactaaattagattttgagagcaccgatgaaccaaagcatgcaaatgatatcataaaggatagatttttgagaccttctaatgctcttccttggagcttgttggacatggtccaagacgttccacatacgtcttctccagaagattgctctggtaaactagattacaaggaattgctgaaagtcccggacccaattaatagaacatcataccagtttaaaagaactgggttagaaggtaaaatttcaggctacaaagaagaggttgatttgaaggaagttgcaaatgccaatgcatcaaattcactgtcgattacgagaagtatcaaccataaccaaaactcagtaaggggttctacagcgcaattgcctttcacaccaggcggaattcccatgaaatctgtcaagacagattcagaacaaaatggatcttctacaatggccaacgctactaaattgttacacaaggatggtcaaggtttattcgatattccagagggtatgaatagaggcattaagccgatggattctccagctgaaaatgaggatcaaaacggacagttcaaagaattgaaacagctaaatgagatagataatgaattagacataaggattgaggcgaacgaggcaaagttaaaagaggaggaaaaatctgccaagtcaatttctgaagaaattatggaggaagccactgaagaaacgactgccgataatgctgatgatgccgaaatcgatgaactattaccaattggaatagactttggcagaactaaaccagtttcgaaaagtgttcctgttaaaaaggaatgggcccatgttgttgatttgaaccataagatcgaaaatttcgatgagttgattccaaaccccgctagatcgtggccttttgaattggatacatttcaaaaggaagccgtctatcatctcgaacaaggtgattccgtatttgttgccgcccacacatctgctggtaaaactgttgttgcagaatacgcaattgccatggcacatagaaacatgactaaaactatatatacatcacccattaaagccttatccaatcaaaaattccgagactttaaagaaacttttgacgatgttaatattgggttgattactggtgatgtgcaaattaatccggatgctaactgtttgattatgacgaccgaaattttaagatcaatgctttatagaggtgccgatttgatcagagatgtagagtttgtcattttcgatgaagttcactacgttaatgatcaagaccgtggtgttgtctgggaagaagttattattatgcttccacagcatgtcaagtttatcttattatctgccaccgttcctaacacttatgagtttgctaattggattggaagaactaagcaaaaaaatatttatgtcatttccacaccaaaaagacccgttccattggaaataaatatatgggctaaaaaggaactgataccggttattaatcaaaattcagaatttttagaagctaatttcaggaaacataaagagattctaaatggggagagtgcaaaaggggctccttcaaaaactgacaacgggagaggtggatccacagcaagagggggccgtggtggatccaatactcgagatggaagaggaggccgtggtaattcaacacgtggaggtgccaaccgtggaggttcaagaggtgctggcgcaattggctccaacaagcgtaagtttttcactcaagatggtccttcgaaaaaaacatggcccgaaattgtcaattacctaaggaaaagagagcttctaccaatggttgttttcgtatttagtaaaaagaggtgcgaggaatatgctgactggttggagggaattaacttctgcaacaataaggaaaaatcacaaatccacatgtttattgagaagtcgattactcgtttgaaaaaagaggatagagatttgcctcaaattcttaaaaccagatcattacttgaacgtggtatagctgttcatcatggggggctattgcccattgtcaaggagttgatcgaaatattattttccaagggttttatcaaagttttatttgcaacagaaacttttgccatgggtttgaaccttcccacaagaacagttatctttagcagcatccgtaaacatgatggtaatggattaagagaactgactccaggtgagtttacccaaatggctggtagagctggtagaaggggcttggattccactggtacagtcattgtgatggcatataatagtcctttatctattgctacgttcaaagaagtaacgatgggtgttccgacgaggttgcagtctcagtttagattaacatacaatatgatattaaatcttttaagaattgaggcgttgagagttgaagaaatgatcaagtattcttttagtgagaatgccaaagaaactttacaacctgaacatgaaaaacaaatcaaagtattacaagaggaattacaaaccatagagtacaaaagttgtgaaatctgtgataatgatatcgaaaagtttttggaattgatgctggcatataaggaggcaacagtcaacctaatgcaagaaatggttaaatcgccttcgatattgcatatcttgaaagagggcagactcgttgcttttagggaccccaatgattgcttgaaattaggatttgtatttaaagtttctctgaaggatgctgtttgtgtcattatgacgttcacaaaaccatacaaactcccaaatggtgagccaaatcatttaatatactttccaaaagcggatggatacagaagaaggaacttccctaaattccagaagactgatttttatatggaagaagttcctgtgacggctattgaagtgatcactaaacgcaagtttgccgcacccttgggaaaagtgattaaaaaggatgttgccgctttgaacgagtttaacgctgaaacaaataacattttggacggcaaaacgctaaaagaagcaattaacattgaaaagcaaggtttaaaaattcaccaaatattgttagaccgtacaaatataagggatgagatattcaaactaaaaagcattaaatgtcccaacctaagccaacacattgttcccaagtttaaggcgcatgtaattaaaaagaaaattgaagaattgtaccatttgatgtctgaccaaaatctgagcttactacccgattatgaaaagagattggctgttctgaaagacactgaatttatcgaccaaaaccacaacgtgctgttaaaaggtagagtggcatgtgaaattaattctggttatgagttagttttaactgaattaattttagacaactttttaggaagctttgaacctgaagagattgtagccttattatcagtatttgtttatgaggggaaaaccagggaagaggagcctcctattgtcacaccaaggctagcaaagggtaaacaaagaattgaggaaatttacaagaaaatgctttgtgttttcaatacgcatcagattccattaactcaggatgaagctgagtttttggacagaaaaaggtttgccatgatgaatgtggtgtatgagtgggcccgtggtttatcattcaaagaaatcatggaaatgagccccgaggctgaaggtactgtagtcagagttatcacttggctagacgaaatttgccgcgaagttaagactgcctctattattattggtaattccacattacatatgaagatgagcagggctcaagagttgattaagagagatattgttttcgccgcaagtttgtatttatag

SEQ ID NO: 7966 - DNA, 3864 bp, Artificial Sequence
  Description of Artificial Sequence: Synthetic polynucleotide
atgtctgagggattcagtagcagttccatacaggaattatatcaatctttaaaagaaatcactaacaacgcagacgtagagcttttcgaagatcgcattactaaattagattttgagagcaccgatgaaccaaagcatgcaaatgatatcataaaggatagatttttgagaccttctaatgctcttccttggagcttgttggacatggtccaagacgttccacatacgtcttctccagaagattgctctggtaaattggattacaaggaattgttgaaagtcccggacccaattaatagaacatcttaccagtttaaaagaactgggttagaaggtaaaatttctggctacaaagaagaggttgatttgaaggaagttgcaaatgccaatgcatctaattctttatccattacgagaagtatcaaccataaccaaaactctgtaaggggttctacagcgcaattgcctttcacaccaggcggaattcccatgaaatctgtcaagacagattctgaacaaaatggatcttctacaatggccaacgctactaaattgttacacaaggatggtcaaggtttattcgatattccagagggtatgaatagaggcattaagccgatggattctccagctgaaaatgaggatcaaaacggacagttcaaagaattgaaacagttgaatgagatagataatgaattagacataaggattgaggcgaacgaggcaaagttaaaagaggaggaaaaatctgccaagtctatttctgaagaaattatggaggaagccactgaagaaacgactgccgataatgctgatgatgccgaaatcgatgaattattaccaattggaatagactttggcagaactaaaccagtttccaaaagtgttcctgttaaaaaggaatgggcccatgttgttgatttgaaccataagatcgaaaatttcgatgagttgattccaaaccccgctagaagttggccttttgaattggatacatttcaaaaggaagccgtctatcatctcgaacaaggtgattccgtatttgttgccgcccacacatctgctggtaaaactgttgttgcagaatacgcaattgccatggcacatagaaacatgactaaaactatatatacatctcccattaaagccttatccaatcaaaaattcagggactttaaagaaacttttgacgatgttaatattgggttgattactggtgatgtgcaaattaatccggatgctaactgtttgattatgacgaccgaaattttaagaagtatgctttatagaggtgccgatttgatcagagatgtagagtttgtcattttcgatgaagttcactacgttaatgatcaagaccgtggtgttgtctgggaagaagttattattatgcttccacagcatgtcaagtttatcttattatctgccaccgttcctaacacttatgagtttgctaattggattggaagaactaagcaaaaaaatatttatgtcatttccacaccaaaaagacccgttccattggaaataaatatatgggctaaaaaggaattgataccggttattaatcaaaattctgaatttttagaagctaatttcaggaaacataaagagattttgaatggggagagtgcaaaaggggctccttccaaaactgacaacgggagaggtggatccacagcaagagggggccgtggtggatccaatactagagatggaagaggaggccgtggtaattctacacgtggaggtgccaaccgtggaggttccagaggtgctggcgcaattggctccaacaagcgtaagtttttcactcaagatggtccttccaaaaaaacatggcccgaaattgtcaattacttgaggaaaagagagcttttaccaatggttgttttcgtatttagtaaaaagaggtgcgaggaatatgctgactggttggagggaattaacttctgcaacaataaggaaaaatctcaaatccacatgtttattgagaagtctattactcgtttgaaaaaagaggatagagatttgcctcaaattcttaaaaccagatctttacttgaacgtggtatagctgttcatcatggggggttattgcccattgtcaaggagttgatcgaaatattattttccaagggttttatcaaagttttatttgcaacagaaacttttgccatgggtttgaaccttcccacaagaacagttatctttagcagcatccgtaaacatgatggtaatggattaagagaattgactccaggtgagtttacccaaatggctggtagagctggtagaaggggcttggattccactggtacagtcattgtgatggcatataatagtcctttatctattgctacgttcaaagaagtaacgatgggtgttccgacgaggttgcagtctcagtttagattaacatacaatatgatattaaatcttttaagaattgaggcgttgagagttgaagaaatgatcaagtattcttttagtgagaatgccaaagaaactttacaacctgaacatgaaaaacaaatcaaagtattacaagaggaattacaaaccatagagtacaaaagttgtgaaatctgtgataatgatatcgaaaagtttttggaattgatgttagcatataaggaggcaacagtcaacttgatgcaagaaatggttaaatctccttccatattgcatatcttgaaagagggcagactcgttgcttttagggaccccaatgattgcttgaaattaggatttgtatttaaagtttctttgaaggatgctgtttgtgtcattatgacgttcacaaaaccatacaaactcccaaatggtgagccaaatcatttaatatactttccaaaagcggatggatacagaagaaggaacttccctaaattccagaagactgatttttatatggaagaagttcctgtgacggctattgaagtgatcactaaacgcaagtttgccgcacccttgggaaaagtgattaaaaaggatgttgccgctttgaacgagtttaacgctgaaacaaataacattttggacggcaaaacgttgaaagaagcaattaacattgaaaagcaaggtttaaaaattcaccaaatattgttagaccgtacaaatataagggatgagatattcaaattgaaaagcattaaatgtcccaacttgagccaacacattgttcccaagtttaaggcgcatgtaattaaaaagaaaattgaagaattgtaccatttgatgtctgaccaaaatttgagcttattgcccgattatgaaaagagattggctgttttgaaagacactgaatttatcgaccaaaaccacaacgtgttattaaaaggtagagtggcatgtgaaattaattctggttatgagttagttttaactgaattaattttagacaactttttaggaagctttgaacctgaagagattgtagccttattaagtgtatttgtttatgaggggaaaaccagggaagaggagcctcctattgtcacaccaaggttagcaaagggtaaacaaagaattgaggaaatttacaagaaaatgctttgtgttttcaatacgcatcagattccattaactcaggatgaagctgagtttttggacagaaaaaggtttgccatgatgaatgtggtgtatgagtgggcccgtggtttatctttcaaagaaatcatggaaatgagccccgaggctgaaggtactgtagtcagagttatcacttggttagacgaaatttgccgcgaagttaagactgcctctattattattggtaattccacattacatatgaagatgagcagggctcaagagttgattaagagagatattgttttcgccgcaagtttgtatttatga

SEQ ID NO: 7967 - DNA, 2061 bp, Saccharomyces cerevisiae
atgaccgatatcacacccgtacagaacgatgtggatgtcaatggtaataatgtcaatgacgacgtttccagtaatctaaagaggcctatagatcaaggggatccttcgaatggactcgcagaagaagaaaaccccgccaataaccagttgcatctcaaaaaggctagactggatggagatgctctaacatcatcgcctgctggacttgcagagaacggtattgaaggcgccaccctggcggctaacggggaaaatgggtataacgccaccggaagtggcgcagaagacgaacagcaggggttgaagaaggaagaaggaggacaaggtaccaaacaagaggatttagatgaaaactcaaaacaagaacttccgatggaggttccaaaggaacctgcccctgctcctcctccagagcccgatatgaataatctccctcagaatccaataccaaagcaccagcagaaacatgcattgcttgcgattaaagctgtcaaacgcttgaaggatgcgagaccctttctacaacctgttgacccagtgaaattggatattcccttttactttaactacataaagaggccaatggacttgtctactatagagaggaagttgaacgtaggcgcttatgaagttccggagcaaatcacggaggatttcaatctcatggttaacaacagtattaaattcaacggtccaaatgcgggcatatcacaaatggcaagaaacatacaagcttctttcgagaaacatatgctaaatatgcctgctaaggatgctccacctgtaatagccaagggacggcggtctagtgcccaagaggatgccccaattgtaattagacgagcccaaactcataatgggaggccgaaaaggactatacatccgccgaaatcaaaggatatttatccttatgaatcgaagaaaccgaaatccaaaagactacaacaagcaatgaaattttgtcagagtgtgctaaaggaattgatggccaagaagcacgcctcttataactacccatttttggaaccagtagacccagtttctatgaatttgccgacttatttcgattatgttaaagagccaatggatttaggcacaatcgccaagaaattaaatgactggcagtatcaaacaatggaggattttgagagagacgtgaggttggtctttaaaaactgctacacgttcaatccggatggcacgatcgttaatatgatgggtcatcgtctagaggaagttttcaattccaaatgggcggataggcctaatttggatgactacgattccgatgaagattcgaggacccaaggcgactacgacgattatgaatctgagtattcagagtctgacatcgatgaaactataattacaaatccagccatccagtatttggaagaacaacttgctcggatgaaagtggagttgcaacaattaaaaaagcaagaactggaaaaaataagaaaagagaggcgcttagcacgtggatcaaagaaacgcggcaaaagatcgaagggaaggagtgggtctaagaacgcttcttcgaaaggaaggcgagataaaaagaataaattgaaaacagtagtgacatatgatatgaaacgtatcattacagagaggatcaatgatttaccaacttccaaattagaaagagcaatcgacataataaaaaaatccatgcccaatatttctgaagacgatgaagtagaacttgacctcgacactttagataatcacaccatcttaacattgtacaacactttctttagacaatatgaaagctcatccggtgcttctaacggtttggacggtacttcaggtgttacgcgagatgcttcgtccttgtcgcctacaagtgcgggaagcagaaagagaagatctaaggcattaagccaagaggagcagagtaggcagatagaaaagataaaaaataaactagctatcttagacagtgcttcacctctgagccaaaacggctccccaggccaaattcaaagcgctgcacacaacgggttttcctcatcttcagatgacgatgttagcagcgaaagtgaagaagagtga

SEQ ID NO: 7968 - DNA, 2061 bp, Artificial Sequence
  Description of Artificial Sequence: Synthetic polynucleotide
atgaccgatatcacacccgtacagaacgatgtggatgtcaatggtaataatgtcaatgacgacgtttccagtaatttgaagaggcctatagatcaaggggatccttccaatggactcgcagaagaagaaaaccccgccaataaccagttgcatctcaaaaaggctagattagatggagatgctttaacatcttctcctgctggacttgcagagaacggtattgaaggcgccaccttagcggctaacggggaaaatgggtataacgccaccggaagtggcgcagaagacgaacagcaggggttgaagaaggaagaaggaggacaaggtaccaaacaagaggatttagatgaaaactccaaacaagaacttccgatggaggttccaaaggaacctgcccctgctcctcctccagagcccgatatgaataatctccctcagaatccaataccaaagcaccagcagaaacatgcattgcttgcgattaaagctgtcaaacgcttgaaggatgcgagaccctttttgcaacctgttgacccagtgaaattggatattcccttttactttaactacataaagaggccaatggacttgtctactatagagaggaagttgaacgtaggcgcttatgaagttccggagcaaatcacggaggatttcaatctcatggttaacaacagtattaaattcaacggtccaaatgcgggcatatctcaaatggcaagaaacatacaagcttctttcgagaaacatatgttgaatatgcctgctaaggatgctccacctgtaatagccaagggaaggcgttctagtgcccaagaggatgccccaattgtaattagaagagcccaaactcataatgggaggccgaaaaggactatacatccgccgaaatccaaggatatttatccttatgaatccaagaaaccgaaatccaaaagattacaacaagcaatgaaattttgtcagagtgtgttgaaggaattgatggccaagaagcacgcctcttataactacccatttttggaaccagtagacccagtttctatgaatttgccgacttatttcgattatgttaaagagccaatggatttaggcacaatcgccaagaaattaaatgactggcagtatcaaacaatggaggattttgagagagacgtgaggttggtctttaaaaactgctacacgttcaatccggatggcacgatcgttaatatgatgggtcatcgtttagaggaagttttcaattccaaatgggcggataggcctaatttggatgactacgattccgatgaagatagtaggacccaaggcgactacgacgattatgaatctgagtattctgagtctgacatcgatgaaactataattacaaatccagccatccagtatttggaagaacaacttgctagaatgaaagtggagttgcaacaattaaaaaagcaagaattggaaaaaataagaaaagagaggcgcttagcacgtggatccaagaaacgcggcaaaagatccaagggaaggagtgggtctaagaacgcttcttctaaaggaaggagagataaaaagaataaattgaaaacagtagtgacatatgatatgaaacgtatcattacagagaggatcaatgatttaccaacttccaaattagaaagagcaatcgacataataaaaaaatccatgcccaatatttctgaagacgatgaagtagaacttgacctcgacactttagataatcacaccatcttaacattgtacaacactttctttagacaatatgaaagctcttccggtgcttctaacggtttggacggtacttctggtgttacgagggatgcttcttccttgtctcctacaagtgcgggaagcagaaagagaagatctaaggcattaagccaagaggagcagagtaggcagatagaaaagataaaaaataaattggctatcttagacagtgcttcccctttaagccaaaacggctccccaggccaaattcaaagcgctgcacacaacgggttttcctcttcttctgatgacgatgttagcagcgaaagtgaagaagagtga

SEQ ID NO: 7969 - DNA, 2007 bp, Saccharomyces cerevisiae
atggagcaaaacgctgaaaaacgctctattgttggcgacgacaactcaaccgtgaagagacaagacacttccccgtccaaaggtattgcacatatcaaaccagaatatattgtaccattgaagcagaatgaaaaccagaaggtcgccatctatgatgaagagatgtcttccgacagaatgacaaacgagtttgcaggtgggactaataagaaaaataagaacggaagaggtaagaagcgtgggcaaaacaagaatagagataacaggcaggtcaaggaacagaatgtcttgtgcccacgcttgatccatggcgatatatctaaatgctcctttggtgataactgtaggtttgttcacgatatcaatctgtacctttcaacaaaaaagcctgaagttgaaagtaatatatttccttcctgtccggtcttcaactcgttgggattttgccccatgggattcaaatgcagatttttatcgtctcatctgaataaagaagataatatcctaatatcgaagaaggagattgatccagatgcgcaaacaatatggtccgttaaaggtgaggtaaaccatatctcaccggaaagaaaactcgatcttataaaaagaagatttcctttcacaaaaagtaatgaaatattggaaatcatcgactctttccaacaagaatgtagagattccatgaagccagaagaagaagttgagtcaacgccacagctgaagaaacaagacccagatgtggaacaaccagttgccccccaagtcgaacagaggaacaaagaattgtcagaacatagaatgaaacagcgtgaagtatacttgaagtacaaggacactcgttattttgctcaagaaaaaaagccactggatttgtaccacaaaaaaatcgtgtcgccattgacaaccgtaggcaatttaccataccgtcgtctaatgagaaagttaggtgcagatgtgacatattcggaaatggccttggcagttcccttaattcaaggaactaattctgagtgggcgttacctaaagctcacacatcagagttccccgggttcggggttcaagtggcctgttctaaagcctggcaggcggcaaaggctgcagaagcactcgcaaactccgtcagtgaaataagtgaaatcaacttaaactctggctgccccatcgatttgctatacagacaaggttctggtagcgccctgctggataaccctgcaagaatgattcgttgtttaaacgcgatgaactacgtatcgaaagatattcctatcacggtgaagatcagaacaggtacaaaggaaggtcatcctatcgcggaagggttagtcaaaagactggttaacgaaactgatgtggctgcgattaccttacacggtaggtctaggcaacaaaggtacactaagtctgcggattgggactacgtgagtcaagtggctgacaccttgagatccgccgaagcggatttcatcgaaaccgaacaaggcaaagaaggcagggattccaagaacagaattcaatttgtcggaaatggtgatgtcaacaattttgaagactggtaccgctatttgaacggaaatgaaaatattgatagtgttatggttgctcgaggggccctgatcaaaccatggatttttgaagaggttgagtcgcagcagtatctagacaagacaagtacggaaagattagacattttaagggattatgcgcagttctctatggaacactggggcaccgacgaatacggcatttctcaatgtcgtagattcttctgcgagttcatgtccttttttcataggtatgtccccatgggtatttgtgaaagataccctgtgaagttgaatgagagaccgccaaactggtgtggaagagacgaacttgaaactctaatgggtagtacggatgttaatgattggatcaagctaagtgatctatttttcggtaaaaccgacgagaactttgtatttgtccccaaacataagagcagctcttatgcaaacagagattcctaa

SEQ ID NO: 7970 - DNA, 2007 bp, Artificial Sequence
  Description of Artificial Sequence: Synthetic polynucleotide
atggagcaaaacgctgaaaaacgctctattgttggcgacgacaactctaccgtgaagagacaagacacttccccgtccaaaggtattgcacatatcaaaccagaatatattgtaccattgaagcagaatgaaaaccagaaggtcgccatctatgatgaagagatgtcttccgacagaatgacaaacgagtttgcaggtgggactaataagaaaaataagaacggaagaggtaagaagcgtgggcaaaacaagaatagagataacaggcaggtcaaggaacagaatgtcttgtgcccacgcttgatccatggcgatatatctaaatgctcctttggtgataactgtaggtttgttcacgatatcaatctttacctttctacaaaaaagcctgaagttgaaagtaatatatttccttcctgtccggtcttcaactctttgggattttgccccatgggattcaaatgcagatttttatcttctcatttgaataaagaagataatatcttaatatccaagaaggagattgatccagatgcgcaaacaatatggtccgttaaaggtgaggtaaaccatatctctccggaaagaaaactcgatcttataaaaagaagatttcctttcacaaaaagtaatgaaatattggaaatcatcgactctttccaacaagaatgtagagattccatgaagccagaagaagaagttgagtctacgccacagttgaagaaacaagacccagatgtggaacaaccagttgccccccaagtcgaacagaggaacaaagaattgagtgaacatagaatgaaacagcgtgaagtatacttgaagtacaaggacactcgttattttgctcaagaaaaaaagccattagatttgtaccacaaaaaaatcgtgtctccattgacaaccgtaggcaatttaccataccgtcgtttaatgagaaagttaggtgcagatgtgacatattctgaaatggccttggcagttcccttaattcaaggaactaattctgagtgggcgttacctaaagctcacacaagtgagttccccgggttcggggttcaagtggcctgttctaaagcctggcaggcggcaaaggctgcagaagcactcgcaaactccgtcagtgaaataagtgaaatcaacttaaactctggctgccccatcgatttgttgtacagacaaggttctggtagcgccttattagataaccctgcaagaatgattcgttgtttaaacgcgatgaactacgtatccaaagatattcctatcacggtgaagatcagaacaggtacaaaggaaggtcatcctatcgcggaagggttagtcaaaagattggttaacgaaactgatgtggctgcgattaccttacacggtaggtctaggcaacaaaggtacactaagtctgcggattgggactacgtgagtcaagtggctgacaccttgagatccgccgaagcggatttcatcgaaaccgaacaaggcaaagaaggcagggattccaagaacagaattcaatttgtcggaaatggtgatgtcaacaattttgaagactggtaccgctatttgaacggaaatgaaaatattgatagtgttatggttgctagaggggccttgatcaaaccatggatttttgaagaggttgagagccagcagtatttggacaagacaagtacggaaagattagacattttaagggattatgcgcagttctctatggaacactggggcaccgacgaatacggcatttctcaatgtcgtagattcttctgcgagttcatgtccttttttcataggtatgtccccatgggtatttgtgaaagataccctgtgaagttgaatgagagaccgccaaactggtgtggaagagacgaacttgaaactttaatgggtagtacggatgttaatgattggatcaagttgagtgatttatttttcggtaaaaccgacgagaactttgtatttgtccccaaacataagagcagctcttatgcaaacagagattcctga

SEQ ID NO: 7971 - DNA, 2052 bp, Saccharomyces cerevisiae
atggattttacaacaatgactatggcaagcaatatggctactagtactactacgacggctacatcggcacatgcatctataaattcgtcatcaaactttaatattgatattgattcgaaccagaatactccttccattttgataaataacaattcggattcttctaatggaaaaaacacagattttaacggcgtcaataatattcaccaaaaaaatatcatgaataatacaaataatgttcatttgtactctccaaatataatggaccaaacgctactaactccacaggacattgccaagttacggagagaatcaatagcccattctcaagggatgggtggtgtttcatggggatccattagtgttggttcttggttaagagatgaaattattagccgtagaaatagtattgtacctgcatcagcaaacggtgctgcctccgctgccgcttctgcaaccactactgccactaatactttgcagattcaacaaccaactaagagaccctctgttagtaatccgccttaccatagagggtattctatttctcctcagatagcctacactgcttatctgccaaatctagaaaagcaatattgtaaagattattcatgctgtggtctttccttaccaggtttgcatgatttgctgagacattacgaagaagctcatatatccacgtctcctaacactaccaatatgtcacaaataccgatgaactctgctggtaacactagttcatcagttcgtatgacaaataatacctcttctgccaactataacctgcagaataacatggccgctaatacaaaaaatgcaggtcataagactaatactatgcaggctcatagcagcaatgcaactaataacacctccattaataatatgcatgccaatcttcagagcaacatggattccaactccacaatacgacaatctcagcatcctcaccatcagcagaatataatacaacaacagttgcaatcgaattctgtaaatcatacatcaggggctgtacccacaccgagtgtaatgggttcagcaactgcgtcgtccacaactgcaaatccaaatgtgatatctataacgggtgcccccaactcgggcttatctatggctaatcactctcaacaactacatctgaatggtaatctagtcgatgccgtttcaacgaatgatgtgtttttaagaacgagcaattctccatcaagacacgttccgcacaataaacaaattaacagtaacaataatagtggtatcaatatcaataataatacctcacacaattctaatattaacatgggtagtaaaaacgccatggtgaatcgtccacatacttttaataactattccttgaacaaaacgtccaggaatcctattcaacatcaatcaagaaaaattgatcctcatcaaaccgatttatcacctctggtacttgtccaagatatagatttaagttttatggatgatgatattttgggccctagtaaccacaattccatgaactctgtcgtaaatccaactacaggttctcacaactacaatacttttcattcttccgtacacgcaaaatcttctcaaaacatggtcgaggatcaagacattgatgacattgatgatgacgatgatgttgatgatgacgatgacgatgacgatgacgatgacacagaaaatggctccagttccaatggaaaatcagttcataacaacaattacaagatgcctcagcaagcttatatagacgatcctgcgagaaggctctatgtaatggatcatgaggaacaaaaaccctttaagtgtccagttattggttgtgaaaagacttataaaaaccaaaacggtttgaagtaccataggttgcacggacatcagaatcaaaaattacatgaaaaccctgacggtacatttagcgtaatagatccagattcgacagattcttttggtgatggaatgggctctgcaaaggataaaccataccgttgtgaagtttgtggtaagagatataagaacttgaacggtttaaaatatcacaggggccactccactcactaa

SEQ ID NO: 7972 - DNA, 2052 bp, Artificial Sequence
  Description of Artificial Sequence: Synthetic polynucleotide
atggattttacaacaatgactatggcaagcaatatggctactagtactactacgacggctacaagtgcacatgcatctataaattcttcttccaactttaatattgatattgattccaaccagaatactccttccattttgataaataacaattctgattcttctaatggaaaaaacacagattttaacggcgtcaataatattcaccaaaaaaatatcatgaataatacaaataatgttcatttgtactctccaaatataatggaccaaacgttattaactccacaggacattgccaagttaagaagagaaagtatagcccattctcaagggatgggtggtgtttcctggggatccattagtgttggttcttggttaagagatgaaattattagccgtagaaatagtattgtacctgcatctgcaaacggtgctgcctccgctgccgcttctgcaaccactactgccactaatactttgcagattcaacaaccaactaagagaccctctgttagtaatccgccttaccatagagggtattctatttctcctcagatagcctacactgcttatttaccaaatttggaaaagcaatattgtaaagattattcttgctgtggtctttccttaccaggtttgcatgatttgttaagacattacgaagaagctcatatatccacgtctcctaacactaccaatatgtctcaaataccgatgaactctgctggtaacactagttcttctgttcgtatgacaaataatacctcttctgccaactataacttacagaataacatggccgctaatacaaaaaatgcaggtcataagactaatactatgcaggctcatagcagcaatgcaactaataacacctccattaataatatgcatgccaatcttcagagcaacatggattccaactccacaataagacaatctcagcatcctcaccatcagcagaatataatacaacaacagttgcaaagcaattctgtaaatcatacatctggggctgtacccacaccgagtgtaatgggttctgcaactgcgtcttccacaactgcaaatccaaatgtgatatctataacgggtgcccccaacagtggcttatctatggctaatcactctcaacaattgcatttgaatggtaatttggtcgatgccgtttccacgaatgatgtgtttttaagaacgagcaattctccatctagacacgttccgcacaataaacaaattaacagtaacaataatagtggtatcaatatcaataataatacctctcacaattctaatattaacatgggtagtaaaaacgccatggtgaatcgtccacatacttttaataactattccttgaacaaaacgtccaggaatcctattcaacatcaatctagaaaaattgatcctcatcaaaccgatttatctcctttggtacttgtccaagatatagatttaagttttatggatgatgatattttgggccctagtaaccacaattccatgaactctgtcgtaaatccaactacaggttctcacaactacaatacttttcattcttccgtacacgcaaaatcttctcaaaacatggtcgaggatcaagacattgatgacattgatgatgacgatgatgttgatgatgacgatgacgatgacgatgacgatgacacagaaaatggctccagttccaatggaaaatctgttcataacaacaattacaagatgcctcagcaagcttatatagacgatcctgcgagaaggctctatgtaatggatcatgaggaacaaaaaccctttaagtgtccagttattggttgtgaaaagacttataaaaaccaaaacggtttgaagtaccataggttgcacggacatcagaatcaaaaattacatgaaaaccctgacggtacatttagcgtaatagatccagattctacagattcttttggtgatggaatgggctctgcaaaggataaaccataccgttgtgaagtttgtggtaagagatataagaacttgaacggtttaaaatatcacaggggccactccactcactga

SEQ ID NO: 7973 - DNA, 858 bp, Saccharomyces cerevisiae
atgaaaatcaatgtatcccgtccattacagtttttacaatggagttcatatattgttgttgcatttctgatacaattgctaatcattcttcctttatcgatcttaatatatcacgatttttacctaagactattacctgccgattcctctaacgtagtcccccttaatacgttcaacattttaaatggcgtacaatttggtacaaaattcttccaatctattaaaagcattccggtaggtacagatctgccgcaaacaatagacaatggcttatcacagttaatccccatgcgtgacaacatggaatacaagctcgatctaaacctacagctttattgccagagcaaaactgaccatttaaatttagacaatttgttaattgatgtttacagaggtccaggcccgctattgggtgctcctggaggaagtaacagcaaagatgaaaaaatctttcacacttctagacctattgtctgcctcgcactgacggattccatgtcgcctcaggagatcgaacaactaggcccatcacgtctagacgtttacgatgaagaatggctaaatacaataagaatagaggacaaaatatcgttagagtcttcatatgaaacaatctcggtgttcttgaaaacggagattgcccaaagaaatctaataatacatccagaaagtgggattaagtttaggatgaattttgagcagggattaagaaacttgatgcttcgaaaaagatttttatcttatattattggcatttcaattttccattgcataatatgtgtacttttttttatcacaggttgcactgcattcatttttgttagaaagggtcaggaaaaatccaagaaacatagctga

SEQ ID NO: 7974 - DNA, 858 bp, Artificial Sequence
  Description of Artificial Sequence: Synthetic polynucleotide
atgaaaatcaatgtatcccgtccattacagtttttacaatggagttcttatattgttgttgcatttttaatacaattgttgatcattcttcctttatctatcttaatatatcacgatttttacttgagattattacctgccgattcctctaacgtagtcccccttaatacgttcaacattttaaatggcgtacaatttggtacaaaattcttccaatctattaaaagcattccggtaggtacagatttaccgcaaacaatagacaatggcttatctcagttaatccccatgcgtgacaacatggaatacaagctcgatttgaacttacagctttattgccagagcaaaactgaccatttaaatttagacaatttgttaattgatgtttacagaggtccaggcccgttattgggtgctcctggaggaagtaacagcaaagatgaaaaaatctttcacacttctagacctattgtctgcctcgcattgacggattccatgtctcctcaggagatcgaacaattaggcccatctcgtttagacgtttacgatgaagaatggttaaatacaataagaatagaggacaaaatatctttagagtcttcttatgaaacaatcagtgtgttcttgaaaacggagattgcccaaagaaatttgataatacatccagaaagtgggattaagtttaggatgaattttgagcagggattaagaaacttgatgcttagaaaaagatttttatcttatattattggcatttccattttccattgcataatatgtgtacttttttttatcacaggttgcactgcattcatttttgttagaaagggtcaggaaaaatccaagaaacatagctga

SEQ ID NO: 7975 - DNA, 1104 bp, Saccharomyces cerevisiae
atgcacacaatgcatattccatccggtgatgttctgataccgaagccgaagcttattactgaagaaacagatccactgcatataataaagacgaggcaaaagacacatggtcggcccgtgaccattgcaggcccaatggttcggtattccaagttaccattccgtcagttgtgccgagaatataacgttgatatagtttactcccccatgattttggcaagagaatatgtccgtaatgagcatgcaagaatctcagacctttctacaaataatgaggacaccccgctaatcgtccaagtaggtgtaaataacgtggctgatttactaaaatttgtggaaatggttgccccatactgtgatggtattggtattaactgtggttgtcctataaaggaacaaatccgagagggcataggttgcgctctgatatacaattcagatttgttatgcagtatggtccatgctgtgaaagataagtatggcgacaaactaagaattgaaacgaaaataagaatacatgaggcattggacgagacggtggagttatgtagaaagctatgtgatgctggggtagattggattacgattcatggccgaacacgtagaactaggtcatcgcagccggctaacctggatgcgataaaatatatcatcgagaacatcagcgacaaaaatgtgcctgtaatagcgaatggggattgttttaagttatccgatttggaaagaatcaccaaatacactggtgcacatggtgtcatggctgtgcgtgggttgttaagcaatccagcgttatttgctggatatactacctgcccttggggctgcattgagaagttttgttattgggctctagagtttggtggcttgccttttcaattggctcagcaccatctgtactgtatgcttgaaaatatggagttgaagaaatctctgttaaagaaaatgatgaatcttaaaaattacattagtctgatcgactggtttaataaaacctttgagttcaagcgttacggcgaggatggatttggcatgggcgttgaaattccttataaagctaatagctgtgtgcagaggagcgcctcagtggttgagagacaagaatga

SEQ ID NO: 7976 - DNA, 1104 bp, Artificial Sequence
  Description of Artificial Sequence: Synthetic polynucleotide
atgcacacaatgcatattccatccggtgatgttttgataccgaagccgaagcttattactgaagaaacagatccattgcatataataaagacgaggcaaaagacacatggtagacccgtgaccattgcaggcccaatggttagatattccaagttaccattccgtcagttgtgcagagaatataacgttgatatagtttactcccccatgattttggcaagagaatatgtccgtaatgagcatgcaagaatcagtgacctttctacaaataatgaggacaccccgttgatcgtccaagtaggtgtaaataacgtggctgatttattgaaatttgtggaaatggttgccccatactgtgatggtattggtattaactgtggttgtcctataaaggaacaaatcagagagggcataggttgcgctttaatatacaattctgatttgttatgcagtatggtccatgctgtgaaagataagtatggcgacaaattgagaattgaaacgaaaataagaatacatgaggcattggacgagacggtggagttatgtagaaagttatgtgatgctggggtagattggattacgattcatggcagaacacgtagaactaggtcctctcagccggctaaccttgatgcgataaaatatatcatcgagaacatcagcgacaaaaatgtgcctgtaatagcgaatggggattgttttaagttatccgatttggaaagaatcaccaaatacactggtgcacatggtgtcatggctgtgcgtgggttgttaagcaatccagcgttatttgctggatatactacctgcccttggggctgcattgagaagttttgttattgggctttggagtttggtggcttgccttttcaattggctcagcaccatctttactgtatgcttgaaaatatggagttgaagaaatctttattaaagaaaatgatgaatcttaaaaattacattagtttaatcgactggtttaataaaacctttgagttcaagcgttacggcgaggatggatttggcatgggcgttgaaattccttataaagctaatagctgtgtgcagaggagcgcctctgtggttgagagacaagaatga

SEQ ID NO: 7977 - DNA, 342 bp, Saccharomyces cerevisiae
atggccggtttaaaagacgttgtcactcgtgaatacaccatcaacttgcacaaaagactacatggtgtcagtttcaaaaagagagctccaagagctgtgaaggaaatcaagaaattcgccaaattacacatgggtactgaagatgtccgtctagccccagaattgaaccaagctatctggaaaagaggtgttaagggtgttgaatacagattgagattgagaatctccagaaagagaaacgaagaagaagatgccaagaacccattgttttcctacgtcgaaccagttttggttgcctctgctaagggtctacaaaccgttgtcgttgaagaagatgcttaa

SEQ ID NO: 7978 - DNA, 342 bp, Artificial Sequence
  Description of Artificial Sequence: Synthetic polynucleotide
atggccggtttaaaagacgttgtcactcgtgaatacaccatcaacttgcacaaaagattacatggtgtcagtttcaaaaagagagctccaagagctgtgaaggaaatcaagaaattcgccaaattacacatgggtactgaagatgtccgtttggccccagaattgaaccaagctatctggaaaagaggtgttaagggtgttgaatacagattgagattgagaatctccagaaagagaaacgaagaagaagatgccaagaacccattgttttcctacgtcgaaccagttttggttgcctctgctaagggtttacaaaccgttgtcgttgaagaagatgcttga

SEQ ID NO: 7979 - DNA, 150 bp, Saccharomyces cerevisiae
atgatacaaaaaccgattttattatcctcgtttctgtttctctacatccgtgcattattacatagtatacatccgtacatccgtacatccgtacatctgtacacaaaaaaaatcacctcatacaattttttaggagtgccgtttaaatga

SEQ ID NO: 7980 - DNA, 150 bp, Artificial Sequence
  Description of Artificial Sequence: Synthetic polynucleotide
atgatacaaaaaccgattttattatcctcttttttgtttctctacatccgtgcattattacatagtatacatccgtacatccgtacatccgtacatctttacacaaaaaaaatcacctcttacaattttttaggagtgccgtttaaatga

SEQ ID NO: 7981 - DNA, 687 bp, Saccharomyces cerevisiae
atgactgtttctacttccaagaccccaaaaaagaatattaagtataccttaacacatactttacaaaaatggaaagaaactttaaagaaaattacccacgaaacgttgagtagtatcgatgactctagtggaagcgatgaaaaaatagaggctctgtttactgtgtctcagcctgccgtcgtagcctccaagggtatagacagagatagtggtgcttctatgtcgcaggtaggaggaggtgtcaatagtacattggagatgaagctcacagatgagagtgaggaatctagctctgctaataacacgaccacaaccgcctcgcatactctatcgaattcgaagaagtctacgcagaactttgaaaactataacgtagtggaggaacgcataaaattagcacagaaaagtaaggcgccgttttgtaacgctgagaaaatctggaaacgaagaagacaactctggacacaacccactgagcaaagtgaaagcgccaataatgacggagttactcgaagggagattttccaagctatacctcaggaatattatgctcgagtttacaagaaactggtggtagatgataagccattgagagagcctctaaatctggaagatgctttacaagtcataaatgcaggctggacggaaacgagaaagtgggctaatgctgccaagggcatgccatga

SEQ ID NO: 7982 - DNA, 687 bp, Artificial Sequence
  Description of Artificial Sequence: Synthetic polynucleotide
atgactgtttctacttccaagaccccaaaaaagaatattaagtataccttaacacatactttacaaaaatggaaagaaactttaaagaaaattacccacgaaacgttgagtagtatcgatgactctagtggaagcgatgaaaaaatagaggctttgtttactgtgtctcagcctgccgtcgtagcctccaagggtatagacagagatagtggtgcttctatgtctcaggtaggaggaggtgtcaatagtacattggagatgaagctcacagatgagagtgaggaatctagctctgctaataacacgaccacaaccgcctctcatactttatccaattctaagaagtctacgcagaactttgaaaactataacgtagtggaggaacgcataaaattagcacagaaaagtaaggcgccgttttgtaacgctgagaaaatctggaaaagaagaagacaactctggacacaacccactgagcaaagtgaaagcgccaataatgacggagttactagaagggagattttccaagctatacctcaggaatattatgctcgtgtttacaagaaattagtggtagatgataagccattgagagagcctttaaatttggaagatgctttacaagtcataaatgcaggctggacggaaacgagaaagtgggctaatgctgccaagggcatgccatga

SEQ ID NO: 7983 - DNA, 369 bp, Saccharomyces cerevisiae
atgttccttacattctcaatgtgtgtgaactggataatcgtaaaaatgccaaacaggtctgaagaacttgaccgattactcgacaaaataatcaactctccgcatagaacagaagcctcgaagactttgcaagaaattgaaaataatcaatcatatattttaaatgtacagttgaagaagttattgcgacttcatgacgactcatttaaaaataagtgtgtttctcctattaactatatgttggaaaagtacactccgtatatggggcataccgaagcattacaaaaggaagcagagcttgtggatagggatctccgaatccttgaaatgacgtaccaactgatagaaaagaatcgcaactcgaaataa

SEQ ID NO: 7984 - DNA, 369 bp, Artificial Sequence
  Description of Artificial Sequence: Synthetic polynucleotide
atgttccttacattctccatgtgtgtgaactggataatcgtaaaaatgccaaacaggtctgaagaacttgacagattactcgacaaaataatcaactctccgcatagaacagaagcctccaagactttgcaagaaattgaaaataatcaaagttatattttaaatgtacagttgaagaagttattgagacttcatgacgactcttttaaaaataagtgtgtttctcctattaactatatgttggaaaagtacactccgtatatggggcataccgaagcattacaaaaggaagcagagcttgtggatagggatctcagaatccttgaaatgacgtaccaattgatagaaaagaatcgcaactccaaatga

SEQ ID NO: 7985 - DNA, 2820 bp, Saccharomyces cerevisiae
atgtctatcgacttgaaaaaaagaaaagtcgaagaagacgtaagaagtagagggaaaaattctaagatattttcccctttccggattattggtaatgttagcaatggtgttccttttgctactggtacattgggatctaccttttacattgtaacgtgtgttggtaaaacatttcagatatatgatgcgaataccttacatttactttttgtttccgagaaagaaacaccatcctcaattgtagcattatcagcacactttcactacgtctacgcagcatatgaaaacaaggttggtatttacaagaggggtattgaggaacatttgcttgagctagaaactgatgcaaatgtcgaacatttgtgcatattcggagattatctttgcgcttccaccgacgacaattccatctttatatacaagaagtccgatccgcaagataaatatccatcagaattctacactaaacttaccgttactgaaattcaaggtggcgaaattgtgtctttacaacatttggcaacttatttgaataaattaactgtcgttaccaaatctaacgttttactttttaacgtcagaaccgggaagcttgtattcacatcaaacgaatttccagaccaaatcacaactgctgaacccgctccagtcctggatattattgctctaggtaccgtgaccggtgaggttattatgtttaatatgagaaaaggtaaaaggatccgcacaattaagattccgcaatcaagaatctcctcattgagtttcagaaccgacggttcttctcatttgagtgtgggaacgagcagtggtgatctaatattttatgatttagatcgccgttcaagaatacacgttttgaagaacattcatagagaatcgtacggtggtgtcactcaggctacttttttaaatggtcaacccattattgttacatcaggtggtgacaattccctgaaggagtacgttttcgatccgtcattatctcaaggaagcggtgatgtagttgttcaaccgccaagatatctacgttccagagggggtcattctcaaccaccttcatacattgcgtttgctgattcgcaatcacacttcatgctatcagcatccaaagatagatcattatggagcttttctctgcgtaaagatgcacagtcgcaagaaatgtcacaaaggttacacaagaaacaagatggcggcagggtaggtggtagtacaattaagtctaaatttcctgaaatagtggctcttgcaattgaaaatgccagaataggtgaatgggaaaacattatcactgcacataaagatgaaaagtttgcaagaacctgggatatgcgaaataaaagagttggcaggtggacttttgatactactgatgatggatttgttaaatctgtggccatgtcgcaatgtggtaattttggattcatcggttcttctaacggctctatcaccatctataatatgcaaagtggtatactccgtaaaaaatacaaattgcacaaaagagcagtcaccggtatatccttagatggtatgaatcgtaaaatggtttcttgtggactagacggtattgttggtttttatgactttaacaagtcaaccttgttgggaaaattgaaattggatgcacctattaccgcaatggtttatcatcgttcttccgatctatttgcattggctttagacgacttatcaattgttgttattgacgcagttactcaaagagttgttcgtcaattatggggtcatagtaatagaataactgcatttgatttctcacctgagggccgttggattgtttccgcttctctagattccaccattagaacgtgggatcttccaaccggaggatgtatcgatggtatcatagtagataatgtcgctacgaatgtaaagttttctccgaatggtgacttgcttgccactacccatgttactggtaatggtatatgcatctggacgaacagagcacaatttaagacagtatcgacaagaaccatcgatgagtctgaatttgcaagaatggcgttacctagcacatctgttcgagggaacgactcgatgttatcaggggctttagaaagcaatggaggagaagacctaaatgatattgatttcaacacttatacatcattggaacagattgataaggagctgttgactttatcaataggacctagaagtaaaatgaacacattgcttcatttagatgttatcagaaaacgttctaagccaaaggaagctccaaagaaatcagaaaagcttccatttttcttgcaactatctggggaaaaggttggggatgaagcctctgtcagagaaggcatagcacatgaaacaccagaagaaatccatcgcagagatcaagaagcacaaaagaagttagatgcagaagagcaaatgaataaattcaaagttacaggaagattagggtttgaatcacatttcacaaagcaattacgagagggctcacaatccaaggactattcatcattgctggccactctaataaatttctcacctgctgcagtggatttggagataagatcattgaattcctttgagccatttgatgaaattgtgtggtttatcgacgcgttaacacaggggttgaagagcaataaaaatttcgaactttatgaaacgtttatgagcttactgtttaaggcacacggtgatgttattcatgctaacaacaagaatcaagatattgcctctgctcttcaaaattgggaggatgtacataagaaggaagacagattagatgatcttgtgaagttttgcatgggagtggcagcttttgtgaccaccgcgtga

SEQ ID NO: 7986 - DNA, 2820 bp, Artificial Sequence
  Description of Artificial Sequence: Synthetic polynucleotide
atgtctatcgacttgaaaaaaagaaaagtcgaagaagacgtaagaagtagagggaaaaattctaagatattttcccctttcagaattattggtaatgttagcaatggtgttccttttgctactggtacattgggatctaccttttacattgtaacgtgtgttggtaaaacatttcagatatatgatgcgaataccttacatttactttttgtttccgagaaagaaacaccatccagtattgtagcattaagtgcacactttcactacgtctacgcagcatatgaaaacaaggttggtatttacaagaggggtattgaggaacatttgcttgagttagaaactgatgcaaatgtcgaacatttgtgcatattcggagattatctttgcgcttccaccgacgacaattccatctttatatacaagaagtccgatccgcaagataaatatccatctgaattctacactaaacttaccgttactgaaattcaaggtggcgaaattgtgtctttacaacatttggcaacttatttgaataaattaactgtcgttaccaaatctaacgttttactttttaacgtcagaaccgggaagcttgtattcacaagtaacgaatttccagaccaaatcacaactgctgaacccgctccagtcttggatattattgctttgggtaccgtgaccggtgaggttattatgtttaatatgagaaaaggtaaaaggatccgcacaattaagattccgcaatctagaatctcctctttgagtttcagaaccgacggttcttctcatttgagtgtgggaacgagcagtggtgatttgatattttatgatttagatcgccgttccagaatacacgttttgaagaacattcatagagaatcttacggtggtgtcactcaggctacttttttaaatggtcaacccattattgttacatctggtggtgacaattccttgaaggagtacgttttcgatccgtctttatctcaaggaagcggtgatgtagttgttcaaccgccaagatatttacgttccagagggggtcattctcaaccaccttcttacattgcgtttgctgattctcaatctcacttcatgctttctgcatccaaagatagatctttatggagcttttctttacgtaaagatgcacagtctcaagaaatgtctcaaaggttacacaagaaacaagatggcggcagggtaggtggtagtacaattaagtctaaatttcctgaaatagtggctcttgcaattgaaaatgccagaataggtgaatgggaaaacattatcactgcacataaagatgaaaagtttgcaagaacctgggatatgagaaataaaagagttggcaggtggacttttgatactactgatgatggatttgttaaatctgtggccatgtctcaatgtggtaattttggattcatcggttcttctaacggctctatcaccatctataatatgcaaagtggtatactccgtaaaaaatacaaattgcacaaaagagcagtcaccggtatatccttagatggtatgaatcgtaaaatggtttcttgtggattggacggtattgttggtttttatgactttaacaagtctaccttgttgggaaaattgaaattggatgcacctattaccgcaatggtttatcatcgttcttccgatttatttgcattggctttagacgacttatccattgttgttattgacgcagttactcaaagagttgttcgtcaattatggggtcatagtaatagaataactgcatttgatttcagtcctgagggccgttggattgtttccgcttctttagattccaccattagaacgtgggatcttccaaccggaggatgtatcgatggtatcatagtagataatgtcgctacgaatgtaaagttttctccgaatggtgacttgcttgccactacccatgttactggtaatggtatatgcatctggacgaacagagcacaatttaagacagtatctacaagaaccatcgatgagtctgaatttgcaagaatggcgttacctagcacatctgttagggggaacgactccatgttaagtggggctttagaaagcaatggaggagaagacttgaatgatattgatttcaacacttatacatctttggaacagattgataaggagttattgactttatctataggacctagaagtaaaatgaacacattgcttcatttagatgttatcagaaaacgttctaagccaaaggaagctccaaagaaaagtgaaaagcttccatttttcttgcaattatctggggaaaaggttggggatgaagcctctgtcagagaaggcatagcacatgaaacaccagaagaaatccatcgcagagatcaagaagcacaaaagaagttagatgcagaagagcaaatgaataaattcaaagttacaggaagattagggtttgaaagtcatttcacaaagcaattaagagagggctctcaatccaaggactattcttctttgttagccactttgataaatttcagtcctgctgcagtggatttggagataagaagtttgaattcctttgagccatttgatgaaattgtgtggtttatcgacgcgttaacacaggggttgaagagcaataaaaatttcgaactttatgaaacgtttatgagcttactttttaaggcacacggtgatgttattcatgctaacaacaagaatcaagatattgcctctgctcttcaaaattgggaggatgtacataagaaggaagacagattagatgatcttgtgaagttttgcatgggagtggcagcttttgtgaccaccgcgtga

SEQ ID NO: 7987 - DNA, 3441 bp, Saccharomyces cerevisiae
atgagtgggataaagaaggaaccgattgaatctgatgaggttcctcaacaagagacaaaaaataacttacctagtgcaccttctgagatgtcaccccttttcctaaacaaaaacacacagaaggctatgcaatctattgcaccaatattggagggtttcagtcctaagacgtcagctagcgaaaatatgtctttgaaattgccacctcccggtattcaagatgatcacagtgaagagaatctcaccgtgcatgatactctgcaaagaaccataagcactgcactaggaaacggaaacaacaccaatacagttacaacttccggtttaaaaaaggcagacagtgaatcaaagtcagaagctgatcctgaggggctcagcaattctaacatagtcaatgatgcagataacataaattccatctccaagaccggatcgccccatttacctcaaggaacaatggacgctgagcagactaacatgggaactaactctgtacctacttcatcagcttcttcacgcaaatcctcgactagtcatcccaaacctaggctacccaaggtagggaagattggggtatgtgcaatggatgcaaaagtcctttcaaagccaatgagacacattttgaatcgtttaattgaacatggtgaatttgaaactgtcatttttggagataaggtgattctagatgaaagaatagagaattggccaacttgcgactttttgatatctttcttttcttcaggatttcccctagataaagcaattaaatacgtcaagttacgcaagcctttcattatcaatgatttaataatgcaaaagattttgtgggacaggagattatgtctacaagtattagaagcctacaacgttccaacacctcctagactggaaatcagtagagatggtggtccccgtgccaacgaagaattaagggcaaaattacgtgagcatggcgtagaagttaaacccgttgaagaaccggaatggaaaatggttgatgatgatactttagaagttgatgggaaaaccatgactaagccctttgttgaaaagcccgttgatggtgaagaccacaacatttatatatactatcattctaagaacggaggaggcggtcgtcgtctattccgtaaagttggtaacaagtcttctgagtttgatcctactttggttcatcctcgtacggaggggtcttacatttatgagcagtttatggataccgataatttcgaagatgtgaaggcttatacgattggtgagaacttttgtcacgctgaaactaggaaatcacctgtggttgatggtatagttagaagaaatactcatggtaaagaagttagatatattactgagttatcagacgaagagaaaaccattgctgggaaagtttccaaagctttttcacaaatgatctgtggtttcgatttgcttcgcgtttctggtaaaagttacgtcattgatgttaacggattttcttttgtaaaggataacaaagcttactatgattcatgcgccaatatattgagaagtaccttcattgaagccaaaaagaagatggatatggaaaagaagaatctgcccattattcgtgaagaaaaggaacaaaagtgggtattcaaaggactggctatcattatccgtcacgcggacagaacaccaaaacagaaattcaaacattcattcacttcgcctatttttatatcgttactaaaaggtcacaaagaagaagttgtcattcggaatgtaaatgatttaaagattgttcttcaggccttaagaattgcgttagatgaaaaagcaggaaatccagctaaaattaaagtgttagcaaacgctctagaaaagaaactgaattttcccggtacgaaaatacaattgaaaccggttttaaataaagagaacgaagtggaaaaagttcagtttattttgaaatggggtggtgaacccactcattctgccaaatatcaggctacggaactcggagagcaaatgagacaagattttgacctattgaataagagcattctacaaaacatcaagatattttcatcgtctgagagacgtgttcttcatacggcgcagtactggaccagagctctttttggggccgatgaattaggtagcgatgaaatcagtattagaaaggatcttttagatgacagtaatgccgccaaagatttaatggataaggtgaaaaagaagttgaagccacttttaagagagggtaaggaagctcccccacaatttgcctggccttcaaagatgccggagccatatttagtcataaagcgagtggttgaattgatgaattaccataaaaaaattatggataacaactttgctaaaaaggatgtcaactcgatgcaaacaagatggtgtacttctgaagatcctagtttgtttaaggaaaggtgggataaacttttcaaagaattcaataatgctgaaaaagtcgatccttctaaaatttctgaattgtatgatactatgaagtatgatgctcttcacaacaggcagttcctagagaacatatttgacccgggtcttccaaatgaagctatcgccgatgaactcggcagtcattctttagttgaccgatacccaattaacgttctcgccaaaaataattttaagataatagacagtcatagcatgaacaattctggaaagaacagtagtaatagtgttgggtcgttaggatgggttctggaaagcggaaaaacatctacagcaagaaaccccaaatcttcttctcaattcgatgagccacgctttatgcagttgcgggagctgtataagctggccaaagtattgtttgattttatctgccccaaagaatatggtatttcagatgcagagaaactggatatcggtttgttaacttcgttgcctttggcaaagcaaatactaaatgatataggagacatgaaaaatagagaaactccagcttgtgttgcgtacttcaccaaagagtcccatatttacactctattgaatatcatatacgaatctggtattccaatgagaatcgctagaaatgctttaccagaactagactacttgtcgcagatcacttttgaactttatgagagtacggatgcttctggtcaaaaatcgcattccattagactaaaaatgtctcctgggtgtcatactcaagatccgttagatgttcaattagatgacaggcattatattagttgtattccaaagatttccctgacgaagcatttggatatggactatgttcaacagaaattgagaaacaaatttaccagggtcattatgcctccgaaatttacaccagtaaacattacgagccccaacttgagtttccagaaacgcaaaaccagaagaaagtcggtatctgttgagaagttgaaacgtcctgcctcgtccggatcttcatcatctacctccgttaacaagacattagattag

SEQ ID NO: 7988 - DNA, 3441 bp, Artificial Sequence
  Description of Artificial Sequence: Synthetic polynucleotide
atgagtgggataaagaaggaaccgattgaatctgatgaggttcctcaacaagagacaaaaaataacttacctagtgcaccttctgagatgtctccccttttcttgaacaaaaacacacagaaggctatgcaatctattgcaccaatattggagggtttcagtcctaagacgagcgctagcgaaaatatgtctttgaaattgccacctcccggtattcaagatgatcacagtgaagagaatctcaccgtgcatgatactttacaaagaaccataagcactgcattgggaaacggaaacaacaccaatacagttacaacttccggtttaaaaaaggcagacagtgaatccaagtctgaagctgatcctgaggggctcagcaattctaacatagtcaatgatgcagataacataaattccatctccaagaccggaagtccccatttacctcaaggaacaatggacgctgagcagactaacatgggaactaactctgtacctacttcttctgcttcttctcgcaaatccagcactagtcatcccaaacctaggttacccaaggtagggaagattggggtatgtgcaatggatgcaaaagtcctttccaagccaatgagacacattttgaatcgtttaattgaacatggtgaatttgaaactgtcatttttggagataaggtgattttagatgaaagaatagagaattggccaacttgcgactttttgatatctttcttttcttctggatttcccttagataaagcaattaaatacgtcaagttacgcaagcctttcattatcaatgatttaataatgcaaaagattttgtgggacaggagattatgtttgcaagtattagaagcctacaacgttccaacacctcctagattagaaatcagtagagatggtggtccccgtgccaacgaagaattaagggcaaaattacgtgagcatggcgtagaagttaaacccgttgaagaaccggaatggaaaatggttgatgatgatactttagaagttgatgggaaaaccatgactaagccctttgttgaaaagcccgttgatggtgaagaccacaacatttatatatactatcattctaagaacggaggaggcggtcgtcgtttattccgtaaagttggtaacaagtcttctgagtttgatcctactttggttcatcctcgtacggaggggtcttacatttatgagcagtttatggataccgataatttcgaagatgtgaaggcttatacgattggtgagaacttttgtcacgctgaaactaggaaatctcctgtggttgatggtatagttagaagaaatactcatggtaaagaagttagatatattactgagttaagtgacgaagagaaaaccattgctgggaaagtttccaaagctttttctcaaatgatctgtggtttcgatttgcttcgcgtttctggtaaaagttacgtcattgatgttaacggattttcttttgtaaaggataacaaagcttactatgattcctgcgccaatatattgagaagtaccttcattgaagccaaaaagaagatggatatggaaaagaagaatttgcccattattcgtgaagaaaaggaacaaaagtgggtattcaaaggattggctatcattatccgtcacgcggacagaacaccaaaacagaaattcaaacattctttcacttctcctatttttatatctttattgaaaggtcacaaagaagaagttgtcattagaaatgtaaatgatttaaagattgttcttcaggccttaagaattgcgttagatgaaaaagcaggaaatccagctaaaattaaagtgttagcaaacgctttggaaaagaaattgaattttcccggtacgaaaatacaattgaaaccggttttaaataaagagaacgaagtggaaaaagttcagtttattttgaaatggggtggtgaacccactcattctgccaaatatcaggctacggaactcggagagcaaatgagacaagattttgacttgttgaataagagcattttacaaaacatcaagatattttcttcttctgagagacgtgttcttcatacggcgcagtactggaccagagctctttttggggccgatgaattaggtagcgatgaaatcagtattagaaaggatcttttagatgacagtaatgccgccaaagatttaatggataaggtgaaaaagaagttgaagccacttttaagagagggtaaggaagctcccccacaatttgcctggccttctaagatgccggagccatatttagtcataaagagggtggttgaattgatgaattaccataaaaaaattatggataacaactttgctaaaaaggatgtcaactccatgcaaacaagatggtgtacttctgaagatcctagtttgtttaaggaaaggtgggataaacttttcaaagaattcaataatgctgaaaaagtcgatccttctaaaatttctgaattgtatgatactatgaagtatgatgctcttcacaacaggcagttcttggagaacatatttgacccgggtcttccaaatgaagctatcgccgatgaactcggcagtcattctttagttgacagatacccaattaacgttctcgccaaaaataattttaagataatagacagtcatagcatgaacaattctggaaagaacagtagtaatagtgttgggtctttaggatgggttttggaaagcggaaaaacatctacagcaagaaaccccaaatcttcttctcaattcgatgagccacgctttatgcagttgagagagttgtataagttggccaaagtattgtttgattttatctgccccaaagaatatggtatttctgatgcagagaaattggatatcggtttgttaacttctttgcctttggcaaagcaaatattgaatgatataggagacatgaaaaatagagaaactccagcttgtgttgcgtacttcaccaaagagtcccatatttacactttattgaatatcatatacgaatctggtattccaatgagaatcgctagaaatgctttaccagaattagactacttgtctcagatcacttttgaactttatgagagtacggatgcttctggtcaaaaatctcattccattagattgaaaatgtctcctgggtgtcatactcaagatccgttagatgttcaattagatgacaggcattatattagttgtattccaaagatttccttgacgaagcatttggatatggactatgttcaacagaaattgagaaacaaatttaccagggtcattatgcctccgaaatttacaccagtaaacattacgagccccaacttgagtttccagaaacgcaaaaccagaagaaagagtgtatctgttgagaagttgaaacgtcctgcctcttccggatcttcttcttctacctccgttaacaagacattagattga

SEQ ID NO: 7989 - DNA, 726 bp, Saccharomyces cerevisiae
atgaatatgggaggcagtagcagcactgctgccaaaaaagcgacttgtaaaatatcgatgttatggaattggtataccattgacacctgcttcattgccagatcttggagaaatgacaccaaaggaaaatttgctggttcttgcatcggctgttttgcgcttgtggtggtagctcaatggcttactcgtttttcaaggcaatttgacgtagagctattaaaaagacagaaaataaagcatttagctagttactcgccagaggagtacgttgtcaaatgtggagaagaggatgctaaatctgatatagaagaactacaaggcttttacaacgaaccaagctggaaaacaactttaatttccttacaaaaaagtttcatttatagtttttacgtttggggtccaaggagattgaacgagccagaagacgacctgttaaagaaggtcctatcatgctgtacattaataacgccagtggatttgtacccaacttttttggatcacatgataagagttactattttcgtattacagtgggggttatcttatatcatcatgctgctgttcatgtactataacggctatatcattattagttgtttaataggtgctatcgttggtcgtttcatattttgctatgaacctctaggctcattgggtgctaatggatcagcccagggtacagtgagttatgataaagagagtgatgatcgcaaatgctgcttgtag

SEQ ID NO: 7990 - DNA, 726 bp, Artificial Sequence
  Description of Artificial Sequence: Synthetic polynucleotide
atgaatatgggaggcagtagcagcactgctgccaaaaaagcgacttgtaaaatatccatgttatggaattggtataccattgacacctgcttcattgccagatcttggagaaatgacaccaaaggaaaatttgctggttcttgcatcggctgttttgcgcttgtggtggtagctcaatggcttactcgttttagcaggcaatttgacgtagagttattaaaaagacagaaaataaagcatttagctagttactctccagaggagtacgttgtcaaatgtggagaagaggatgctaaatctgatatagaagaattacaaggcttttacaacgaaccaagctggaaaacaactttaatttccttacaaaaaagtttcatttatagtttttacgtttggggtccaaggagattgaacgagccagaagacgacttattaaagaaggtcctttcttgctgtacattaataacgccagtggatttgtacccaacttttttggatcacatgataagagttactattttcgtattacagtgggggttatcttatatcatcatgttattattcatgtactataacggctatatcattattagttgtttaataggtgctatcgttggtcgtttcatattttgctatgaacctttgggctctttgggtgctaatggatctgcccagggtacagtgagttatgataaagagagtgatgatcgcaaatgctgcttgtga

SEQ ID NO: 7991 - DNA, 825 bp, Saccharomyces cerevisiae
atggattttaaagcaagtgggacaaagtttaagaaaactggcaagaaggtagtgcctgctaaagcgtttgaagaaattgttcagacaaatagagatgttctgaaaaaatcagcattcctctcagatttacttgaaaatttacaaccgcacctcaataacattaagaaaatacgatgtgttgcaattggaaatttcaaggaggattttcctgcgacgtaccaattcgctcttctcctagagattactgattatataaaaagtgaggatgaaagggatgtcgttgtttccctgtatgatccaatatttactaaagaagagatacagtacttgaaaagtttaggaagcaaatggctgatagaggaagaattttcagagaacgatgcaattgattatgaatcggtattatatttccttccccatgctcctttggatttaactgagaacatactatcgtcacagcgaccacacttatggctggcaaataatatgatatcacacaccgatagatacaccaaagcaaaactttgtgaaaactatcctaatttaagcaagctagttcattacttgcagactaacgctccgccagaagttaaaaaagcacatgatgtagatggttttgcaacattcattccaaagagaaaaagaaaaaacagaaacaactcctctaaactcaaggtcacaccatctgatatagactatgattcaatagcaccgaagtttaagtcctgccaaatactcaccgattttgatgaaggaaagtatttgaaggaaaaaccctggatcaattccttctctgacttgacgttacatgctatagagtactaa

SEQ ID NO: 7992 - DNA, 825 bp, Artificial Sequence
  Description of Artificial Sequence: Synthetic polynucleotide
atggattttaaagcaagtgggacaaagtttaagaaaactggcaagaaggtagtgcctgctaaagcgtttgaagaaattgttcagacaaatagagatgttttgaaaaaatctgcattcctctctgatttacttgaaaatttacaaccgcacctcaataacattaagaaaataagatgtgttgcaattggaaatttcaaggaggattttcctgcgacgtaccaattcgctcttctcttggagattactgattatataaaaagtgaggatgaaagggatgtcgttgtttccttatatgatccaatatttactaaagaagagatacagtacttgaaaagtttaggaagcaaatggttgatagaggaagaattttctgagaacgatgcaattgattatgaaagtgtattatatttccttccccatgctcctttggatttaactgagaacatattatcttctcagaggccacacttatggttggcaaataatatgatatctcacaccgatagatacaccaaagcaaaactttgtgaaaactatcctaatttaagcaagttggttcattacttgcagactaacgctccgccagaagttaaaaaagcacatgatgtagatggttttgcaacattcattccaaagagaaaaagaaaaaacagaaacaactcctctaaactcaaggtcacaccatctgatatagactatgattctatagcaccgaagtttaagtcctgccaaatactcaccgattttgatgaaggaaagtatttgaaggaaaaaccctggatcaattccttctctgacttgacgttacatgctatagagtactga

SEQ ID NO: 7993 - DNA, 207 bp, Saccharomyces cerevisiae
atgcatttgtgccagaatggacactattacaaaccccaccgtgcctcagctgagaaggtcccttacctaaagaaaaagaaaaagaattctcgaaacgaaggcaaggcaaaaaaaaagaatgaaaagaaaaaaataggaactgttgaattttttcaacaaaaaaaaaaagaaaaaaaacgggtcctaaatgcggtgtgtgggttataa

SEQ ID NO: 7994 - DNA, 207 bp, Artificial Sequence
  Description of Artificial Sequence: Synthetic polynucleotide
atgcatttgtgccagaatggacactattacaaaccccaccgtgcctctgctgagaaggtcccttacttgaagaaaaagaaaaagaattctagaaacgaaggcaaggcaaaaaaaaagaatgaaaagaaaaaaataggaactgttgaattttttcaacaaaaaaaaaaagaaaaaaaaagagtcttgaatgcggtgtgtgggttatga

SEQ ID NO: 7995 - DNA, 2028 bp, Saccharomyces cerevisiae
atgaattttaaaatactcctcccgatttgtgctttattgacacttacaacatttctgttgaccattattgcaactgcgggttctacctcaaattataagccaataacgaacatttatatcggtgatgctgatatatcaaaaatcaacgttacaaaagttatgccacaagttggcccaattttgactgtgttaggttctgctctaaccgctccaaatacaacggtggataccatcttcggcgctcttaaggcaatcgcttctaccgaagccttgtctcctttactgcacttgttgtctaatgctgctaacacttcagccacattatcatctttgacacagttggctccaatggctttgctaggaaccaataccgctactaccacgaccttctccgctcttgatgagttattgactacctctaaaaacacaaccgaactcttggatgggtttagcacattgatgtcatctatgtcaaccaacacttcttctacttcggcttccttagaaaatactgttctaaccctattagtggattcgaccaatcctataggcactactgagtctttgatcactttaaataatatgaccacagaagaaaagacaaaattgtcgcctgtattcgagttattcgcaagttccaagaacattactgccacatgcgatgcgttagaaaccataatgaactctaccattccaacttcaacggtctcctcattgttttctagtctaaaaaccagtcttgcggaaggtggcaatgctactgaaactattatgcaattaggctccctcgttccttcgagtttaaaaccagctgtccaagctgttgttactctgtttgatgaaactacatctcaaaatgtaacattatccgtattgagcactatgattgccgaaaacattacccaatcatcttccgctaaagctgccatgggtgctttgactgacttgttgaattacactacaaaccaaacagagctgctaacatctgtcgaaagtttggccctctctaaagaagccgcttcctctactaaccaattggtggcacttgatgaaatcctttctgcaagtgctaacgcatccacagttgtttccataatccctactttggaatcccaattggccaataacaccgtattacttaagtacgttccatacttgttcagcctattagctgcgtcaagcgaccccgtgtcaagtttctcttctctggttaatatcaccaaatgggcagaaactaatgccgctacatttatgcccatgttgaaaattttaaactctgctgtaaacatgacaactatcacaccagaacaactcaaggaaatgactccttctatccttgaatatctacacatccctgtcatataccgtttgtccattttcacaatgtgtcgtgctcacttaaacagaacaatgtactcgtgtagcaagtcacacgctgttcaaaacatggatttccggtcgattgtttacaacaacattgaaggctcggactttaaaccttatatggatgccctgaacatcggtaaggacgatttgcatttagatggtgaattacaagacagacaacacatgtatgtcccagcagtgaaagcagctttagctatgaacttaatgtgcataatcacatccttcttcttaatggtattcttgttgctactaagtagacgttccgtggtgagtcaaaaattatggttggcattgggctttatttcctgttggatatgtattttcagcgggttgggaagcacaatctttagcgtcatccttaatatgatgaaatccggctccaagaaggacaattacgatgtcattatttctggctcttctccattttatggcctaatgtggtctggatttgtatttgccgtccttgtatttctctgcattgcatactgctggtggagcagcagaaagggagctgccatcgtggaagctgagaaagctgttcaagaaagtgactctactacctcaagaatcattgaagaacacgaaagccccattgatgctgaaaaaaactttgcaaggtaa

SEQ ID NO: 7996 - DNA, 2028 bp, Artificial Sequence
  Description of Artificial Sequence: Synthetic polynucleotide
atgaattttaaaatactcctcccgatttgtgctttattgacacttacaacatttttattgaccattattgcaactgcgggttctacctctaattataagccaataacgaacatttatatcggtgatgctgatatatccaaaatcaacgttacaaaagttatgccacaagttggcccaattttgactgtgttaggttctgctttgaccgctccaaatacaacggtggataccatcttcggcgctcttaaggcaatcgcttctaccgaagccttgtctcctttattacacttgttgtctaatgctgctaacacttctgccacattatcttctttgacacagttggctccaatggctttgttgggaaccaataccgctactaccacgaccttctccgctcttgatgagttattgactacctctaaaaacacaaccgaactcttggatgggtttagcacattgatgtcttctatgtctaccaacacttcttctactagtgcttccttagaaaatactgttttaaccttattagtggattctaccaatcctataggcactactgagtctttgatcactttaaataatatgaccacagaagaaaagacaaaattgtctcctgtattcgagttattcgcaagttccaagaacattactgccacatgcgatgcgttagaaaccataatgaactctaccattccaacttccacggtctcctctttgttttctagtttgaaaaccagtcttgcggaaggtggcaatgctactgaaactattatgcaattaggctccctcgttccttctagtttaaaaccagctgtccaagctgttgttactttatttgatgaaactacatctcaaaatgtaacattatccgtattgagcactatgattgccgaaaacattacccaatcttcttccgctaaagctgccatgggtgctttgactgacttgttgaattacactacaaaccaaacagagttattaacatctgtcgaaagtttggccctctctaaagaagccgcttcctctactaaccaattggtggcacttgatgaaatcctttctgcaagtgctaacgcatccacagttgtttccataatccctactttggaatcccaattggccaataacaccgtattacttaagtacgttccatacttgttcagcttattagctgcgtccagcgaccccgtgtccagtttctcttctttggttaatatcaccaaatgggcagaaactaatgccgctacatttatgcccatgttgaaaattttaaactctgctgtaaacatgacaactatcacaccagaacaactcaaggaaatgactccttctatccttgaatatttgcacatccctgtcatataccgtttgtccattttcacaatgtgtcgtgctcacttaaacagaacaatgtactcttgtagcaagtctcacgctgttcaaaacatggatttcagatctattgtttacaacaacattgaaggctctgactttaaaccttatatggatgccttgaacatcggtaaggacgatttgcatttagatggtgaattacaagacagacaacacatgtatgtcccagcagtgaaagcagctttagctatgaacttaatgtgcataatcacatccttcttcttaatggtattcttgttgttattaagtagacgttccgtggtgagtcaaaaattatggttggcattgggctttatttcctgttggatatgtattttcagcgggttgggaagcacaatctttagcgtcatccttaatatgatgaaatccggctccaagaaggacaattacgatgtcattatttctggctcttctccattttatggcttaatgtggtctggatttgtatttgccgtccttgtatttctctgcattgcatactgctggtggagcagcagaaagggagctgccatcgtggaagctgagaaagctgttcaagaaagtgactctactacctccagaatcattgaagaacacgaaagccccattgatgctgaaaaaaactttgcaaggtga

SEQ ID NO: 7997 - DNA, 792 bp, Saccharomyces cerevisiae
atgaggaattttttcacgttattttttgcagctatattttcgctaggagcacttatattagccattgttgcatgcgcaggatcaacgaaaaattacagtcccataaataaaatttactgtgcagaattggatctgtcgcagatgaaggtatcgacggtgctcccttctttgagttctgctacgctatcttcgttgggcctgccctcatatataaatatagggctttggtcgtactgtacagtggactcctcgcataacatccaatcatgttcttcgcctcacggtatccagaattttaacctatcgtcattagtgtatgacaatatcaacaacaatgaggctctggagcttatggattccgtggccagtgttgttttgcccgaaaaactaaaaagtaaaatgacatactacaacaatttggtcaagtgtatgttcattaccattcttattggtattgtcttgacctttgtgaatctagtgttcaacgtattgcgctggatcatccacataaggccgctaacgtggtttggtgcctttttttcatttttcgcctttgccgccctattagtcagtataggttcgtgtttgggcacttactcatacatcaaatacatcctaaagcataactatagtgattacggtatttcaatgagcattggtaggaactaccagggtttgatgtggggggctgtcgttggagcattactgaatttcattctatggtgtagcgtgagatcgaggcccaccgtcatctatgcgaacgctccaattgaggaaaaaccattgatttga

SEQ ID NO: 7998 - DNA, 792 bp, Artificial Sequence
  Description of Artificial Sequence: Synthetic polynucleotide
atgaggaattttttcacgttattttttgcagctatattttctttgggagcacttatattagccattgttgcatgcgcaggaagtacgaaaaattacagtcccataaataaaatttactgtgcagaattggatttatctcagatgaaggtatctacggtgctcccttctttgagttctgctacgttgtcttctttgggcttgccctcttatataaatatagggctttggagttactgtacagtggactcctctcataacatccaaagctgttcttctcctcacggtatccagaattttaacttatcttctttagtgtatgacaatatcaacaacaatgaggctttggagcttatggattccgtggccagtgttgttttgcccgaaaaattgaaaagtaaaatgacatactacaacaatttggtcaagtgtatgttcattaccattcttattggtattgtcttgacctttgtgaatttggtgttcaacgtattgcgctggatcatccacataaggccgttaacgtggtttggtgcctttttttcttttttcgcctttgccgccttattagtcagtataggttcttgtttgggcacttactcctacatcaaatacatcttgaagcataactatagtgattacggtatttccatgagcattggtaggaactaccagggtttgatgtggggggctgtcgttggagcattattgaatttcattttatggtgtagcgtgagaagtaggcccaccgtcatctatgcgaacgctccaattgaggaaaaaccattgatttga

SEQ ID NO: 7999 - DNA, 339 bp, Saccharomyces cerevisiae
atgtatctcagtgcccagcttatgagaactgtcacagcctcccacttgaccctcagagccctctccactccccccctctttcaacatcgccagatagccgccgttgaatggtgcgggacaacccggcctggcctggccaggcaaaaaaggacgcagcacgcctcgagcgttatttccaaatcgggcgtactatcagccaagcccagctcggtatttttagcgcttctcgcaggaaaattggctgagaagtatatatacgcgagaatgttgctcttccatgtctcagtagtcaatgagtgtccagtggtgtttcattctggaccagttgtttggaagtag

SEQ ID NO: 8000 - DNA, 339 bp, Artificial Sequence
  Description of Artificial Sequence: Synthetic polynucleotide
atgtatctcagtgcccagcttatgagaactgtcacagcctcccacttgaccctcagagccctctccactccccccctctttcaacatcgccagatagccgccgttgaatggtgcgggacaaccaggcctggcttggccaggcaaaaaaggacgcagcacgcctccagcgttatttccaaatctggcgtattatctgccaagcccagctctgtatttttagcgcttctcgcaggaaaattggctgagaagtatatatacgcgagaatgttgctcttccatgtctccgtagtcaatgagtgtccagtggtgtttcattctggaccagttgtttggaagtga

SEQ ID NO: 8001 - DNA, 1701 bp, Saccharomyces cerevisiae
atggagtactggcattatgtggaaactacgtcatcgggccaacctcttcttcgagaaggtgaaaaagatatctttatcgatcagtccgtaggtctttaccatggcaaatctaagattctacagcgacagaggggcagaatctttttaacgtcacaaagaattatctacatcgacgatgcaaagcccactcagaactcgcttgggttggaattggacgatctagcgtatgtaaactattcatctggcttcttgaccagatcacctcgtctgatcctgtttttcaaggacccctccagtaaggatgaacttggtaaaagtgcggaaacagcaagtgccgacgttgtttcgacgtgggtctgccccatctgtatggtttcgaacgaaacgcagggggaattcactaaagacactctacctacacccatttgtatcaattgcggtgtgccagcggactatgagctcaccaagtcgtctataaattgttctaatgcaatcgacccgaacgccaacccacagaatcagttcggagtgaactctgagaacatttgccccgcctgtacttttgctaatcatcctcaaataggaaattgcgagatttgcggccacagattgcctaatgcatccaaagtacgatcaaagctgaacaggctaaactttcatgattctagggtccatattgagctagaaaaaaattcactggctagaaacaagagctcgcactcggcattatcgtcctcgtcctcgacaggatcatcgacagaattcgtgcaattgagtttccgcaaatctgatggcgtattgttttcacaagctacagagagggctttggagaatatactcactgaaaagaataagcatattttcaatcagaatgtggtttctgtaaatggtgtagacatgaggaaaggggctagttctcacgaatacaacaatgaggtgccatttattgagactaaattgagcagaattggcatatcaagcttggaaaaatctagagaaaaccagcttttgaacaatgacattctctttaacaatgcgttgaccgacctaaacaagctaatgtcgctggctaccagcatcgaaagactatacaaaaatagcaacataacgatgaaaaccaagacattgaacttacaggatgaatcaaccgtgaatgaaccgaaaacgagaagaccgctattgatacttgatagagagaagttcctaaataaagagctgttcttggatgagattgcgagagaaatttacgagttcacgttgtccgagtttaaagatttgaacagtgataccaactatatgatcataactctggtagatctatatgcaatgtacaacaaatctatgcgtataggtacaggcctgatatctcccatggaaatgagagaagcatgcgaaagattcgagcatttaggtctaaatgaattgaagttagtgaaagttaacaaaagaatattatgtgtaacgagcgaaaaattcgacgttgtaaaagaaaagctagtagatctgatcggtgataatcctggttctgatctcctaagattgacacagattttgagttccaataattcaaaatcaaactggacgctaggtatccttatggaggtattacaaaattgtgtcgatgaaggcgatttactgatagacaagcaactgagtgggatttactactataaaaactcttattggccctcgcatatataa

SEQ ID NO: 8002 - DNA, 1701 bp, Artificial Sequence
  Description of Artificial Sequence: Synthetic polynucleotide
atggagtactggcattatgtggaaactacgtcttctggccaacctcttcttagagaaggtgaaaaagatatctttatcgatcagtccgtaggtctttaccatggcaaatctaagattttacagagacagaggggcagaatctttttaacgtctcaaagaattatctacatcgacgatgcaaagcccactcagaactctcttgggttggaattggacgatttggcgtatgtaaactattcttctggcttcttgaccagatctcctcgtttgatcttatttttcaaggacccctccagtaaggatgaacttggtaaaagtgcggaaacagcaagtgccgacgttgtttccacgtgggtctgccccatctgtatggtttctaacgaaacgcagggggaattcactaaagacactttacctacacccatttgtatcaattgcggtgtgccagcggactatgagctcaccaagtcttctataaattgttctaatgcaatcgacccgaacgccaacccacagaatcagttcggagtgaactctgagaacatttgccccgcctgtacttttgctaatcatcctcaaataggaaattgcgagatttgcggccacagattgcctaatgcatccaaagtaagatccaagttgaacaggttaaactttcatgattctagggtccatattgagttagaaaaaaattctttggctagaaacaagagctctcactctgcattatcttcctcctcctctacaggatcttctacagaattcgtgcaattgagtttccgcaaatctgatggcgtattgttttctcaagctacagagagggctttggagaatatactcactgaaaagaataagcatattttcaatcagaatgtggtttctgtaaatggtgtagacatgaggaaaggggctagttctcacgaatacaacaatgaggtgccatttattgagactaaattgagcagaattggcatatctagcttggaaaaatctagagaaaaccagcttttgaacaatgacattctctttaacaatgcgttgaccgacttgaacaagttgatgtctttggctaccagcatcgaaagattatacaaaaatagcaacataacgatgaaaaccaagacattgaacttacaggatgaaagtaccgtgaatgaaccgaaaacgagaagaccgttattgatacttgatagagagaagttcttgaataaagagcttttcttggatgagattgcgagagaaatttacgagttcacgttgtccgagtttaaagatttgaacagtgataccaactatatgatcataactttggtagatttatatgcaatgtacaacaaatctatgcgtataggtacaggcttgatatctcccatggaaatgagagaagcatgcgaaagattcgagcatttaggtttgaatgaattgaagttagtgaaagttaacaaaagaatattatgtgtaacgagcgaaaaattcgacgttgtaaaagaaaagttggtagatttgatcggtgataatcctggttctgatctcttgagattgacacagattttgagttccaataattctaaaagtaactggacgttaggtatccttatggaggtattacaaaattgtgtcgatgaaggcgatttattgatagacaagcaattgagtgggatttactactataaaaactcttattggccctctcatatatga

SEQ ID NO: 8003 - DNA, 1182 bp, Saccharomyces cerevisiae
atggcgaactcattagacagactgagagaacacttaaagaacggcgataaactggttctaaaaaataatgagggacagtctactgatgatattacgaaagcaaccatggtagaaactctatccagtgatggtagtacccaagatagttttccattgaatgaagaaacggaaattgagattgatggttcattggtacagttacgaataattgttcattgttggatgaataaggactcaagtgccgcagactatctagcagactgtcagaataaacaattgactaatgtttcatttttacaaagaactgatttaataaattggttgtctggcaatacggaatcatcccaatatctgaaagcacccggtcagaaaggcgagacatccgataaagtagatatagaaaataaaactttggctggtgaattgtcgactgtaaaatcaaccacttcagcatctcttgaaaatgatagtgaagtttccgatccagttgtggtggaaacaatgaaacatgaacgtatattggtggaccacaactctgcattgcgtggtgctaagccgatcaactttggttatctaataaaagatgcagaactaaaattagtacagtcgatcaaaggatctttacgaggatctaaattgcctcccggtcataagggcgcgcacggtcgtatttccaaaacaaatggttcatcaggtggccctcgcaaagatccaattattttgattccttcggctgcgtcatcaattttaactgttgcaaatataaaacagttcctgctggagtcaaaatacgtgaatcctcgtaacttaccgtcagtgccaaacggattagttaacatagagaaaaacttcgaacgtatatcaagaccaattagatttattatagtcgataacactaggatgtttactaagccagaatattgggacagagttgtcgctatcttcactactggtcatacgtggcagtttaataactatcagtggaattcgccacaggaattatttcaacgctgcaaaggctactatttccactttgccggtgattctgtaccacaacacgtgcagcaatggaatgtagaaaaggtcgaacttgacaaaaataaaagatttaaggatgtggaagtcgtgcgttatttctggcatagtttagaaaaggaacttatttcaagaggataccgttga

SEQ ID NO: 8004 - DNA, 1182 bp, Artificial Sequence
  Description of Artificial Sequence: Synthetic polynucleotide
atggcgaactctttagacagattgagagaacacttaaagaacggcgataaattggttttgaaaaataatgagggacagtctactgatgatattacgaaagcaaccatggtagaaactttatccagtgatggtagtacccaagatagttttccattgaatgaagaaacggaaattgagattgatggttctttggtacagttaagaataattgttcattgttggatgaataaggacagcagtgccgcagactatttggcagactgtcagaataaacaattgactaatgtttcttttttacaaagaactgatttaataaattggttgtctggcaatacggaatcttcccaatatttgaaagcacccggtcagaaaggcgagacatccgataaagtagatatagaaaataaaactttggctggtgaattgtctactgtaaaatctaccacttctgcatctcttgaaaatgatagtgaagtttccgatccagttgtggtggaaacaatgaaacatgaacgtatattggtggaccacaactctgcattgcgtggtgctaagccgatcaactttggttatttgataaaagatgcagaattgaaattagtacagtctatcaaaggatctttaagaggatctaaattgcctcccggtcataagggcgcgcacggtcgtatttccaaaacaaatggttcttctggtggccctcgcaaagatccaattattttgattccttctgctgcgagttctattttaactgttgcaaatataaaacagttcttattggagagtaaatacgtgaatcctcgtaacttaccgtctgtgccaaacggattagttaacatagagaaaaacttcgaacgtatatctagaccaattagatttattatagtcgataacactaggatgtttactaagccagaatattgggacagagttgtcgctatcttcactactggtcatacgtggcagtttaataactatcagtggaattctccacaggaattatttcaacgctgcaaaggctactatttccactttgccggtgattctgtaccacaacacgtgcagcaatggaatgtagaaaaggtcgaacttgacaaaaataaaagatttaaggatgtggaagtcgtgcgttatttctggcatagtttagaaaaggaacttatttctagaggataccgttga

SEQ ID NO: 8005 - DNA, 4308 bp, Saccharomyces cerevisiae
atggccaaaaaaacgaaaaataactcaaaaagttcaactccagtgaatgatgtaccaacaactgctggcaaaaagaaagcaaaaggaaaaaagggacaagaaccagagccagaagatgacaaaagggccaagcaacaaagtaatagagcaaaagtgacatccacagcaagctggacaggtaaattgcctcatacaatcttacacgaaacatgtcagaaacgaaaatggaataaggtagagtatgatatgaagaaaatcggtgataaaggtttcattgcaattgcagttttgtcattcactgacccaaagacaaaagaaacattgactgcaagaatgaacgatccaacctatgacaaagcttcaggaaaaggccttgtaattcctcaagaaactccaattgaagctagacacatggcctccactattgcgctatatcgcattgcatacaacaccaacctgcacatgatgcttccgccaaaccatagaaaaacatggtatgccctcgacgattttcgaaaagataacctgaaaacagacgaaaagcgtataaacaaactatttgatcttgatcccttcaagacaatggtggaagacagaaagctcaaagcccaacgtgaaaaagaacaagtggcccagaataatcaagcacagaaagaacaagttgcacgaaccattttatctagccatggtggaatttcttcttctggaaaggacaggcaagagagaaaagtagcatctcataaaaactcacataatccttcattagtgcggtttccaaaaaaggtttgggaaaattctatatttgttgaccttgatgaatcgtctagacaactgatagaaacttcattgaaagagaaaattgattggcaagctaaaaaaattagccataaaaatgagacaattgctgaaaatcgggaagatctcaaggcaaaattattaactctacaatttagaccaaaacacgtagaggaagccatgctttataaagatccattgtctttcttattgtttaacttaccggaagatgatttaccaccattttttcataaaaagaaaggtgatacaaaaaacaaggttgaaataacaaacctaccgttatcaactagaatgatcgttgagcgtttaacagaaattggtgtctcttcagatgaagccttattggctttacaacaaaacgatatgaatgaaaatgaagcggccgggttcttgacgagggaaattttaccaactttaaatagcaatacgaatgaacctgtatcagaaactgaatctatagaatgttggaaccaagagctagagagcctagagagcatttatgagggctgcgtgatggacgccaaggaagattcacactacacgctcaatttaattgaaaaactcaaaataaaattgaaagtatatagaaccaaaaattatcctgcatcattacctggtattgtagtttcaacctttgataaaaattacaagctacctgattatattaagaaacaaatattaaccaggttactgcattatctccaggaaggaaatctaataggcgatatgttagtatatcatatttatgaatggttgaaagagaatatatctaagataattgacaaccctggcccattaattccagattcagattcgaaaggtgcaataaacaaaagaaacatttcaaacggtaagagaagtataaataattctagttcgagaaaattcacaaaaaccaccatttctgaagacacgctctctgtcctaagggaagagtacacaaaaaggatcaaaagttctgaatacaaaagtatgcagttagttagagaacaactgcctgcctggaagaagcaaaaggttattatagatatcatcaataaaaacgaagttgtattgattactggtgaaacaggttcgggtaaatccactcaggtcgttcagtttatactagatttcttacagaaggaaaaaggagatttcggtaagactaaaatcgtatgtacgcaacccagaagaatctcggctattgggcttgctgaacgtgtttctgatgaacgctgtgtaacttgtggggaagaggtaggttacgtaataagaggtgtcaataaaaccaaagcttccacacgtatcaagttcatgaccacaggtgttcttgttaggttgttacagaatgctagaactatgttagaaaacacaattgttgttattgatgaagttcatgaacgttctattgatactgacttgatagtgacattgatgaaaaatctcttacatagagttcgcggcatgaaaattgttttaatgagtgctactgttaacgttgacttgttcaaaaaattctttccggggctagcaacatgtcacatagaaggacgcactttccccatcactgattacttcttggaagacattcttagtgaccttgacttcaagatcaagagagagaaggctttgtcttatgatgatgatagcgttgatgaaagaaataatgacgaccaatatttgaagccgagagcagattctaagttttttacatctgggcaaatcaattatgatttgctttgtcaagtggttgaatatgtacataaacgcctgaaagctgctaatgacaacggatctattatcgtttttttgcctggtgtgggagagattaataagtgctgcaatttgctagctaataaatcaaatgaagcagattttatggttctacccttgcactccgctctaactcctgaagaccaaaaaagggtgttcaaaaaatatcatgggaaaaggaaagttgttgtatccacaaatattgctgaaacatctattactatagatgactgtgttgcaactattgacacaggccgtgccaaatcgatgttctataatccaaaggataatactacaaaactaattgagtcgtttatttcaaaagctgaagttaaacaacgtagaggtcgtgctggtagagtacgtgaaggtttatcttacaaattattttctaaaaatttatacgaaaacgacatgatatcaatgccaattccagaaatcaaaagaatcccgttggaatccctttatttatctgttaaggctatgggtataaaggacgttaaagcgtttttgagcacagctttggatgcccctcctttaccagctctgcaaaaggcagaaagaatattaacaacgataggacttgttgatgagtccgacaagtcactcacacagctaggtcaatttattagcctgatgcctgtcatggatagtaagcatggtaaattactaatatacggcattctgtttggctgtacggacatttctgttttacttgtctcgatactcggtattggagttttgcctttcatcggaggttttgaaaatagggaaaagataaaaaaactgctatgtaaatatgaaagtcgtggggatttatttgcagtattggaaattgtcagagattacttcaaaatcaaagattcgagcatcaaaaggaaatatttgagagacaatttactttcctataataaaattaatgaaattaagtcatcaacagcccaatattattctattttgaaagatgtaggctttctaccaatggactataaagttggaagcatttctgatttgaataggaacgagcgaaattttgatatcctaagggccattctcacgggtgcgttttatccacacatagccagggtgcaactaccagatgtaaagtatctatcaacaagttccggtgctgttgaaaaagatcctgaagccaaaatgatcaaatactggattcgaagcgaagagtatcaggacaaattagaagaatataagacgaaaatttcgcaagagacgcaaaaggttgatttggaagatttaccgttacctgctactagggcattcattcatccaagttcagtcttattttcaaccaattcagtaaacttggaagacgctaagttactctctgaggtggatggtccaatatcccgtcaatccaaaataccaaccgttgtaaaatacccatttgttttgtttaccacgtctcaagttactaataagttgtatttgagggacttaaccccaactactacattatcattactattattcggaggggcaatctcttatgacattggaggtactattcattcaccgggcatcgttgtcgacaactggctcccaattagaacctggtgtaagaatggtgttttaatcaaggaactgagaacacaacttgatgaggccataaggaaaaagttagaaagtcccgattatgctaaaaaatctcaaattgataattctggtgctgataaaactctaaaaattgttgaaaaaattatagcttccgaacaatag

SEQ ID NO: 8006 - DNA, 4308 bp, Artificial Sequence
  Description of Artificial Sequence: Synthetic polynucleotide
atggccaaaaaaacgaaaaataactccaaaagttctactccagtgaatgatgtaccaacaactgctggcaaaaagaaagcaaaaggaaaaaagggacaagaaccagagccagaagatgacaaaagggccaagcaacaaagtaatagagcaaaagtgacatccacagcaagctggacaggtaaattgcctcatacaatcttacacgaaacatgtcagaaaagaaaatggaataaggtagagtatgatatgaagaaaatcggtgataaaggtttcattgcaattgcagttttgagtttcactgacccaaagacaaaagaaacattgactgcaagaatgaacgatccaacctatgacaaagcttctggaaaaggccttgtaattcctcaagaaactccaattgaagctagacacatggcctccactattgcgttatatcgcattgcatacaacaccaacttgcacatgatgcttccgccaaaccatagaaaaacatggtatgccctcgacgattttagaaaagataacttgaaaacagacgaaaagcgtataaacaaattatttgatcttgatcccttcaagacaatggtggaagacagaaagctcaaagcccaacgtgaaaaagaacaagtggcccagaataatcaagcacagaaagaacaagttgcaagaaccattttatctagccatggtggaatttcttcttctggaaaggacaggcaagagagaaaagtagcatctcataaaaactctcataatccttctttagtgagatttccaaaaaaggtttgggaaaattctatatttgttgaccttgatgaaagctctagacaattgatagaaacttctttgaaagagaaaattgattggcaagctaaaaaaattagccataaaaatgagacaattgctgaaaatagagaagatctcaaggcaaaattattaactttacaatttagaccaaaacacgtagaggaagccatgctttataaagatccattgtctttcttattgtttaacttaccggaagatgatttaccaccattttttcataaaaagaaaggtgatacaaaaaacaaggttgaaataacaaacttaccgttatctactagaatgatcgttgagcgtttaacagaaattggtgtctcttctgatgaagccttattggctttacaacaaaacgatatgaatgaaaatgaagcggccgggttcttgacgagggaaattttaccaactttaaatagcaatacgaatgaacctgtatctgaaactgaatctatagaatgttggaaccaagagttagagagcttagagagcatttatgagggctgcgtgatggacgccaaggaagattctcactacacgctcaatttaattgaaaaactcaaaataaaattgaaagtatatagaaccaaaaattatcctgcatctttacctggtattgtagtttctacctttgataaaaattacaagttacctgattatattaagaaacaaatattaaccaggttattacattatctccaggaaggaaatttgataggcgatatgttagtatatcatatttatgaatggttgaaagagaatatatctaagataattgacaaccctggcccattaattccagattctgattctaaaggtgcaataaacaaaagaaacatttccaacggtaagagaagtataaataattctagtagtagaaaattcacaaaaaccaccatttctgaagacacgctctctgtcttgagggaagagtacacaaaaaggatcaaaagttctgaatacaaaagtatgcagttagttagagaacaattacctgcctggaagaagcaaaaggttattatagatatcatcaataaaaacgaagttgtattgattactggtgaaacaggttctggtaaatccactcaggtcgttcagtttatattggatttcttacagaaggaaaaaggagatttcggtaagactaaaatcgtatgtacgcaacccagaagaatctctgctattgggcttgctgaacgtgtttctgatgaacgctgtgtaacttgtggggaagaggtaggttacgtaataagaggtgtcaataaaaccaaagcttccacacgtatcaagttcatgaccacaggtgttcttgttaggttgttacagaatgctagaactatgttagaaaacacaattgttgttattgatgaagttcatgaacgttctattgatactgacttgatagtgacattgatgaaaaatctcttacatagagttcgcggcatgaaaattgttttaatgagtgctactgttaacgttgacttgttcaaaaaattctttccggggttagcaacatgtcacatagaaggacgcactttccccatcactgattacttcttggaagacattcttagtgaccttgacttcaagatcaagagagagaaggctttgtcttatgatgatgatagcgttgatgaaagaaataatgacgaccaatatttgaagccgagagcagattctaagttttttacatctgggcaaatcaattatgatttgctttgtcaagtggttgaatatgtacataaacgcttaaaagctgctaatgacaacggatctattatcgtttttttgcctggtgtgggagagattaataagtgctgcaatttgttggctaataaatctaatgaagcagattttatggttttgcccttgcactccgctttgactcctgaagaccaaaaaagggtgttcaaaaaatatcatgggaaaaggaaagttgttgtatccacaaatattgctgaaacatctattactatagatgactgtgttgcaactattgacacaggccgtgccaaatctatgttctataatccaaaggataatactacaaaattgattgagtcttttatttccaaagctgaagttaaacaacgtagaggtcgtgctggtagagtacgtgaaggtttatcttacaaattattttctaaaaatttatacgaaaacgacatgatatccatgccaattccagaaatcaaaagaatcccgttggaatccctttatttatctgttaaggctatgggtataaaggacgttaaagcgtttttgagcacagctttggatgcccctcctttaccagctttacaaaaggcagaaagaatattaacaacgataggacttgttgatgagtccgacaagtctctcacacagttgggtcaatttattagcttgatgcctgtcatggatagtaagcatggtaaattattgatatacggcattttatttggctgtacggacatttctgttttacttgtcagtatactcggtattggagttttgcctttcatcggaggttttgaaaatagggaaaagataaaaaaattattatgtaaatatgaaagtcgtggggatttatttgcagtattggaaattgtcagagattacttcaaaatcaaagattctagcatcaaaaggaaatatttgagagacaatttactttcctataataaaattaatgaaattaagagttctacagcccaatattattctattttgaaagatgtaggctttttaccaatggactataaagttggaagcatttctgatttgaataggaacgagagaaattttgatatcttgagggccattctcacgggtgcgttttatccacacatagccagggtgcaattaccagatgtaaagtatttatctacaagttccggtgctgttgaaaaagatcctgaagccaaaatgatcaaatactggattagaagcgaagagtatcaggacaaattagaagaatataagacgaaaatttctcaagagacgcaaaaggttgatttggaagatttaccgttacctgctactagggcattcattcatccaagttctgtcttattttccaccaattctgtaaacttggaagacgctaagttactctctgaggtggatggtccaatatcccgtcaatccaaaataccaaccgttgtaaaatacccatttgttttgtttaccacgtctcaagttactaataagttgtatttgagggacttaaccccaactactacattatctttattattattcggaggggcaatctcttatgacattggaggtactattcattctccgggcatcgttgtcgacaactggctcccaattagaacctggtgtaagaatggtgttttaatcaaggaattgagaacacaacttgatgaggccataaggaaaaagttagaaagtcccgattatgctaaaaaatctcaaattgataattctggtgctgataaaactttgaaaattgttgaaaaaattatagcttccgaacaatga

SEQ ID NO: 8007 - DNA, 1095 bp, Saccharomyces cerevisiae
atggtacaagaaatcgatttaggtttgacatgtgatatgcatgttcatgtaagagagggtgcgatgtgtgaactagtcacccccaagattagagatggtggggtttcaattgcttacatcatgccaaatttacaacctccaattaccacactagatagagtgattgaatacaaaaagacactgcagaaactagctcctaaaactaccttcttaatgagtttttatctttcaaaagacttaactccagatttaattcatgaagctgcccaacaacatgccattcgtggagtaaagtgttatccagcgggagtaacaacaaattcggctgctggggtggatccaaatgacttcagcgcattttacccaattttcaaggctatgcaagaagagaacctggtattaaatttgcatggggaaaaaccttctgtccatgatggagacaaagaacctattcatgtattgaatgcagaggaagcctttttgccagccttgaaaaaattgcataatgatttcccaaacctgaaaataattctggaacactgcactagcgagtcggcaataaagacaatcgaggatataaataagaacgtgaagaaagccactgacgtaaaggttgctgccacattaacggctcatcacttatttttaacaattgatgattgggccggaaatccggtaaatttttgcaaacctgttgcgaaacttccaaatgacaaaaaggctctagtcaaagctgctgtatcagggaaaccatattttttctttggatctgattcagcacctcatcctgtacaaaataaggccaattacgagggtgtttgcgcaggagtttactcacaatcttttgcgatcccttatatcgcccaagtttttgaagagcaaaatgccttggagaacttaaagggctttgtttccgacttcggaatttccttttatgaggttaaagatagcgaagtggcttcttcagataaggcaatattattcaaaaaagaacaagttatccctcaggttatcagcgatggcaaagacataagcatcatcccatttaaagcaggtgataaactaagttggtcggtgagatgggaacctcgttaa

SEQ ID NO: 8008 - DNA, 1095 bp, Artificial Sequence
  Description of Artificial Sequence: Synthetic polynucleotide
atggtacaagaaatcgatttaggtttgacatgtgatatgcatgttcatgtaagagagggtgcgatgtgtgaattggtcacccccaagattagagatggtggggtttctattgcttacatcatgccaaatttacaacctccaattaccacattagatagagtgattgaatacaaaaagacattacagaaattggctcctaaaactaccttcttaatgagtttttatctttctaaagacttaactccagatttaattcatgaagctgcccaacaacatgccattcgtggagtaaagtgttatccagcgggagtaacaacaaattctgctgctggggtggatccaaatgacttcagcgcattttacccaattttcaaggctatgcaagaagagaacttggtattaaatttgcatggggaaaaaccttctgtccatgatggagacaaagaacctattcatgtattgaatgcagaggaagcctttttgccagccttgaaaaaattgcataatgatttcccaaacttgaaaataattttggaacactgcactagcgagtctgcaataaagacaatcgaggatataaataagaacgtgaagaaagccactgacgtaaaggttgctgccacattaacggctcatcacttatttttaacaattgatgattgggccggaaatccggtaaatttttgcaaacctgttgcgaaacttccaaatgacaaaaaggctttggtcaaagctgctgtaagtgggaaaccatattttttctttggatctgattctgcacctcatcctgtacaaaataaggccaattacgagggtgtttgcgcaggagtttactctcaatcttttgcgatcccttatatcgcccaagtttttgaagagcaaaatgccttggagaacttaaagggctttgtttccgacttcggaatttccttttatgaggttaaagatagcgaagtggcttcttctgataaggcaatattattcaaaaaagaacaagttatccctcaggttatcagcgatggcaaagacataagcatcatcccatttaaagcaggtgataaattaagttggtctgtgagatgggaacctcgttga

SEQ ID NO: 8009 - DNA, 471 bp, Saccharomyces cerevisiae
atgagtatgagttcaactgtaattaaattcagggctggtgtttgtgaatacaacgaagattcacgtctatgtacgccaattccagttcagggtgaaatcgagatcaaaccaaatgaagaggaagaattgggattttgggatttcgagtggcgtccaacggaaaagccggtcgggagggaacttgatcctatttctttgattttaattcctggagagaccatgtgggttccaataaaatccagtaaaagtggcagaatatttgctttagttttttcatccaacgaaaggtacttcttttggctgcaagagaagaactcaggtaatttgcccttaaatgaattgagtgcgaaagataaagaaatttacaataagatgattggagtgctgaataatagtagtgaaagtgatgaggaagaaagcaatgacgaaaagcaaaaagctcaagatgtggatgttagtatgcaagattaa

SEQ ID NO: 8010 - DNA, 471 bp, Artificial Sequence
  Description of Artificial Sequence: Synthetic polynucleotide
atgagtatgagttctactgtaattaaattcagggctggtgtttgtgaatacaacgaagattctcgtctttgtacgccaattccagttcagggtgaaatcgagatcaaaccaaatgaagaggaagaattgggattttgggatttcgagtggcgtccaacggaaaagccggtcgggagggaacttgatcctatttctttgattttaattcctggagagaccatgtgggttccaataaaatccagtaaaagtggcagaatatttgctttagttttttcttccaacgaaaggtacttcttttggttacaagagaagaacagtggtaatttgcccttaaatgaattgagtgcgaaagataaagaaatttacaataagatgattggagtgttgaataatagtagtgaaagtgatgaggaagaaagcaatgacgaaaagcaaaaagctcaagatgtggatgttagtatgcaagattga

SEQ ID NO: 8011 - DNA, 5799 bp, Saccharomyces cerevisiae
atgtcgcaacaggattcacagcgctggctgcccacggatcggctaatatatggtgtgctagtcaaatctttccttcccttacaaaggtatcctgagctggtatatgaaaacagcaattatgcgaacgtttatgtgggtgcagaagtttacgtcttcgaagaatctgtggataagaaatggtgtagagcgtaccaatgtttacgaccctttcctgaagaattcatatcgaatatgaactcggcgaatgatgtactgccagacgtgaaaccgaaagtagtgatatttcctagaaaatatgttcattttgaagcagaaaaagccgtcagcacaatgccatttttcaaagcacctagtgctgaggattttaaaccattgataagtaaagaatgtgagtcccgctccttttgtgacagcctatatgttagctctactgatgatatatcaactggtaaaccaagaaagacaccgagacctccgttcccctttttcagataccaaaagaggtcctttaaggacgaaatgggtcctatattatctcttatttcctcgcatgtttactctatgtattcaattggcgagttttctatatataggaaaatgataaaactttattatgatttggacactatacgatttagattgtctatgaatttaaccacagaggctgagaaaataaatctgataagagcagcaacatccctaagaactaaaatcgcaaaatttttgtcctccacatacaggaagaataaactaattgctaactctactccaagaaacccagatccttatggtttcgaaggaatttttgccagggatattgatactggcgaattgctctcatacgagatcgacaaattaagaactttagtgtcatcgtcaatgctttgtggtttaactaataattttcctactgtacctgtggtagagtccgatgatgagtcctcatctaacggactattcggcacagttagatcgagcattttggttaacttgaaagatctggcatgggatccctctatatcagatcctaaatatcaagatctttctatttgtgtatacttgagaaccaaagacgaagttttaacagagtcttttaccatgacgaagtcgtccaatatggaatcagctctagatgaaattcctgcaatgttattcaagaatattttggaaacgatagtccataaaaataaagtatacttagtagtagtgctgaaggaaacaatagcaattacaacagaaactgctccggaaatttcatcttacaatatatctaccgaagagtcaagttcacattccccattttctccatttaattcatcgactgagaataagattgaccacgtaaaaaagggcttagctgccggagttattaacatatctccggtattcaagttttataacggcctatcagttgcgaataaagctcagaggtttaacctttatctttatagctccgattcctcggattcgcaaaacttcaactcttcaaaggatgcggatttaggttggggcgggttaataaataagataataaaagattcttctgaaggcgtttctgtgaaccctagggctgtttctttatcggtaactgtaaaggaaattataggcaaacaagaggcggaaaaagtgctctccacatctttagtaccgataagatctattcccacatacttttatgataccatgtttagccaagcagaaagaatttatctgaacttaggtagggtgtcgctttatggacttcctgcagctgatacaaatatagaaaatgttaccgttcaaatatcctgcaggaataaggccgtaaaattttgcaaaaataagctcgaagagagatctggggactggaagtttgtttcagttcgtccaaatgagagcataggcgaatcgattagaatagaaggggtagagaacatgaacgaagacgagacattaagagtattggtatatttgaatggatttttgatggcaaaatcaaatatacatatcaagaaaaagaacgaaatcatagaatatagaaagggtaccgtattccaaataatgtcatccaaatcagtacctctaattcatttagagcttgaagcatcatattttggtcggagatataatatcaaccctgccattacaaatttcttagttcttcaaaccaaaaatgttgaattcgaccagcaacttaaagagcactattcagttacattgaagcagctgaataacgtttcttttaaagatttactaaagcattttgacacaattttagcacactatttgttacttcttgaatcggtgaatgaagctactgataaaaaaggcccttcttcaagtttacccaatattgtattcagtgaattcgtcaagtttttaaatttaatgttaacacaccaagaaaactctagatattggtttaatagactgtacaaaaaagtcatgtcaaaggaactagaatgtcccaatgttgcaccgatactaataaaacatatgacaacgatctttgataggagtcattcttcttggactagaacaggaactgcaatctgccgaaccatcctgtacataattgtgttggcaatcggttcgtctcattctgatgaaatgcctaatttcagtcattttttcagaagcttgcacaaatttttaatgcttgctgatgagccaataatggcggatcaaattttgttaatagaaagtattccctctatgctggagacaatgaccaatcactgtaaggtggaagacttagttcgttttgcgatcggactgtttgaatgttgccaggaaaaagaaatgaatcaaaaaatgtactccaggccactctcagttcgagaagaagaatatttgaatacaaagtttaattgcctgttgaagttaattaacaagaaggttttgcaaaattatttaaccaatacggaatccgtagataaactgaggttacagtttttatctaaaacccttgagtggttacttacgccgtatactccaggcgatgacaaatgttttcacgtagaatccttacgcttggttaattctgttttcattacaataatcgaagattacaaatttgacatgctacaaaggaacttgataaggttactaccatatttgtgtaagtccttcgtccatttaagaaggtactgtaagaaagcacgtttaatgaggcctcgaagagtttttaccatgctttttcccagagaaattccatgcaactacataccggttgattcaatagtgaatgatgaagtagtcgtagaagttcttctagagcttgccatcataatttgtgaaataacgaaaattgcatcaagcagatttccatcatatcaatctttcagcgaaatcataaacttgtgcgataaagacactctttttcaatcaaatttttattcacgacaaatcacgaatgaaaatgtctatacaataaccaaaacagtttttttgttttttaaacaagattggttcccaggaatgaagtggcttggcgtatcagcgttattaggaagatcgtctctaatattgcttagtttatgcaaggattatatcatagaaaataattcaccttctccatcaaaggagtctgaaaagagggttgacatgcgactttgggcagaatatgtaaaagtcatactactagtttcaaaccataaaagtgcatccttgactaagttagctattactccacgtaaggccgtttatttgatatcgggtgacctgaaaaaaatttcagcatatatcctaaatgaatgttgggatgccctagccactgggcactataatatcacttatgctaaaaagtatggattaggagccttgagtgattgccaatttgaattgtttgttcataatcaatttttgatacgtgagatctttatttttgctttccatagacatatcgatgcaacaagaatttgttgcaaaatactatggggattagggctaaatttttggaggatatttgggtccctacaaccagcagtgaacgcatgtatcccagaattattcagcgcataccaaatcgggaagcttcgtttgaatgattacgaattggaaaggtttgtttcttgtttgttttttatgatgcacgttcccgattctgacaccttttttcctgcttgtatggatttcttaagagatttacttggttttttgcatattgtaaatgaaatctacaaaatacctaatcaagaagaatttgatgatgatcggactgctcggcacatagagatgttcgagtacttgctagaagcaaacaggccagagttgtttcataaaatgatatatgatttgtttatccactttattcagaaaaaagactttgttcaagcagctttgagtctagaactcttggcaggtacgtacgcttgggattctaatgatactcttgaagcaatatctttcccgccattgccagagcaatcttcatttgagaggaaggaatatcttcttaaggaatccgcaagaaacttttcgagaggccaaaaaccagaaaaagctttagcggtatacaaggacttgataaaagcctacgatgagatcaattatgatttaaacgggctggcctttgtacatgaccaaatagcaggcatttataccagattacagtccattgatagactggttccaacgtattttaaagtttctttcatgggatttggttttccaaaatcattaagaaataaatcgttcgtctttgagggtctcccatttgaacacattacgtctatgcatgacaggcttctacgaagctatcatgggtcaaatattgtacactcacaagaagaagtggatatgttattgatgaatcctccaatgggaaaatacattcatgtagcttccgtcgaaccgtgcttaagtatatccgataattacaacagtagtgacaagaaaagctcaattaacaacaaagtgcggatgtacattgagaatagagatttgaggactttcagtaattctcgacgtttgccaggcgcaaaaggagtcactgacctgtgggtggaggaatatacgtatcatactatgaatacttttccaacactaatgaatagatcagaaattgtaaaggttacgaagagcaaactttctccacttgaaaatgcaattcgttccttacaagttaaaatacaggagttatatgggcttgaaaacatgtgcaataaaactctgaaggaccacggtgatgtgaacgatttatttaccgagctttctacaaatattacgggaacaatatcagctccagttaatggaggcatatcacagtacaaggcctttttagaaccctccacatccaagcagttcagtactgatgatttaggaagattgacgctagcttttgatgagcttgttgcagtattaggtcgctgtctaacgttgcatgcagaactactaccatcaaaggatctaaaaccatcacatgatcttctagtgcgtctttttgaggaaaatttcgctgaggagatagaaagatatagtcgtactctcagtgaggccaatcgtagcaggaataacatgattactgctcgaataatttcgcacaagaaccccaataaaaaggcaagcttttctggaagggatcatcacacctcagggtccaatcatagccaatttgtattagaacatagcgactcatttggcccaaacagtttactttttggaaaatatttaacaagaacgttatcccactcgtccactacgagcagtttggataaaagtggaattgtttccggcacttcgagcacctttttggcagggtcacagccaaacaccaacacagattcacagcacaagcatgattactcacattcgggataa

SEQ ID NO: 8012 - DNA, 5799 bp, Artificial Sequence
  Description of Artificial Sequence: Synthetic polynucleotide
atgtctcaacaggattctcagcgctggttgcccacggatagattaatatatggtgtgttggtcaaatctttccttcccttacaaaggtatcctgagttggtatatgaaaacagcaattatgcgaacgtttatgtgggtgcagaagtttacgtcttcgaagaatctgtggataagaaatggtgtagagcgtaccaatgtttaagaccctttcctgaagaattcatatccaatatgaactctgcgaatgatgtattgccagacgtgaaaccgaaagtagtgatatttcctagaaaatatgttcattttgaagcagaaaaagccgtcagcacaatgccatttttcaaagcacctagtgctgaggattttaaaccattgataagtaaagaatgtgagtcccgctccttttgtgacagcttgtatgttagctctactgatgatatatctactggtaaaccaagaaagacaccgagacctccgttcccctttttcagataccaaaagaggtcctttaaggacgaaatgggtcctatattatctcttatttcctctcatgtttactctatgtattctattggcgagttttctatatataggaaaatgataaaactttattatgatttggacactataagatttagattgtctatgaatttaaccacagaggctgagaaaataaatttgataagagcagcaacatccttgagaactaaaatcgcaaaatttttgtcctccacatacaggaagaataaattgattgctaactctactccaagaaacccagatccttatggtttcgaaggaatttttgccagggatattgatactggcgaattgctctcttacgagatcgacaaattaagaactttagtgtcttcttctatgctttgtggtttaactaataattttcctactgtacctgtggtagagtccgatgatgagtcctcttctaacggattattcggcacagttagaagcagcattttggttaacttgaaagatttggcatgggatccctctatatctgatcctaaatatcaagatctttctatttgtgtatacttgagaaccaaagacgaagttttaacagagtcttttaccatgacgaagtcttccaatatggaatctgctttagatgaaattcctgcaatgttattcaagaatattttggaaacgatagtccataaaaataaagtatacttagtagtagtgttgaaggaaacaatagcaattacaacagaaactgctccggaaatttcttcttacaatatatctaccgaagagagcagttctcattccccattttctccatttaattcttctactgagaataagattgaccacgtaaaaaagggcttagctgccggagttattaacatatctccggtattcaagttttataacggcttaagtgttgcgaataaagctcagaggtttaacctttatctttatagctccgattccagtgattctcaaaacttcaactcttccaaggatgcggatttaggttggggcgggttaataaataagataataaaagattcttctgaaggcgtttctgtgaaccctagggctgtttctttaagtgtaactgtaaaggaaattataggcaaacaagaggcggaaaaagtgctctccacatctttagtaccgataagatctattcccacatacttttatgataccatgtttagccaagcagaaagaatttatttgaacttaggtagggtgtctctttatggacttcctgcagctgatacaaatatagaaaatgttaccgttcaaatatcctgcaggaataaggccgtaaaattttgcaaaaataagctcgaagagagatctggggactggaagtttgtttctgttcgtccaaatgagagcataggcgaaagtattagaatagaaggggtagagaacatgaacgaagacgagacattaagagtattggtatatttgaatggatttttgatggcaaaatctaatatacatatcaagaaaaagaacgaaatcatagaatatagaaagggtaccgtattccaaataatgtcttccaaatctgtacctttgattcatttagagcttgaagcaagttattttggtagaagatataatatcaaccctgccattacaaatttcttagttcttcaaaccaaaaatgttgaattcgaccagcaacttaaagagcactattctgttacattgaagcagttgaataacgtttcttttaaagatttattgaagcattttgacacaattttagcacactatttgttacttcttgaatctgtgaatgaagctactgataaaaaaggcccttcttccagtttacccaatattgtattcagtgaattcgtcaagtttttaaatttaatgttaacacaccaagaaaactctagatattggtttaatagattatacaaaaaagtcatgtccaaggaattggaatgtcccaatgttgcaccgatattaataaaacatatgacaacgatctttgataggagtcattcttcttggactagaacaggaactgcaatctgcagaaccatcttgtacataattgtgttggcaatcggttcttctcattctgatgaaatgcctaatttcagtcattttttcagaagcttgcacaaatttttaatgcttgctgatgagccaataatggcggatcaaattttgttaatagaaagtattccctctatgttagagacaatgaccaatcactgtaaggtggaagacttagttcgttttgcgatcggattatttgaatgttgccaggaaaaagaaatgaatcaaaaaatgtactccaggccactcagtgttagagaagaagaatatttgaatacaaagtttaattgcttgttgaagttaattaacaagaaggttttgcaaaattatttaaccaatacggaatccgtagataaattgaggttacagtttttatctaaaacccttgagtggttacttacgccgtatactccaggcgatgacaaatgttttcacgtagaatccttacgcttggttaattctgttttcattacaataatcgaagattacaaatttgacatgttacaaaggaacttgataaggttattaccatatttgtgtaagtccttcgtccatttaagaaggtactgtaagaaagcacgtttaatgaggcctagaagagtttttaccatgctttttcccagagaaattccatgcaactacataccggttgattctatagtgaatgatgaagtagtcgtagaagttcttttggagcttgccatcataatttgtgaaataacgaaaattgcaagtagcagatttccatcttatcaatctttcagcgaaatcataaacttgtgcgataaagacactctttttcaaagcaatttttattctagacaaatcacgaatgaaaatgtctatacaataaccaaaacagtttttttgttttttaaacaagattggttcccaggaatgaagtggcttggcgtatctgcgttattaggaagatcttctttgatattgcttagtttatgcaaggattatatcatagaaaataattctccttctccatctaaggagtctgaaaagagggttgacatgagactttgggcagaatatgtaaaagtcatattattggtttctaaccataaaagtgcatccttgactaagttagctattactccacgtaaggccgtttatttgatatctggtgacttgaaaaaaatttctgcatatatcttgaatgaatgttgggatgccttggccactgggcactataatatcacttatgctaaaaagtatggattaggagccttgagtgattgccaatttgaattgtttgttcataatcaatttttgatacgtgagatctttatttttgctttccatagacatatcgatgcaacaagaatttgttgcaaaatattatggggattagggttaaatttttggaggatatttgggtccttacaaccagcagtgaacgcatgtatcccagaattattcagcgcataccaaatcgggaagcttcgtttgaatgattacgaattggaaaggtttgtttcttgtttgttttttatgatgcacgttcccgattctgacaccttttttcctgcttgtatggatttcttaagagatttacttggttttttgcatattgtaaatgaaatctacaaaatacctaatcaagaagaatttgatgatgatagaactgctagacacatagagatgttcgagtacttgttggaagcaaacaggccagagttgtttcataaaatgatatatgatttgtttatccactttattcagaaaaaagactttgttcaagcagctttgagtttagaactcttggcaggtacgtacgcttgggattctaatgatactcttgaagcaatatctttcccgccattgccagagcaatcttcttttgagaggaaggaatatcttcttaaggaatccgcaagaaacttttccagaggccaaaaaccagaaaaagctttagcggtatacaaggacttgataaaagcctacgatgagatcaattatgatttaaacgggttagcctttgtacatgaccaaatagcaggcatttataccagattacagtccattgatagattggttccaacgtattttaaagtttctttcatgggatttggttttccaaaatctttaagaaataaatctttcgtctttgagggtctcccatttgaacacattacgtctatgcatgacaggcttttaagaagctatcatgggtctaatattgtacactctcaagaagaagtggatatgttattgatgaatcctccaatgggaaaatacattcatgtagcttccgtcgaaccgtgcttaagtatatccgataattacaacagtagtgacaagaaaagctctattaacaacaaagtgcgtatgtacattgagaatagagatttgaggactttcagtaattctcgtcgtttgccaggcgcaaaaggagtcactgacttatgggtggaggaatatacgtatcatactatgaatacttttccaacattgatgaatagaagtgaaattgtaaaggttacgaagagcaaactttctccacttgaaaatgcaattcgttccttacaagttaaaatacaggagttatatgggcttgaaaacatgtgcaataaaactttgaaggaccacggtgatgtgaacgatttatttaccgagctttctacaaatattacgggaacaatatctgctccagttaatggaggcatatctcagtacaaggcctttttagaaccctccacatccaagcagttcagtactgatgatttaggaagattgacgttggcttttgatgagcttgttgcagtattaggtcgctgtttgacgttgcatgcagaattattaccatctaaggatttgaaaccatctcatgatcttttagtgcgtctttttgaggaaaatttcgctgaggagatagaaagatatagtcgtactctcagtgaggccaatcgtagcaggaataacatgattactgctagaataatttctcacaagaaccccaataaaaaggcaagcttttctggaagggatcatcacacctctgggtccaatcatagccaatttgtattagaacatagcgactcttttggcccaaacagtttactttttggaaaatatttaacaagaacgttatcccactcttccactacgagcagtttggataaaagtggaattgtttccggcacttccagcacctttttggcagggtctcagccaaacaccaacacagattctcagcacaagcatgattactctcattctggatga

SEQ ID NO: 8013 - DNA, 1254 bp, Saccharomyces cerevisiae
atgaacgaagcagatgttacaaaatttgttaataatgccaggaaaacgctgaccgatgctcaacttttatgttcaagtgctaatttaaggattgtagatattaagaaaaaattgtcatcttggcagttgagtatttcaaaactcaattttctaatagttggcttgagacagcaaggaaagtttctttacactattttaaaggaaggcattgggacaaagctaatccagaaacaatggaatcaagctgtcttagtggtcttagttgatgagatgaagtactggcaatatgaaatcacttctaaagtacaaaggttggatggtatagtaaatgaattgagcatatcagaaaaagatgataccgatccctctaaactaggagattacatctcgagagacaacgttaacttattgaatgacaaactgaaagaagtgccagtaattgagcgtcaaattgaaaacattaagcttcaatacgaaaatatggtcagaaaagttaacaaagaactgattgataccaagttgacggacgtaactcaaaaattccaaagtaaatttggtatagataacctgatggaaacaaatgttgcagagcagtttagcagggaactaacggaccttgaaaaagatttagcagagataatgaattcattgacacagcactttgataagacattgctgttacaagataaaaaaattgataacgatgaacgtgaggagctgtttaaggtggtacaaggcgacgacaaagaactatacaacattttcaaaactctgcatgaggtaattgatgacgtggacaaaacaattcttaacttgggtcaatttttgcaggcaaaaataaaggaaaagacagaactacacagcgaagtttctgaaataataaacgatttcaatagaaatttggaatatctattaatctttaaagatatttccaatctgattgatagcttcaaaaattcctgtacacaagatattcaaacaactaaggaactttgtgaattttatgataattttgaagaaagctacggtaacttagttctagaagcaaagaggagaaaggatgtggcaaacagaatgaaaactatattgaaagattgtgaaaagcagttgcagaatttagatgctcaggaccaggaagaacgtcagaattttatagcggaaaatggaacttatcttcctgagacaatctggcccggtaaaattgacgatttttcttccctgtacactttaaattacaacgtgaagaatccttag

SEQ ID NO: 8014 - DNA, 1254 bp, Artificial Sequence
  Description of Artificial Sequence: Synthetic polynucleotide
atgaacgaagcagatgttacaaaatttgttaataatgccaggaaaacgttgaccgatgctcaacttttatgtagtagtgctaatttaaggattgtagatattaagaaaaaattgtcttcttggcagttgagtatttccaaactcaattttttaatagttggcttgagacagcaaggaaagtttctttacactattttaaaggaaggcattgggacaaagttaatccagaaacaatggaatcaagctgtcttagtggtcttagttgatgagatgaagtactggcaatatgaaatcacttctaaagtacaaaggttggatggtatagtaaatgaattgagcatatctgaaaaagatgataccgatccctctaaattaggagattacatctccagagacaacgttaacttattgaatgacaaattgaaagaagtgccagtaattgagcgtcaaattgaaaacattaagcttcaatacgaaaatatggtcagaaaagttaacaaagaattgattgataccaagttgacggacgtaactcaaaaattccaaagtaaatttggtatagataacttgatggaaacaaatgttgcagagcagtttagcagggaattgacggaccttgaaaaagatttagcagagataatgaattctttgacacagcactttgataagacattgttattacaagataaaaaaattgataacgatgaacgtgaggagttatttaaggtggtacaaggcgacgacaaagaattatacaacattttcaaaactttacatgaggtaattgatgacgtggacaaaacaattcttaacttgggtcaatttttgcaggcaaaaataaaggaaaagacagaattgcacagcgaagtttctgaaataataaacgatttcaatagaaatttggaatatcttttaatctttaaagatatttccaatttaattgatagcttcaaaaattcctgtacacaagatattcaaacaactaaggaactttgtgaattttatgataattttgaagaaagctacggtaacttagttttggaagcaaagaggagaaaggatgtggcaaacagaatgaaaactatattgaaagattgtgaaaagcagttgcagaatttagatgctcaggaccaggaagaacgtcagaattttatagcggaaaatggaacttatcttcctgagacaatctggcccggtaaaattgacgatttttcttccttgtacactttaaattacaacgtgaagaatccttga

SEQ ID NO: 8015 - DNA, 2127 bp, Saccharomyces cerevisiae
atggaggattcggactccaacacagataaaaagttctttttcaaaaaaagaagaatcgattcctataattatagcgatgaggaagataataattcaagcatgaatagtgacatgacatacactaatgatgccttgaaaactagtagcggcaatgccccaacgatctcaaaattaacgaagacatatggtattggtgcgaagttactttcgagtatgggatatgttgcgggaaaaggccttgggaaggatggttctggtataactacaccaatagaaacccaaagccgacctatgcacaatgcaggtctaggaatgttttcaaataccaactccagtaactatcacagtgaaaatgaggattacttgagctctgaggatgaggtggttgaaggtatagaacaagtcaaattcaataaaacctccacggaggttttaggcgaagcgttgttaaatgatagtggtgatatgactatagtgcgaacactgagagaattgaggttagcaggggtacaattaccagagagtatcctaaaagaattagaccctttaaatgcagtaccaaagccgaaaaaagatgttgttgtggagatattgcaagagctgctgggtattgaaaaaagtttggaagctattcgtcagcgcacctctccgttagaagtgcaagtcaaagaatattatggacaagagaggcttctttctgaattggaggttactttgagggacgaaagcaagcatgtttccctgtatgataagattggtgctattttaaaattgtccgacgacgagctcatagataggctaacgtcctgcttattgagaaaagaattactaatagaatttgatttggatcatttagaaaagccaaacgatatacttgatgagttaacgcaaattatagaactactcgcatatagaatggatacaacttcgaaatttttgaacaggacacaaacaacaatctttaaagttatatatcccaaactcaaaaaattttgggaagggtttgatatgactaaatcaaaaatcgacagcgctatcaccctattactggatttccaacaagtgctaagttttatcgggtgtaaagagcatatcatggaggaattcgtctatccaaagctattacaggaattagataattgggaacttcacgatgaagtagaccatgtttcgccaagaatatgggtcttggattttatggttttaattgacgataagatcaaagacacaattgtggacaagattgaagcaaaattttttgcttattgtaaaaattggtaccatagggaatcattttgtatcactaattctgatattatatttatcaaagaacttatctgcgaacgaagatattacaaaattttatgtaaagagtttcttcctaaattcctggacgagctgtgggaaagacataatgaccccatctacgagttagaggattggaaggaaaaacaggaatggaaagaaaaagattctggatttttctattttatgaaaaaactgagaagttatacccattattttcatccaaaacagtatgaattgatgatgcggggaacctttaataatataaacaaaatactctatcaatggcatctttatagtacagtggaagacttacacaagtcaaagtggtggcttaattggctgatgaatacggtatttgagcactctttaccaacagaaatagaactatcggagatcagaaaaagctataatatattcgctatgtctcataggtaccaccttgataaatctacattagatgaagatttcgatttgagacagggtttacgaaacttaatggaaacacaagtgatcgacgatattagtcaaagcgaacaagaacctacctatactgtacaaaatattccgcttggaaaagttagcagctctttcaaggatgtggtagaagactactgcctggaaaaagggtacttgatcagcaaaataccaaataggtacactcaactgccatatggaagagaccaagattgtatagttcctttatttgagatccgaaacgggaagaaaaaaatggaagttgctttgaaacatgatattctttgggtggaggattccagtgggacctttaagccaatttatttatgggcccttgacctctag

SEQ ID NO: 8016 - DNA, 2127 bp, Artificial Sequence
  Description of Artificial Sequence: Synthetic polynucleotide
atggaggattctgactccaacacagataaaaagttctttttcaaaaaaagaagaatcgattcctataattatagcgatgaggaagataataatagtagcatgaatagtgacatgacatacactaatgatgccttgaaaactagtagcggcaatgccccaacgatctccaaattaacgaagacatatggtattggtgcgaagttactttccagtatgggatatgttgcgggaaaaggccttgggaaggatggttctggtataactacaccaatagaaacccaaagcaggcctatgcacaatgcaggtttgggaatgttttctaataccaactccagtaactatcacagtgaaaatgaggattacttgagctctgaggatgaggtggttgaaggtatagaacaagtcaaattcaataaaacctccacggaggttttaggcgaagcgttgttaaatgatagtggtgatatgactatagtgagaacattaagagaattgaggttagcaggggtacaattaccagagagtatcttgaaagaattagaccctttaaatgcagtaccaaagccgaaaaaagatgttgttgtggagatattgcaagagttattgggtattgaaaaaagtttggaagctattcgtcagcgcacctctccgttagaagtgcaagtcaaagaatattatggacaagagaggcttctttctgaattggaggttactttgagggacgaaagcaagcatgtttccttatatgataagattggtgctattttaaaattgtccgacgacgagctcatagataggttgacgtcctgcttattgagaaaagaattattgatagaatttgatttggatcatttagaaaagccaaacgatatacttgatgagttaacgcaaattatagaattactcgcatatagaatggatacaacttctaaatttttgaacaggacacaaacaacaatctttaaagttatatatcccaaactcaaaaaattttgggaagggtttgatatgactaaatctaaaatcgacagcgctatcaccttattattagatttccaacaagtgttgagttttatcgggtgtaaagagcatatcatggaggaattcgtctatccaaagcttttacaggaattagataattgggaacttcacgatgaagtagaccatgtttctccaagaatatgggtcttggattttatggttttaattgacgataagatcaaagacacaattgtggacaagattgaagcaaaattttttgcttattgtaaaaattggtaccatagggaaagtttttgtatcactaattctgatattatatttatcaaagaacttatctgcgaaagaagatattacaaaattttatgtaaagagtttcttcctaaattcttggacgagttatgggaaagacataatgaccccatctacgagttagaggattggaaggaaaaacaggaatggaaagaaaaagattctggatttttctattttatgaaaaaattgagaagttatacccattattttcatccaaaacagtatgaattgatgatgagaggaacctttaataatataaacaaaatactctatcaatggcatctttatagtacagtggaagacttacacaagtccaagtggtggcttaattggttaatgaatacggtatttgagcactctttaccaacagaaatagaattatctgagatcagaaaaagctataatatattcgctatgtctcataggtaccaccttgataaatctacattagatgaagatttcgatttgagacagggtttaagaaacttaatggaaacacaagtgatcgacgatattagtcaaagcgaacaagaacctacctatactgtacaaaatattccgcttggaaaagttagcagctctttcaaggatgtggtagaagactactgcttagaaaaagggtacttgatcagcaaaataccaaataggtacactcaattaccatatggaagagaccaagattgtatagttcctttatttgagatcagaaacgggaagaaaaaaatggaagttgctttgaaacatgatattctttgggtggaggattccagtgggacctttaagccaatttatttatgggcccttgacctctga

SEQ ID NO: 8017 - DNA, 3924 bp, Saccharomyces cerevisiae
atgtatcgatataatagaagttccccttttgaacgaacaccagaaaaacgagtaagccgtcaagaaagccaacgaaagagcatcgaattgcccaaactgccaccattgaatacgaggaactcctttttggatgattctgataacggaacagataatatctcaattggctggacaccaatcagtgacacccagcaattccaaagcccggtccctcaggcttttacctttacatcaaaacatagtgcaaggggaaacggtactagctcttcagaatccacacccaaatcgacaaagtacgtcaaagaaagacgaccaccaccaccgccaccccttttgtattccactgaatcaatacggatagactcacccatggtatctcccagttctcagtcccgggaaagatcacctaataaactatcctttataggaaactcagaggaacgacatcacatggaatacatatctaaccattccaggatcttaaaatcaccatttgcgaacggatttagtccaaattcccctaaatctccaagagatagtagcaaacagcaggctcacttctctgatgaatcagatctacggtgtcatgaaagagaaaaagctttacccccaattcctttcactactactcttctgctatctccttttgatgatgaagactcagaattttttacgaaaccaccaccgcctctatcaacatctagaaacgtaagtgggaatagccgagtatcagaagccctagaaagtgtttattctgactcagattatacttttaataactcaaatgccaggcaaagtagttttaactctttactaggagccaagccattagaattagcaccaagcattactgcaccgacacaaccattttcaattcaatctatcgatgagcacaagctttatcaatgtgataatgtttacaaactttctgctatttatgagtggattttgaaagtttattttgaatggtttaatgaatgtgtcttcacgaaaatcgatcttttccaaattgttcaattacttttagagtttcaaatgcctacaaatttcgatcaagatacgatagactcaaatgtggataatattatggcttcgtttatttcccagaaagcagtaagattcgatatcattaacgatgaagaggtagccgtagttgtgggagggctggatattactggtgttttcaccgaactactaccgtgctattcattcatcgataatacttatggatctacaaactccctgatttgttattccaacgtttgcacacatggccaaagctctggcttcagaaaagaaataaaactttccgaaatcataaataaatcagttggactttggacagaatactggcacttgactccagatgatttagcagaaattaatccccgtgaagtacaaagacaaagctttatatttgacttaattattttagaagaaagatccttaaacatggctactgccgcggtagaaatctatgggaaacggtttgacaaatccctacttccagatgagcctgagttcaaggcattggcatttgatatcttcgaacctctaatacaattacataccgaatttcttttgacgccaatattttggaaattaaaaacgagaggtaagtttattgatggcgttggaaaaatctattcaaaatggtgtggtgaagccaagaatatatatttgaattacgcgaaagctatggcaacggtacacgaaatcataatgtgggagaagaaaaacaagacgaaatttgtaacatggcttaaggagattgataactcggttgaaattacaagatcgaagatgtatcatgatgttatattctttggggggtttttcaaatctttacaaaacatgcccgtaactctgcgctcaattttgaagaacacggatccttccatggaggattatgaatacctgaaaatagtaattaaggaagtagaaaagttgaactttgaagttaatcaggtacatggattagcaattgaccataggaaactagtaaggttttcgaaacaattagtattaagtactaatagtagtaatgcaacaagctatgtgaacgtcggtggtagtactaacgcaaatgacgatgatgcaattcaggataaactagctcttggtttaacttatccggaaaggaagttagtactatctggcactgtttataaaaagagggatttatggctggacccaaccccagtgtatatcgcattattggacaattgcttactgattacagaggaaataagtaaaggagaaactcaaaaatataagcttattgaaagacctatcccaatagattatttaagtctcgagaaaaggaaaattccaggaacaagtaaacagcctctgagaaactactctcagaaagaacataaatccccaatgcataatttttcgacaccgattaactccatgagacctctgcttaaaagttctggaaatcacatgtcaacagcgtatggagatagaaagactagtaatactgaaatttctaacgcgaatccaaacacagacgagttctcatttaagatcagaaatacagccacaggtgaatcgttcaaattttttacagaaagtgcagaagtactcaaccaatggattgatgctatcatggaatcttttaaaagaaatgcagaaaatcatgatttaaatgcctttgaatttacagtgttgagctctgagttcgcatacttcgacaaggatgcaccggtgaatctacctgtagctccggaaggatcagaaattgatgtagcactcaaagcttacgctcaaaaagcaaacaaagattcatgttcatggagtaagacaacacggattctttgttgtgaagatgttaaattcgagggcagaatttacctatttgtggctacaacagacggtatctatgtgaaatatagagacgattatggtagtggtttcgttaaaatattagaattaaacgacgtcaaaagaatggaagccaatgttaagttggggctcttgtttgtattggataacagaaagttgtgctattttaatatctcaacggtagtgagccgttacctagcgcaaggaaacactctagatgaaaactgcattgtgggaacagtaatcagagataaggtgagattcttcaaaattgctgatgattttggtaactcaaaacatttattttttgaaagaaaggggaagatagttatattaacaccagaatttgatcaattgacaaaccaagtaaaatatttcaaattttacaaagagtataagctcccaagttcaagtaataacattctgaataacgaaattgaggatattgccatattcaggaaaagttttgctgtgtgtacaaagaaaacagtcatactttatcaagattcattcgaggataacggaatagtcttaccatcttttttgaatgataaagatatgatggcacacttgaggcatccacatttgaatagcttaccgttcaaaagtgctacagactccaagaaacgcccctccatagaatctctcactgaagaagcaaaaaaggatatcgccacttgcaaagctataccggtcaatttttttcaaatatcacaatctagtttttttgccttggtttatgatgaagccgtagtgaaaataaactgctacggtgagatgtctgattggagaaaggatattctcttacttgatttttgttgtaccggcgcgagcttccatggtaatcatttgattctcgttggcgacaatttgatacagatttacgacttaaaaaatgttgagcagaacctaggcgaattggttcccgtccagatcataaaaggaaagaagataaagctggctagttcagaaaggagagagaaaacaattcttgtgttaagtcatccaaatatacttaatagacaattattagtcgcgtgcaatcctgtagcaatggcagatcatcaataa

SEQ ID NO: 8018 - DNA, 3924 bp, Artificial Sequence
  Description of Artificial Sequence: Synthetic polynucleotide
atgtatcgttataatagaagttccccttttgaaagaacaccagaaaaaagagtaagccgtcaagaaagccaaagaaagagcatcgaattgcccaaattaccaccattgaatacgaggaactcctttttggatgattctgataacggaacagataatatctctattggctggacaccaatcagtgacacccagcaattccaaagcccggtccctcaggcttttacctttacaagtaaacatagtgcaaggggaaacggtactagctcttctgaatccacacccaaatctacaaagtacgtcaaagaaagaagaccaccaccaccgccaccccttttgtattccactgaaagtataagaatagactctcccatggtatctcccagttctcagtccagagaaagatctcctaataaactttcctttataggaaacagtgaggaaagacatcacatggaatacatatctaaccattccaggatcttaaaatctccatttgcgaacggatttagtccaaattcccctaaatctccaagagatagtagcaaacagcaggctcacttctctgatgaaagtgatttaagatgtcatgaaagagaaaaagctttacccccaattcctttcactactactcttttattatctccttttgatgatgaagactctgaattttttacgaaaccaccaccgcctttatctacatctagaaacgtaagtgggaatagcagagtatctgaagccttggaaagtgtttattctgacagtgattatacttttaataacagtaatgccaggcaaagtagttttaactctttattaggagccaagccattagaattagcaccaagcattactgcaccgacacaaccattttctattcaatctatcgatgagcacaagctttatcaatgtgataatgtttacaaactttctgctatttatgagtggattttgaaagtttattttgaatggtttaatgaatgtgtcttcacgaaaatcgatcttttccaaattgttcaattacttttagagtttcaaatgcctacaaatttcgatcaagatacgatagactctaatgtggataatattatggcttcttttatttcccagaaagcagtaagattcgatatcattaacgatgaagaggtagccgtagttgtgggagggttagatattactggtgttttcaccgaattattaccgtgctattctttcatcgataatacttatggatctacaaactccttgatttgttattccaacgtttgcacacatggccaaagctctggcttcagaaaagaaataaaactttccgaaatcataaataaatctgttggactttggacagaatactggcacttgactccagatgatttagcagaaattaatccccgtgaagtacaaagacaaagctttatatttgacttaattattttagaagaaagatccttaaacatggctactgccgcggtagaaatctatgggaaaagatttgacaaatccttacttccagatgagcctgagttcaaggcattggcatttgatatcttcgaacctttgatacaattacataccgaatttcttttgacgccaatattttggaaattaaaaacgagaggtaagtttattgatggcgttggaaaaatctattctaaatggtgtggtgaagccaagaatatatatttgaattacgcgaaagctatggcaacggtacacgaaatcataatgtgggagaagaaaaacaagacgaaatttgtaacatggcttaaggagattgataactctgttgaaattacaagatccaagatgtatcatgatgttatattctttggggggtttttcaaatctttacaaaacatgcccgtaactttacgctccattttgaagaacacggatccttccatggaggattatgaatacttgaaaatagtaattaaggaagtagaaaagttgaactttgaagttaatcaggtacatggattagcaattgaccataggaaattagtaaggttttccaaacaattagtattaagtactaatagtagtaatgcaacaagctatgtgaacgtcggtggtagtactaacgcaaatgacgatgatgcaattcaggataaattggctcttggtttaacttatccggaaaggaagttagtattatctggcactgtttataaaaagagggatttatggttagacccaaccccagtgtatatcgcattattggacaattgcttattgattacagaggaaataagtaaaggagaaactcaaaaatataagcttattgaaagacctatcccaatagattatttaagtctcgagaaaaggaaaattccaggaacaagtaaacagcctttgagaaactactctcagaaagaacataaatccccaatgcataatttttctacaccgattaactccatgagacctttacttaaaagttctggaaatcacatgtctacagcgtatggagatagaaagactagtaatactgaaatttctaacgcgaatccaaacacagacgagttctcctttaagatcagaaatacagccacaggtgaatctttcaaattttttacagaaagtgcagaagtactcaaccaatggattgatgctatcatggaatcttttaaaagaaatgcagaaaatcatgatttaaatgcctttgaatttacagtgttgagctctgagttcgcatacttcgacaaggatgcaccggtgaatttacctgtagctccggaaggatctgaaattgatgtagcactcaaagcttacgctcaaaaagcaaacaaagattcttgttcttggagtaagacaacaagaattctttgttgtgaagatgttaaattcgagggcagaatttacttgtttgtggctacaacagacggtatctatgtgaaatatagagacgattatggtagtggtttcgttaaaatattagaattaaacgacgtcaaaagaatggaagccaatgttaagttggggctcttgtttgtattggataacagaaagttgtgctattttaatatctctacggtagtgagccgttacttggcgcaaggaaacactttagatgaaaactgcattgtgggaacagtaatcagagataaggtgagattcttcaaaattgctgatgattttggtaactccaaacatttattttttgaaagaaaggggaagatagttatattaacaccagaatttgatcaattgacaaaccaagtaaaatatttcaaattttacaaagagtataagctcccaagtagtagtaataacattttgaataacgaaattgaggatattgccatattcaggaaaagttttgctgtgtgtacaaagaaaacagtcatactttatcaagattctttcgaggataacggaatagtcttaccatcttttttgaatgataaagatatgatggcacacttgaggcatccacatttgaatagcttaccgttcaaaagtgctacagactccaagaaacgcccctccatagaatctctcactgaagaagcaaaaaaggatatcgccacttgcaaagctataccggtcaatttttttcaaatatctcaatctagtttttttgccttggtttatgatgaagccgtagtgaaaataaactgctacggtgagatgtctgattggagaaaggatattctcttacttgatttttgttgtaccggcgcgagcttccatggtaatcatttgattctcgttggcgacaatttgatacagatttacgacttaaaaaatgttgagcagaacttgggcgaattggttcccgtccagatcataaaaggaaagaagataaagttggctagttctgaaaggagagagaaaacaattcttgtgttaagtcatccaaatatacttaatagacaattattagtcgcgtgcaatcctgtagcaatggcagatcatcaatga

SEQ ID NO: 8019 - DNA, 981 bp, Saccharomyces cerevisiae
atgaatatagactgtttgtgtcgttgggtagttctgccactgctgcgctatccacttctggtagctcttgtattgagatggtctctaagcgactcgataagcatttgtctaacaatctatacactactgataaatgcattcctcattgctaattcctatataaagcggtcgggacaggtcgcctggaagagccttcgtgaatttaagaatggcatagttcttattactggaggaagtaaaggacttggacgggccatagtatctcaactcctacaagactacagcaacctgaccatcttgaatgtcgacatatgcccatcatcagtgaggaatactcgcgtgaaggatctcatctgcgacctgagtgatgatgaagaagttgcagcactactgaatttgttgaaaagaaagtataaaaatgaaatccgattgattgtgaacaatgctggagtaagggccaacttcaccggattcaacggcatggaacgggataatcttgataagatttttaagataaacacatttgcaccacttcagttcattcaagaactggcccctagtagacactcaactagacagtgttatattgtcaatatcgcaagcattttgggcatattgacgccggccaaagtagcagcttatgcggcgagcaaagcagcattgatagcctttcatcagtcgtacagttttgaattgcaaaacgaaggcgtaagaaatatcagaacactattagtgaccccagggcaactgaatacggaaatgtttgcaggattcaagcctcctcgccagttctttgcccctgtaatagacattactactctagctgccaagatagtccgttattgtgagctgggtcagaggggacagctaaatgaacccttttattgtagttttgctcatcttttgatgtgcgtaccttattcgctacaacgcattgtaagaagcttctctcgcatagattgctgcctcccggacgagtag

SEQ ID NO: 8020 - DNA, 981 bp, Artificial Sequence
  Description of Artificial Sequence: Synthetic polynucleotide
atgaatatagactgtttgtgtcgttgggtagttttgccattacttcgctatccacttttggtagctcttgtattgagatggtctttaagcgacagtataagcatttgtttaacaatctatacattattgataaatgcattcctcattgctaattcctatataaagagatctggacaggtcgcctggaagagccttcgtgaatttaagaatggcatagttcttattactggaggaagtaaaggacttggaagagccatagtatctcaactcttacaagactacagcaacttgaccatcttgaatgtcgacatatgcccatcttctgtgaggaatactcgcgtgaaggatctcatctgcgacttgagtgatgatgaagaagttgcagcattattgaatttgttgaaaagaaagtataaaaatgaaatcaggttgattgtgaacaatgctggagtaagggccaacttcaccggattcaacggcatggaaagagataatcttgataagatttttaagataaacacatttgcaccacttcagttcattcaagaattggcccctagtagacacagtactagacagtgttatattgtcaatatcgcaagcattttgggcatattgacgccggccaaagtagcagcttatgcggcgagcaaagcagcattgatagcctttcatcagtcttacagttttgaattgcaaaacgaaggcgtaagaaatatcagaacattattagtgaccccagggcaattgaatacggaaatgtttgcaggattcaagcctcctcgccagttctttgcccctgtaatagacattactactttggctgccaagatagtccgttattgtgagttaggtcagaggggacagttgaatgaacccttttattgtagttttgctcatcttttgatgtgcgtaccttattctttacaacgcattgtaagaagcttctctcgcatagattgctgcctcccggacgagtga

SEQ ID NO: 8021 - DNA, 2013 bp, Saccharomyces cerevisiae
atggtagaaccggacatgcagaagaaggcaagtggtggcagtggcggttccgagatggatactttaaatgctaccagcaacagtagtaaacaaggagtttcaaataataaaaggaatccggtcagtaaaaagaaaccagggaataaggtctctgatggaagagataatgcacataattatcacggggaaggccgcagaaaaagtagcaaacaacagaggtcaagaacgccctataaggagactagtactaggatcaatgatcaagatatagatttatctatccaggaagaaattcttggtggtaatttcaaattacgaggcaggaaaactcaagtttccattaatcatttgttgaatttccagttacctgaagtcgaaagggaaaaaagtaggtcctcttcaagtaagaaatcgaataggagacgcgatgagcacgtacatttacacggtgacacatttgttaatgttaattaccgtcttttggtagatgatcgttttgactacccagagcaaaactgtaacccgaacgttcctgtcgatcaagaaaagattctaagagtcatagtgccaaagggtcagaattgttctatttgtctgagcgaggaaccggtggctcccagaatggttacttgtggccatattttctgtctaagttgtctcttgaactttttctccattgaagaaaccgtcaaaaataaagagactgggtactcaaagaagaagaaatataaagaatgcccgctttgtggaagtattattggccctaaaagggtcaagcctgttctgtatgaggacgactttgatgtaaccaggttaaatcaaaaacccgaacctggtgccacagtacatctacaactgatgtgtaaaccacacggttcactattacctttgccagtagccttacatttagaccctctaaaatgtggaaatttccctcccgcaaacttaggatcaataaagcattatgcgcatattatgaagtgtggcgtgtcttactccttggagctctatcaaaaggacattgttgctattcaggaacaatatgaaatcgacaaggccatttataatgatagtggaaaatttgttaagcagtcgattgaaaatatcaatgatcaaatttcgacgttgctggctgcaaccactgatttgagcccactttccaacgatattaacaacggtttggacaattttcattttgatgacgatctcttgaccaaatacgatgattcttccgcttattttttctaccagacgttggtggcatcgtccacgaaatacttcttatctccactggatgtaaaaatcttattgactattttccactattattccaagtttccagaaagcatcgagacgacagtcgaaaatatacattatgatacagtggtaacggagcaattaatccgccgctacaagtacatcggccaccttccaatcggcactgagattgcccttttagacttggactggcgtaaaataccattccttcccaaggaaatttacgaacagtttgctcatgagctaaaacaacgtcgaagaaaattcacaatgaaaaagcaaaaggaagataaggaaaagaaactatatgaaaaaaggttggaacaagaacatgccgagttctacagaaaggaaaatggcaattctctcaagtttgaagactctgtacagatggctacccattatgaatccattgtaagctcttccatacctctcaactccttaggaatttctatgctgggtccaccgacaaattcctgctctactcctcaaaagcaagcgccctcccacacgaaaagaacaatttgggggacatcaattgcagtgacggaagacgaaaaagcatcaaaggagaacaaagaatttcaagatatgttattgcagcgaataaggcaggaagatagttcggatgtcacagattcgacggattctcctcctacaagtaatggtaagcgaggcaggaagaagaaaggtaaagtcatgctattcagcagcaatcatcaagccttgggttag

SEQ ID NO: 8022 - DNA, 2013 bp, Artificial Sequence
  Description of Artificial Sequence: Synthetic polynucleotide
atggtagaaccggacatgcagaagaaggcaagtggtggcagtggcggttccgagatggatactttaaatgctaccagcaacagtagtaaacaaggagtttctaataataaaaggaatccggtcagtaaaaagaaaccagggaataaggtctctgatggaagagataatgcacataattatcacggggaaggccgcagaaaaagtagcaaacaacagaggagcagaacgccctataaggagactagtactaggatcaatgatcaagatatagatttatctatccaggaagaaattcttggtggtaatttcaaattaagaggcaggaaaactcaagtttccattaatcatttgttgaatttccagttacctgaagtcgaaagggaaaaaagtaggtcctcttccagtaagaaatctaataggagacgcgatgagcacgtacatttacacggtgacacatttgttaatgttaattaccgtcttttggtagatgatcgttttgactacccagagcaaaactgtaacccgaacgttcctgtcgatcaagaaaagattttaagagtcatagtgccaaagggtcagaattgttctatttgtttgagcgaggaaccggtggctcccagaatggttacttgtggccatattttctgtttaagttgtctcttgaactttttctccattgaagaaaccgtcaaaaataaagagactgggtactccaagaagaagaaatataaagaatgcccgctttgtggaagtattattggccctaaaagggtcaagcctgttttatatgaggacgactttgatgtaaccaggttaaatcaaaaacccgaacctggtgccacagtacatttacaattgatgtgtaaaccacacggttctttattacctttgccagtagccttacatttagaccctttgaaatgtggaaatttccctcccgcaaacttaggatccataaagcattatgcgcatattatgaagtgtggcgtgtcttactccttggagctctatcaaaaggacattgttgctattcaggaacaatatgaaatcgacaaggccatttataatgatagtggaaaatttgttaagcagagtattgaaaatatcaatgatcaaatttctacgttgttggctgcaaccactgatttgagcccactttccaacgatattaacaacggtttggacaattttcattttgatgacgatctcttgaccaaatacgatgattcttccgcttattttttctaccagacgttggtggcatcttccacgaaatacttcttatctccattagatgtaaaaatcttattgactattttccactattattccaagtttccagaaagcatcgagacgacagtcgaaaatatacattatgatacagtggtaacggagcaattaatccgccgctacaagtacatcggccaccttccaatcggcactgagattgcccttttagacttggactggcgtaaaataccattccttcccaaggaaatttacgaacagtttgctcatgagttgaaacaacgtagaagaaaattcacaatgaaaaagcaaaaggaagataaggaaaagaaactttatgaaaaaaggttggaacaagaacatgccgagttctacagaaaggaaaatggcaattctctcaagtttgaagactctgtacagatggctacccattatgaatccattgtaagctcttccatacctctcaactccttaggaatttctatgttgggtccaccgacaaattcctgctctactcctcaaaagcaagcgccctcccacacgaaaagaacaatttgggggacatccattgcagtgacggaagacgaaaaagcatccaaggagaacaaagaatttcaagatatgttattgcagaggataaggcaggaagatagttctgatgtcacagattctacggattctcctcctacaagtaatggtaagagaggcaggaagaagaaaggtaaagtcatgcttttcagcagcaatcatcaagccttgggttga

SEQ ID NO: 8023 - DNA, 1956 bp, Saccharomyces cerevisiae
atgagtggaaaatttgttcgtgcttctaaatatagacacgtctttggccaagcggccaaaaaggaactgcaatatgaaaaactcaaagtgaccaacaacgcatgggactccaacttgctaaaaacgaatggtaaatttattgcggtgaattggaatgcctctggaggtggtgcattcgctgtcattccgatcgaggaagtgggcaaggctccagatcaagtgcctttgttcagaggccacactgcgcaggtcttggataccgattttgatccgtttaatgaccacaggattgcttccggttccgatgattctaagattggtatttgggacataccggaaaactacaaatttcacgatcatgtagatgaagatggagagccaattgatatcaaaccagtaaagtttttgacaggacacgcaaggaaagttggacatgttctttatcatcccgtcgctgagaatgtattagcatcctcttcaggtgactatactgttaaattatggaatgtggaaactggaaaggacatgattactttgaaacatccagatatggtcacatccatgtcattttcgtatgatggtaattatcttgccacagtggctcgagataagaaactacgagtctggaatatcagagaagaaaaaattgttagcgaagggcctgcccatacgggtgcaaaaaaccaaagggtggtatggttaggaaactctgacagattggctactactggtttttcaaaattgagtgatcgtcaaatcggtatttgggatgccttcaacattgaaaagggagatttgggaggcttctacactgtcgaccaatcatcaggtattttgatgcccttttatgacgaagggaataagattctttacttggtggggaaaggtgatggtaatattcgatactacgaatttcaaaacgacgagctgtttgagttgtctgaattccaatccacagaagcacagagaggctttgctgtagcgcctaagcgaatggtgaacgtcaaagaaaacgaagtcttaaaaggtttcaagactgtcgttgatcagcgtatcgaaccggtatctttctttgttccaaggagatcagaggagttccaagaagatatctacccggatgcaccttccaataagccagctttaactgctgaagagtggttttctggcaagtctgttgaaggtccaattctcgttagtatgagatctatctatgacggttccgcaccaagctttcatgaggctaaaagacctcaacagccaacaactcaagaaacagctcttgaagagaaaaaggagcagcctaaagtggagaagccaatcagcgaatccgaaaaggaggtgaaacaagaagctccaaaatctccctcaccgctaaagtcggcctcctcatcttctacaatcaaccatgtattaaaggaagataattcgatcaacaagttgttgaagaaatcctccgatattgatcaagttaacaacgccgaagatccgtctagggatacctccggatgggaagaagccgatgatgagccagctcctatcaaaatcgaaaccccagtcactccaacagaaactaaaaaggatcgcacacctaaggtcgaaccttcaaaagaattgaagccagagccagtgtctatcgcaacagatagaaaacaggagcaaagcttacctcaagaagagaagtcctctgagaaaacaaagtcccctgagcaggaaaaatccgcaacacctccttcttcaattacggctgctaagacagccattactgccagcagtaaggaagagccatccgcggcaaggacatcacctaagtcattgggtttaaaaaagtctgtcgaaaaactatctacattggttctgcaattagaagatgtagttgataaattaacgaaagcaaatcttgacaaagatgagcgcctgttaaagttggaacaaaaaattggcgaactgtcaaaatga

SEQ ID NO: 8024 - DNA, 1956 bp, Artificial Sequence
  Description of Artificial Sequence: Synthetic polynucleotide
atgagtggaaaatttgttcgtgcttctaaatatagacacgtctttggccaagcggccaaaaaggaattacaatatgaaaaactcaaagtgaccaacaacgcatgggactccaacttgttgaaaacgaatggtaaatttattgcggtgaattggaatgcctctggaggtggtgcattcgctgtcattccgatcgaggaagtgggcaaggctccagatcaagtgcctttgttcagaggccacactgcgcaggtcttggataccgattttgatccgtttaatgaccacaggattgcttccggttccgatgattctaagattggtatttgggacataccggaaaactacaaatttcacgatcatgtagatgaagatggagagccaattgatatcaaaccagtaaagtttttgacaggacacgcaaggaaagttggacatgttctttatcatcccgtcgctgagaatgtattagcatcctcttctggtgactatactgttaaattatggaatgtggaaactggaaaggacatgattactttgaaacatccagatatggtcacatccatgagtttttcttatgatggtaattatcttgccacagtggctagagataagaaacttagggtctggaatatcagagaagaaaaaattgttagcgaagggcctgcccatacgggtgcaaaaaaccaaagggtggtatggttaggaaactctgacagattggctactactggtttttccaaattgagtgatcgtcaaatcggtatttgggatgccttcaacattgaaaagggagatttgggaggcttctacactgtcgaccaatcttctggtattttgatgcccttttatgacgaagggaataagattctttacttggtggggaaaggtgatggtaatattagatactacgaatttcaaaacgacgagttatttgagttgtctgaattccaatccacagaagcacagagaggctttgctgtagcgcctaagagaatggtgaacgtcaaagaaaacgaagtcttaaaaggtttcaagactgtcgttgatcagcgtatcgaaccggtatctttctttgttccaaggagaagtgaggagttccaagaagatatctacccggatgcaccttccaataagccagctttaactgctgaagagtggttttctggcaagtctgttgaaggtccaattctcgttagtatgagatctatctatgacggttccgcaccaagctttcatgaggctaaaagacctcaacagccaacaactcaagaaacagctcttgaagagaaaaaggagcagcctaaagtggagaagccaatcagcgaatccgaaaaggaggtgaaacaagaagctccaaaatctccctctccgttgaagtctgcctcctcttcttctacaatcaaccatgtattaaaggaagataattccatcaacaagttgttgaagaaatcctccgatattgatcaagttaacaacgccgaagatccgtctagggatacctccggatgggaagaagccgatgatgagccagctcctatcaaaatcgaaaccccagtcactccaacagaaactaaaaaggatcgcacacctaaggtcgaaccttccaaagaattgaagccagagccagtgtctatcgcaacagatagaaaacaggagcaaagcttacctcaagaagagaagtcctctgagaaaacaaagtcccctgagcaggaaaaatccgcaacacctccttcttccattacggctgctaagacagccattactgccagcagtaaggaagagccatccgcggcaaggacatctcctaagtctttgggtttaaaaaagtctgtcgaaaaattatctacattggttttgcaattagaagatgtagttgataaattaacgaaagcaaatcttgacaaagatgagcgcttattaaagttggaacaaaaaattggcgaattatccaaatga

SEQ ID NO: 8025 - DNA, 6696 bp, Saccharomyces cerevisiae
atgaattccaacaatcctgataataataatagcaacaacattaataataataataaggataaggatattgcccccaatagcgatgttcagctagctaccgtctataccaaggcaaagtcttacattcctcagattgaacaagtttatcaaggcacaaatccaaatattcaagaggcaaaattattaggggagttattacaagttctagcagaagttcccaagggtacgcatttattttgcgaccccatacttgaaccaatatcaattttttccctaaccattttctcattcaatgaagaagctacggccacatggctgaagaatcattttaatccaattctctctgtttgtgataaatgcattctaaattttgcgagagggaagtgcaaaatgttacaacattttgccattcaaagacatgtgccgcatgaacatgtagccaagtttaatgacatcgtatgccaatggagggtggaggctgtttttcctattcttagaaatatttccgttaacgataatacgggaattaacattacaaatgaaattgaaactgcaatgtacgagtgtctctgtaatccgcatatgttgaggcttaacaagcaacttaaggctactttcgaagcaatcttcaaatttttctacgacacaaagcatcgtttgttggacgttacgaatccattaagcataaaaacctttatatcaggtgtcatattttgctggtgtgaaggttcaaaagaggaaaatgagtggtcacgagcttttctaaaggatttatactcaagaaatttccatataaatctttctaacctgacaccggatattattgaggaagtttatatccatattttattcttacagaatccggcaaactggacagagattgtggtatctcaattctggtcgagattactaccggttttcaatttatttgataaagacgtcttcatagagtactttcaggtcccaaaaaatgtggaatctttaaaaaaaacattcaaatttccgttagagccaatttttaaaatgtggtacaatcacttaagcaaatcatatcatgataagccactagactttttgttaagaggattaacaatgttcttgaataaatttggctccgagttttggtccaaaattgaacccttcacattccatagcattttggatataattttcaatagagattcattcccaatcaaactaatcaaaattcaagacaatccaattgttgagcatcaaacagaagtttactttcaacttaccggttctgtaaccgatttactttcttggaccttaccattttatcatgcactgtcaccatccaaaagaattcaaatggttagaaaggtctcaatggcgttcctgcgtataatagccaattatccatccctaaaatccattcccaaagcttgtttaatgaattcagcaactgccttgttgagggctgtgttgactattaaggaaaatgaaagggcaatgctttataagaatgatgaatttgaaacagtactgttgactaaaacagattctagagctttgctcaacaatcctttgatccaagacataataattagatcagcttcgaatcctaacgacttttatcctgggctaggtgctgcttctgcatcggtggccacatccacgatgatggtattggcagaatgtatcgattttgatatactgttattatgtcatcgaacgtttaagctttattcaggtaaaccaattagcgaaattccaatttcaaccaacgtcttggaaaatgttacaaataaaattgacctgagatcttttcatgacggtccattgctggccaaacagctgctagtatctttaaaaaatattaatggtcttttgatagtaccgtcaaatactgccgtagctgaggcacacaacgcattgaatcagaagtttttgctgctatcaacgagattaatggaaaaatttgcggatattttgcccggtcaactgtctaaaatccttgcggatgaagatgcatcgcagggtttttggtcctgcatattctcctctgataaacacttgtatcaagcagctactaatattttatacaatacatttgacgttgagggtagactggaaggtatcttagcgattctgaatagtaatttgaccgttaacttgaagaatataaacgtgatgctacaaagattaatcaattgtgaattctatgagccttgcccccgtgctgttcgtgttttgatggacgtagtgagtgcatttgtagacccgatttctggtgtgtttgctaatttccaaactttgaagagccaaaataccgaaaaggaatttttaaaattctgggaatcatgttggttattcttggatacgatttataagtttactttgaaatgggcttctaaatatgactattctgaactggaaaatttcaccaaagatactttagatctaagtcgctctttggtggactcctttagagaattttcagatattcttcatgaccaaacgaaaaatttacttctcaacgttttagaaacctttaagaatatgttgtattggctgagattgagcgacgaagtacttttggaatcttgtgttagattaattataagcacgtctgatttagcacatgaaaagcatgtgaaagtggatgattccttggtagaaatgatggccaagtacgcctcgaaggcaaagagattttcaaataagttgacggagcaacaggcgagtgagattctacaaaaggctaaaatattcaataaagcactcacggaagaggtcgctacagaagctgaaaactacagaaaagaaaaggaattatcaagacttgggaaggtgatcgacttaacggattctgtgccggcgtcaccatccctctcgccctctctgtcttcaaccattgctagttcttctgctgaatccagggcagactatttacaaagaaaagctttatcttcttcaataactgggagaccaagagtagctcagcctaaaataacatcttttggtacgttccaatcatcagctaatgctaaactgcatcgtacaaaacctgttaagcctttatccaaaatggaattagctaggatgcaattattaaacaacagagttgttcatccacctagtgcgccagctttccatacaaagagtaggggtttgtctaacaaaaacgacgatagcagtagtgaggagagtgacaacgatatagaaagcgctcgggagctttttgctattgctaaggcaaaaggcaaaggaatacaaactgtcgatattaatggtaaggttgtcaagagacaaactgcggctgaattggctaaacaggagttagaacatatgagaaagagattaaatgttgatatgaaccctctatatgaaatcatattgcaatgggattacaccagaaatagtgaatatcctgatgatgagcctattggtaattattctgacgtaaaggatttcttcaactctcctgctgactaccaaaaagtcatgaagcctttactacttctagaatcttggcaaggtctatgttcttcacgtgatagagaggactataaacctttcagtattattgtaggaaatcgaactgctgtgtcagatttctatgatgtgtatgcctctgtcgctaaacaagtcatacaggattgtggtatttctgaatctgacttaattgtaatggcttatttacccgattttcgaccagacaaaaggttgtccagtgatgatttcaagaaagcacaacatacatgtttagcaaaggtgagaacattgaaaaataccaaaggtggtaatgttgatgtcacattacgaattcatagaaatcattctttcagtaaatttttgacactaagatcagagatatattgtgtgaaggttatgcaaatgacgactattgaaagagagtattcaacactggaagggctggaatactatgacttagttggccaaattctacaggctaaaccatcgcctcccgtaaatgtggatgcggcagaaattgaaacagttaagaaaagctataagctcaatacgtcgcaggctgaggccatcgttaattcggtatctaaagaaggtttttctttaattcagggtccacctggtacgggtaaaacaaagactatactgggtattattggttactttttgtctacaaagaatgcctcatcttcaaatgtcatcaaagtgccactagaaaagaactcatcgaatactgaacaactgttaaaaaagcaaaaaattctaatctgtgcccccagtaatgccgctgtggacgaaatctgcctcagactgaagagtggagtgtatgacaagcaggggcatcaatttaaacctcaattggtccgtgtaggtaggtcagacgttgtaaacgttgcaattaaggaccttactttagaagaacttgtggataaaaggataggtgaaaggaattacgaaatcagaacagatccggaactagaacgtaaatttaataatgctgtgactaaaagaagagaattgagaggaaaattagactctgagagtggtaatccagaaagtccaatgtcaaccgaagatatcagtaaattacaacttaagattagggagctaagtaaaataatcaatgaacttggccgtgatagggacgaaatgcgtgagaagaattccgtaaattataggaatagggatttggatagaaggaatgcacaggcccatatcttggcggttagtgacatcatatgttcgactttatctggttcagcccatgatgtactcgcaacaatgggtattaaatttgatacggtcattatagatgaagcatgtcaatgtaccgaactttcttcaattattcctctcaggtatggagggaagcgttgtattatggttggtgatcctaaccaactaccaccaactgttctttcaggtgcagcaagcaattttaaatacaatcagtcactgttcgttagaatggagaaaaatagctccccatacttgctggatgttcaataccgtatgcatccttccatcagtaaattcccctcttctgaattttatcagggacgactaaaagacggccctggtatggatatcttgaacaaaagaccctggcaccagcttgagccattagctccctacaaattttttgacatcattagtggtaggcaagaacaaaatgcgaagactatgtcttatacaaatatggaggaaatacgtgttgccattgagttagttgactaccttttcagaaaattcgataataaaattgatttcacgggaaaaatcggtataatttcaccttatagagagcaaatgcaaaaaatgcgtaaagagtttgcccgctattttggaggcatgatcaacaaatcaatcgatttcaatacaatcgacggtttccaaggtcaagaaaaagaaatcatcttgatatcgtgtgtccgtgccgatgatacgaaatctagtgtcggttttttaaaggactttcgtcgtatgaatgtggctctgactagagccaagacaagtatttgggttttgggacatcaaaggtctctggctaaaagcaagttatggagagatttgattgaagatgcaaaagatagaagttgtcttgcatatgcttgctcgggtttcctggatcccagaaataatagagctcaaagtattttaagaaagttcaatgtacccgtaccatcagagcaagaagatgattataagctacccatggaatatattacgcaaggccccgatgaggtaaaatccaataaggacacaaagaagagaagagttgtcgatgaaggtgaagaggcagataaagctgtaaagaaaaagaagaaagagaagaagaaggaaaagaaaaagtccaaggcagatgataagaaaaagaataacaagaaggcagaatcgcccagcacctcatctggtacaaagaaaaagtcatccatttttggtggaatgagtgtaccgagtgccgtagttcctaaaacttttcctgatgtggacagcaacaaaaaggcagcagcagttgttggtaaaaagaaaaataacaaacacgtttgtttttcggatgatgttagtttcataccaagaaatgacgaacctgaaattaaagtgaccagaagtttatcctctgtattgaaggaaaagcagttaggtttgaaggagacgagaacaatttctccgcctgaaatcagtaataatgaggatgatgatgacgaagatgattatacgccgtcaatctccgattcttcattaatgaaaagtgaagcaaatggtcgtaacaacagggtggcttctcataaccaaaatttcagcgctagtatatacgacgatccacaagtttcgcaagcaaagcagacgcaggtacctgctgctattacaaaacacagaagttcaaatagtgttttatccggtggttcttcgaggatcctgactgcttccgattacggtgaacccaatcaaaatggacagaatggagcaaataggaccctctctcaacatgtgggtaatgcgaatcaatactcaacggctcctgtgggtacaggcgaactgcatgaaactctgcccgcccatccgcaagacagctatcctgctgaggcagaagatccatatgatttaaacccccatccgcaaccacaatcttcagcattcaaaggacctggtagtgggcccacaggcacacgcaacagttcgagacggaatgcttcatctagcccatttatcccaaaaaaaagaaagcctagatcatga

SEQ ID NO: 8026 - DNA, 6696 bp, Artificial Sequence
  Description of Artificial Sequence: Synthetic polynucleotide
atgaattccaacaatcctgataataataatagcaacaacattaataataataataaggataaggatattgcccccaatagcgatgttcagttagctaccgtctataccaaggcaaagtcttacattcctcagattgaacaagtttatcaaggcacaaatccaaatattcaagaggcaaaattattaggggagttattacaagttttagcagaagttcccaagggtacgcatttattttgcgaccccatacttgaaccaatatctattttttccttgaccattttcagtttcaatgaagaagctacggccacatggttaaagaatcattttaatccaattctctctgtttgtgataaatgcattttgaattttgcgagagggaagtgcaaaatgttacaacattttgccattcaaagacatgtgccgcatgaacatgtagccaagtttaatgacatcgtatgccaatggagggtggaggctgtttttcctattcttagaaatatttccgttaacgataatacgggaattaacattacaaatgaaattgaaactgcaatgtacgagtgtctctgtaatccgcatatgttgaggcttaacaagcaacttaaggctactttcgaagcaatcttcaaatttttctacgacacaaagcatcgtttgttggacgttacgaatccattaagcataaaaacctttatatctggtgtcatattttgctggtgtgaaggttccaaagaggaaaatgagtggagcagagcttttttgaaggatttatactctagaaatttccatataaatctttctaacttaacaccggatattattgaggaagtttatatccatattttattcttacagaatccggcaaactggacagagattgtggtatctcaattctggtccagattattaccggttttcaatttatttgataaagacgtcttcatagagtactttcaggtcccaaaaaatgtggaatctttaaaaaaaacattcaaatttccgttagagccaatttttaaaatgtggtacaatcacttaagcaaaagttatcatgataagccattggactttttgttaagaggattaacaatgttcttgaataaatttggctccgagttttggtccaaaattgaacccttcacattccatagcattttggatataattttcaatagagattctttcccaatcaaattaatcaaaattcaagacaatccaattgttgagcatcaaacagaagtttactttcaacttaccggttctgtaaccgatttactttcttggaccttaccattttatcatgcattatctccatccaaaagaattcaaatggttagaaaggtctccatggcgttcttgcgtataatagccaattatccatccttgaaatccattcccaaagcttgtttaatgaattctgcaactgccttgttgagggctgtgttgactattaaggaaaatgaaagggcaatgctttataagaatgatgaatttgaaacagtacttttgactaaaacagattctagagctttgctcaacaatcctttgatccaagacataataattagatctgcttctaatcctaacgacttttatcctgggttaggtgctgcttctgcatctgtggccacatccacgatgatggtattggcagaatgtatcgattttgatatattattattatgtcatagaacgtttaagctttattctggtaaaccaattagcgaaattccaatttctaccaacgtcttggaaaatgttacaaataaaattgacttgagatcttttcatgacggtccattgttagccaaacagttgttagtatctttaaaaaatattaatggtcttttgatagtaccgtccaatactgccgtagctgaggcacacaacgcattgaatcagaagtttttgttattatctacgagattaatggaaaaatttgcggatattttgcccggtcaattatctaaaatccttgcggatgaagatgcatcccagggtttttggtcctgcatattctcctctgataaacacttgtatcaagcagctactaatattttatacaatacatttgacgttgagggtagattagaaggtatcttagcgattttgaatagtaatttgaccgttaacttgaagaatataaacgtgatgttacaaagattaatcaattgtgaattctatgagccttgcccccgtgctgttcgtgttttgatggacgtagtgagtgcatttgtagacccgatttctggtgtgtttgctaatttccaaactttgaagagccaaaataccgaaaaggaatttttaaaattctgggaaagttgttggttattcttggatacgatttataagtttactttgaaatgggcttctaaatatgactattctgaattggaaaatttcaccaaagatactttagatttgagtcgctctttggtggactcctttagagaattttctgatattcttcatgaccaaacgaaaaatttacttctcaacgttttagaaacctttaagaatatgttgtattggttgagattgagcgacgaagtacttttggaatcttgtgttagattaattataagcacgtctgatttagcacatgaaaagcatgtgaaagtggatgattccttggtagaaatgatggccaagtacgcctccaaggcaaagagattttctaataagttgacggagcaacaggcgagtgagattttacaaaaggctaaaatattcaataaagcactcacggaagaggtcgctacagaagctgaaaactacagaaaagaaaaggaattatctagacttgggaaggtgatcgacttaacggattctgtgccggcgtctccatccctctctccctctttatcttccaccattgctagttcttctgctgaatccagggcagactatttacaaagaaaagctttatcttcttctataactgggagaccaagagtagctcagcctaaaataacatcttttggtacgttccaatcttctgctaatgctaaattgcatcgtacaaaacctgttaagcctttatccaaaatggaattagctaggatgcaattattaaacaacagagttgttcatccacctagtgcgccagctttccatacaaagagtaggggtttgtctaacaaaaacgacgatagcagtagtgaggagagtgacaacgatatagaaagcgctagagagctttttgctattgctaaggcaaaaggcaaaggaatacaaactgtcgatattaatggtaaggttgtcaagagacaaactgcggctgaattggctaaacaggagttagaacatatgagaaagagattaaatgttgatatgaaccctttatatgaaatcatattgcaatgggattacaccagaaatagtgaatatcctgatgatgagcctattggtaattattctgacgtaaaggatttcttcaactctcctgctgactaccaaaaagtcatgaagcctttattacttttagaatcttggcaaggtttgtgttcttctcgtgatagagaggactataaacctttcagtattattgtaggaaatagaactgctgtgtctgatttctatgatgtgtatgcctctgtcgctaaacaagtcatacaggattgtggtatttctgaatctgacttaattgtaatggcttatttacccgattttaggccagacaaaaggttgtccagtgatgatttcaagaaagcacaacatacatgtttagcaaaggtgagaacattgaaaaataccaaaggtggtaatgttgatgtcacattaagaattcatagaaatcattctttcagtaaatttttgacattaagaagtgagatatattgtgtgaaggttatgcaaatgacgactattgaaagagagtattctacattagaagggttggaatactatgacttagttggccaaattttacaggctaaaccatctcctcccgtaaatgtggatgcggcagaaattgaaacagttaagaaaagctataagctcaatacgagccaggctgaggccatcgttaattctgtatctaaagaaggtttttctttaattcagggtccacctggtacgggtaaaacaaagactatattaggtattattggttactttttgtctacaaagaatgcctcttcttccaatgtcatcaaagtgccattggaaaagaactcttccaatactgaacaattattaaaaaagcaaaaaattttgatctgtgcccccagtaatgccgctgtggacgaaatctgcctcagattaaagagtggagtgtatgacaagcaggggcatcaatttaaacctcaattggtccgtgtaggtaggagtgacgttgtaaacgttgcaattaaggaccttactttagaagaacttgtggataaaaggataggtgaaaggaattacgaaatcagaacagatccggaattggaacgtaaatttaataatgctgtgactaaaagaagagaattgagaggaaaattagactctgagagtggtaatccagaaagtccaatgtctaccgaagatatcagtaaattacaacttaagattagggagttgagtaaaataatcaatgaacttggccgtgatagggacgaaatgcgtgagaagaattccgtaaattataggaatagggatttggatagaaggaatgcacaggcccatatcttggcggttagtgacatcatatgttccactttatctggttctgcccatgatgtactcgcaacaatgggtattaaatttgatacggtcattatagatgaagcatgtcaatgtaccgaactttcttccattattcctctcaggtatggagggaagcgttgtattatggttggtgatcctaaccaattaccaccaactgttctttctggtgcagcaagcaattttaaatacaatcagtctttattcgttagaatggagaaaaatagctccccatacttgttggatgttcaataccgtatgcatccttccatcagtaaattcccctcttctgaattttatcagggaagattgaaagacggccctggtatggatatcttgaacaaaagaccctggcaccagcttgagccattagctccctacaaattttttgacatcattagtggtaggcaagaacaaaatgcgaagactatgtcttatacaaatatggaggaaatacgtgttgccattgagttagttgactaccttttcagaaaattcgataataaaattgatttcacgggaaaaatcggtataatttctccttatagagagcaaatgcaaaaaatgcgtaaagagtttgcccgctattttggaggcatgatcaacaaatctatcgatttcaatacaatcgacggtttccaaggtcaagaaaaagaaatcatcttgatatcttgtgtccgtgccgatgatacgaaatctagtgtcggttttttaaaggactttcgtcgtatgaatgtggctttgactagagccaagacaagtatttgggttttgggacatcaaaggtctttggctaaaagcaagttatggagagatttgattgaagatgcaaaagatagaagttgtcttgcatatgcttgctctggtttcttggatcccagaaataatagagctcaaagtattttaagaaagttcaatgtacccgtaccaagtgagcaagaagatgattataagttgcccatggaatatattacgcaaggccccgatgaggtaaaatccaataaggacacaaagaagagaagagttgtcgatgaaggtgaagaggcagataaagctgtaaagaaaaagaagaaagagaagaagaaggaaaagaaaaagtccaaggcagatgataagaaaaagaataacaagaaggcagaaagtcccagcacctcttctggtacaaagaaaaagtcttccatttttggtggaatgagtgtaccgagtgccgtagttcctaaaacttttcctgatgtggacagcaacaaaaaggcagcagcagttgttggtaaaaagaaaaataacaaacacgtttgtttttctgatgatgttagtttcataccaagaaatgacgaacctgaaattaaagtgaccagaagtttatcctctgtattgaaggaaaagcagttaggtttgaaggagacgagaacaatttctccgcctgaaatcagtaataatgaggatgatgatgacgaagatgattatacgccgtctatctccgattcttctttaatgaaaagtgaagcaaatggtcgtaacaacagggtggcttctcataaccaaaatttcagcgctagtatatacgacgatccacaagtttctcaagcaaagcagacgcaggtacctgctgctattacaaaacacagaagtagtaatagtgttttatccggtggttcttccaggatcttgactgcttccgattacggtgaacccaatcaaaatggacagaatggagcaaataggaccctctctcaacatgtgggtaatgcgaatcaatactctacggctcctgtgggtacaggcgaattacatgaaactttacccgcccatccgcaagacagctatcctgctgaggcagaagatccatatgatttaaacccccatccgcaaccacaatcttctgcattcaaaggacctggtagtgggcccacaggcacacgcaacagtagtagaagaaatgcttcttctagcccatttatcccaaaaaaaagaaagcctagatcttga

SEQ ID NO: 8027 - DNA, 1362 bp, Saccharomyces cerevisiae
atggaactgaatcaggttttagaaaaaaaggagcagattctgcaatacttaggcactctggtcgggcttcacgaaaaagcgttgtctgatgtaaattcggcttcccaggtgacaagcatccggaaggatatcactatttgcttaaacgatctatgcagaattaatgatctcttagtatcccatgatggtctattgaaaagagaaattgggtccttacttcgagacaaacaagagctactagaactgaacgaaagagagcagcttctttggaaagagcggaagtcgtggcatattaagcaagaaaccgatgctgcgccggcggactatgttatcgataaggacgccataattaccatttcatcgcaccaccggacatcactaaacaaatatatcgagtcagtgggggcagaaaatacaatactatccaatacggatgattcggatgcaatgatcgaggaagtacagaacgctgaatcttctgcggatcaaatgatacgtaattacaaactgttacaattatctcataagcaagctaaatcagaaataataaggctggaaactttattaagagacttcaaaaaggacaataaattcattgaagaggagttaaaaaggcaatctggacggatacgttccgaaatgggtaatattgattttcatttgtccaagatagaggaatctaagcatcaattaatgaaaagaataggattcgagtcgcccctgacacaggaaaaatcactatcagaaaagatattcaatttaaggctgtccagcgcggatgaagattacaatgagagacaaactatcaacatgaaaaattttgttcatatgaaggatctcatagaactgaaaattgaagatctacaagagcaactaatgagaaataaaaatgagtcttctacagtactaacgcaacgtgaattatggctagattgtcaaaaaaaagtaggagatttggaaagcaaattaataaccaaacttcggagcagcagcaactccaaaatacctccaaatgaaatgtcagaaatgatcaattctacaatacagtacctaaataaccttcttgactcttctgatgaaaagctcacgacaactttaatatcaaacgaaagggacgtactttcgaaagcttgtgaagaactccatagcgaaagtaccactgcacaagatgggtcaagcgcactaccttctaaaccaattgatatacacaaaagccataaagggtcgaacgcgagttcaaatttaaaacagccctcgactccctcattcttggttgctagcaaatcgccaccaaagattggcatttctgaaagtgtagtaaacgctaataaaaatgatgccatatcaaaaaaagttgaatga

SEQ ID NO: 8028 - DNA, 1362 bp, Artificial Sequence
  Description of Artificial Sequence: Synthetic polynucleotide
atggaattgaatcaggttttagaaaaaaaggagcagattttacaatacttaggcactttggtcgggcttcacgaaaaagcgttgtctgatgtaaattctgcttcccaggtgacaagcatcagaaaggatatcactatttgcttaaacgatttatgcagaattaatgatctcttagtatcccatgatggtttattgaaaagagaaattgggtccttacttcgtgacaaacaagagttattggaattgaacgaaagagagcagcttctttggaaagagagaaagtcttggcatattaagcaagaaaccgatgctgcgccggcggactatgttatcgataaggacgccataattaccatttcttctcaccacagaacatctttgaacaaatatatcgagtctgtgggggcagaaaatacaatattatccaatacggatgattctgatgcaatgatcgaggaagtacagaacgctgaatcttctgcggatcaaatgatacgtaattacaaattattacaattatctcataagcaagctaaaagtgaaataataaggttagaaactttattaagagacttcaaaaaggacaataaattcattgaagaggagttaaaaaggcaatctggaagaatacgttccgaaatgggtaatattgattttcatttgtccaagatagaggaatctaagcatcaattaatgaaaagaataggattcgagtctcccttgacacaggaaaaatctttatctgaaaagatattcaatttaaggctttccagcgcggatgaagattacaatgagagacaaactatcaacatgaaaaattttgttcatatgaaggatctcatagaattgaaaattgaagatttgcaagagcaattgatgagaaataaaaatgagtcttctacagtattgacgcaacgtgaattatggcttgattgtcaaaaaaaagtaggagatttggaaagcaaattaataaccaaacttagaagcagcagcaactccaaaatacctccaaatgaaatgtctgaaatgatcaattctacaatacagtacttgaataaccttcttgactcttctgatgaaaagctcacgacaactttaataagcaacgaaagggacgtactttctaaagcttgtgaagaactccatagcgaaagtaccactgcacaagatgggtccagcgcattaccttctaaaccaattgatatacacaaaagccataaagggtctaacgcgagtagtaatttaaaacagccctccactccctctttcttggttgctagcaaatctccaccaaagattggcatttctgaaagtgtagtaaacgctaataaaaatgatgccatatccaaaaaagttgaatga

SEQ ID NO: 8029 - DNA, 1572 bp, Saccharomyces cerevisiae
atggccgccgttagagactacaagactgccttggaattcgccaagagcttaccaagactagatggtttgtctgtccaggagttgatggactccaagaccagaggtgggttgacttataacgactttttggttttgccaggtctggttgatttcccatcttctgaagttagcctacaaactaagttgacaaggaatatcactttgaacaccccattcgtttcctctccaatggacaccgtgacagaatcagaaatggccatcttcatggctttgttgggtggtatcggttttattcaccacaactgtaccccagaggaccaagctgacatggtcagaagagtcaagaactatgaaaatgggtttattaacaaccctatagtgatttccccaactactactgtgggtgaagctaagagtatgaaggaaagatttggattttccggtttccccgttacagaagatggtaaaagaaacggaaaattgatgggtatcgtcacttctcgtgatattcagttcgttgaagacaactctttgcttgttcaagatgttatgaccaaaaaccctgtcaccggtgcacaaggtattacattgtctgaaggtaatgaaattttaaagaagattaaaaagggtaagctattgattgttgacgacaatggtaacttagtttctatgctttccagaactgatttaatgaaaaatcagaactatccattggcttctaaatctgccaccaccaagcaactgttatgtggtgctgctatcggtactatcgatgctgataaggaaaggttaagactattagtcgaagcaggtttggatgttgttatcttagattcctctcaaggtaactctattttccaattgaacatgatcaaatggattaaagaaactttcccagatttggaaatcattgctggtaacgttgccaccagagaacaagctgctaacttgattgctgccggtgccgatggtttaagaattggtatgggttcaggctctatttgtatcactcaagaagttatggcctgtggtagaccacaaggtacagccgtctacaacgtgtgtgaatttgctaaccaattcggtattccatgtatggctgatggtggtgttcaaaacattggtcatattaccaaagctttggctcttggttcttctactgttatgatgggtggtatgttagctggtactactgaatctcctggtgaatatttctatcaagatggtaaaagattgaaggcatatcgtggtatgggttccattgacgccatgcaaaagactggtactaaaggtaatgcatctacctcccgttacttttccgaatcagacagtgttttggtcgcacaaggtgtctccggtgctgtcgttgacaaaggttctatcaagaaatttattccatatttgtacaacggtttacaacattcttgtcaagacattggttacaagtccctaactttattaaaggaaaatgtccaaagcggtaaagttagatttgaatttagaaccgcttctgctcaactagaaggtggtgttcataacttacattcttacgaaaagcgtttacataactaa

SEQ ID NO: 8030 - DNA, 1572 bp, Artificial Sequence
  Description of Artificial Sequence: Synthetic polynucleotide
atggccgccgttagagactacaagactgccttggaattcgccaagagcttaccaagattagatggtttgtctgtccaggagttgatggactccaagaccagaggtgggttgacttataacgactttttggttttgccaggtttagttgatttcccatcttctgaagttagcttacaaactaagttgacaaggaatatcactttgaacaccccattcgtttcctctccaatggacaccgtgacagaaagtgaaatggccatcttcatggctttgttgggtggtatcggttttattcaccacaactgtaccccagaggaccaagctgacatggtcagaagagtcaagaactatgaaaatgggtttattaacaaccctatagtgatttccccaactactactgtgggtgaagctaagagtatgaaggaaagatttggattttccggtttccccgttacagaagatggtaaaagaaacggaaaattgatgggtatcgtcacttctcgtgatattcagttcgttgaagacaactctttgcttgttcaagatgttatgaccaaaaaccctgtcaccggtgcacaaggtattacattgtctgaaggtaatgaaattttaaagaagattaaaaagggtaagttgttgattgttgacgacaatggtaacttagtttctatgctttccagaactgatttaatgaaaaatcagaactatccattggcttctaaatctgccaccaccaagcaattattatgtggtgctgctatcggtactatcgatgctgataaggaaaggttaagattattagtcgaagcaggtttggatgttgttatcttagattcctctcaaggtaactctattttccaattgaacatgatcaaatggattaaagaaactttcccagatttggaaatcattgctggtaacgttgccaccagagaacaagctgctaacttgattgctgccggtgccgatggtttaagaattggtatgggttctggctctatttgtatcactcaagaagttatggcctgtggtagaccacaaggtacagccgtctacaacgtgtgtgaatttgctaaccaattcggtattccatgtatggctgatggtggtgttcaaaacattggtcatattaccaaagctttggctcttggttcttctactgttatgatgggtggtatgttagctggtactactgaatctcctggtgaatatttctatcaagatggtaaaagattgaaggcatatcgtggtatgggttccattgacgccatgcaaaagactggtactaaaggtaatgcatctacctcccgttacttttccgaaagtgacagtgttttggtcgcacaaggtgtctccggtgctgtcgttgacaaaggttctatcaagaaatttattccatatttgtacaacggtttacaacattcttgtcaagacattggttacaagtccttgactttattaaaggaaaatgtccaaagcggtaaagttagatttgaatttagaaccgcttctgctcaattggaaggtggtgttcataacttacattcttacgaaaagcgtttacataactga

SEQ ID NO: 8031 - DNA, 1662 bp, Saccharomyces cerevisiae
atgtcgaaagacttgaattcttcacgcatcaaaatcattaaacctaatgactcttacataaaggttgaccggaaaaaagatttaacaaaatacgaattagaaaacggtaaagtaatttctactaaggaccgacctatcgcttctgtacctgccataacaggaaagataccaagtgatgaggaagtattcgactccaagacgggattacctaatcattcctttttaagagagcatttctttcatgagggtcgactttctaaggaacaggccataaaaatcttaaatatgtcaactgtagcattgagtaaagaacccaatctactaaaactcaaagcgccaattactatatgtggtgatattcacgggcagtattatgatttattgaaactgtttgaagttggcggtgaccccgccgaaatcgactatttattcttgggggattatgttgatagaggtgcattctcttttgagtgtctgatttatttgtactccttgaagttgaataatttagggagattttggatgctaagaggtaaccatgagtgtaagcacttgacctcttattttacttttaagaatgagatgttgcacaaatacgatatggaagtttacgatgcttgctgcagatcattcaatgtcttaccattagcagctttaatgaacggacaatatttttgtgtgcatggtggtatctctccagagttaaaatcagtagaggatgttaataaaattaatagatttcgagaaatcccatctcgtggtctcatgtgtgacctactatgggccgatcctgtcgaaaattatgatgatgcaagagatggtagcgaatttgatcagagcgaggatgaattcgtacctaacagtttgaggggttgctctttcgccttcacttttaaagcatcatgcaagtttttgaaggcaaatggtttgttatctattattagagcacacgaagcacaggatgctgggtacagaatgtataaaaacaataaagtaacaggcttcccgagcttaataaccatgttcagtgcgccaaactacctggacacatatcataataaagctgctgtgttaaaatatgaagaaaacgtcatgaacatcaggcagtttcacatgtctccgcacccttactggttgcctgattttatggatgttttcacctggtcactaccttttgttggcgaaaaagttactagcatgttagtgtctatattaaacatatgtagtgagcaggaacttgacccagaatcggaacccaaagctgcggaggagactgtaaaggcaagagcaaacgcaactaaggagaccggcaccccatctgatgaaaaggcgtcatcagcgatattagaagatgaaacccgaagaaaggctttgagaaataagatattagctattgctaaagtttcaagaatgttttcggtgctaagagaagagagcgaaaaagtggaatatttgaaaactatgaatgccggtgtcttacctcgtggtgctctagctcgtgggactgaaggtttgaatgaaacgctaagcacttttgaaaaggctagaaaggaagaccttattaatgaaaaattaccaccatctttatcggaggttgaacaagagaagattaaatactacgaaaaaatattaaagggagcggagaaaaagccacaactgtga

SEQ ID NO: 8032 - DNA, 1662 bp, Artificial Sequence
  Description of Artificial Sequence: Synthetic polynucleotide
atgtccaaagacttgaattcttctcgcatcaaaatcattaaacctaatgactcttacataaaggttgacagaaaaaaagatttaacaaaatacgaattagaaaacggtaaagtaatttctactaaggacagacctatcgcttctgtacctgccataacaggaaagataccaagtgatgaggaagtattcgactccaagacgggattacctaatcattcctttttaagagagcatttctttcatgagggtaggctttctaaggaacaggccataaaaatcttaaatatgtctactgtagcattgagtaaagaacccaatttattgaaactcaaagcgccaattactatatgtggtgatattcacgggcagtattatgatttattgaaattatttgaagttggcggtgaccccgccgaaatcgactatttattcttgggggattatgttgatagaggtgcattctcttttgagtgtttaatttatttgtactccttgaagttgaataatttagggagattttggatgttgagaggtaaccatgagtgtaagcacttgacctcttattttacttttaagaatgagatgttgcacaaatacgatatggaagtttacgatgcttgctgcagatctttcaatgtcttaccattagcagctttaatgaacggacaatatttttgtgtgcatggtggtatctctccagagttaaaatctgtagaggatgttaataaaattaatagatttagagaaatcccatctcgtggtctcatgtgtgacttattatgggccgatcctgtcgaaaattatgatgatgcaagagatggtagcgaatttgatcagagcgaggatgaattcgtacctaacagtttgaggggttgctctttcgccttcacttttaaagcatcttgcaagtttttgaaggcaaatggtttgttatctattattagagcacacgaagcacaggatgctgggtacagaatgtataaaaacaataaagtaacaggcttcccgagcttaataaccatgttcagtgcgccaaactacttggacacatatcataataaagctgctgtgttaaaatatgaagaaaacgtcatgaacatcaggcagtttcacatgtctccgcacccttactggttgcctgattttatggatgttttcacctggtctttgccttttgttggcgaaaaagttactagcatgttagtgtctatattaaacatatgtagtgagcaggaacttgacccagaaagtgaacccaaagctgcggaggagactgtaaaggcaagagcaaacgcaactaaggagaccggcaccccatctgatgaaaaggcgagttctgcgatattagaagatgaaaccagaagaaaggctttgagaaataagatattagctattgctaaagtttctagaatgttttctgtgttgagagaagagagcgaaaaagtggaatatttgaaaactatgaatgccggtgtcttacctcgtggtgctttggctcgtgggactgaaggtttgaatgaaacgttgagcacttttgaaaaggctagaaaggaagaccttattaatgaaaaattaccaccatctttatctgaggttgaacaagagaagattaaatactacgaaaaaatattaaagggagcggagaaaaagccacaattgtga

SEQ ID NO: 8033 - DNA, 618 bp, Saccharomyces cerevisiae
atgagcacacaatatattgatgagacagcatttgttcaggctgagcaaggtaaaaccaatctaatgttctctgacgaaaagcaacaggcacgttttgagctcggtgtttccatggttatttataagtgggatgcgttggatgttgccgtagaaaacagttggggtggtccagactcagctgagaagagagactggattacagggattgtagtagaccttttcaaaaatgaaaaagttgttgacgccgctttaatcgaagaaacgttactttatgcaatgatagatgaatttgaaactaatgttgaagacgactcggctttaccgattgccgtggaggtcatcaacatatataacgactgtttcaatttaaattataataaggtagaaaaattgtatttggaatggcaagaaaagcagagaactaaaaaatcaaaaagagttgtgcatattgagggtgatgatgatgaagacgatgaagatgtagaggactatgatgacgaagatgaagatgaagagatggacgaggttgtacctgacttagtatcgtctaaacctgaaccaattgttgacgaagacggttttgaattggttcaaccaaaaggaagaagaaagcactag

SEQ ID NO: 8034 - DNA, 618 bp, Artificial Sequence
  Description of Artificial Sequence: Synthetic polynucleotide
atgagcacacaatatattgatgagacagcatttgttcaggctgagcaaggtaaaaccaatttaatgttctctgacgaaaagcaacaggcacgttttgagctcggtgtttccatggttatttataagtgggatgcgttggatgttgccgtagaaaacagttggggtggtccagactctgctgagaagagagactggattacagggattgtagtagaccttttcaaaaatgaaaaagttgttgacgccgctttaatcgaagaaacgttactttatgcaatgatagatgaatttgaaactaatgttgaagacgactctgctttaccgattgccgtggaggtcatcaacatatataacgactgtttcaatttaaattataataaggtagaaaaattgtatttggaatggcaagaaaagcagagaactaaaaaatctaaaagagttgtgcatattgagggtgatgatgatgaagacgatgaagatgtagaggactatgatgacgaagatgaagatgaagagatggacgaggttgtacctgacttagtatcttctaaacctgaaccaattgttgacgaagacggttttgaattggttcaaccaaaaggaagaagaaagcactga

SEQ ID NO: 8035 - DNA, 3825 bp, Saccharomyces cerevisiae
atgggaaatactgactccaaatccagttcgatcctgctgaaccactgcatcgctctggttcgaccggaggacgcagatgcgtcctccccttcacgtacgtcgtcgccctcgccctccctttcagttgatgctgatccgttgagtttaaacctgtcaatttttaagctggattctgggcctgacgttgaagcgttgttcagcgacaaaccaaatgtcccgctagataccgtcttcaacgatttttacttggacttcatatcagtggacgtgcaggacttcagcattaactctagttttaaaaaaatcctgcacattatctctagtttgaacccacccaacttcaacaacttgattgtcttcctttcgctctacattattctttccgcgaactccttgcccgcttcccgtacgggacttcattcttcgcggcttatcaacgccataaagaccctttccatcctcatacctatttattttgaccgggtcaagtctagcacgcaggaccattacgatgtcttttgggccacgcaacatgaaattgagggtcttcccttgcaaaacatcccactgggagaaagactactgttggcgatcttgaaactggctttccaagataatttcacaactgccgtgaccgcccacccaagcgaattgtgggaaatcggcatcttgactaattccaacaagtaccgctcactactgaatatgcatcatcagtggcatctttttgccaatagactgcttcttttacgtcttttggcagctttattttcttcggacttgtacacgagcggcggtaaacaggacataaacatgtttcttgtctactggtgtactcaaatgcctaaggacaaaagcattcaattcacttcctcgctattaaattgcacgatgcggtttatacttaacaataataaagacttccagagcttgaaggctaattttttcagctccgacgccaccgcaagtaattggcagacgctttattttcaatttgtgcagtcttgtctgcacgttttaaatctctccatgtcatataaggcccaagacaatgtcattaccattttcctcacccaattacagcgagagtacgatttaaaattaattctttctagtttcattaaaattttcaaataccccatcgatctcgccatagaacaagaatcaaacatttttaacttcacaaacaataaacatattgatgccagcagaaggagagccgtgtcgacgagctctcacgataacagttcatcttcgcatgcttcgttgcctagttcatcatcggcggcataccatacgaaaccgcaaacaaagccacaattaccagagattcatcctttgttgatacctatgactattctcatgacaaacttgattgattgcaataagtgtttccaaaattattttgcagacaagtttgcaagtagattcatcattttttccatctactatttaaagtattatgattattcatcgttgtcgtcgtcttcatcaacaacacgctcgaattcttccaccacgagcaacggcacatctaacgatacgagcaacgagcgttctattgtggaactgaacgaaaatagcgtttcacagatcttgttacctttactcaatcatcttctcctgattttgacttcaaaaaaacttgttctcttcaaaatgctacagactttcaaccttaattattatacaaataatttgccaaatttctacaaactctccaacatcaacggcgatataaataatttgacgttcagagattttacagtcatacaattatcgaatttgattttagacaacattaaattcaatttacaaccgaatccgattttttatgaattgatttacaatctgctgccaattaatgacgaaattttgaccagttctcacaaaaatgatgattcacatgacgatttaattctattatcagcaaagaagaagtccgcatcaccaagtgcagccacctctagtcatacatcctcgtccaaactatcctacaatgctgcaatgtccctactttacgttctttctaagtcatcaaataaggtttatctgacaacttacgctacgcctgtcttcaagacaaaagatataccgtatatgatctcaccgggtttcaaaatggatttgttggcgttattattaaggtcaatcacaatatttttcaccttatattttgacgatgcggagaatctactatttgcaatggtgagacatcagtccatcactcaccaaataaatgactctataaattctatatccaaggccttagacatgaatccaaatttaaattcgcatatcatgaccttgaagcaaatgggattcaaccggaaagtccaatggaaggatttctatcaatttgaagagataactgatttgcctcaagtcaatctttattcttcagcaaatcaacaacatcaaaatcagcaacaaggccaaaatgacaatcgaggccaaaatcaaaatgaggacccaggtcaagaaaacgaatctccaactccttatttgcttttcaatcctgcgtcattagaaaatgaaacacctgggacagttaagcatttttcaagtacgaatcatgataagaactaccaagtcattgcattcattgatttcaagtcagattcaaatctgaatttgcaacatcaattagagtattggccacatagacctcaatggcctacaccactaacgtttactcacaaatgtaaaaatcccaaatatgaaaattttaatgaagtttggtccggtacagtttatttacaaattcttttgcgggttattaagcaaattttgtcgaaggttcctgaaattccgagaattaaatcggtgcaatatttcgaaactttatcgaaactgtcggctcttagatctgatatattgaccacaattcatccccggttaccactggatgttcgacgattgacaacttttcagcctttgtctatgcatactaatgataagctgttgatgtggttccacattgccacatgggcaaatattttcacgcagacgtcgtttaaatacgaggaaactttttcgcatgaattgaggcaatttgaatctcttttggatattagtattgacgaatgtgaaggcaataccatttcaaagcctacaacagatcgtttgggatacatacgaagatcaagaggtcaatcttctgtaagcttagaaagaacaataagcgctggctcaggtgtaagtaccccaacaatggcattaaatagaacaaaaagtaacggaagtggcaacttgatgaattatttttttcagaacacagcgcaaaatcactttcagcatttaagatcgtcttcgtcttcgtcctccattactttagagaagactacttctaatagttcttcaataagaactagaccaaattctcatcatgttgctcctgagactaataacaataattccactaatggtaatagcaacaacagtagtaacggcggattttcatttttcaaatggaaatggggtggaaataacagcaatggtggcagtgatgacaccaaggctagtcaaagagatccaaatgtcagcacgtcaatcattacagataatttgaatagttatatgtttgaagaagaaattagtcccggcgttgtaaacaacataattgaaaataacatttgggttggaaccgacatccgactatttaagatcgcaaacttcagaaaagaatctttttcatttctggaaatgacatcttcttttttcaagaaatttaaattcattaatagcgataatgacaattataataataacgaatttgatgataatacacagttaagatatacctctagagggttgtatagatag

SEQ ID NO: 8036 - DNA, 3825 bp, Artificial Sequence
  Description of Artificial Sequence: Synthetic polynucleotide
atgggaaatactgactccaaatccagttctatcttattaaaccactgcatcgctttggttaggccggaggacgcagatgcgtcctccccttctcgtacgtcttctccctctccctccctttctgttgatgctgatccgttgagtttaaacttatccatttttaagttggattctgggcctgacgttgaagcgttgttcagcgacaaaccaaatgtcccgttagataccgtcttcaacgatttttacttggacttcatatctgtggacgtgcaggacttcagcattaactctagttttaaaaaaatcttgcacattatctctagtttgaacccacccaacttcaacaacttgattgtcttcctttctctctacattattctttccgcgaactccttgcccgcttcccgtacgggacttcattcttcccgtcttatcaacgccataaagaccctttccatcctcatacctatttattttgaccgtgtcaagtctagcacgcaggaccattacgatgtcttttgggccacgcaacatgaaattgagggtcttcccttgcaaaacatcccattaggagaaagattattattggcgatcttgaaattggctttccaagataatttcacaactgccgtgaccgcccacccaagcgaattgtgggaaatcggcatcttgactaattccaacaagtaccgctctttattgaatatgcatcatcagtggcatctttttgccaatagattacttcttttacgtcttttggcagctttattttcttctgacttgtacacgagcggcggtaaacaggacataaacatgtttcttgtctactggtgtactcaaatgcctaaggacaaaagcattcaattcacttcctctttattaaattgcacgatgagatttatacttaacaataataaagacttccagagcttgaaggctaattttttcagctccgacgccaccgcaagtaattggcagacgctttattttcaatttgtgcagtcttgtttgcacgttttaaatctctccatgtcttataaggcccaagacaatgtcattaccattttcctcacccaattacagagagagtacgatttaaaattaattctttctagtttcattaaaattttcaaataccccatcgatctcgccatagaacaagaatctaacatttttaacttcacaaacaataaacatattgatgccagcagaaggagagccgtgagtacgagctctcacgataacagttcttcttctcatgcttctttgcctagttcttcttctgcggcataccatacgaaaccgcaaacaaagccacaattaccagagattcatcctttgttgatacctatgactattctcatgacaaacttgattgattgcaataagtgtttccaaaattattttgcagacaagtttgcaagtagattcatcattttttccatctactatttaaagtattatgattattcttctttgtcttcttcttcttctacaacacgcagtaattcttccaccacgagcaacggcacatctaacgatacgagcaacgagcgttctattgtggaattgaacgaaaatagcgtttctcagatcttgttacctttactcaatcatcttctcttgattttgacttctaaaaaacttgttctcttcaaaatgttacagactttcaaccttaattattatacaaataatttgccaaatttctacaaactctccaacatcaacggcgatataaataatttgacgttcagagattttacagtcatacaattatccaatttgattttagacaacattaaattcaatttacaaccgaatccgattttttatgaattgatttacaatttattaccaattaatgacgaaattttgaccagttctcacaaaaatgatgattctcatgacgatttaattttattaagtgcaaagaagaagtccgcatctccaagtgcagccacctctagtcatacatcctcctccaaactttcctacaatgctgcaatgtccttactttacgttctttctaagagtagtaataaggtttatttgacaacttacgctacgcctgtcttcaagacaaaagatataccgtatatgatctctccgggtttcaaaatggatttgttggcgttattattaaggtctatcacaatatttttcaccttatattttgacgatgcggagaatttactttttgcaatggtgagacatcagtccatcactcaccaaataaatgactctataaattctatatccaaggccttagacatgaatccaaatttaaattctcatatcatgaccttgaagcaaatgggattcaacagaaaagtccaatggaaggatttctatcaatttgaagagataactgatttgcctcaagtcaatctttattcttctgcaaatcaacaacatcaaaatcagcaacaaggccaaaatgacaatagaggccaaaatcaaaatgaggacccaggtcaagaaaacgaatctccaactccttatttgcttttcaatcctgcgtctttagaaaatgaaacacctgggacagttaagcatttttctagtacgaatcatgataagaactaccaagtcattgcattcattgatttcaagagtgattctaatttgaatttgcaacatcaattagagtattggccacatagacctcaatggcctacaccattaacgtttactcacaaatgtaaaaatcccaaatatgaaaattttaatgaagtttggtccggtacagtttatttacaaattcttttgagagttattaagcaaattttgtccaaggttcctgaaattccgagaattaaatctgtgcaatatttcgaaactttatccaaattatctgctcttagatctgatatattgaccacaattcatcccagattaccattagatgttcgtcgtttgacaacttttcagcctttgtctatgcatactaatgataagttgttgatgtggttccacattgccacatgggcaaatattttcacgcagacgtcttttaaatacgaggaaactttttctcatgaattgaggcaatttgaatctcttttggatattagtattgacgaatgtgaaggcaataccatttccaagcctacaacagatcgtttgggatacataagaagatctagaggtcaatcttctgtaagcttagaaagaacaataagcgctggcagtggtgtaagtaccccaacaatggcattaaatagaacaaaaagtaacggaagtggcaacttgatgaattatttttttcagaacacagcgcaaaatcactttcagcatttaagatcttcttcttcttcttcctccattactttagagaagactacttctaatagttcttctataagaactagaccaaattctcatcatgttgctcctgagactaataacaataattccactaatggtaatagcaacaacagtagtaacggcggattttcttttttcaaatggaaatggggtggaaataacagcaatggtggcagtgatgacaccaaggctagtcaaagagatccaaatgtcagcacgtccatcattacagataatttgaatagttatatgtttgaagaagaaattagtcccggcgttgtaaacaacataattgaaaataacatttgggttggaaccgacatcagattatttaagatcgcaaacttcagaaaagaatctttttcttttttggaaatgacatcttcttttttcaagaaatttaaattcattaatagcgataatgacaattataataataacgaatttgatgataatacacagttaagatatacctctagagggttgtatagatga

SEQ ID NO: 8037 - DNA, 402 bp, Saccharomyces cerevisiae
atggacgcacaactggaatgggcaagcagcctcgtcccaaagagacagcttcaacaacaacaacaacaacaggagcagcagcagcagcagcaacaggatttccacaaggaccagttgatgactgtgggtatgcgaatcagacagcgggtcgaccagggttatgcatcgaggacgccgagcacctcggacgcttcactacagccgggtgtcattagagattactcgagcgttattgttccgcaatttacaaggtcgcccttgcccactgctaactcgctaccacctatgctgataaaccagagaacaatgtcgaccgaggcgtcctcgctcgagaaatgggacgtcgcggaacctgccgcggagcacgaaacaatggttaatggatccaagagaagactttaa

SEQ ID NO: 8038 - DNA, 402 bp, Artificial Sequence
  Description of Artificial Sequence: Synthetic polynucleotide
atggacgcacaattggaatgggcaagcagcctcgtcccaaagagacagcttcaacaacaacaacaacaacaggagcagcagcagcagcagcaacaggatttccacaaggaccagttgatgactgtgggtatgagaatcagacagagagtcgaccagggttatgcaagcaggacgccgagcaccagtgacgcttctttgcagccgggtgtcattagagattactccagcgttattgttccgcaatttacaaggtctcccttgcccactgctaactctttaccacctatgttgataaaccagagaacaatgtctaccgaggcgtcctctctcgagaaatgggacgtcgcggaacctgccgcggagcacgaaacaatggttaatggatccaagagaagactttga

SEQ ID NO: 8039 - DNA, 1275 bp, Saccharomyces cerevisiae
atgtccgaagctaccctctcctccaagcaaaccattgaatgggaaaacaaatactccgcccacaactaccaccccttgcccgtcgtttttcacaaggctaagggcgcacatgtgtgggacccggagggtaagctgtacctcgacttcctgagcgcttattctgccgtcaaccagggccattgccatcctcacatcatcaaggctttgacggagcaagcacaaacactaacattgtcctccagagcgttccacaacgatgtttacgcgcaattcgccaagttcgtgaccgaattcttcgggttcgaaaccgttttgcccatgaacaccggtgcagaagccgtggaaactgctttgaagttggccagaagatgggggtacatgaagaagaacatccctcaagataaagccatcattctgggtgccgagggtaacttccacgggagaaccttcggtgctatcagtttgagtaccgactacgaggactccaagttgcatttcgggcctttcgtgcctaacgttgccagtggtcactccgtgcacaagatcagatacggccacgcagaagatttcgtccctatcttggaatctcctgaaggtaagaacgttgccgccatcattctagagccaattcagggtgaagccggtatcgtcgtgccccccgcagactacttcccaaaggtctccgcattatgccgtaagcacaacgtcctattgatcgttgacgaaattcaaaccggtatcggtagaaccggtgagttgctttgctacgaccactacaaggcagaggccaagcctgatattgttttgttaggtaaggctctctcaggtggtgttcttcccgtctcatgtgttctgtcttctcacgacatcatgtcttgctttaccccaggatctcacggttctactttcggcggtaatcctttggcttcccgcgttgccatcgccgccctcgaggtcatccgcgacgagaagctgtgccaaagagccgcccaactgggtagctctttcatcgcccaattgaaagctctccaagccaaatctaacggtataatctctgaggtgcgtggtatgggactgcttaccgccatcgtaatcgacccatccaaggccaatggtaagaccgcttgggacttgtgtctattgatgaaggatcacggcctcttggctaagcccacccacgaccacatcatcagattggctcctcctttggtcatctccgaagaggacttgcaaaccggtgtcgaaaccattgccaagtgtatcgatctgttataa

SEQ ID NO: 8040 - DNA, 1275 bp, Artificial Sequence
  Description of Artificial Sequence: Synthetic polynucleotide
atgtccgaagctaccctctcctccaagcaaaccattgaatgggaaaacaaatactccgcccacaactaccaccccttgcccgtcgtttttcacaaggctaagggcgcacatgtgtgggacccggagggtaagttgtacctcgacttcttgagcgcttattctgccgtcaaccagggccattgccatcctcacatcatcaaggctttgacggagcaagcacaaacattaacattgtcctccagagcgttccacaacgatgtttacgcgcaattcgccaagttcgtgaccgaattcttcgggttcgaaaccgttttgcccatgaacaccggtgcagaagccgtggaaactgctttgaagttggccagaagatgggggtacatgaagaagaacatccctcaagataaagccatcattttgggtgccgagggtaacttccacgggagaaccttcggtgctatcagtttgagtaccgactacgaggactccaagttgcatttcgggcctttcgtgcctaacgttgccagtggtcactccgtgcacaagatcagatacggccacgcagaagatttcgtccctatcttggaatctcctgaaggtaagaacgttgccgccatcattttagagccaattcagggtgaagccggtatcgtcgtgccccccgcagactacttcccaaaggtctccgcattatgccgtaagcacaacgtcttattgatcgttgacgaaattcaaaccggtatcggtagaaccggtgagttgctttgctacgaccactacaaggcagaggccaagcctgatattgttttgttaggtaaggctctctctggtggtgttcttcccgtctcctgtgttttatcttctcacgacatcatgtcttgctttaccccaggatctcacggttctactttcggcggtaatcctttggcttcccgcgttgccatcgccgccctcgaggtcatccgcgacgagaagttgtgccaaagagccgcccaattgggtagctctttcatcgcccaattgaaagctctccaagccaaatctaacggtataatctctgaggtgcgtggtatgggattgcttaccgccatcgtaatcgacccatccaaggccaatggtaagaccgcttgggacttgtgtttgttgatgaaggatcacggcctcttggctaagcccacccacgaccacatcatcagattggctcctcctttggtcatctccgaagaggacttgcaaaccggtgtcgaaaccattgccaagtgtatcgatttattatga

SEQ ID NO: 8041 - DNA, 270 bp, Saccharomyces cerevisiae
atggagacacctttggatttattgaaactcaatctcgatgagagggtgtacatcaagctgcgcggggccaggacgctggtgggcacactgcaagcgttcgactcacactgcaacatcgtgctgagtgatgcagtagagaccatataccaattaaacaacgaggagttgagtgagtccgaaagacgatgtgaaatggtgttcatcagaggagacacagtgactctaatcagcacgccctctgaagatgacgatggcgcagtggagatataa

SEQ ID NO: 8042 - DNA, 270 bp, Artificial Sequence
  Description of Artificial Sequence: Synthetic polynucleotide
atggagacacctttggatttattgaaactcaatctcgatgagagggtgtacatcaagttgcgcggggccaggacgttagtgggcacattacaagcgttcgactctcactgcaacatcgtgttgagtgatgcagtagagaccatataccaattaaacaacgaggagttgagtgagtccgaaagaagatgtgaaatggtgttcatcagaggagacacagtgactttgatcagcacgccctctgaagatgacgatggcgcagtggagatatga

SEQ ID NO: 8043 - DNA, 960 bp, Saccharomyces cerevisiae
atgtggaagagatcgttccactcccaaggagggcccctgcgtgccagaacaaagtttaccaaaccaaagccaaaacaaccggtgcttcccaaagacaaaataagaccgcccactcaattgactcatcactccaacaacctgaggattaccgaaccaatcccaccaacaacctcaaacctgcgctgtcccgacgaccacccgctgtggcagttcttctccaacaagaaattcatcaggtccgccgacgacttgccgccttccagccatatcagaccctggagcatcccagagttgaggcacaagtcctttaacgacttgcattccctttggtacaactgcctcagggagcaaaatgtgcttgctcgcgaaaaccatctcttgaaaaacattgttggctccacgcatgacgaattcagtgagctctctaactctatcagaaccaccatgtggcaaataagacatgtacttaacgaaagagagctggcctatagcgcttcacgcgaatttttacaggatgaatcggagaggaaaaagttcttggatactttggccaacgattacttcttgaacaaggatatccctgatgacgaagtcgcctccatgctcacacgattccagttggccattttcggcatatcggaaaccatccaggataatacagtcgacattaacttcatcgacgggatcaagttcttggcaaacttaaaactacagcggttcaaggactccaatgacctcatatccgaaatatcacaagaaccgatcacagacgtgggcgagtcgttcatcttattcacttccgacttcgaacctcatgccgttcaagaggcttgtgtcgccatcaaagacctgagaaagtccccagataataaagtccctaaattagacgaactccccaccgtgagaaaatacttgaaacagctaattcatgcaagctccgtggagcaagcaactgcatga

SEQ ID NO: 8044 - DNA, 960 bp, Artificial Sequence
  Description of Artificial Sequence: Synthetic polynucleotide
atgtggaagagatctttccactcccaaggagggcccttacgtgccagaacaaagtttaccaaaccaaagccaaaacaaccggtgcttcccaaagacaaaataagaccgcccactcaattgactcatcactccaacaacttgaggattaccgaaccaatcccaccaacaaccagtaaccttcgctgtcccgacgaccacccgttatggcagttcttctccaacaagaaattcatcaggtccgccgacgacttgccgccttccagccatatcagaccctggagcatcccagagttgaggcacaagtcctttaacgacttgcattccctttggtacaactgcctcagggagcaaaatgtgcttgctcgcgaaaaccatctcttgaaaaacattgttggctccacgcatgacgaattcagtgagctctctaactctatcagaaccaccatgtggcaaataagacatgtacttaacgaaagagagttggcctatagcgctagtcgcgaatttttacaggatgaaagtgagaggaaaaagttcttggatactttggccaacgattacttcttgaacaaggatatccctgatgacgaagtcgcctccatgctcacaagattccagttggccattttcggcatatctgaaaccatccaggataatacagtcgacattaacttcatcgacgggatcaagttcttggcaaacttaaaattacagagattcaaggactccaatgacctcatatccgaaatatctcaagaaccgatcacagacgtgggcgagagtttcatcttattcacttccgacttcgaacctcatgccgttcaagaggcttgtgtcgccatcaaagacttgagaaagtccccagataataaagtccctaaattagacgaactccccaccgtgagaaaatacttgaaacagttgattcatgcaagctccgtggagcaagcaactgcatga

SEQ ID NO: 8045 - DNA, 2130 bp, Saccharomyces cerevisiae
atgttggaagagcaactatatttgttagcttgcatttttgcatctagggctgacacgcgcaatatcaaaaagttgtctactagactgggctcacaatccaagtacttggagattctctgtgttttgtggccagaattagatgacccaaaaaaccttttgtttcttcgtgaattagaagaggaggtgcaaagtccggaaggggaagaaacaaccgacgaagatgtaatagtagaactattagaaagtgacagcagtttgattccattaattgaaagtgataccacaacgagatcgaacagatatcatgaactgcaagaattcataagcaaaaaactcaataacaagaccttggagaattttgaggagtggttgagagaaaggattttaatatgtaatgaaatgatacctgaaacacctttattatattctgtactatgggagactgccaagtcaaaagtgttatctacaaaatttataggatgggtagaaggagtattaaaacccctcgaccacctaaataaacggcttcatctcatatttaaaatcaacgaatgggaaaaaatgcctgatagcgagttatttaagataatatttgacggtgtagaggatatgcaaggatatattggtatagcagatgttattgaagatgaattagctcccactttgtcttatgggaagaaatgggaaacgttcattacggaattcttcaataaacagcagttctcactaaaatctgatactaattaccagttatttataaagctctattacagtctcgaaaaaggagtaaaagataacagtgaagcgtccagaaaattgcaaagtaatgtggttgatatattatttcacaacagtgagaatttatttaatttatccagtttaactcataagcttgatgaattatggagtatcttgagtggattccctgatgaaattacaatagaagaacagaaaactattactgctctagagatgaaacaatttatggaattcttcatcaaatgttccacgaaattttcatttaaagaaatctttgccataacacaggaagaagaatcggctcagttggcccatttctcttcactatgccatgaagaatttaacaaagccaacgaaatctccagttttttgcaagccatgtatgaaacggtcttggacatcagcaaggatgataaaattttcacccgaattagtatggatgaaaagctatacagtatattggaaatcctcttacaaatgaatgagttcgcgtacattgaagccatcatagaaagattcgactacagtaacaatacccaaatatatgaacttctggtgaagttcttctggcatttcttcaataatgcttctaatggattacgtaaagagcctgaaatgaaaaaagcttcgcaaacgttacaaataattcagaagcatatgtcgcaacgggcaggcacaaatctaactaagctggaagtattgcttgagatatcagacaaattgtcgcattattccataaacctaaataagtcgcacaatggcgcaagagataccgctttcaaaccaagcaacattctagaatatagagattgccccctcgatataatatccaacttattagagctgaacccgcgattgtataaggatctgccaactacaaaaagcttgttattcgggatttacgacagcttatccattaatagagagggccaaacgggtaaagtggaagtggatttgatggtattacatattgactatgccttggtgaatttagattttggcacagcatacgaattgggcaagcaagtgtttgaaatttgtcaagaagcgggccaacatatgatgaaggcgttgggcgatgagcattggttaacattttatcaaatggggaagtttgtcgatccaaattgggtggataatgaaattcccacagagataattgttctgcagatgagcatcttgggccgcttactggaggtttgcccccttgaggaagtcgaaattgttacatcgcaatggagcacactagaattggagctaagcgcccgtgacctggtgaaagacaagtacgcactggacggacagaacgacaataagagtaaggtaggcggcattgctagggagattttccacaacgtgactaatttctga

SEQ ID NO: 8046 - DNA, 2130 bp, Artificial Sequence
  Description of Artificial Sequence: Synthetic polynucleotide
atgttggaagagcaattatatttgttagcttgcatttttgcatctagggctgacacgcgcaatatcaaaaagttgtctactagattgggctctcaatccaagtacttggagattctctgtgttttgtggccagaattagatgacccaaaaaaccttttgtttcttcgtgaattagaagaggaggtgcaaagtccggaaggggaagaaacaaccgacgaagatgtaatagtagaattattagaaagtgacagcagtttgattccattaattgaaagtgataccacaacgagatctaacagatatcatgaattacaagaattcataagcaaaaaactcaataacaagaccttggagaattttgaggagtggttgagagaaaggattttaatatgtaatgaaatgatacctgaaacacctttattatattctgtattatgggagactgccaagagtaaagtgttatctacaaaatttataggatgggtagaaggagtattaaaacccctcgaccacttgaataaaagacttcatctcatatttaaaatcaacgaatgggaaaaaatgcctgatagcgagttatttaagataatatttgacggtgtagaggatatgcaaggatatattggtatagcagatgttattgaagatgaattagctcccactttgtcttatgggaagaaatgggaaacgttcattacggaattcttcaataaacagcagttctctttgaaatctgatactaattaccagttatttataaagctctattacagtctcgaaaaaggagtaaaagataacagtgaagcgtccagaaaattgcaaagtaatgtggttgatatattatttcacaacagtgagaatttatttaatttatccagtttaactcataagcttgatgaattatggagtatcttgagtggattccctgatgaaattacaatagaagaacagaaaactattactgctttggagatgaaacaatttatggaattcttcatcaaatgttccacgaaattttcttttaaagaaatctttgccataacacaggaagaagaatctgctcagttggcccatttctcttctttatgccatgaagaatttaacaaagccaacgaaatctccagttttttgcaagccatgtatgaaacggtcttggacatcagcaaggatgataaaattttcaccagaattagtatggatgaaaagttgtacagtatattggaaatcctcttacaaatgaatgagttcgcgtacattgaagccatcatagaaagattcgactacagtaacaatacccaaatatatgaacttttagtgaagttcttctggcatttcttcaataatgcttctaatggattacgtaaagagcctgaaatgaaaaaagcttctcaaacgttacaaataattcagaagcatatgtctcaaagagcaggcacaaatttaactaagttggaagtattgcttgagatatctgacaaattgtctcattattccataaacttgaataagtctcacaatggcgcaagagataccgctttcaaaccaagcaacattttggaatatagagattgccccctcgatataatatccaacttattagagttgaacccgcgtttgtataaggatttaccaactacaaaaagcttgttattcgggatttacgacagcttatccattaatagagagggccaaacgggtaaagtggaagtggatttgatggtattacatattgactatgccttggtgaatttagattttggcacagcatacgaattgggcaagcaagtgtttgaaatttgtcaagaagcgggccaacatatgatgaaggcgttgggcgatgagcattggttaacattttatcaaatggggaagtttgtcgatccaaattgggtggataatgaaattcccacagagataattgttttacagatgagcatcttgggccgcttattggaggtttgcccccttgaggaagtcgaaattgttacatctcaatggagcacattagaattggagttgagcgcccgtgacttggtgaaagacaagtacgcattggacggacagaacgacaataagagtaaggtaggcggcattgctagggagattttccacaacgtgactaatttctga

SEQ ID NO: 8047 - DNA, 768 bp, Saccharomyces cerevisiae
atggctgtcggaaagaataagagactatccaagggtaagaaaggtcaaaagaagagagtcgttgacccatttaccagaaaggaatggttcgacattaaagctccatccacttttgaaaacagaaatgttggtaagactttagttaacaagtccactggtttgaagagtgcttcagatgctttgaaaggtagagttgtcgaagtttgcttggctgacttacagggttctgaagaccactctttcagaaaaatcaaattaagagttgacgaagtccaaggtaagaatttattgaccaacttccacggtatggacttcactactgataaattgagatccatggttagaaagtggcaaactttgatcgaagctaacgttactgttaagacttctgatgattacgttttgagaatctttgctatcgccttcaccagaaagcaagctaaccaagttaagagacactcttacgctcaatcttcccatatcagagctatcagaaaggttatttccgaaatcttgactaaggaagttcaaggatctaccttggcccaattgacctccaagttgattccagaagttatcaacaaggaaattgaaaacgccaccaaggacattttcccactacaaaacatccatgttagaaaggttaagttgttgaaacaaccaaagttcgatgtcggtgctttgatggctttgcacggtgaaggttctggtgaagaaaagggtaagaaggttaccggtttcaaggacgaagtcttggaaactgtgtaa

SEQ ID NO: 8048 - DNA, 768 bp, Artificial Sequence
  Description of Artificial Sequence: Synthetic polynucleotide
atggctgtcggaaagaataagagattatccaagggtaagaaaggtcaaaagaagagagtcgttgacccatttaccagaaaggaatggttcgacattaaagctccatccacttttgaaaacagaaatgttggtaagactttagttaacaagtccactggtttgaagagtgcttctgatgctttgaaaggtagagttgtcgaagtttgcttggctgacttacagggttctgaagaccactctttcagaaaaatcaaattaagagttgacgaagtccaaggtaagaatttattgaccaacttccacggtatggacttcactactgataaattgagatccatggttagaaagtggcaaactttgatcgaagctaacgttactgttaagacttctgatgattacgttttgagaatctttgctatcgccttcaccagaaagcaagctaaccaagttaagagacactcttacgctcaatcttcccatatcagagctatcagaaaggttatttccgaaatcttgactaaggaagttcaaggatctaccttggcccaattgacctccaagttgattccagaagttatcaacaaggaaattgaaaacgccaccaaggacattttcccattgcaaaacatccatgttagaaaggttaagttgttgaaacaaccaaagttcgatgtcggtgctttgatggctttgcacggtgaaggttctggtgaagaaaagggtaagaaggttaccggtttcaaggacgaagtcttggaaactgtgtga

SEQ ID NO: 8049 - DNA, 2937 bp, Saccharomyces cerevisiae
atggctaaaacattgaaagatttggacggttggcaagttatcattacagatgatcaggggagggttattgacgacaacaatagaagaagatcaagaaaaagaggaggagaaaacgtatttctgaaaagaatttctgatggattgagttttgggaagggtgagagcgtgatatttaatgataatgtgacggaaacatattctgtctacttgatccatgagatcagactcaatacacttaataatgttgtggagatttgggttttttcttacttgagatggtttgaactcaaaccaaaactgtactacgaacaattcaggccagatctaataaaggaagatcatcctttagaattttacaaagataaatttttcaacgaagtaaataagagcgagttatatttaactgctgagctatcagagatttggcttaaggatttcattgcagttggacagatactgccagagtcacaatggaatgatagtagtatcgataaaatagaggatagagattttctagtacgttatgcatgcgaacctactgcggaaaagtttgtaccaattgatatttttcaaatcataagaagagtaaaggaaatggaacccaaacaatctgatgaatacttgaaaagagtatctgtaccagtgagtgggcagaagacaaatagacaggtgatgcataagatgggagttgaaagatcttcaaaaagactagcaaagaaaccttcaatgaaaaaaattaaaatcgagccctctgcagatgatgacgtaaataatggaaatataccgtctcagcgaggaacgtcaacaactcatggttcaatttctccccaagaagagtctgtttcccctaacatctcatcggcgtccccttctgcgctcacatcacctacagattcttcgaaaattttacaaaaaagatctatatcaaaggaactaattgtttcagaggaaataccaataaactcttcagaacaggaatccgattatgagccaaacaatgaaacatctgtgctttcaagtaaacctgggtcaaagccagagaagacatctacagaactcgttgacggccgagagaattttgtatatgcaaataatccagaagtgagtgatgatggtgggcttgaagaggaaacagatgaagttagttcagaaagttctgatgaagcaataataccagtaaataaaagacgtggcgctcacggaagcgaattgagcagtaaaattagaaaaatccacattcaagaaacacaagaattttctaaaaattacactacagaaacagataacgaaatgaacggaaatggaaaacctggaattcccaggggcaacaccaaaattcatagtatgaacgaaaatcctacaccagaaaaaggtaatgcaaagatgattgatttcgctactttgtcaaagttgaaaaaaaaatatcagataattttagaccggtttgcaccagataatcaagtaacagattcctcccaattgaacaaattaacagacgaacagtcaagcttggacgttgcaggccttgaggataagtttagaaaagcatgctcttcatctggaagagaaaccattctgtcaaattttaacgctgatataaatttagaggaatcaattagagaatctttacaaaagagagaactactaaaatcacaagtggaggattttacaagaatattccttccgatttacgacagtttgatgtcttcccaaaataaactattttatattaccaatgcagatgattctactaaattccagcttgtgaatgatgtaatggatgagttgatcacctcttcggcccgaaaggaactacctattttcgattacattcatattgatgccttggaactggcaggaatggatgcattatatgagaaaatatggttcgccatttctaaagaaaatctatgcggtgatatatcactagaggccttaaacttctatattacaaatgtcccgaaagcaaaaaagagaaagacactaatattaatacaaaatccggaaaatctattgagtgagaagattttacaatatttcgagaaatggatttcttcgaaaaattcaaaattgtctatcatttgcgttggcggacataatgtgacgattagagagcaaataaatataatgccctccctcaaagcacactttaccgaaatcaaacttaataaggtggacaagaatgaattgcaacaaatgatcatcacgcgactcaaatctttattgaaaccttttcatgtcaaagtaaatgataagaaggaaatgactatttacaataatattcgcgaaggacagaaccagaaaataccagataatgtgatagtaatcaatcataagatcaacaacaaaatcactcaacttattgcaaagaacgtagccaacgtaagtggtagtactgaaaaagcattcaaaatatgtgaagctgccgtagaaatttctaaaaaagacttcgtacggaaaggtggtctacaaaagggtaaattggtagtgtcacaggagatggtaccacgctatttctcagaagctattaacggattcaaggatgaaactatttcaaagaagattataggaatgtctctgttgatgagaacatttttatataccctggcgcaagaaaccgaaggcacgaatcgtcatacgcttgctctggagaccgtcctgattaagatggtgaagatgttgcgggacaacccagggtacaaggcgtcaaaagaaattaagaaggtcatatgcggtgcctgggagcccgcaataactatagagaaactaaagcaattttcttggataagtgtagtgaatgatttagtgggagaaaaattagttgttgtggtgctcgaggagcccagtgcaagcattatggtagaactaaaacttcctttagaaataaattacgccttttcgatggatgaagaattcaaaaatatggactgcatttga

SEQ ID NO: 8050 - DNA, 2937 bp, Artificial Sequence
  Description of Artificial Sequence: Synthetic polynucleotide
atggctaaaacattgaaagatttggacggttggcaagttatcattacagatgatcaggggagggttattgacgacaacaatagaagaagatctagaaaaagaggaggagaaaacgtatttttgaaaagaatttctgatggattgagttttgggaagggtgagagcgtgatatttaatgataatgtgacggaaacatattctgtctacttgatccatgagatcagactcaatacacttaataatgttgtggagatttgggttttttcttacttgagatggtttgaactcaaaccaaaactttactacgaacaattcaggccagatttgataaaggaagatcatcctttagaattttacaaagataaatttttcaacgaagtaaataagagcgagttatatttaactgctgagttatctgagatttggcttaaggatttcattgcagttggacagatattgccagagtctcaatggaatgatagtagtatcgataaaatagaggatagagattttttggtacgttatgcatgcgaacctactgcggaaaagtttgtaccaattgatatttttcaaatcataagaagagtaaaggaaatggaacccaaacaatctgatgaatacttgaaaagagtatctgtaccagtgagtgggcagaagacaaatagacaggtgatgcataagatgggagttgaaagatcttctaaaagattagcaaagaaaccttctatgaaaaaaattaaaatcgagccctctgcagatgatgacgtaaataatggaaatataccgtctcagaggggaacgagtacaactcatggttccatttctccccaagaagagtctgtttcccctaacatctcttctgcgtccccttctgcgctcacatctcctacagattcttctaaaattttacaaaaaagatctatatccaaggaattgattgtttctgaggaaataccaataaactcttctgaacaggaatccgattatgagccaaacaatgaaacatctgtgctttccagtaaacctgggtccaagccagagaagacatctacagaactcgttgacggcagagagaattttgtatatgcaaataatccagaagtgagtgatgatggtgggcttgaagaggaaacagatgaagttagttctgaaagttctgatgaagcaataataccagtaaataaaagacgtggcgctcacggaagcgaattgagcagtaaaattagaaaaatccacattcaagaaacacaagaattttctaaaaattacactacagaaacagataacgaaatgaacggaaatggaaaacctggaattcccaggggcaacaccaaaattcatagtatgaacgaaaatcctacaccagaaaaaggtaatgcaaagatgattgatttcgctactttgtccaagttgaaaaaaaaatatcagataattttagacagatttgcaccagataatcaagtaacagattcctcccaattgaacaaattaacagacgaacagagtagcttggacgttgcaggccttgaggataagtttagaaaagcatgctcttcttctggaagagaaaccattttatccaattttaacgctgatataaatttagaggaaagtattagagaatctttacaaaagagagaattattgaaatctcaagtggaggattttacaagaatattccttccgatttacgacagtttgatgtcttcccaaaataaattattttatattaccaatgcagatgattctactaaattccagcttgtgaatgatgtaatggatgagttgatcacctcttctgccagaaaggaattacctattttcgattacattcatattgatgccttggaattggcaggaatggatgcattatatgagaaaatatggttcgccatttctaaagaaaatttatgcggtgatatatctttggaggccttaaacttctatattacaaatgtcccgaaagcaaaaaagagaaagacattaatattaatacaaaatccggaaaatttattgagtgagaagattttacaatatttcgagaaatggatttcttctaaaaattctaaattgtctatcatttgcgttggcggacataatgtgacgattagagagcaaataaatataatgccctccctcaaagcacactttaccgaaatcaaacttaataaggtggacaagaatgaattgcaacaaatgatcatcacgaggctcaaatctttattgaaaccttttcatgtcaaagtaaatgataagaaggaaatgactatttacaataatattcgcgaaggacagaaccagaaaataccagataatgtgatagtaatcaatcataagatcaacaacaaaatcactcaacttattgcaaagaacgtagccaacgtaagtggtagtactgaaaaagcattcaaaatatgtgaagctgccgtagaaatttctaaaaaagacttcgtaagaaaaggtggtttacaaaagggtaaattggtagtgtcccaggagatggtaccacgctatttctctgaagctattaacggattcaaggatgaaactatttccaagaagattataggaatgtctttgttgatgagaacatttttatataccttagcgcaagaaaccgaaggcacgaatcgtcatacgcttgctttggagaccgtcttgattaagatggtgaagatgttgagagacaacccagggtacaaggcgtccaaagaaattaagaaggtcatatgcggtgcctgggagcccgcaataactatagagaaattgaagcaattttcttggataagtgtagtgaatgatttagtgggagaaaaattagttgttgtggtgctcgaggagcccagtgcaagcattatggtagaattgaaacttcctttagaaataaattacgccttttccatggatgaagaattcaaaaatatggactgcatttga

SEQ ID NO: 8051 - DNA, 1347 bp, Saccharomyces cerevisiae
atggtgatgtcaagaatacgagatacaatagccaggccattccagaaccttacagcccttgagaaagtggtacagtggctaagattagggacgacattactcataatctctttcgggttggcgttgactgtcggacccctttcttcgccaagaacattgtacatgtcacgactggatacttactctgctgatattacgacgggtttatttaccgtgttgagagagtctatggagcagtcgacatctacagaagaaaataacggtgtaggcttaacaacatccgaactgtatatattgactgcttacaccgaaagtcagataaagaatgttcctcagtacatcacagtgtcgctttatgggaggtgcgattcaacatataccatggtggaagtattcgactctgaaggaaatatgcatagcgtaaagaattcgactactaagagtacctgcagtagcataggaacggactatctttttgattatcgtgaggttttagaaagcttgggtttagatatcattttagattatgcatacaacaaaatcggttcacaacaggcagaaagttctgcatacacgacctacatgaggagtttaaaacataaaaaggccaacgtgttacatttactctatgcagttattagtttccaggtgtgtatgttatttttcatgatatggtactactacataaagggaaggtttatgaacgccctcaaagaaagggcacttgttcatatcaactctctactatcgctagttgttttcattgggggcctgataagtagcataagccttgcctgggttaactacactattcagtctagaattaatacagaattagaggccttcgggttttcttaccatcttggagttacatggtttgcgcttctgtggtgttttgcaggtttgatttctgtgtcatgcttagcttggtctggcttagaatggtgtatttccgataatggcacgtcctatggaggtggaatcgatgataaattcttaggctaccaagccggtgtatttactgatgcagatctagacgatgaaacttcttacagtcaacgttatccgcaacgacagtctacttcgggcgaggctgaactgatgagaaacagtgatactatggcaacaataagaaaaacatctgatgttgacttaaatagtgaaaatgatgctaacaccagtttagaccatggaaatcccaccgcaaatataagcaatggcggcaaacacgaaccatttgctactagagaggaattcgaattgcaggacataagattccggtcaagcaacgacagtgaagaaagtatgcaaagggttatcaagccttcgtcagcattacagttttga

SEQ ID NO: 8052 - DNA, 1347 bp, Artificial Sequence
  Description of Artificial Sequence: Synthetic polynucleotide
atggtgatgagtagaataagagatacaatagccaggccattccagaaccttacagcccttgagaaagtggtacagtggttgagattagggacgacattactcataatctctttcgggttggcgttgactgtcggacccctttcttctccaagaacattgtacatgtctaggttagatacttactctgctgatattacgacgggtttatttaccgtgttgagagagtctatggagcagagtacatctacagaagaaaataacggtgtaggcttaacaacatccgaattgtatatattgactgcttacaccgaaagtcagataaagaatgttcctcagtacatcacagtgtctctttatgggaggtgcgattctacatataccatggtggaagtattcgactctgaaggaaatatgcatagcgtaaagaattctactactaagagtacctgcagtagcataggaacggactatctttttgattatcgtgaggttttagaaagcttgggtttagatatcattttagattatgcatacaacaaaatcggttctcaacaggcagaaagttctgcatacacgacctacatgaggagtttaaaacataaaaaggccaacgtgttacatttactctatgcagttattagtttccaggtgtgtatgttatttttcatgatatggtactactacataaagggaaggtttatgaacgccctcaaagaaagggcacttgttcatatcaactctttattaagtttggttgttttcattgggggcttgataagtagcataagccttgcctgggttaactacactattcagtctagaattaatacagaattagaggccttcgggttttcttaccatcttggagttacatggtttgcgcttttatggtgttttgcaggtttgatttctgtgtcttgcttagcttggtctggcttagaatggtgtatttccgataatggcacgtcctatggaggtggaatcgatgataaattcttaggctaccaagccggtgtatttactgatgcagatttggacgatgaaacttcttacagtcaacgttatccgcaaagacagtctacttctggcgaggctgaattgatgagaaacagtgatactatggcaacaataagaaaaacatctgatgttgacttaaatagtgaaaatgatgctaacaccagtttagaccatggaaatcccaccgcaaatataagcaatggcggcaaacacgaaccatttgctactagagaggaattcgaattgcaggacataagattcagaagcagcaacgacagtgaagaaagtatgcaaagggttatcaagccttcttctgcattacagttttga

SEQ ID NO: 8053 - DNA, 567 bp, Saccharomyces cerevisiae
atgagtgatactacggaagtccctaggcaatcatctgagaacgaccaggataataacttggaaagaaccaactcattaaaaagtccggacgtgaccaacaatataccaagtcttttcaaattagccgccgaatggcaaatcaacaatccacaggaaaccttccaaaaccatatcctggaaaatgatgtactcaagaaaattaatgaaatcactcatttgatccgggaatcgtacaaagacctctccagtcaagatgggatgatgtccaaacaacaacaggaaaagatggattgggatttgttttgtactgttcctgtaaacattattgagcaatatacaaaagacatggacgaaatatatgaaaaaatggaaaggctagcaaaacaacaacgtctttggtgtgaatccgcttttcaaatagacgtggaaagatgtggtgactccattctcaatgctgaaacgtggatgaagaagaaagagcgccatttagagtacaaaaatattgaaatggaaagatccgcaaatgaaattaaggaaactattcaaagactaacagatgatagatga

SEQ ID NO: 8054 - DNA, 567 bp, Artificial Sequence
  Description of Artificial Sequence: Synthetic polynucleotide
atgagtgatactacggaagtccctaggcaatcttctgagaacgaccaggataataacttggaaagaaccaactctttaaaaagtccggacgtgaccaacaatataccaagtcttttcaaattagccgccgaatggcaaatcaacaatccacaggaaaccttccaaaaccatatcttggaaaatgatgtactcaagaaaattaatgaaatcactcatttgatcagagaatcttacaaagacctctccagtcaagatgggatgatgtccaaacaacaacaggaaaagatggattgggatttgttttgtactgttcctgtaaacattattgagcaatatacaaaagacatggacgaaatatatgaaaaaatggaaaggttagcaaaacaacaacgtctttggtgtgaatccgcttttcaaatagacgtggaaagatgtggtgactccattctcaatgctgaaacgtggatgaagaagaaagagcgccatttagagtacaaaaatattgaaatggaaagatccgcaaatgaaattaaggaaactattcaaagattgacagatgatagatga

SEQ ID NO: 8055 - DNA, 1302 bp, Saccharomyces cerevisiae
atgacaattgaaagcactctagctcgggaattagaaagcttgattttacccgctgattccatagtgaatgtagttgaccaattccaagaggagttgttatcacggcttcagacaaatacgatttctatgctcccgcagtgtttagtcccagataaacgatcgcgatggaaccctgaagacaaaattctgaccattgatttcggcgggacaagactgaaatttgcaattatctctctgccccaaatcgttatcgaatacaatgatgccttcgaacttacctacaacatcgttgattcgaatttctttaatcaaatcatctatacaatatgtaccaggctggctgcaaatggttatataaaaaaaaagaacgagtcatctgaggcgtctaaattttttgtttccgtgacattcagttttcctctaaatccagaaggggaggtagttgcaatgggaaaaggatttgtgatgactgacacccttcaaggatccacggtgaaacagctcatccaatcttcctttcaccggattatatcagaaaatatcgaagaatttttctgtaccatgaacgtgtgtcatgtaataaacgatgcaattgcagtttcactaacaagcaaatttatatgcgaaaacgattccatctcattaataataggaactggtacaaatgcatgttttgaggttccatacggatatttaccacctttcaagagagatgccctgagagaaacattaccgtcaagctataataaggagacattaaatttcaaacatgttctcattaattctgaaattggctttattggtaaaaatgtcattgcattgcaaccgtttgacattcatggagcaatctcatacgaaatgccactagagtgcgttacttctggtaaatggcttcccctatcattaaaaaatattctattgcaatataacataatccccaaaaacttcccagtagagttcaatggggaactggtatgccagctggcagaagactgtactaatgcttggttcgaaaacgaacattatgcactaatttgtcagatcgcacgactattaatcaagagagccgcattttatgttgctgcaattgtacaagctattgatatcatcacaggctgcaaaaactataactttattcatattggctacgttggatcctttctccacaattcaaatttttatcgagagcagataaaatattactccagcatacatattaagttgcaattcttaaatcacagtaatcttctaggcgctgcaatagccacctacttgaacaaatcagacaaccaagttcaataa

SEQ ID NO: 8056 - DNA, 1302 bp, Artificial Sequence
  Description of Artificial Sequence: Synthetic polynucleotide
atgacaattgaaagcactttggctagagaattagaaagcttgattttacccgctgattccatagtgaatgtagttgaccaattccaagaggagttgttatcccgtcttcagacaaatacgatttctatgctcccgcagtgtttagtcccagataaaagatctcgttggaaccctgaagacaaaattttgaccattgatttcggcgggacaagattgaaatttgcaattatctctttaccccaaatcgttatcgaatacaatgatgccttcgaacttacctacaacatcgttgattctaatttctttaatcaaatcatctatacaatatgtaccaggttggctgcaaatggttatataaaaaaaaagaacgagtcttctgaggcgtctaaattttttgtttccgtgacattcagttttcctttaaatccagaaggggaggtagttgcaatgggaaaaggatttgtgatgactgacacccttcaaggatccacggtgaaacagctcatccaatcttcctttcacagaattatatctgaaaatatcgaagaatttttctgtaccatgaacgtgtgtcatgtaataaacgatgcaattgcagtttctttaacaagcaaatttatatgcgaaaacgattccatctctttaataataggaactggtacaaatgcatgttttgaggttccatacggatatttaccacctttcaagagagatgccttgagagaaacattaccgtctagctataataaggagacattaaatttcaaacatgttctcattaattctgaaattggctttattggtaaaaatgtcattgcattgcaaccgtttgacattcatggagcaatctcctacgaaatgccattggagtgcgttacttctggtaaatggcttcccttatctttaaaaaatattttattgcaatataacataatccccaaaaacttcccagtagagttcaatggggaattggtatgccagttagcagaagactgtactaatgcttggttcgaaaacgaacattatgcattgatttgtcagatcgcaagattattaatcaagagagccgcattttatgttgctgcaattgtacaagctattgatatcatcacaggctgcaaaaactataactttattcatattggctacgttggatcctttctccacaatagtaatttttatagagagcagataaaatattactccagcatacatattaagttgcaattcttaaatcacagtaatcttttgggcgctgcaatagccacctacttgaacaaaagtgacaaccaagttcaatga

SEQ ID NO: 8057 - DNA, 1038 bp, Saccharomyces cerevisiae
atggaaggcgtgtatttcaatattgacaatgggtttattgaaggtgtagtgagaggctacagaaatgggttgttatctaataaccaatacatcaacttaacacaatgtgacacgttggaagatctaaaattacaattatcatcaactgattatggtaattttctttcctctgtttcctcagagtctttgaccacgtcattgattcaagaatatgcttctagcaagttgtaccacgaattcaactacataagagaccaatccagtggatccacgagaaagttcatggactatatcacttatggttacatgatcgacaatgtagcattgatgattacaggtactattcatgatcgtgataagggtgaaattttacaacgttgtcatccgctaggttggtttgatactttgcctacgttgagtgttgctactgatcttgaatccctatacgaaaccgtattggtggataccccactggcaccttacttcaaaaactgttttgacacggcagaggagctagacgatatgaacattgaaattattagaaataagctgtacaaggcttatttagaagacttttacaattttgtcactgaagaaattccggaacctgctaaagaatgtatgcaaacattactagggtttgaagctgacagaagaagtatcaatattgcactcaactctttgcaaagttcagatattgacccagatttgaaaagtgacttgttacctaacataggtaagttgtaccctcttgcaacgtttcacttggcgcaagcccaagatttcgaaggagttagagctgctttagctaacgtctatgagtataggggatttttggagactggtaacttagaagatcacttttaccaattggaaatggaactatgtagagatgctttcacgcaacaatttgccatcagcactgtttgggcctggatgaaatccaaggaacaagaagttaggaatattacctggattgcagaatgtatcgcacaaaaccaaagagaaagaatcaacaattatatttccgtttattga

SEQ ID NO: 8058 - DNA, 1038 bp, Artificial Sequence
  Description of Artificial Sequence: Synthetic polynucleotide
atggaaggcgtgtatttcaatattgacaatgggtttattgaaggtgtagtgagaggctacagaaatgggttgttatctaataaccaatacatcaacttaacacaatgtgacacgttggaagatttgaaattacaattatcttctactgattatggtaattttctttcctctgtttcctctgagtctttgaccacgtctttgattcaagaatatgcttctagcaagttgtaccacgaattcaactacataagagaccaatccagtggatccacgagaaagttcatggactatatcacttatggttacatgatcgacaatgtagcattgatgattacaggtactattcatgatcgtgataagggtgaaattttacaacgttgtcatccgttgggttggtttgatactttgcctacgttgagtgttgctactgatcttgaatccttgtacgaaaccgtattggtggataccccattggcaccttacttcaaaaactgttttgacacggcagaggagttggacgatatgaacattgaaattattagaaataagttgtacaaggcttatttagaagacttttacaattttgtcactgaagaaattccggaacctgctaaagaatgtatgcaaacattattagggtttgaagctgacagaagaagtatcaatattgcactcaactctttgcaaagttctgatattgacccagatttgaaaagtgacttgttacctaacataggtaagttgtaccctcttgcaacgtttcacttggcgcaagcccaagatttcgaaggagttagagctgctttagctaacgtctatgagtataggggatttttggagactggtaacttagaagatcacttttaccaattggaaatggaattatgtagagatgctttcacgcaacaatttgccatcagcactgtttgggcctggatgaaatccaaggaacaagaagttaggaatattacctggattgcagaatgtatcgcacaaaaccaaagagaaagaatcaacaattatatttccgtttattga

SEQ ID NO: 8059 - DNA, 531 bp, Saccharomyces cerevisiae
atgactgcccaacaagccccaaagtggtatccttccgaagacgttgctgccccaaagaaaaccagaaaggctgttcgcccacaaaagttgcgtgcctctctagttccaggcactgttttgatcttgctagctggccgtttcagaggtaagagagttgtctacttgaaacatctagaagacaacactctattggtcactggtccattcaaggtcaatggtgttccattgagaagagtcaacgctcgttatgtcattgctacctctaccaaagtctccgtggaaggtgtcaacgttgaaaaattcaacgttgaatactttgccaaggaaaaattgaccaagaaggaaaagaaggaagctaacttgttcccagaacaacaaactaaggaaatcaagactgaacgtgttgaagatcaaaaggttgttgacaaggctttgttggctgaaatcaagaagaccccattgttgaagcaatatttgtccgcttctttctctttgaagaacggtgacaagccacacctattgaaattctaa

SEQ ID NO: 8060 - DNA, 531 bp, Artificial Sequence
  Description of Artificial Sequence: Synthetic polynucleotide
atgactgcccaacaagccccaaagtggtatccttccgaagacgttgctgccccaaagaaaaccagaaaggctgttcgcccacaaaagttgcgtgcctctttggttccaggcactgttttgatcttgttggctggccgtttcagaggtaagagagttgtctacttgaaacatttggaagacaacactttattggtcactggtccattcaaggtcaatggtgttccattgagaagagtcaacgctcgttatgtcattgctacctctaccaaagtctccgtggaaggtgtcaacgttgaaaaattcaacgttgaatactttgccaaggaaaaattgaccaagaaggaaaagaaggaagctaacttgttcccagaacaacaaactaaggaaatcaagactgaacgtgttgaagatcaaaaggttgttgacaaggctttgttggctgaaatcaagaagaccccattgttgaagcaatatttgtccgcttctttctctttgaagaacggtgacaagccacacttattgaaattctga

SEQ ID NO: 8061 - DNA, 1179 bp, Saccharomyces cerevisiae
atgtctgatatgcttccattggctacgtatagcctgaatgttgaaccatactccccaaccccagctctgaacttcaaaattccggttaccattagaatcacaatggcggccatcgaccctgagccctttgacgatgacaaaaagccatctactttaagaataatcaaaaggaatcctgaactcactcgcggtgagtactacaaccaagataacaatgacggcctcgaagaggatgaaagtgaaagtgaacaagaagcagatgtaccaaaaaggagtgtcaaatcaaaaaaaggtaaggcagtcgagcaaagtgaatcagaagactctgaagatgaaaacgaaatcgacgatgaattcgaagaatgcgttcttttaaccttatctccaaaaggccaatatcaacaagctttggatattaccattgcaccagaggaagacgttcaattcgtcgttaccggttcatacactatctctctaaccggtaactacgtcaaacatccattcgacaattcttcagattcagacgaagatgaagaagactattacagtgacgaagaatcttccaatggagaagaagaagaagaagaagaagaagaggacgatgaggaactaagttccggtgatgacgatcttgatgatttagtagatgctagtgacatcgaaagtcgtcttgatgaattagtcaaaaaggacgaaaagaagaaaaacaacaagaaggacagtaaaaggaaacatgaggaagatgaggaagaaagtgctaaacctgccgagaaaaaacaaacgaccaagaaagacaagaaagcagagaaagttaaagactcggaagagagcaaaccaaagccaaagacgaagctactggaaggcggtattatcattgaagaccgcgtcacaggaaaaggcccacatgccaaaaagggtaccagagttggaatgagatatgttggtaagttgaagaacgggaaagtttttgacaagaatacaaagggtaagccttttgtttttaagttgggccaaggcgaagtaattaaaggatgggacatcggtgttgctggtatggcggtcggtggtgagcgtagaattgtcattcctgctccatatgcctacggtaaacaagctttgcccggtattcctgctaactctgaattgacatttgatgttaaattggtctccatgaaatag

SEQ ID NO: 8062 - DNA, 1179 bp, Artificial Sequence
  Description of Artificial Sequence: Synthetic polynucleotide
atgtctgatatgcttccattggctacgtatagcttgaatgttgaaccatactccccaaccccagctttgaacttcaaaattccggttaccattagaatcacaatggcggccatcgaccctgagccctttgacgatgacaaaaagccatctactttaagaataatcaaaaggaatcctgaactcactcgcggtgagtactacaaccaagataacaatgacggcctcgaagaggatgaaagtgaaagtgaacaagaagcagatgtaccaaaaaggagtgtcaaatctaaaaaaggtaaggcagtcgagcaaagtgaaagtgaagactctgaagatgaaaacgaaatcgacgatgaattcgaagaatgcgttcttttaaccttatctccaaaaggccaatatcaacaagctttggatattaccattgcaccagaggaagacgttcaattcgtcgttaccggttcttacactatctctttaaccggtaactacgtcaaacatccattcgacaattcttctgattctgacgaagatgaagaagactattacagtgacgaagaatcttccaatggagaagaagaagaagaagaagaagaagaggacgatgaggaattaagttccggtgatgacgatcttgatgatttagtagatgctagtgacatcgaaagtcgtcttgatgaattagtcaaaaaggacgaaaagaagaaaaacaacaagaaggacagtaaaaggaaacatgaggaagatgaggaagaaagtgctaaacctgccgagaaaaaacaaacgaccaagaaagacaagaaagcagagaaagttaaagactctgaagagagcaaaccaaagccaaagacgaagttattggaaggcggtattatcattgaagaccgcgtcacaggaaaaggcccacatgccaaaaagggtaccagagttggaatgagatatgttggtaagttgaagaacgggaaagtttttgacaagaatacaaagggtaagccttttgtttttaagttgggccaaggcgaagtaattaaaggatgggacatcggtgttgctggtatggcggtcggtggtgagcgtagaattgtcattcctgctccatatgcctacggtaaacaagctttgcccggtattcctgctaactctgaattgacatttgatgttaaattggtctccatgaaatga

SEQ ID NO: 8063 - DNA, 3138 bp, Saccharomyces cerevisiae
atgtcacttcccttaaaaacgatagtacatttggtaaagccctttgcttgcactgctaggtttagtgcgagatacccaatccacgtcattgttgttgctgttttattgagtgccgctgcttatctatccgtgacacaatcttaccttaacgaatggaagctggactctaatcagtattctacatacttaagcataaagccggatgagttgtttgaaaaatgcacacactactataggtctcctgtgtctgatacatggaagttactcagctctaaagaagccgccgatatttataccccttttcattattatttgtctaccataagttttcaaagtaaggacaattcaacgactttgccttcccttgatgacgttatttacagtgttgaccataccaggtacttattaagtgaagagccaaagataccaactgaactagtgtctgaaaacggaacgaaatggagattgagaaacaacagcaattttattttggacctgcataatatttaccgaaatatggtgaagcaattttctaacaaaacgagcgaatttgatcagttcgatttgtttatcatcctagctgcttaccttactcttttttatactctctgttgcctgtttaatgacatgaggaaaatcggatcaaagttttggttaagcttttctgctctttcaaactctgcatgcgcattatatttatcgctgtacacaactcacagtttattgaagaaaccggcttccttattaagtttggtcattggactaccatttatcgtagtaattattggctttaagcataaagttcgacttgcggcattctcgctacaaaaattccacagaattagtattgacaagaaaataacggtaagcaacattatttatgaggctatgtttcaagaaggtgcctacttaatccgcgactacttattttatattagctccttcattggatgtgctatttatgctagacatcttcccggattggtcaatttctgtattttgtctacatttatgctagttttcgacttgcttttgtctgctactttttattctgccattttatcaatgaagctggaaattaacatcattcacagatcaaccgtcatcagacagactttggaagaggacggagttgtcccaactacagcagatattatatataaggatgaaactgcctcagaaccacattttttgagatctaacgtggctatcattctgggaaaagcatcagttattggtcttttgcttctgatcaacctttatgttttcacagataagttaaatgctacaatactaaacacggtatattttgactctacaatttactcgttaccaaattttatcaattataaagatattggcaatctcagcaatcaagtgatcatttccgtgttgccaaagcaatattatactccgctgaaaaaataccatcagatcgaagattctgttctacttatcattgattccgttagcaatgctattcgggaccaatttatcagcaagttacttttttttgcatttgcagttagtatttccatcaatgtctacttactgaatgctgcaaaaattcacacaggatacatgaacttccaaccacaatcaaataagatcgatgatcttgttgttcagcaaaaatcggcaacgattgagttttcagaaactcgaagtatgcctgcttcttctggcctagaaactccagtgaccgcgaaagatataattatctctgaagaaatccagaataacgaatgcgtctatgctttgagttcccaggacgagcctatccgtcctttatcgaatttagtggaacttatggagaaagaacaattaaagaacatgaataatactgaggtttcgaatcttgtcgtcaacggtaaactgccattatattccttagagaaaaaattagaggacacaactcgtgcggttttagttaggagaaaggcactttcaactttggctgaatcgccaattttagtttccgaaaaattgcccttcagaaattatgattatgatcgcgtttttggagcttgctgtgaaaatgtcatcggctatatgccaataccagttggtgtaattggtccattaattattgatggaacatcttatcacataccaatggcaaccacggaaggttgtttagtggcttcagctatgcgtggttgcaaagccatcaatgctggtggtggtgcaacaactgttttaaccaaagatggtatgactagaggcccagtcgttcgtttccctactttaataagatctggtgcctgcaagatatggttagactcggaagagggacaaaattcaattaaaaaagcttttaattctacatcaaggtttgcacgtttgcaacatattcaaacctgtctagcaggcgatttgctttttatgagatttcggacaactaccggtgacgcaatgggtatgaacatgatatcgaaaggtgtcgaatactctttgaaacaaatggtagaagaatatggttgggaagatatggaagttgtctccgtatctggtaactattgtactgataagaaacctgccgcaatcaattggattgaaggtcgtggtaaaagtgtcgtagctgaagctactattcctggtgatgtcgtaaaaagtgttttaaagagcgatgtttccgctttagttgaattaaatatatccaagaacttggttggatccgcaatggctggatctgttggtggtttcaacgcgcacgcagctaatttggtcactgcacttttcttggcattaggccaagatcctgcgcagaacgtcgaaagttccaactgtataactttgatgaaggaagttgatggtgatttaaggatctctgtttccatgccatctattgaagttggtacgattggcgggggtactgttctggagcctcagggcgccatgcttgatcttctcggcgttcgtggtcctcaccccactgaacctggagcaaatgctaggcaattagctagaataatcgcgtgtgctgtcttggctggtgaactgtctctgtgctccgcacttgctgccggtcacctggtacaaagccatatgactcacaaccgtaaaacaaacaaagccaatgaactgccacaaccaagtaacaaagggcccccctgtaaaacctcagcattattataa

SEQ ID NO: 8064 - DNA, 3138 bp, Artificial Sequence
  Description of Artificial Sequence: Synthetic polynucleotide
atgtctcttcccttaaaaacgatagtacatttggtaaagccctttgcttgcactgctaggtttagtgcgagatacccaatccacgtcattgttgttgctgttttattgagtgccgctgcttatttatccgtgacacaatcttaccttaacgaatggaagttggactctaatcagtattctacatacttaagcataaagccggatgagttgtttgaaaaatgcacacactactataggtctcctgtgtctgatacatggaagttactcagctctaaagaagccgccgatatttataccccttttcattattatttgtctaccataagttttcaaagtaaggacaattctacgactttgccttcccttgatgacgttatttacagtgttgaccataccaggtacttattaagtgaagagccaaagataccaactgaattagtgtctgaaaacggaacgaaatggagattgagaaacaacagcaattttattttggacttgcataatatttacagaaatatggtgaagcaattttctaacaaaacgagcgaatttgatcagttcgatttgtttatcatcttggctgcttaccttactcttttttatactctctgttgcttatttaatgacatgaggaaaatcggatccaagttttggttaagcttttctgctctttccaactctgcatgcgcattatatttatctttgtacacaactcacagtttattgaagaaaccggcttccttattaagtttggtcattggattaccatttatcgtagtaattattggctttaagcataaagttcgtcttgcggcattctctttacaaaaattccacagaattagtattgacaagaaaataacggtaagcaacattatttatgaggctatgtttcaagaaggtgcctacttaatccgcgactacttattttatattagctccttcattggatgtgctatttatgctagacatcttcccggattggtcaatttctgtattttgtctacatttatgcttgttttcgacttgcttttgtctgctactttttattctgccattttatctatgaagttggaaattaacatcattcacagatctaccgtcatcagacagactttggaagaggacggagttgtcccaactacagcagatattatatataaggatgaaactgccagtgaaccacattttttgagatctaacgtggctatcattttaggaaaagcatctgttattggtcttttgcttttgatcaacctttatgttttcacagataagttaaatgctacaatattaaacacggtatattttgactctacaatttactctttaccaaattttatcaattataaagatattggcaatctcagcaatcaagtgatcatttccgtgttgccaaagcaatattatactccgttaaaaaaataccatcagatcgaagattctgttttacttatcattgattccgttagcaatgctattagagaccaatttatcagcaagttacttttttttgcatttgcagttagtatttccatcaatgtctacttattgaatgctgcaaaaattcacacaggatacatgaacttccaaccacaaagcaataagatcgatgatcttgttgttcagcaaaaatctgcaacgattgagttttctgaaactagaagtatgcctgcttcttctggccttgaaactccagtgaccgcgaaagatataattatctctgaagaaatccagaataacgaatgcgtctatgctttgagttcccaggacgagcctatccgtcctttatccaatttagtggaacttatggagaaagaacaattaaagaacatgaataatactgaggtttctaatcttgtcgtcaacggtaaattaccattatattccttagagaaaaaattagaggacacaactcgtgcggttttagttaggagaaaggcactttctactttggctgaatctccaattttagtttccgaaaaattgcccttcagaaattatgattatgatcgcgtttttggagcttgctgtgaaaatgtcatcggctatatgccaataccagttggtgtaattggtccattaattattgatggaacatcttatcacataccaatggcaaccacggaaggttgtttagtggcttctgctatgcgtggttgcaaagccatcaatgctggtggtggtgcaacaactgttttaaccaaagatggtatgactagaggcccagtcgttcgtttccctactttaataagatctggtgcctgcaagatatggttagactctgaagagggacaaaattctattaaaaaagcttttaattctacatccaggtttgcacgtttgcaacatattcaaacctgtttggcaggcgatttgctttttatgagatttagaacaactaccggtgacgcaatgggtatgaacatgatatccaaaggtgtcgaatactctttgaaacaaatggtagaagaatatggttgggaagatatggaagttgtctccgtatctggtaactattgtactgataagaaacctgccgcaatcaattggattgaaggtcgtggtaaaagtgtcgtagctgaagctactattcctggtgatgtcgtaaaaagtgttttaaagagcgatgtttccgctttagttgaattaaatatatccaagaacttggttggatccgcaatggctggatctgttggtggtttcaacgcgcacgcagctaatttggtcactgcacttttcttggcattaggccaagatcctgcgcagaacgtcgaaagttccaactgtataactttgatgaaggaagttgatggtgatttaaggatctctgtttccatgccatctattgaagttggtacgattggcgggggtactgttttggagcctcagggcgccatgcttgatcttctcggcgttcgtggtcctcaccccactgaacctggagcaaatgctaggcaattagctagaataatcgcgtgtgctgtcttggctggtgaattatctttatgctccgcacttgctgccggtcacttggtacaaagccatatgactcacaaccgtaaaacaaacaaagccaatgaattaccacaaccaagtaacaaagggcccccctgtaaaacctctgcattattatga

SEQ ID NO: 8065 - DNA, 2661 bp, Saccharomyces cerevisiae
atggaaggaagatcagattttgtggcgacttcacagtccggaagtgaaatgagccatagtgaaactaggaatagaactgggatgaatgctaggaaaaggaaattcgcctgtgtggaatgtcgtcagcagaagtcgaaatgtgatgctcacgaaagagcaccggagccatgcactaagtgtgctaaaaagaatgtcccatgcattttaaaacgagatttcagaagaacttataaaagagcaaggaacgaagccattgaaaaaagattcaaggaactcaccagaactttgacaaatttaacttcggatgaaattttgaagaaaattgaagaggaacaggaaattgttttggataacagtaatttcacaaaagaaaaagtaaaacaactcaggaagagtgcttttgagacgacagaaatagaaccgagatcatacaaaacacttcgaggagaacctatttcttacagtaccaacagaagacatacggattcttctcctttaacgctcttaagctcgtcgacaaacttcgaccctgttcactcaacaaacgttatgacagatgatcaacttaagtgcttgccaaaaagcctgggcgacgtatatttgtcaagcagcgatattgctgagctgtttcaagaatttgcgacaaaatatcatcaatttttacccgtcgttgacctttcgaaaggagcagagcgaatttatcacttatctccttgcttattctgggtcatcctgctcattggtttaaggcggaaatttggggctacagacttaatgactcgattatcagtgctagtaaagtcagttttatcagaaatcacaatatctccaataattcgatatactccatcagataaggacgaacccgttctaaatgtagcatctgtatattccgtgcaagcatttcttttatacacgttctggcctcccttaacctcttcattaagcgccgacacttcgtggaataccataggaacagcgatgttccaagcgcttcgggtaggactaaattgtgcaggtttttcaaaagagtatgcttcggcaaattcagaattagttaacgagcaaatacgaacttggatttgctgcaatgttgtatctcaaacagttgcatcatcatttggtttcccagcttatgtttcatttgattatttagtaatcagctctattagagtaccaaattcaaaaagccaagtagatatacccaatgaactaagacaaatggctcaaattgctagatttgagaaccaaatcgtaaacacaatgaactccaccccggcgagtgttactgggatggtaagtcaggaagagaagcagcccttgttacacgttcttaatcaacaactaagtcaattggagattagtcttgaagaaaataacctagatgatatccgaaaatttttattactagtggccaaggttcacttattaacctattacttcactgatgttacctcccaaagtgctggaaaatcaaatggtaatatttatgagggatcatattccattatggaactcgatacaagttttgaaacgaaacgtggattggtgaaagtttataatgccgccgtaaactttcttatacatgccaatagtatgtgggaacatgatcctaccattattaagtactttcctggtttgtttgtcttgaatatatggcaatctgcctgtattattagtaaactcatacattcatcacttcattcaatgctagatgttaactcaggcaaaaaagcttataacaacgcaatttcattgacgtttaatgcctcagttttaaaatatgatatggcgtacagatcatccggaataatgcgaagcatatggagtttatttgctaatatgtatgatgcctggaaaaacgaccaaaaggaaggtggaggtagactaaataatgatttcaatttaggcatcaccataaaatctaggatgtcagtaaacgttttttttgactgcttatatattctaaaagagaaatgtggtatggccaaattggagagagagaccaaggtttctacagcttacaatgttgatgaagaggaagaggaagatgaagatgaggagggagaagaagaagaagaagaagaagaactaagtagtaaagttccagaaaatatggatagccagcaactaaggacaaggaaattcaccaatgtaaggcatccagaaaagaaagcaagaaaaataattgaaacaattccgctagacccaaatccaataaatgcaggctctaccagcagtggaagctcattaacgaccccaaatagtcaagtagcgaacactatatcatatagaggaatcctcaataaaatgtcacctagggaacaactgaatcatgcaaatttagattccagtgtttctacagacatcaaggacactgaagctgtcaatgaacctctgccaatagggaggaatgctgaacatccggcaaatcaaccgcctctttcaataacacaaatgcaagaaaacacactacctgcgacacaagccaactcttctctattagaaacgtatcccattgttcaatcaaaccccgttacaactacaatcaaagaatcacccaattccatcatggcaggttgggataactgggaatctgatatggtttggagggatgttgatattttaatgaatgaatttgcgttcaatcccaaggtttaa

SEQ ID NO: 8066 - DNA, 2661 bp, Artificial Sequence
  Description of Artificial Sequence: Synthetic polynucleotide
atggaaggaagaagtgattttgtggcgacttctcagtccggaagtgaaatgagccatagtgaaactaggaatagaactgggatgaatgctaggaaaaggaaattcgcctgtgtggaatgtcgtcagcagaagagtaaatgtgatgctcacgaaagagcaccggagccatgcactaagtgtgctaaaaagaatgtcccatgcattttaaaaagagatttcagaagaacttataaaagagcaaggaacgaagccattgaaaaaagattcaaggaactcaccagaactttgacaaatttaacttctgatgaaattttgaagaaaattgaagaggaacaggaaattgttttggataacagtaatttcacaaaagaaaaagtaaaacaactcaggaagagtgcttttgagacgacagaaatagaaccgagatcttacaaaacacttagaggagaacctatttcttacagtaccaacagaagacatacggattcttctcctttaacgctcttaagctcctctacaaacttcgaccctgttcactctacaaacgttatgacagatgatcaacttaagtgcttgccaaaaagcttgggcgacgtatatttgagtagcagcgatattgctgagttatttcaagaatttgcgacaaaatatcatcaatttttacccgtcgttgacctttctaaaggagcagagagaatttatcacttatctccttgcttattctgggtcatcttactcattggtttaaggagaaaatttggggctacagacttaatgactagattatctgtgttagtaaagtctgttttatctgaaatcacaatatctccaataattcgttatactccaagtgataaggacgaacccgttttgaatgtagcatctgtatattccgtgcaagcatttcttttatacacgttctggcctcccttaacctcttctttaagcgccgacacttcttggaataccataggaacagcgatgttccaagcgcttcgtgtaggattgaattgtgcaggtttttccaaagagtatgcttctgcaaattctgaattagttaacgagcaaataagaacttggatttgctgcaatgttgtatctcaaacagttgcatcttcttttggtttcccagcttatgtttcttttgattatttagtaatcagctctattagagtaccaaattctaaaagccaagtagatatacccaatgaattgagacaaatggctcaaattgctagatttgagaaccaaatcgtaaacacaatgaactccaccccggcgagtgttactgggatggtaagtcaggaagagaagcagcccttgttacacgttcttaatcaacaattgagtcaattggagattagtcttgaagaaaataaccttgatgatatcagaaaatttttattattggtggccaaggttcacttattaacctattacttcactgatgttacctcccaaagtgctggaaaatctaatggtaatatttatgagggatcctattccattatggaactcgatacaagttttgaaacgaaacgtggattggtgaaagtttataatgccgccgtaaactttcttatacatgccaatagtatgtgggaacatgatcctaccattattaagtactttcctggtttgtttgtcttgaatatatggcaatctgcctgtattattagtaaactcatacattcttctcttcattctatgcttgatgttaacagtggcaaaaaagcttataacaacgcaatttctttgacgtttaatgcctctgttttaaaatatgatatggcgtacagaagttccggaataatgagaagcatatggagtttatttgctaatatgtatgatgcctggaaaaacgaccaaaaggaaggtggaggtagattgaataatgatttcaatttaggcatcaccataaaatctaggatgtctgtaaacgttttttttgactgcttatatattttgaaagagaaatgtggtatggccaaattggagagagagaccaaggtttctacagcttacaatgttgatgaagaggaagaggaagatgaagatgaggagggagaagaagaagaagaagaagaagaattaagtagtaaagttccagaaaatatggatagccagcaattaaggacaaggaaattcaccaatgtaaggcatccagaaaagaaagcaagaaaaataattgaaacaattccgttagacccaaatccaataaatgcaggctctaccagcagtggaagctctttaacgaccccaaatagtcaagtagcgaacactatatcttatagaggaatcctcaataaaatgtctcctagggaacaattgaatcatgcaaatttagattccagtgtttctacagacatcaaggacactgaagctgtcaatgaacctttaccaatagggaggaatgctgaacatccggcaaatcaaccgcctctttccataacacaaatgcaagaaaacacattgcctgcgacacaagccaactcttctttattagaaacgtatcccattgttcaaagtaaccccgttacaactacaatcaaagaaagtcccaattccatcatggcaggttgggataactgggaatctgatatggtttggagggatgttgatattttaatgaatgaatttgcgttcaatcccaaggtttga

SEQ ID NO: 8067 - DNA, 2097 bp, Saccharomyces cerevisiae
atggtggataaaaataggacgttgcatgaattatcttccaaaaatttcagcagaacgccgaatggactgatctttaccaatgatttaaagacagtatattccatttttctaatttgtttggatttgaaagagaaaaaacatagtagtgacactaagtctttcttattaactgcattcactaaacatttccacttcacttttacatatcaggaagctattaaagcaatgggacaattggaactaaaagtggatatgaacacaacttgtattaacgtttcatataatattaaacctagtttggcgcgccaccttcttacattatttatgtcttctaagctactacatacaccgcaggacagaactcgtggcgagccaaaagagaaagttcttttccaaccaacacctaagggagttgctgttttacaaaagtatgttagagatattgggttgaaaacaatgcctgatattcttttgtcatcgtttaactccatgaaacttttcacttttgagagaagctctgtcacggattcaatcatccatagtgattatttgatccatattcttttcattaaaatgatgggcgctaagccaaatgtttggtctccaacaaacgcagatgacccattaccttgcctatcttcgttgttggaatacactaataatgatgatacatttacttttgagaaatctaagccagaacaaggatggcaagctcagattggaaacatcgatataaatgacttagaaagggtatcgccattagctcatcgattctttacaaatccagattctgagtcgcacacgcaatactacgtttcgaatgcaggtattaggttgtttgaaaataagacgtttggcacttccaaaaaaatcgtgattaagtacacctttacaacaaaggctatatggcagtggataatggactgtactgatattatgcatgttaaagaagcggtctcgttggcagcgttatttttaaaaacggggttgattgtaccagttcttttacaaccatcacgcactgacaagaaaaagtttcaaattagcaggtcctctttttttaccttgtccaagcgtggttgggatttggtttcttggacaggttgtaagagcaataatattagagcaccaaatggtagcaccatagacctagatttcacattaaggggtcatatgactgttcgtgatgaaaaaaagacattggatgatagtgaaggtttttctcaagacatgcttatctcttcgagtaatttaaataaactggactatgtgctaactgatccaggtatgagatatttattcaggcgccatttagaaaaggaactttgtgtagaaaatttggatgtcttcattgagattaagaggtttttgaagaaaatgacaattctgaaaaaattgatagattctaagcattgtgataaaaaatctaataccagtacttcaaaaaacaatatcgtaaaaacgattgattcagctttaatgaaacaggccaatgagtgccttgaaatggcatatcacatttattcgtcctatatcatgataggatcaccatatcaattaaatatccatcataacttgcgtcagaatatttctgacatcatgttgcaccctcattctccattatcggaacactttcctactaatctatacgatccatcacctgcatccgcggaatcagcagcttcatcaattagctcaacggaggctgacacgttaggtgaaccacctgaagtgagtctaaaaccttcaaaaaatctttcaaatgaaaactgttcatttaagaagcaaggattcaaacatcagttaaaggaatataaacctgccccgttaactctggcagaaacgcattcgcctaatgcatcagtagaaaattcacatacaattgttcgttatggcatggacaacacccaaaatgataccaaatcggttgaatcatttccagcaactttgaaggtcctcaggaaattatatcccctcttcgagatcgttagcaatgaaatgtatagactgatgaataacgattcctttcaaaaatttacccagtcagacgtatacaaagatgctagcgctttaatagaaatccaagaaaagtgctaa

SEQ ID NO: 8068 - DNA, 2097 bp, Artificial Sequence
  Description of Artificial Sequence: Synthetic polynucleotide
atggtggataaaaataggacgttgcatgaattatcttccaaaaatttcagcagaacgccgaatggattgatctttaccaatgatttaaagacagtatattccatttttttgatttgtttggatttgaaagagaaaaaacatagtagtgacactaagtctttcttattaactgcattcactaaacatttccacttcacttttacatatcaggaagctattaaagcaatgggacaattggaattgaaagtggatatgaacacaacttgtattaacgtttcttataatattaaacctagtttggcgcgccaccttcttacattatttatgtcttctaagttattacatacaccgcaggacagaactcgtggcgagccaaaagagaaagttcttttccaaccaacacctaagggagttgctgttttacaaaagtatgttagagatattgggttgaaaacaatgcctgatattcttttgtcttcttttaactccatgaaacttttcacttttgagagaagctctgtcacggattctatcatccatagtgattatttgatccatattcttttcattaaaatgatgggcgctaagccaaatgtttggtctccaacaaacgcagatgacccattaccttgcttatcttctttgttggaatacactaataatgatgatacatttacttttgagaaatctaagccagaacaaggatggcaagctcagattggaaacatcgatataaatgacttagaaagggtatctccattagctcatagattctttacaaatccagattctgagtctcacacgcaatactacgtttctaatgcaggtattaggttgtttgaaaataagacgtttggcacttccaaaaaaatcgtgattaagtacacctttacaacaaaggctatatggcagtggataatggactgtactgatattatgcatgttaaagaagcggtctctttggcagcgttatttttaaaaacggggttgattgtaccagttcttttacaaccaagccgcactgacaagaaaaagtttcaaattagcaggtcctctttttttaccttgtccaagcgtggttgggatttggtttcttggacaggttgtaagagcaataatattagagcaccaaatggtagcaccatagacttggatttcacattaaggggtcatatgactgttcgtgatgaaaaaaagacattggatgatagtgaaggtttttctcaagacatgcttatctcttccagtaatttaaataaattagactatgtgttgactgatccaggtatgagatatttattcaggcgccatttagaaaaggaactttgtgtagaaaatttggatgtcttcattgagattaagaggtttttgaagaaaatgacaattttgaaaaaattgatagattctaagcattgtgataaaaaatctaataccagtacttctaaaaacaatatcgtaaaaacgattgattctgctttaatgaaacaggccaatgagtgccttgaaatggcatatcacatttattcttcctatatcatgataggatctccatatcaattaaatatccatcataacttgcgtcagaatatttctgacatcatgttgcaccctcattctccattatctgaacactttcctactaatctttacgatccatctcctgcatccgcggaaagtgcagcttcttccattagctctacggaggctgacacgttaggtgaaccacctgaagtgagtttgaaaccttccaaaaatctttctaatgaaaactgttcctttaagaagcaaggattcaaacatcagttaaaggaatataaacctgccccgttaactttggcagaaacgcattctcctaatgcatctgtagaaaattctcatacaattgttcgttatggcatggacaacacccaaaatgataccaaatctgttgaaagttttccagcaactttgaaggtcctcaggaaattatatcccctcttcgagatcgttagcaatgaaatgtatagattaatgaataacgattcctttcaaaaatttacccagagtgacgtatacaaagatgctagcgctttaatagaaatccaagaaaagtgctga

SEQ ID NO: 8069 - DNA, 1188 bp, Saccharomyces cerevisiae
atggagcatgtagattccgattttgcacctataaggagatcgaaaaaggttgttgacagtgacaagattgtgaaagcaataagcgatgatttggagcaaaaaaattttactgtactgagaaagttgaaccttgttccaattaaaaaaagtgttagcagcccaaaggtgtgtaagccgagtccagttaaggagcgagtggaccatgttttctaccagaagttcaaatcaatggccttgcaagagctaggcaccaattatttgtcaataagctacgttccgagcttaagtaagtttctttcaaaaaatcttaggagtatgaaaaattgtatcgttttcttcgacaaagttgaacatatacaccaatatgctggtatcgaccgtgcagtttcagaaacactgtctttagtcgatataaatgtcgtaattatagaaatgaatgactacttaatgaaagagggtattcaatcaagcaaatcaaaagaatgtatcgagtcaatggggcaggcttcatatagcggacaactagatttcgaagctagtgaaaaaccttcaaatcacacgtctgacctaatgatgatggttatgaggaaaataaataatgacgaaagtatcgatcatattgtctacttcaaattcgaacaattagataaattatctacttcaactataatagaaccttcgaagcttaccgaatttatcaatgttttatcggtacttgaaaaaagtaataacattgcatttaaggtcctcatttattcaaataacgttagcatttcgtctctcctatcgacatccctcaaaaagaaactcaacacaaaatatactgtgtttgagatgccgatattaacatgcgctcaagaacaagaatatttgaaaaaaatgataaagtttacctttgattccggaagcaagttattacagtcttacaactcgcttgtcacatgccagttgaataataaagaatccaacttagcaatctttttcgaatttttgaaggtctttccgcacccttttacctatttgtttaacgcttacactgagattatagtccagagtagaacttttgatgaattgttggataagatcagaaacagactgacaataaaaaattacccacatagtgcttataactttaagaaaaaccagcgtcttccacttaagttaactcgaaaagtacatgatagataa

SEQ ID NO: 8070 - DNA, 1188 bp, Artificial Sequence
  Description of Artificial Sequence: Synthetic polynucleotide
atggagcatgtagattccgattttgcacctataaggagaagtaaaaaggttgttgacagtgacaagattgtgaaagcaataagcgatgatttggagcaaaaaaattttactgtattaagaaagttgaaccttgttccaattaaaaaaagtgttagcagcccaaaggtgtgtaagccgagtccagttaaggagagagtggaccatgttttctaccagaagttcaaatctatggccttgcaagagttgggcaccaattatttgagcataagctacgttccgagcttaagtaagtttctttctaaaaatcttaggagtatgaaaaattgtatcgttttcttcgacaaagttgaacatatacaccaatatgctggtatcgaccgtgcagtttctgaaacattatctttagtcgatataaatgtcgtaattatagaaatgaatgactacttaatgaaagagggtattcaaagcagcaaatctaaagaatgtatcgagtccatggggcaggcttcttatagcggacaattggatttcgaagctagtgaaaaaccttccaatcacacgtctgacttgatgatgatggttatgaggaaaataaataatgacgaaagtatcgatcatattgtctacttcaaattcgaacaattagataaattatctacttctactataatagaaccttctaagcttaccgaatttatcaatgttttaagtgtacttgaaaaaagtaataacattgcatttaaggtcctcatttattctaataacgttagcatttcttctctcttgagtacatccctcaaaaagaaactcaacacaaaatatactgtgtttgagatgccgatattaacatgcgctcaagaacaagaatatttgaaaaaaatgataaagtttacctttgattccggaagcaagttattacagtcttacaactctcttgtcacatgccagttgaataataaagaatccaacttagcaatctttttcgaatttttgaaggtctttccgcacccttttacctatttgtttaacgcttacactgagattatagtccagagtagaacttttgatgaattgttggataagatcagaaacagattgacaataaaaaattacccacatagtgcttataactttaagaaaaaccagcgtcttccacttaagttaactagaaaagtacatgatagatga

SEQ ID NO: 8071 - DNA, 7887 bp, Saccharomyces cerevisiae
atgatgtttccgattaatgttctactgtacaagtggcttatatttgcagtgactttcttatggagctgtaaaattttactaaggaagcttttaggaataaatataacatggattaacctgtttaaactagaaatatgcggtttatccttagaagatggtaccgtcaggctaaaatccgttcgttttgctgtatttgaaagaaagcttttcatcaagggtctacgaattgattccaagaaatcatctactaatgatcttcataaagaattaccaagagaggaagaaagaacttttatagagacccccgaagataatggtgggggcttcatttctaagattctttcattatcacaatactggctcaatggggtcacgatcattttggaagatacgcaattagtcaacaacgatatcacgattgaaaaatttggcttttttctttcaattgataactctaaacatatcaagtcactaagatttgattcctttttgagaaaacttctttggaatggccagaccatcattgctgatgccatttttatagtgaatacaaacttactaattggtgaaattatgaatcctctgaaggatggacttcaagtaggattagatttaaaactaggtgatttaaatattcccatgaatttattgaatttatttatcaacaaggagaacgttgatttgatgtccaatgaaaaacttctacaaagattggcagatacaacaaaggcgaatgaagagctaaaggatgaagatatcgctaagatgaaggatgatctcgtgtatgcaatggaaaaatttgtagatcggataaagccattgaaagaaatgaacgtcaccgttgataaacttcaaatcaaagattttccactcaccaatcatccagaactgcttggaatgaacaaatatatcagttataatgttttggtttctaatataaacttcaataccaacaggttcagaaatgagatgccaggttatacgttaatttttgaggagcgtgattctcccttcaagtttagtattataatggcaagatttaatatatatttgaatctaaatcgaaaacatcaaagccacgccaaacagttgaaaattattgaaattccaaatgtttcgatatttggcgaaaccaatttgttctctcaaaaatttcgtctttctaataacctacacgcaaaggaactagagaacgctatttttaacatcaaaggtaatatatcctccttaactattgacatggatccagtaaatatttcctttatcaaatgcttcctatcaaacattaaagtctttacgtcctcttgtccgaaaaacaagattttaaaggagaattctcatgtaaagttcttaacaaggcggagagtcctatttgactattttaagtgttttttgcctctaatcaatatgaaattcaccctggatgatcccaaatttgttatcaatgataaagacgatctgatcataggcaagttttctgtcttcatgataagccatcactctaaaagatatacattgggtaacaatcttatggaagaaaaagaagagacgcaacacattttttatgaaagccattggaatgttgaattactagatatgaaattacagcatattataaaacatcaaaaatacgagcatacaatattaagggtggacagcattgccatagaagaaaaagttcaacttttaccggatatattatgttctgcaaacgctgatatcgacacgctaatgctagatttatctgaacttccaacaatggttatgttgagtgaattagtacacaacttagatagtcagttggcaaatgtcgaagagaattatttcaaagagttctatgaaaagttcgcatctaatttacaaaatatgaaagctgaatgttctaatatggctaaatgtttgagacagaaggaaattttaccaagcgacttcatgttccagcaactacctgattttttcgattatattaaaatcaatattagagacatatcatccaccctaggtgctaggtcggtttttatgccaagagatgttttctcttccgttgactctcaaagttcaaaggacctaattgatggcaaactaagaaaatactgcaatacagtcgaaaaattgcaaattgctttatttggtgacaagacacaatggcataacaaaattggctcaaatcacgctactatggttaggtctggtcagctcacaaattttagtaaagataataaacagaatcctaaccataagtccagtattgccgatttagacgatatatcgactagtgatgcgacagaggtaaatcatctttggaacatcaacttactagtaaatgatataactacgtcaataatcggagagacacccgaagtgagcgaagaattgtccactaaaactgtttccaaagtttctaatttatcaattaagctatttccagacactgagtcatttagtagcaatgaaagcgattcgaagataattttgcaaataaatcactccagaggaacatcggtagtatcactgatgagtatctttttggccgtctcaggaatacacacactgaaccaaatatttggacattgtatacaccaaaagatgcgacagtctaaaactaaacaatactttcttgccctctcagaatccaaaaaaaaatcatgtatcaaaagtataaaatggggccaactaaaggagttactcgaaataaatttctcttctgaatatatcagccaaataatcgcactcccaaatggccttagaacaaaatttgaaccaacttcgacatttatcacagtcaaaaactgtaatacaatttcagtttcaggtcagtacttcagaatgatggtagaatctccaacgcagccaaacttttgggagagaatgatctgtatcaatggatttaaagtaatgatacacattgatttattaaaacagcaaatgaaaaagttaaactctttacagaattgggaaaaattaccatccgccataaccttagaaaatgattcatggcacttttccataccgcatcatttcgagatgtttaaaataatagattctattccaactatatttaagagtattaaacaaatgttatattcgttgaaaacatcaaaagacgatttgataattttcccccacaaaatagagactcctttatcactgccaaagattaaactgaaatctaaaaggtggttatttagcatttctgatgatccactagaggcagaattgaatactatctttcagatcggtttacaagaacaacgggagagacttgcgaaattacaggaattcaataaacgcatctctgaagatttgattaaaagtcaaaagaacgctaaagaaatgaaggacgacttcgaggcaattgataacgcaatactaaagcaccgtacaggattgtgggcaaaggatgggaaaaaaagattgcgtaaatccgcaacagattctgaaatacctcttaccccagcagctttgaacattaatggaaagcgtgatgacaggcctgatagaacgcagtttatttctcccgagattgaaaatgcgtacaatactttattagcgaacttctccgattcatggattaaaagggtgaaagaatataaagttaaagaacgtcgtgagttcgataagaacttttctttcttatggggtttcattgattatactaagctccccaaagatattaacaaaaaagttttacctttctcaacaaatccttttttaatgaatttgataattgagaatatcgatattgatataataaggccttcatgtggcattgaaaatattccaaacttcattcacgatgttggaaaaggcgttccgaagaatacagaatattcgattatgattccgatgcatttagatgcgaaatttagtgaagtaagatggcatttgagagattatcccctgccttttgttagtatacctccactaagctctacacaaagtaaagaaacaatacctatgagaatttatggggattttatgataacagaggatatgcttcaatccgacagagagcttagaactttatttgttcctttaataccatcggtaactgttgaaaatacagatagatattactcgttgttcgtgcccagaacaatgactagcgctaagatattcaccgatctaaattttgaaataaactctaaccatacaacacgagtaacttggggtggttcttatcaaccagccattcaacaaacaatgcaatgtttggataacttttcaaagcctccattagatccttctgttaaactagggttttgggataaaacaagatatcttttccatggaaagatcaatatagtttggaaaaagaggggaaaattcgaaatttcccttaaaggcgcaaaaagtccctatatgcttggcggcgaatcagctggtttcatagttggttttgatggtaatgttaacttaaaatgtaacgaagataatgatcccaaaaaatttttatcctgcagcgcagacaaggtccatttcagcattcccaattattttgcaaagccgttactggtatggtctagacctagtaccaatacaatgttcattccaaaccaggacgatacgaacatgcagagatatgcttcattttactatttattgaacactacatcaagtaaaaacgaaaaagcagacaaggaaattatgggaaaatcgttcattgaaaagacaggaattaaactatctgggggtatgacactggatatgggtattctcttcgaaaggttggggcctagtttgaatgagagaacttttgagtccaaaaagcattatttgactcgtctatgtaacccaatttacgttcaagatctctcaaaacatgattcatatgctggctttagaagtgactttatacatatgtctttcgggctatcatctaactcaaactccgcatataacgctatgcaactaagtcccaacgggttcaaggcattctttgtttggtggaaatcattttcaggaaactttcccgtaaggagagggccattatttggtctccaaagtatcagtcctaaatttggtgaacatttatataccatttcttaccacgcagatgtctcaccattattcattaattacatgtaccacaacgctgatgccgatcaaattttgcgtaaaaactacttagaagttgccgaatttgctggtttaaaggctaaatcttctcattttattatggatcttcatcaaaggaaggaagtattgactgaatatcaagccggcttgaacgtcagaaggagagttatgaaattaaaatttctggctggtgatgttgtatgccaggacgtggacatccggactgtaagtggtgagttcagtaaattaaactacattgaagagaaagaggatgctgaatatgatatttttgataatgatatgtcgtggcttgatataacagattttcaagatgcatttttcattaaccctgataattatcttccaaaaattaagattatgccatttgccttttctcctcagttcgcttatcaaaaaagagctagttatggtgacaaataccaagttgatccgaaaacatgcaagccaataacgccgtttgataatcgtgtctcccatggctgtacactagggcacaatgtttctttacgtactgacctagttgagaaacgtgttacagttttgaagaagtttcgagagaaattgcaggagggtattagaaaaaacaaatcagccggtgtatcagaggagaatttgaatgatttactctcaaaagcaaattctagtgtggaaaatgcagaattactactgaaagacttccagaagatatttaaacaacatgaagccggacaaacagaacagcctttccatttcgactctttaaatctattgaaaaacaccaaaaagaccctgaaacaatttgaacatagattttttatttttaacgtactgttgaaatggaacgaggacgcaagaagtgctattttcaaatttttttactatgctaacctatccaatgaatttgcttctttagcaagtggcaagggcctaagggaatttgaagatgtaataaagcaaagagaaatgactgatgatacaacgagtatggaagcgataccagaaggaacagacaaagcaaacaccactaaacaatgtcatagctgcgatgatacagagttcaccactgagaaccttttgaatatatttgaaaaaaatattacacaactgtcttgtgacatcaaaaataagatacaccataagttttttgtccaatttataactccacaaattcagttgacatccctggaaaatccagaagcttgtgttttggtttcttcacccttttttatgctaaagacattggaatttgatgcaaacactaccagtaacacgtatatgcaagatatttttttgaaaagacatggcattctattcggaaacgccaatgcctttttatttaataaaaaggattaccaagagttttttgaactatacttcggctccagctcatatggccaagataaaaaagaacagtggccaccatggctaggcttggagttaggattcgaaccttctgcattaaaaaagaaagcagtggttaggaatatttctgctctgcttcatcatcagaaattagcaccgttttctgctaaatatgactccttaaaagataaaatagaagataatatttgcggatacgttcctcaagttaacgtacaagtgaattctgacgagtacctaatgctgacgaagatggccttgaaattattcctttatgtagaacccgaagatgaagaattgaagaaatatattgaaaaactaattattggttacgatatctatgatacagcccaaactagaaaattcgtaaatgatttacacgatagtgaacaaattctagctgttgttgaaaaggagcttttattcaaaagaagcctattggacgacattggaaaactcgatctatccaatattcacaacgaacgcatgcatcagttgttgaggttgtatatcttaaggaaggttttcacttcaaatggaaacaattacattaataggactttagtatggaatatcaaggttaatgaaactatcttgcatttattagacaaaattgacaaaccatttttagatattgccgttgcaaagctaaactttcaaagaatccaacacacgatgggattaaggaagaacactgtaaccgtaaaaatgatgcaaatatttgacttaggcgaaaatgttaattatcattgtattttagggcctttgataacatcaagtggtaatgacacagtcggtttggcgagtgatgttccgttagttcaaataacttgggatgttgataagcctgtaggtggtattaaggttgttaaaaacgttgagaccactttgtcgagtttgacgataaaattagaagaggacagactaaataaactttttgagtggttatcgttaaaggagttaatttacgatggaaacggagatgacgatgatggagcttccagtatttttgatatggtgtcatcagaatcagaggaaggaaaaattgagttttcagaagatattagttctgatttcaatgaaatgttaaagagatcaagtgattatatgatcgttgaagatcttaaattgaacagcttcaaactttgtatcagttataagggcaaaggaaagatgagattggctaacgttactaactttgttttcaatttcccgactttaagattgtccaaccaaactttgagggtcacagatctattacttgcccttaaaaaagtgttaatcaaggttttaataaaacatactgggagatttattggtaataaattgaaaagaaattctaaggagaataaaattgctgacgacacttcaccactgaagcaactcacaacttataattcctacacggagcctgaagaacttcgttaa

SEQ ID NO: 8072 - DNA, 7887 bp, Artificial Sequence
  Description of Artificial Sequence: Synthetic polynucleotide
atgatgtttccgattaatgttttattgtacaagtggcttatatttgcagtgactttcttatggagctgtaaaattttattgaggaagcttttaggaataaatataacatggattaacttgtttaaattagaaatatgcggtttatccttagaagatggtaccgtcaggttgaaatccgttcgttttgctgtatttgaaagaaagcttttcatcaagggtttaagaattgattccaagaaatcttctactaatgatcttcataaagaattaccaagagaggaagaaagaacttttatagagacccccgaagataatggtgggggcttcatttctaagattctttctttatctcaatactggctcaatggggtcacgatcattttggaagatacgcaattagtcaacaacgatatcacgattgaaaaatttggcttttttctttctattgataactctaaacatatcaagtctttgagatttgattcctttttgagaaaacttctttggaatggccagaccatcattgctgatgccatttttatagtgaatacaaacttattgattggtgaaattatgaatcctttgaaggatggacttcaagtaggattagatttaaaattgggtgatttaaatattcccatgaatttattgaatttatttatcaacaaggagaacgttgatttgatgtccaatgaaaaacttttacaaagattggcagatacaacaaaggcgaatgaagagttgaaggatgaagatatcgctaagatgaaggatgatctcgtgtatgcaatggaaaaatttgtagatagaataaagccattgaaagaaatgaacgtcaccgttgataaacttcaaatcaaagattttccactcaccaatcatccagaattgcttggaatgaacaaatatatcagttataatgttttggtttctaatataaacttcaataccaacaggttcagaaatgagatgccaggttatacgttaatttttgaggagcgtgattctcccttcaagtttagtattataatggcaagatttaatatatatttgaatttgaatagaaaacatcaaagccacgccaaacagttgaaaattattgaaattccaaatgtttctatatttggcgaaaccaatttgttctctcaaaaatttcgtctttctaataacttgcacgcaaaggaattagagaacgctatttttaacatcaaaggtaatatatcctccttaactattgacatggatccagtaaatatttcctttatcaaatgcttcttatctaacattaaagtctttacgtcctcttgtccgaaaaacaagattttaaaggagaattctcatgtaaagttcttaacaaggagaagagtcttgtttgactattttaagtgttttttgcctttgatcaatatgaaattcaccttggatgatcccaaatttgttatcaatgataaagacgatttgatcataggcaagttttctgtcttcatgataagccatcactctaaaagatatacattgggtaacaatcttatggaagaaaaagaagagacgcaacacattttttatgaaagccattggaatgttgaattattagatatgaaattacagcatattataaaacatcaaaaatacgagcatacaatattaagggtggacagcattgccatagaagaaaaagttcaacttttaccggatatattatgttctgcaaacgctgatatcgacacgttgatgcttgatttatctgaacttccaacaatggttatgttgagtgaattagtacacaacttagatagtcagttggcaaatgtcgaagagaattatttcaaagagttctatgaaaagttcgcatctaatttacaaaatatgaaagctgaatgttctaatatggctaaatgtttgagacagaaggaaattttaccaagcgacttcatgttccagcaattacctgattttttcgattatattaaaatcaatattagagacatatcttccaccttgggtgctaggtctgtttttatgccaagagatgttttctcttccgttgactctcaaagttccaaggacttgattgatggcaaattgagaaaatactgcaatacagtcgaaaaattgcaaattgctttatttggtgacaagacacaatggcataacaaaattggcagtaatcacgctactatggttaggtctggtcagctcacaaattttagtaaagataataaacagaatcctaaccataagtccagtattgccgatttagacgatatatctactagtgatgcgacagaggtaaatcatctttggaacatcaacttattggtaaatgatataactacgtctataatcggagagacacccgaagtgagcgaagaattgtccactaaaactgtttccaaagtttctaatttatccattaagttatttccagacactgagtcttttagtagcaatgaaagcgattctaagataattttgcaaataaatcactccagaggaacatctgtagtatctttgatgagtatctttttggccgtcagtggaatacacacattgaaccaaatatttggacattgtatacaccaaaagatgaggcagtctaaaactaaacaatactttcttgccctctctgaatccaaaaaaaaaagttgtatcaaaagtataaaatggggccaattgaaggagttactcgaaataaatttctcttctgaatatatcagccaaataatcgcactcccaaatggccttagaacaaaatttgaaccaacttctacatttatcacagtcaaaaactgtaatacaatttctgtttctggtcagtacttcagaatgatggtagaatctccaacgcagccaaacttttgggagagaatgatctgtatcaatggatttaaagtaatgatacacattgatttattaaaacagcaaatgaaaaagttaaactctttacagaattgggaaaaattaccatccgccataaccttagaaaatgattcttggcacttttccataccgcatcatttcgagatgtttaaaataatagattctattccaactatatttaagagtattaaacaaatgttatattctttgaaaacaagtaaagacgatttgataattttcccccacaaaatagagactcctttatctttaccaaagattaaattgaaatctaaaaggtggttatttagcatttctgatgatccattggaggcagaattgaatactatctttcagatcggtttacaagaacaaagagagagacttgcgaaattacaggaattcaataaacgcatctctgaagatttgattaaaagtcaaaagaacgctaaagaaatgaaggacgacttcgaggcaattgataacgcaatattgaagcaccgtacaggattgtgggcaaaggatgggaaaaaaagattgcgtaaatccgcaacagattctgaaatacctcttaccccagcagctttgaacattaatggaaagcgtgatgacaggcctgatagaacgcagtttatttctcccgagattgaaaatgcgtacaatactttattagcgaacttctccgattcttggattaaaagggtgaaagaatataaagttaaagaacgtcgtgagttcgataagaacttttctttcttatggggtttcattgattatactaagctccccaaagatattaacaaaaaagttttacctttcagtacaaatccttttttaatgaatttgataattgagaatatcgatattgatataataaggccttcttgtggcattgaaaatattccaaacttcattcacgatgttggaaaaggcgttccgaagaatacagaatattctattatgattccgatgcatttagatgcgaaatttagtgaagtaagatggcatttgagagattatcccttaccttttgttagtatacctccattaagctctacacaaagtaaagaaacaatacctatgagaatttatggggattttatgataacagaggatatgcttcaatccgacagagagcttagaactttatttgttcctttaataccatctgtaactgttgaaaatacagatagatattactctttgttcgtgcccagaacaatgactagcgctaagatattcaccgatttgaattttgaaataaactctaaccatacaacaagagtaacttggggtggttcttatcaaccagccattcaacaaacaatgcaatgtttggataacttttccaagcctccattagatccttctgttaaattggggttttgggataaaacaagatatcttttccatggaaagatcaatatagtttggaaaaagaggggaaaattcgaaatttcccttaaaggcgcaaaaagtccctatatgcttggcggcgaatctgctggtttcatagttggttttgatggtaatgttaacttaaaatgtaacgaagataatgatcccaaaaaatttttatcctgcagcgcagacaaggtccatttcagcattcccaattattttgcaaagccgttattggtatggtctagacctagtaccaatacaatgttcattccaaaccaggacgatacgaacatgcagagatatgcttctttttactatttattgaacactacatctagtaaaaacgaaaaagcagacaaggaaattatgggaaaatctttcattgaaaagacaggaattaaattatctgggggtatgacattagatatgggtattctcttcgaaaggttggggcctagtttgaatgagagaacttttgagtccaaaaagcattatttgactcgtctttgtaacccaatttacgttcaagatctctctaaacatgattcttatgctggctttagaagtgactttatacatatgtctttcgggctttcttctaactccaactccgcatataacgctatgcaattgagtcccaacgggttcaaggcattctttgtttggtggaaaagtttttctggaaactttcccgtaaggagagggccattatttggtctccaaagtatcagtcctaaatttggtgaacatttatataccatttcttaccacgcagatgtctctccattattcattaattacatgtaccacaacgctgatgccgatcaaattttgcgtaaaaactacttagaagttgccgaatttgctggtttaaaggctaaatcttctcattttattatggatcttcatcaaaggaaggaagtattgactgaatatcaagccggcttgaacgtcagaaggagagttatgaaattaaaatttttggctggtgatgttgtatgccaggacgtggacatcagaactgtaagtggtgagttcagtaaattaaactacattgaagagaaagaggatgctgaatatgatatttttgataatgatatgtcttggcttgatataacagattttcaagatgcatttttcattaaccctgataattatcttccaaaaattaagattatgccatttgccttttctcctcagttcgcttatcaaaaaagagctagttatggtgacaaataccaagttgatccgaaaacatgcaagccaataacgccgtttgataatcgtgtctcccatggctgtacattagggcacaatgtttctttacgtactgacttggttgagaaacgtgttacagttttgaagaagtttagagagaaattgcaggagggtattagaaaaaacaaaagtgccggtgtatctgaggagaatttgaatgatttactctctaaagcaaattctagtgtggaaaatgcagaattattattgaaagacttccagaagatatttaaacaacatgaagccggacaaacagaacagcctttccatttcgactctttaaatttattgaaaaacaccaaaaagaccttgaaacaatttgaacatagattttttatttttaacgtacttttgaaatggaacgaggacgcaagaagtgctattttcaaatttttttactatgctaacctttccaatgaatttgcttctttagcaagtggcaagggcttgagggaatttgaagatgtaataaagcaaagagaaatgactgatgatacaacgagtatggaagcgataccagaaggaacagacaaagcaaacaccactaaacaatgtcatagctgcgatgatacagagttcaccactgagaaccttttgaatatatttgaaaaaaatattacacaattatcttgtgacatcaaaaataagatacaccataagttttttgtccaatttataactccacaaattcagttgacatccttagaaaatccagaagcttgtgttttggtttcttctcccttttttatgttgaagacattggaatttgatgcaaacactaccagtaacacgtatatgcaagatatttttttgaaaagacatggcattcttttcggaaacgccaatgcctttttatttaataaaaaggattaccaagagttttttgaattatacttcggctccagctcttatggccaagataaaaaagaacagtggccaccatggttaggcttggagttaggattcgaaccttctgcattaaaaaagaaagcagtggttaggaatatttctgctttacttcatcatcagaaattagcaccgttttctgctaaatatgactccttaaaagataaaatagaagataatatttgcggatacgttcctcaagttaacgtacaagtgaattctgacgagtacttgatgcttacgaagatggccttgaaattattcctttatgtagaacccgaagatgaagaattgaagaaatatattgaaaaattgattattggttacgatatctatgatacagcccaaactagaaaattcgtaaatgatttacacgatagtgaacaaattttggctgttgttgaaaaggagcttttattcaaaagaagccttttggacgacattggaaaactcgatttatccaatattcacaacgaacgcatgcatcagttgttgaggttgtatatcttaaggaaggttttcacttccaatggaaacaattacattaataggactttagtatggaatatcaaggttaatgaaactatcttgcatttattagacaaaattgacaaaccatttttagatattgccgttgcaaagttgaactttcaaagaatccaacacacgatgggattaaggaagaacactgtaaccgtaaaaatgatgcaaatatttgacttaggcgaaaatgttaattatcattgtattttagggcctttgataacatctagtggtaatgacacagtcggtttggcgagtgatgttccgttagttcaaataacttgggatgttgataagcctgtaggtggtattaaggttgttaaaaacgttgagaccactttgagcagtttgacgataaaattagaagaggacagattgaataaactttttgagtggttatctttaaaggagttaatttacgatggaaacggagatgacgatgatggagcttccagtatttttgatatggtgtcttctgaaagtgaggaaggaaaaattgagttttctgaagatattagttctgatttcaatgaaatgttaaagagaagtagtgattatatgatcgttgaagatcttaaattgaacagcttcaaactttgtatcagttataagggcaaaggaaagatgagattggctaacgttactaactttgttttcaatttcccgactttaagattgtccaaccaaactttgagggtcacagatttattacttgcccttaaaaaagtgttaatcaaggttttaataaaacatactgggagatttattggtaataaattgaaaagaaattctaaggagaataaaattgctgacgacacttctccattgaagcaactcacaacttataattcctacacggagcctgaagaacttcgttga

SEQ ID NO: 8073 - DNA, 915 bp, Saccharomyces cerevisiae
atgacaaaagatattagaacaggcgatttagtgttatgcaaagttggctcgtttccaccttggccagctgtagtatttccacagcgtttgctgcgaaacgatgtatatagaaagagaaaatccaattgtgttgctgtttgttttttcaacgatccaacttattattgggaacaacccagtagattaaaggagctagatcaagacagcattcacaatttcatattagaacatagtaaaaatgcaaaccaaagggaattggtcaatgcttataaggaagcaaaaaattttgatgatttcaacgtatttttacaagaaaagtttgaagaagaaaacaggttaagtgatctaaaagcgtttgagaaaagtgaaggttctaaaatcgttgccggagaagatccctttgtaggtcgaacaaaagtagtgaataaaagaaaaaaaaattcaatatccatcaaagaagatccggaagataaccagaaatcaaatgaagaagaaagcaaaccgaacatcaaaccgtccaaaaaaaagagacccacagctaattcgggaggaaaatcaaacagtggcaataaaaagaaagttaaattagactattccagaagagtagaaatttcacagttatttcgccgcaggattcaaagaaatctaatccagagagaaacacctcctactgagcatgagatcaaggaaactcatgaactattaaatagaatatatgagaattctgacaccaaacggcccttttttgatttgaaggccctacgcgaaagcaaattacacaagctactgaaagcaattgttaatgatcctgacttaggcgaatttcacccactttgtaaagaaattttactgtcctgggcagacctaatcacagaactgaagaaagaaaagttgcaagcgctacctacgccttga

SEQ ID NO: 8074 - DNA, 915 bp, Artificial Sequence
  Description of Artificial Sequence: Synthetic polynucleotide
atgacaaaagatattagaacaggcgatttagtgttatgcaaagttggctcttttccaccttggccagctgtagtatttccacagcgtttgttaagaaacgatgtatatagaaagagaaaatccaattgtgttgctgtttgttttttcaacgatccaacttattattgggaacaacccagtagattaaaggagttagatcaagacagcattcacaatttcatattagaacatagtaaaaatgcaaaccaaagggaattggtcaatgcttataaggaagcaaaaaattttgatgatttcaacgtatttttacaagaaaagtttgaagaagaaaacaggttaagtgatttgaaagcgtttgagaaaagtgaaggttctaaaatcgttgccggagaagatccctttgtaggtagaacaaaagtagtgaataaaagaaaaaaaaattctatatccatcaaagaagatccggaagataaccagaaatctaatgaagaagaaagcaaaccgaacatcaaaccgtccaaaaaaaagagacccacagctaattctggaggaaaaagtaacagtggcaataaaaagaaagttaaattagactattccagaagagtagaaatttctcagttatttcgccgcaggattcaaagaaatttgatccagagagaaacacctcctactgagcatgagatcaaggaaactcatgaattattaaatagaatatatgagaattctgacaccaaaaggcccttttttgatttgaaggcccttcgcgaaagcaaattacacaagttattgaaagcaattgttaatgatcctgacttaggcgaatttcacccactttgtaaagaaattttattatcctgggcagacttgatcacagaattgaagaaagaaaagttgcaagcgttacctacgccttga

SEQ ID NO: 8075 - DNA, 615 bp, Saccharomyces cerevisiae
atgaaactcaatgaacaaataccaaaagacctgttacgcctgattaaaagttccaagtatgttcatgtggcgacatgctcgtcaaattgtataccatctgtttcgttgatgcattacatatttgtttcatccgcggaaactttccataaacatgagtatagtatagaaatagattgtaatgactatattatattcacagtgttcgagaaatcagtaacctttcgtaatgtcatgagcaacccaaacgttgcattgctatttcacgattggatcacagctaaaaatttaactcttcgaaaaaaaagcgtccatagtaaagatgatttttcatttgttgagtcagagtctacaaaatttaacaactttttacgagatttgaaccaaagtgaattgaatcaagtgagcgctactatcaatggtattgctgatattgtgaaccctaatagtgaagaatctacttattataggcggttgttattaacagtcaatccagacgcagatatttttatactaggagaagatacagccataataaaggtaaatatacaaaaaataaaagtctctgacatggaaaataatacttctacatacggccaaacagtacaaccagtttaa

SEQ ID NO: 8076 - DNA, 615 bp, Artificial Sequence
  Description of Artificial Sequence: Synthetic polynucleotide
atgaaactcaatgaacaaataccaaaagacttattacgcttaattaaaagttccaagtatgttcatgtggcgacatgctcttccaattgtataccatctgtttctttgatgcattacatatttgtttcttccgcggaaactttccataaacatgagtatagtatagaaatagattgtaatgactatattatattcacagtgttcgagaaatctgtaacctttcgtaatgtcatgagcaacccaaacgttgcattgttatttcacgattggatcacagctaaaaatttaactcttagaaaaaaaagcgtccatagtaaagatgatttttcttttgttgagagtgagtctacaaaatttaacaactttttaagagatttgaaccaaagtgaattgaatcaagtgagcgctactatcaatggtattgctgatattgtgaaccctaatagtgaagaatctacttattataggagattgttattaacagtcaatccagacgcagatatttttatattaggagaagatacagccataataaaggtaaatatacaaaaaataaaagtctctgacatggaaaataatacttctacatacggccaaacagtacaaccagtttga

SEQ ID NO: 8077 - DNA, 960 bp, Saccharomyces cerevisiae
atgctaaaatccgtacagggactgtggaaagatttttttggaatacgagatgatggcaggaaacgagaatacgggtcccttgatgaagtgagaaaacgatctgccttaaggagcagaagaaagcagatgcgtcctacgggtaaaagcgttctaaaaagacctagaaaggtgacagataggaaaactgaagaaaaaattcgtactaacaggaggaaaacacccaaacgaaggttaacaaagatattccagacaatcagagatgttttttccaatgataatgaaaatatgagcaagatgcaaaatgtttgtggcgacatgactagaattttgaagaagagatcccagggaagaccttcttatatggacacagatacagccaaatctaggatcctaaggagtgatgcctttaagagaaagatatcggagttgaaatacaataagcaacggatcagtgaactaagaagtggtagttctgacgggtcgagtggaaaagatagaaatcaatcattatacttagatagagaaattcttctacagcggcaaattaagaaaagagatgagaaaataaaagccttggaaagcaagctacaatcattacaagaagcattgaattactcaaatgagaagtacaggattttggaggatttactagattcttcaaacattcatccatcatacaccaaatctaggagaaccatgtctaatctagctagagaaaacgatgagattaagcccttgaaaattgatctttccccgtctccaataagaagaacgaattcattattcacttccagccccatgaaaacatataatcgggatggaaatataccagagatgcagccgttacaggaaaacatatctcccgcctgtcccactccaccctatcgttcaagggaaactgaaaaagaggatgaaacactttcaccaatctcagtggacttttcaagttatttatcttaa

SEQ ID NO: 8078 - DNA, 960 bp, Artificial Sequence
  Description of Artificial Sequence: Synthetic polynucleotide
atgttgaaatccgtacagggattatggaaagatttttttggaataagagatgatggcaggaaaagagaatacgggtcccttgatgaagtgagaaaaagatctgccttaaggagcagaagaaagcagatgcgtcctacgggtaaaagcgttttgaaaagacctagaaaggtgacagataggaaaactgaagaaaaaattcgtactaacaggaggaaaacacccaaaagaaggttaacaaagatattccagacaatcagagatgttttttccaatgataatgaaaatatgagcaagatgcaaaatgtttgtggcgacatgactagaattttgaagaagagatcccagggaagaccttcttatatggacacagatacagccaaatctaggatcttgaggagtgatgcctttaagagaaagatatctgagttgaaatacaataagcaaagaatcagtgaattgagaagtggtagttctgacgggagtagtggaaaagatagaaatcaatctttatacttagatagagaaattcttttacagagacaaattaagaaaagagatgagaaaataaaagccttggaaagcaagttacaatctttacaagaagcattgaattactctaatgagaagtacaggattttggaggatttattagattcttccaacattcatccatcttacaccaaatctaggagaaccatgtctaatttggctagagaaaacgatgagattaagcccttgaaaattgatctttccccgtctccaataagaagaacgaattctttattcacttccagccccatgaaaacatataatagagatggaaatataccagagatgcagccgttacaggaaaacatatctcccgcctgtcccactccaccctatcgttctagggaaactgaaaaagaggatgaaacactttctccaatcagtgtggacttttctagttatttatcttga

SEQ ID NO: 8079 - DNA, 1185 bp, Saccharomyces cerevisiae
atggattccacagcacttaaggtagctctaggctgtattgcaattcgtttggctgtgaacagcctttttccctctctacaacaacaactggaccagtctgtagaattctcaactcccgtaacttcatttaggtcactacaggaaggtatatacctactgcggaacaacatccaagtatataatcatggggttgttcaccatcctccaattttgattttttttctttccctctttaattccgacaggttaatttccctcatatacgctttaattgatggattaattgcgtatcagctgacagaggtaacaaaggctttcaaaaacttgaaactgaaagtttggctacctggacttctttatgccgtgaatcctttgacccttttatcgtgcattagtcggtcatcaatcatattcacaaattttgctatttcatcgtcattgtattgcatattagctgaaggaaacgttcttttgtcctctgttatgatttctatatctggatatttgtcagtataccctattctcctcttaattccgctattaggtatgctgaaaagttggaggcaaagaatattatctgccattgtttccatactatctttattaattctgctattattcagctacagtatattaggcagccaaagttggtcatttttgacacaggtttatggatctattataacctttgagaaggtttttccaaatctgggtttgtggtggtacttcttcattgaaatgtttgacaccttcataccgttcttcaaggctgtattcaacatttttattgcagtattcattacaccatttactttgcgctatcataagcagccattctacgcattcattttatgcattgggtggattgtccttacaaagccatatccctcactaggtgacgctggttttttcttcagcttcctacctttcttcacgccactatttggatatttaagataccccatcatatcagcattactgtttttacacgcaattgttttggcgccaattttctatcatctttgggttgttttaggttcagggaatagtaattttttctatgctatttccctagtttatgctctggctatagcatctatattagttgacttgaactgggcgatgctgagaattgaatacgataacggtatcccaaatttcaaattgaaggtaacacaaatttaa

SEQ ID NO: 8080 - DNA, 1185 bp, Artificial Sequence
  Description of Artificial Sequence: Synthetic polynucleotide
atggattccacagcacttaaggtagctttgggctgtattgcaattcgtttggctgtgaacagcctttttccctctttacaacaacaattggaccagtctgtagaattctctactcccgtaacttcttttaggtccttacaggaaggtatatacttgttgagaaacaacatccaagtatataatcatggggttgttcaccatcctccaattttgattttttttctttccctctttaattccgacaggttaatttccctcatatacgctttaattgatggattaattgcgtatcagttgacagaggtaacaaaggctttcaaaaacttgaaattgaaagtttggttacctggacttctttatgccgtgaatcctttgacccttttaagttgcattagtagaagttctatcatattcacaaattttgctatttcttcttctttgtattgcatattagctgaaggaaacgttcttttgtcctctgttatgatttctatatctggatatttgagtgtataccctattctcctcttaattccgttgttaggtatgttgaaaagttggaggcaaagaatattatctgccattgtttccatattatctttattaattttattattattcagctacagtatattaggcagccaaagttggtcttttttgacacaggtttatggatctattataacctttgagaaggtttttccaaatttgggtttgtggtggtacttcttcattgaaatgtttgacaccttcataccgttcttcaaggctgtattcaacatttttattgcagtattcattacaccatttactttgcgctatcataagcagccattctacgcattcattttatgcattgggtggattgtccttacaaagccatatccctctttgggtgacgctggttttttcttcagcttcttacctttcttcacgccattatttggatatttaagataccccatcatatctgcattactttttttacacgcaattgttttggcgccaattttctatcatctttgggttgttttaggttctgggaatagtaattttttctatgctatttccttggtttatgctttggctatagcatctatattagttgacttgaactgggcgatgttgagaattgaatacgataacggtatcccaaatttcaaattgaaggtaacacaaatttga

SEQ ID NO: 8081 - DNA, 1131 bp, Saccharomyces cerevisiae
atgcaagttgcaattccagaaaccatgaaggctgtcgtcattgaagacggtaaagcggttgttaaagagggcattcccattcctgaattggaagaaggattcgtattgattaagacactcgctgttgctggtaaccccactgattgggcacacattgactacaagatcgggcctcaaggatctattctgggatgtgatgctgctggccaaattgtcaaattgggcccagctgtcaatcctaaagacttttctatcggtgattatatttatgggttcattcacggatcttccgtaaggtttccttccaatggtgcttttgctgaatattctgctatttcaactgtggttgcctacaaatcacccaatgaactcaaatttttgggtgaggatgttctacctgccggccctgtcaggtctttggaaggtgtagccactatcccagtgtcactgaccacagccggcttggtgttgacctataacttgggcttggacctgaagtgggagccatcaaccccacaaagaaaaggccccatcttattatggggcggtgcaactgcagtaggtcagtcgctcatccaattagccaataaattgaatggcttcaccaagatcattgttgtggcttctcggaagcacgaaaaacttttgaaagaatatggtgctgatgaattatttgattatcatgatattgacgtggtagaacaaattaaacacaagtacaacaatatctcgtatttagtcgactgtgtcgcgaatcaagatacgcttcaacaagtgtacaaatgtgcggccgataaacaggatgctacaattgttgaattaaaaaatttgacagaagaaaacgtcaaaaaagagaacaggagacaaaacgttactattgacataataaggctatattcaataggtggccatgaagtaccatttggaaacattactttaccagccgactcagaagctaggaaagctgcaataaaatttatcaaattcatcaatccaaagattaatgatggacaaattcgccatattccagtaagggtctataagaacgggctttgtgatgttcctcatatcctaaaagacatcaaatatggtaagaactctggtgaaaaactcgttgccgtattaaactag

SEQ ID NO: 8082 - DNA, 1131 bp, Artificial Sequence
  Description of Artificial Sequence: Synthetic polynucleotide
atgcaagttgcaattccagaaaccatgaaggctgtcgtcattgaagacggtaaagcggttgttaaagagggcattcccattcctgaattggaagaaggattcgtattgattaagacactcgctgttgctggtaaccccactgattgggcacacattgactacaagatcgggcctcaaggatctattttaggatgtgatgctgctggccaaattgtcaaattgggcccagctgtcaatcctaaagacttttctatcggtgattatatttatgggttcattcacggatcttccgtaaggtttccttccaatggtgcttttgctgaatattctgctatttctactgtggttgcctacaaaagtcccaatgaactcaaatttttgggtgaggatgttttacctgccggccctgtcaggtctttggaaggtgtagccactatcccagtgtctttaaccacagccggcttggtgttgacctataacttgggcttggacttgaagtgggagccatctaccccacaaagaaaaggccccatcttattatggggcggtgcaactgcagtaggtcagagcctcatccaattagccaataaattgaatggcttcaccaagatcattgttgtggcttctagaaagcacgaaaaacttttgaaagaatatggtgctgatgaattatttgattatcatgatattgacgtggtagaacaaattaaacacaagtacaacaatatcagttatttagtcgactgtgtcgcgaatcaagatacgcttcaacaagtgtacaaatgtgcggccgataaacaggatgctacaattgttgaattaaaaaatttgacagaagaaaacgtcaaaaaagagaacaggagacaaaacgttactattgacataataaggttatattctataggtggccatgaagtaccatttggaaacattactttaccagccgactctgaagctaggaaagctgcaataaaatttatcaaattcatcaatccaaagattaatgatggacaaattcgccatattccagtaagggtctataagaacgggctttgtgatgttcctcatatcttgaaagacatcaaatatggtaagaactctggtgaaaaactcgttgccgtattaaactga

SEQ ID NO: 8083 - DNA, 363 bp, Saccharomyces cerevisiae
atggtcaaattaacttcaatcgccgctggtgtcgctgccatcgctgctactgcttccgcaaccaccactatagctcaatctgacgaaagagtcaacttggttgaattgggtgtctacgtctctgatatcagagctcacttggcccaatactacatgttccaagccgcccacccaactgaaacctacccagttgaagttgctgaagccgttttcaactacggtgacttcaccaccatgttgactggtattgccccagaccaagtgaccagaatgatcaccggtgttccatggtactccagcagattaaagccagctatctccaaggctctatccaaagatggtatctacactatcgcaaactag

SEQ ID NO: 8084 - DNA, 363 bp, Artificial Sequence
  Description of Artificial Sequence: Synthetic polynucleotide
atggtcaaattaacttctatcgccgctggtgtcgctgccatcgctgctactgcttccgcaaccaccactatagctcaatctgacgaaagagtcaacttggttgaattgggtgtctacgtctctgatatcagagctcacttggcccaatactacatgttccaagccgcccacccaactgaaacctacccagttgaagttgctgaagccgttttcaactacggtgacttcaccaccatgttgactggtattgccccagaccaagtgaccagaatgatcaccggtgttccatggtactccagcagattaaagccagctatctccaaggctttgtccaaagatggtatctacactatcgcaaactga

SEQ ID NO: 8085 - DNA, 609 bp, Saccharomyces cerevisiae
atgaaagtttccgataggcgtaagtttgaaaaagcaaactttgacgagtttgagtcggctctaaataacaaaaacgacttggtacattgtccctcaataactttatttgaatcgatccccacggaagtgcggtcattctacgaagacgaaaagtctggcctaatcaaagtggtaaaattcagaactggtgcaatggataggaaaaggtcttttgaaaaagttgtcatttccgtcatggtcgggaaaaatgtaaaaaagttcctgacgtttgttgaagacgaaccagatttccagggcggaccaatcccttcaaagtatcttgttcccaagaaaatcaacttgatggtctacacgttgtttcaagtgcatactttgaaattcaatagaaaggattacgataccctttctcttttttacctcaacagaggatactataatgagttgagtttccgtgtcctggaacgttgtcacgaaatagcgagtgctaggccgaacgacagctctacgatgcgtactttcactgactttgtttccggcgcacctattgtaaggagtcttcagaaaagcaccataaggaaatatgggtacaatttggcagcctacacgtag

SEQ ID NO: 8086 - DNA, 609 bp, Artificial Sequence
  Description of Artificial Sequence: Synthetic polynucleotide
atgaaagtttccgataggcgtaagtttgaaaaagcaaactttgacgagtttgagtctgctttgaataacaaaaacgacttggtacattgtccctccataactttatttgaaagtatccccacggaagtgagatctttctacgaagacgaaaagtctggcttaatcaaagtggtaaaattcagaactggtgcaatggataggaaaaggtcttttgaaaaagttgtcatttccgtcatggtcgggaaaaatgtaaaaaagttcttgacgtttgttgaagacgaaccagatttccagggcggaccaatcccttctaagtatcttgttcccaagaaaatcaacttgatggtctacacgttgtttcaagtgcatactttgaaattcaatagaaaggattacgataccctttctcttttttacctcaacagaggatactataatgagttgagtttccgtgtcttggaacgttgtcacgaaatagcgagtgctaggccgaacgacagctctacgatgcgtactttcactgactttgtttccggcgcacctattgtaaggagtcttcagaaaagcaccataaggaaatatgggtacaatttggcagcctacacgtga

SEQ ID NO: 8087 - DNA, 651 bp, Saccharomyces cerevisiae; identical to SEQ ID NO: 2837

SEQ ID NO: 8088 - DNA, 651 bp, Artificial Sequence; identical to SEQ ID NO: 2838
  Description of Artificial Sequence: Synthetic polynucleotide

SEQ ID NO: 8089 - DNA, 4149 bp, Saccharomyces cerevisiae
atgtggaaaactttggggagagttgaacaactgcttccatatgccagcctcattttgcgtaatcgagaagttttgttcagagaaccgaagcgaggaattgacgagtatctggaaaacgattctttttttcaaatgatacctgttaaatatcgtgaaattgtgctgcccaagttgagaagagatactaacaaaatgaccgcggctcttaaaaataaagtcgctgttgcaattgacgagcttacggtgccacttatgtggatgatccattttgccgtaggatacccttaccgttatccagagcttcagctactcgcttttgccggtcctcagcgcaacgtatacgtcgatgatacaacaagacgcatccaactgtacactgattacaacaagaacggttcatcggagcctcgactaaagacgcttgacggactcacttcagattacgtgttttattttgtcactgtgctaaggcaaatgcaaatatgtgcgcttggtaacagttatgacgcttttaatcatgatccttggatggatgtggtgggatttgaggatccagatcaagtaacaaatcgagacatttcgaggatagttttgtattcctacatgtttctgaataccgcgaagggctgtctggttgaatacgcaacttttcggcagtacatgagggaacttccgaagaatgcacctcagaagctgaattttcgggagatgcgtcaggggttgattgccctaggacggcactgcgtaggtagcagatttgaaacagatttgtacgagtcggcgacgagtgaactcatggccaatcattccgttcaaacagggcgaaatatttacggtgtggattccttttcgttaactagtgtcagtgggacgaccgccactttattgcaggaacgagcttccgagcgctggattcaatggttaggccttgaaagcgactaccattgttcattctctagtactcggaatgcggaagacgtagtggcaggtgaggcggcgagttcagatcatcatcaaaaaatttcaagagtaacgcgaaaaaggccccgagagcccaagagtacaaacgatatcctcgtcgcaggccggaaactctttggcagctcctttgaattcagggacttgcatcagttgcgcttatgtcatgaaatatacatggcagacacaccctctgtggcagtacaggccccaccgggctatggtaagacggagttatttcatctccccttgatagcactggcgtctaagggcgacgtgaaatatgtgtcgtttctgtttgtaccgtacacagtgttgcttgctaattgcatgatcaggttgagccgatgcggttgcttgaatgtggcccctgtaagaaactttattgaagaaggttgcgatggcgttactgatttatacgtggggatctacgatgatcttgctagcactaatttcacagacaggatagctgcgtgggagaatattgttgagtgcacctttaggaccaacaacgtaaaattgggttacctcattgtagatgagtttcacaactttgaaacggaggtctaccggcagtcgcaatttgggggcataactaaccttgattttgacgcttttgagaaagcaatctttttgagcggcacagcacctgaggctgtagctgatgctgcgttgcagcgtattgggcttacgggactggccaagaagtcgatggacatcaacgagctcaaacggtcggaagatctcagcagaggtctatccagctatccaacacggatgtttaatctaatcaaggagaaatccgaggtgcctttagggcatgttcataaaatttggaagaaagtggaatcacagcccgaagaagcactgaagcttcttttagccctctttgaaattgaaccagagtcgaaggccattgtagttgcaagcacaaccaacgaagtggaagaattggcctgctcttggagaaagtattttagggtggtatggatacacgggaagctgggtgctgcagaaaaggtgtctcgcacaaaggagtttgtcactgacggtagcatgcgagttctcatcggaacgaaattagtgactgaaggaattgacattaagcaattgatgatggtgatcatgcttgataatagacttaatattattgagctcattcaaggcgtagggagactaagagatgggggcctctgttatctattatctagaaaaaacagttgggcggcaaggaatcgtaagggtgaattaccaccgattaaggaaggctgtataaccgaacaggtacgcgagttctatggacttgaatcaaagaaaggaaaaaagggccagcatgttggatgctgtggctccaggacagacctgtctgctgacacagtggaactgatagaaagaatggacagattggctgaaaaacaggcgacagcttccatgtcgatcattgcgttaccgtctagcttccaggagagcaatagcagtgacaggtgcagaaagtattgcagcagtgatgaggacagcgacacgtgcattcatggtagtgctaatgccagtaccaatgcgactaccaactccagcactaatgctactaccactgccagcaccaacgtcaggactagtgctactaccactgccagcatcaacgtcaggactagtgcgattaccactgaaagtaccaactccagcactaatgctactaccactgccagcaccaacgtcaggactagtgctactaccactgccagcatcaacgtcaggactagtgcgactaccactgaaagtaccaactccaacactagtgctactaccaccgaaagtaccgactccaacactagtgctactaccaccgaaagtaccgactccaacactagtgctactaccactgctagcaccaactccagcactaatgccactaccactgctagcaccaactccagcactaatgccactaccactgaaagtaccaacgctagtgccaaggaggacgccaataaagatggcaatgctgaggataatagattccatccagtcaccgacattaacaaagagtcgtataagcggaaagggagtcaaatggttttgctagagagaaagaaactgaaagcacaatttcccaatacttccgagaatatgaatgtcttacagtttcttggatttcggtctgacgaaattaaacatcttttcctctatggtattgacgtatacttctgcccagagggagtattcacacaatacggattatgcaagggctgtcaaaagatgttcgagctctgtgtctgttgggctggccagaaagtatcgtatcggaggatggcttgggaagcactagctgtggagagaatgctgcgaaatgacgaggaatacaaagaatacttggaagacatcgagccatatcatggggaccctgtaggatatttgaaatattttagcgtaaaaaggggagagatctactctcagatacagagaaattatgcttggtacctggccattactagaagaagagaaacaattagtgtattggattcgacaagaggcaagcaagggagccaagttttccgcatgtctggaaggcagatcaaagagttgtattataaagtatggagcaacttgcgtgaatcgaagacagaggtgctgcagtactttttgaactgggacgagaaaaagtgccgggaagaatgggaggcaaaagacgatacggtctttgtggaagcgctcgagaaagttggagtttttcagcgtttgcgttccatgacgagcgctggactgcagggtccgcagtacgtcaagctgcagtttagcaggcatcatcgacagttgaggagcagatatgaattaagtctaggaatgcacttgcgagatcagcttgcgctgggagttaccccatctaaagtgccgcattggacggcattcctgtcgatgctgatagggctgttctacaataaaacatttcggcagaaactggaatatcttttggagcagatttcggaggtgtggttgttaccacattggcttgatttggcaaacgttgaagttctcgctgcagataacacgagggtaccgctgtacatgctgatggtagcggttcacaaagagctggatagcgatgatgttccagacggtagatttgatataatattactatgtagagattcgagcagagaagttggagagtga

SEQ ID NO: 8090 - DNA, 4149 bp, Artificial Sequence
  Description of Artificial Sequence: Synthetic polynucleotide
atgtggaaaactttggggagagttgaacaattacttccatatgccagcctcattttgcgtaatagagaagttttgttcagagaaccgaagagaggaattgacgagtatttggaaaacgattctttttttcaaatgatacctgttaaatatcgtgaaattgtgttacccaagttgagaagagatactaacaaaatgaccgcggctcttaaaaataaagtcgctgttgcaattgacgagcttacggtgccacttatgtggatgatccattttgccgtaggatacccttaccgttatccagagcttcagttgctcgcttttgccggtcctcagcgcaacgtatacgtcgatgatacaacaagacgcatccaattgtacactgattacaacaagaacggttcttctgagcctcgtttgaagacgcttgacggactcacttctgattacgtgttttattttgtcactgtgttaaggcaaatgcaaatatgtgcgcttggtaacagttatgacgcttttaatcatgatccttggatggatgtggtgggatttgaggatccagatcaagtaacaaatagagacatttctaggatagttttgtattcctacatgtttttgaataccgcgaagggctgtttggttgaatacgcaacttttagacagtacatgagggaacttccgaagaatgcacctcagaagttgaattttagagagatgcgtcaggggttgattgccttaggaagacactgcgtaggtagcagatttgaaacagatttgtacgagtctgcgacgagtgaactcatggccaatcattccgttcaaacagggagaaatatttacggtgtggattccttttctttaactagtgtcagtgggacgaccgccactttattgcaggaaagagcttccgagcgctggattcaatggttaggccttgaaagcgactaccattgttctttctctagtactagaaatgcggaagacgtagtggcaggtgaggcggcgagttctgatcatcatcaaaaaatttctagagtaacgagaaaaaggcccagagagcccaagagtacaaacgatatcctcgtcgcaggcagaaaactctttggcagctcctttgaattcagggacttgcatcagttgcgcttatgtcatgaaatatacatggcagacacaccctctgtggcagtacaggccccaccgggctatggtaagacggagttatttcatctccccttgatagcattagcgtctaagggcgacgtgaaatatgtgtcctttttgtttgtaccgtacacagtgttgcttgctaattgcatgatcaggttgagcagatgcggttgcttgaatgtggcccctgtaagaaactttattgaagaaggttgcgatggcgttactgatttatacgtggggatctacgatgatcttgctagcactaatttcacagacaggatagctgcgtgggagaatattgttgagtgcacctttaggaccaacaacgtaaaattgggttacctcattgtagatgagtttcacaactttgaaacggaggtctacagacagtctcaatttgggggcataactaaccttgattttgacgcttttgagaaagcaatctttttgagcggcacagcacctgaggctgtagctgatgctgcgttgcagcgtattgggcttacgggattggccaagaagtctatggacatcaacgagctcaaaagaagtgaagatctcagcagaggtttatccagctatccaacaagaatgtttaatttgatcaaggagaaatccgaggtgcctttagggcatgttcataaaatttggaagaaagtggaatctcagcccgaagaagcattgaagcttcttttagccctctttgaaattgaaccagagtctaaggccattgtagttgcaagcacaaccaacgaagtggaagaattggcctgctcttggagaaagtattttagggtggtatggatacacgggaagttgggtgctgcagaaaaggtgtctcgcacaaaggagtttgtcactgacggtagcatgagagttctcatcggaacgaaattagtgactgaaggaattgacattaagcaattgatgatggtgatcatgcttgataatagacttaatattattgagctcattcaaggcgtagggagattgagagatgggggcctctgttatcttttatctagaaaaaacagttgggcggcaaggaatcgtaagggtgaattaccaccgattaaggaaggctgtataaccgaacaggtacgcgagttctatggacttgaatccaagaaaggaaaaaagggccagcatgttggatgctgtggctccaggacagacttgtctgctgacacagtggaattgatagaaagaatggacagattggctgaaaaacaggcgacagcttccatgtccatcattgcgttaccgtctagcttccaggagagcaatagcagtgacaggtgcagaaagtattgcagcagtgatgaggacagcgacacgtgcattcatggtagtgctaatgccagtaccaatgcgactaccaactccagcactaatgctactaccactgccagcaccaacgtcaggactagtgctactaccactgccagcatcaacgtcaggactagtgcgattaccactgaaagtaccaactccagcactaatgctactaccactgccagcaccaacgtcaggactagtgctactaccactgccagcatcaacgtcaggactagtgcgactaccactgaaagtaccaactccaacactagtgctactaccaccgaaagtaccgactccaacactagtgctactaccaccgaaagtaccgactccaacactagtgctactaccactgctagcaccaactccagcactaatgccactaccactgctagcaccaactccagcactaatgccactaccactgaaagtaccaacgctagtgccaaggaggacgccaataaagatggcaatgctgaggataatagattccatccagtcaccgacattaacaaagagtcttataagagaaaagggagtcaaatggttttgttggagagaaagaaattgaaagcacaatttcccaatacttccgagaatatgaatgtcttacagtttcttggatttagatctgacgaaattaaacatcttttcctctatggtattgacgtatacttctgcccagagggagtattcacacaatacggattatgcaagggctgtcaaaagatgttcgagctctgtgtctgttgggctggccagaaagtatcttatagaaggatggcttgggaagcattggctgtggagagaatgttaagaaatgacgaggaatacaaagaatacttggaagacatcgagccatatcatggggaccctgtaggatatttgaaatattttagcgtaaaaaggggagagatctactctcagatacagagaaattatgcttggtacttggccattactagaagaagagaaacaattagtgtattggattctacaagaggcaagcaagggagccaagttttccgcatgtctggaaggcagatcaaagagttgtattataaagtatggagcaacttgcgtgaatccaagacagaggtgttacagtactttttgaactgggacgagaaaaagtgcagagaagaatgggaggcaaaagacgatacggtctttgtggaagcgctcgagaaagttggagtttttcagcgtttgcgttccatgacgagcgctggattacagggtccgcagtacgtcaagttacagtttagcaggcatcatagacagttgaggagcagatatgaattaagtttgggaatgcacttgagagatcagcttgcgttgggagttaccccatctaaagtgccgcattggacggcattcttgtccatgttgatagggcttttctacaataaaacatttagacagaaattagaatatcttttggagcagatttctgaggtgtggttgttaccacattggcttgatttggcaaacgttgaagttctcgctgcagataacacgagggtaccgttgtacatgttaatggtagcggttcacaaagagttagatagcgatgatgttccagacggtagatttgatataatattattatgtagagattctagcagagaagttggagagtga

SEQ ID NO: 8091 - DNA, 5391 bp, Saccharomyces cerevisiae; identical to SEQ ID NO: 2833

SEQ ID NO: 8092 - DNA, 5391 bp, Artificial Sequence; identical to SEQ ID NO: 2834
  Description of Artificial Sequence: Synthetic polynucleotide

SEQ ID NO: 8093 - DNA, 4125 bp, Saccharomyces cerevisiae
atgaaagtttccgataggcgtaagtttgaaaaagcaaactttgacgagtttgagtcggctctaaataacaaaaacgacttggtacattgtccctcaataactttatttgaatcgatccccacggaagtgcggtcattctacgaagacgaaaagtctggcctaatcaaagtggtaaaattcagaactggtgcaatggataggaaaaggtcttttgaaaaaattgtcgtttccgtcatggtcgggaaaaatgtacaaaagttcctgacgtttgttgaagacgaaccagatttccagggcggaccaatcccttcaaagtatcttattcccaagaaaatcaacttgatggtctacacgttgtttcaagtgcatactttgaaattcaatagaaaggattacgataccctttctcttttttacctcaacagaggatactataatgagttgagtttccgtgtcctggaacgttgtcacgaaatagcgagtgccaggccgaacgacagctctacgatgcgtactttcactgactttgtttctggcgcacctattgtaaggagtcttcagaaaagcaccataaggagatatgggtacaatttggcaccccacatgtttttgttactacacgtagatgagctatcgattttttctgcataccaagcaagtttacctggcgaaaagaaagtcgacacagagcggctgaagcgtgatctatgcccacgtaaacccattgagataaagtacttttcacagatatgtaacgatatgatgaacaaaaaggaccgattgggtgatgttttagctacagcgcaacgtatacgtcgacgatacaacaagaacagttcatcggagcctcgactaaagacgcttgacggactcacttccgagcgctggattcaatggttaggccttgaaagcgactaccattgttcattctctagtactcggaatgcggaagacgtagtggcaggtgaggcggcgagttcagatcatcatcaaaaaatttcaagagtaacgcgaaaaaggccccgagagcccaagagtacaaacgatatcctcgtcgcaggccagaaactctttggcagctcctttgaattcagggacttgcatcagttgcgcttatgtcatgaaatatacatggcagacacaccctctgtggcagtacaggccccaccgggctatggtaagacggagttatttcatctccccttgatagcactggcgtctaagggcgacgtgaaatatgtgtcgtttctgtttgtaccgtacacagtgttgcttgctaattgcatgatcaggttgagccgatgcggttgcttgaatgtggcccctgtaagaaactttattgaagaaggttgcgatggcgttactgatttatacgtggggatctacgatgatcttgctagcactaatttcacagacaggatagctgcgtgggagaatattgttgagtgcacctttaggaccaacaacgtaaaattgggttacctcattgtagatgagtttcacaactttgaaacggaggtctaccggcagtcgcaatttgggggcataactaaccttgattttgacgcttttgagaaagcaatctttttgagcggcacagcacctgaggctgtagctgatgctgcgttgcagcgtattgggcttacgggactggccaagaagtcgatggacatcaacgagctcaaacggtcggaagatctcagcagaggtctatccagctatccaacacggatgtttaatctaatcaaggagaaatccgaggtgcctttagggcatgttcataaaatttggaagaaagtggaatcacagcccgaagaagcactgaagcttcttttagccctctttgaaattgaaccagagtcgaaggccattgtagttgcaagcacaaccaacgaagtggaagaattggcctgctcttggagaaagtattttagggtggtatggatacacgggaagctgggtgctgcagaaaaggtgtctcgcacaaaggagtttgtcactgacggtagcatgcgagttctcatcggaacgaaattagtgactgaaggaattgacattaagcaattgatgatggtgatcatgcttgataatagacttaatattattgagctcattcaaggcgtagggagactaagagatgggggcctctgttatctattatctagaaaaaacagttgggcggcaaggaatcgtaagggtgaattaccaccaattaaggaaggctgtataaccgaacaggtacgcgagttctatggacttgaatcaaagaaaggaaaaaagggccagcatgttggatgctgtggctccaggacagacctgtctgctgacacagtggaactgatagaaagaatggacagattggctgaaaaacaggcgacagcttccatgtcgatcgttgcgttaccgtctagcttccaggagagcaatagcagtgacaggtgcagaaagtattgcagcagtgatgaggacagcgacacgtgcattcatggtagtgctaatgccagtaccaatgcgactaccaactccagcactaatgctactaccactgccagcaccaacgtcaggactagtgctactaccactgccagcatcaacgtcaggactagtgcgactaccactgaaagtaccaactccagcactaatgctactaccactgccagcaccaacgtcaggactagtgctactaccactgccagcatcaacgtcaggactagtgcgactaccactgaaagtaccaactccaacactagtgctactaccaccgaaagtaccgactccaacactagtgctactaccaccgaaagtaccgactccaacactagtgctactaccactgctagcaccaactccagcactaatgccactaccactgctagcaccaactccagcactaatgccactaccactgaaagtaccaacgctagtgccaaggaggacgccaataaagatggcaatgctgaggataatagattccatccagtcaccgacattaacaaagagtcgtataagcggaaagggagtcaaatggttttgctagagagaaagaaactgaaagcacaatttcccaatacttccgagaatatgaatgtcttacagtttcttggatttcggtctgacgaaattaaacatcttttcctctatggtattgacatatacttctgcccagagggagtattcacacaatacggattatgcaagggctgtcaaaagatgttcgagctctgtgtctgttgggctggccagaaagtatcgtatcggaggatggcttgggaagcactagctgtggagagaatgctgcgaaatgacgaggaatacaaagaatacttggaagacatcgagccatatcatggggaccctgtagggtatttgaaattttttagcgtaaaaaggggagagatctactctcagatacagagaaattatgcttggtacctggccattactagaagaagagaaacaattagtgtattggattcgacaagaggcaagcaagggagccaagttttccgcatgtctggaaggcagatcaaagagttgtattataaagtatggagcaacttgcgtgaatcgaagacagaggtgctgcagtactttttgaactgggacgaaaaaaagtgccgggaagaatgggaggcaaaagacgatacggtctttgtggaagcgctcgagaaagttggagtttttcagcgtttgcgttccatgacgagcgctggactgcagggtccgcagtacgtcaagctgcagtttagcaggcatcatcgacagttgaggagcagatatgaattaagtctaggaatgcacttgcgagatcagcttgcgctgggagttaccccatctaaagtgccgcattggacggcattcctgtcgatgctgatagggctgttctacaataaaacatttcggcagaaactggaatatcttttggagcagatttcggaggtgtggttgttaccacattgggttgatttggcaaacgttgaagttctcgctgcagataacacgagggtaccgctgtacatgctgatggtagcggttcacaaagagctggatagcgatgatgttccagacggtagatttgatataatattactatgtagagattcgagcagagaagttggagagtga

SEQ ID NO: 8094 - DNA, 4125 bp, Artificial Sequence
  Description of Artificial Sequence: Synthetic polynucleotide
atgaaagtttccgataggcgtaagtttgaaaaagcaaactttgacgagtttgagtctgctttgaataacaaaaacgacttggtacattgtccctccataactttatttgaaagtatccccacggaagtgagatctttctacgaagacgaaaagtctggcttaatcaaagtggtaaaattcagaactggtgcaatggataggaaaaggtcttttgaaaaaattgtcgtttccgtcatggtcgggaaaaatgtacaaaagttcttgacgtttgttgaagacgaaccagatttccagggcggaccaatcccttctaagtatcttattcccaagaaaatcaacttgatggtctacacgttgtttcaagtgcatactttgaaattcaatagaaaggattacgataccctttctcttttttacctcaacagaggatactataatgagttgagtttccgtgtcttggaacgttgtcacgaaatagcgagtgccaggccgaacgacagctctacgatgcgtactttcactgactttgtttctggcgcacctattgtaaggagtcttcagaaaagcaccataaggagatatgggtacaatttggcaccccacatgtttttgttattacacgtagatgagttatccattttttctgcataccaagcaagtttacctggcgaaaagaaagtcgacacagagaggttaaagcgtgatttatgcccacgtaaacccattgagataaagtacttttcccagatatgtaacgatatgatgaacaaaaaggacagattgggtgatgttttagctacagcgcaacgtatacgtaggcgttacaacaagaacagttcttctgagcctcgtttgaagacgcttgacggactcacttccgagcgctggattcaatggttaggccttgaaagcgactaccattgttctttctctagtactagaaatgcggaagacgtagtggcaggtgaggcggcgagttctgatcatcatcaaaaaatttctagagtaacgagaaaaaggcccagagagcccaagagtacaaacgatatcctcgtcgcaggccagaaactctttggcagctcctttgaattcagggacttgcatcagttgcgcttatgtcatgaaatatacatggcagacacaccctctgtggcagtacaggccccaccgggctatggtaagacggagttatttcatctccccttgatagcattagcgtctaagggcgacgtgaaatatgtgtcctttttgtttgtaccgtacacagtgttgcttgctaattgcatgatcaggttgagcagatgcggttgcttgaatgtggcccctgtaagaaactttattgaagaaggttgcgatggcgttactgatttatacgtggggatctacgatgatcttgctagcactaatttcacagacaggatagctgcgtgggagaatattgttgagtgcacctttaggaccaacaacgtaaaattgggttacctcattgtagatgagtttcacaactttgaaacggaggtctacagacagtctcaatttgggggcataactaaccttgattttgacgcttttgagaaagcaatctttttgagcggcacagcacctgaggctgtagctgatgctgcgttgcagcgtattgggcttacgggattggccaagaagtctatggacatcaacgagctcaaaagaagtgaagatctcagcagaggtttatccagctatccaacaagaatgtttaatttgatcaaggagaaatccgaggtgcctttagggcatgttcataaaatttggaagaaagtggaatctcagcccgaagaagcattgaagcttcttttagccctctttgaaattgaaccagagtctaaggccattgtagttgcaagcacaaccaacgaagtggaagaattggcctgctcttggagaaagtattttagggtggtatggatacacgggaagttgggtgctgcagaaaaggtgtctcgcacaaaggagtttgtcactgacggtagcatgagagttctcatcggaacgaaattagtgactgaaggaattgacattaagcaattgatgatggtgatcatgcttgataatagacttaatattattgagctcattcaaggcgtagggagattgagagatgggggcctctgttatcttttatctagaaaaaacagttgggcggcaaggaatcgtaagggtgaattaccaccaattaaggaaggctgtataaccgaacaggtacgcgagttctatggacttgaatccaagaaaggaaaaaagggccagcatgttggatgctgtggctccaggacagacttgtctgctgacacagtggaattgatagaaagaatggacagattggctgaaaaacaggcgacagcttccatgtccatcgttgcgttaccgtctagcttccaggagagcaatagcagtgacaggtgcagaaagtattgcagcagtgatgaggacagcgacacgtgcattcatggtagtgctaatgccagtaccaatgcgactaccaactccagcactaatgctactaccactgccagcaccaacgtcaggactagtgctactaccactgccagcatcaacgtcaggactagtgcgactaccactgaaagtaccaactccagcactaatgctactaccactgccagcaccaacgtcaggactagtgctactaccactgccagcatcaacgtcaggactagtgcgactaccactgaaagtaccaactccaacactagtgctactaccaccgaaagtaccgactccaacactagtgctactaccaccgaaagtaccgactccaacactagtgctactaccactgctagcaccaactccagcactaatgccactaccactgctagcaccaactccagcactaatgccactaccactgaaagtaccaacgctagtgccaaggaggacgccaataaagatggcaatgctgaggataatagattccatccagtcaccgacattaacaaagagtcttataagagaaaagggagtcaaatggttttgttggagagaaagaaattgaaagcacaatttcccaatacttccgagaatatgaatgtcttacagtttcttggatttagatctgacgaaattaaacatcttttcctctatggtattgacatatacttctgcccagagggagtattcacacaatacggattatgcaagggctgtcaaaagatgttcgagctctgtgtctgttgggctggccagaaagtatcttatagaaggatggcttgggaagcattggctgtggagagaatgttaagaaatgacgaggaatacaaagaatacttggaagacatcgagccatatcatggggaccctgtagggtatttgaaattttttagcgtaaaaaggggagagatctactctcagatacagagaaattatgcttggtacttggccattactagaagaagagaaacaattagtgtattggattctacaagaggcaagcaagggagccaagttttccgcatgtctggaaggcagatcaaagagttgtattataaagtatggagcaacttgcgtgaatccaagacagaggtgttacagtactttttgaactgggacgaaaaaaagtgcagagaagaatgggaggcaaaagacgatacggtctttgtggaagcgctcgagaaagttggagtttttcagcgtttgcgttccatgacgagcgctggattacagggtccgcagtacgtcaagttacagtttagcaggcatcatagacagttgaggagcagatatgaattaagtttgggaatgcacttgagagatcagcttgcgttgggagttaccccatctaaagtgccgcattggacggcattcttgtccatgttgatagggcttttctacaataaaacatttagacagaaattagaatatcttttggagcagatttctgaggtgtggttgttaccacattgggttgatttggcaaacgttgaagttctcgctgcagataacacgagggtaccgttgtacatgttaatggtagcggttcacaaagagttagatagcgatgatgttccagacggtagatttgatataatattattatgtagagattctagcagagaagttggagagtga

SEQ ID NO: 8095 - DNA, 1140 bp, Saccharomyces cerevisiae; identical to SEQ ID NO: 1003

SEQ ID NO: 8096 - DNA, 1140 bp, Artificial Sequence; identical to SEQ ID NO: 1004
  Description of Artificial Sequence: Synthetic polynucleotide

SEQ ID NO: 8097 - DNA, 1098 bp, Saccharomyces cerevisiae
atggtattggctaaacaatgggttttgaaaaacctaccaactcctggtgaaccatttaactttcattttcacgatcctgcatgtactttcgagctcattgaaaaggaactctcttcagaacaattaaaggacggtgaattactactggaaacaacttatttatctaatgatcctgcccaaaaattttggatatcatcaatggacaaaaattacgccaaaggtgtccagcctggtgaaattattcctgcaagaggaattggtaaagtcttggcctctagaaataaagcattctctcctggcgattatgtctctgcagtgaccggctggactacacatgccataatttcgcaagaaaatgttcaagggctgagaaagcttgacaaaaacaaagttggtaaattatggtggtatctctctgtcttaggtggtacgtctttaacagcttattttattttctttacttatgctcaattgcaagaaagagaagaggactatggaaaagtttacctaatctccggtgcagctggtgccgtcggtaccgtttgcattcagctggccctaaacgtttttaaggcttcaaaggttattgctatcgcaggtggaccagaaaaggttgcttttgttgaatcctttggtgataatgtagtcggtgttgattataaagatccaagtttcaagcagaaacttatcgaggccgctggaggtgagaataccgtggattactttatcgataatgttggcagtaatgtgttggaagcaggtgttctacttctaaagcaaagggctatgttgatagcctgtggtgctataagtgcctataatgatccatctaaatttgtctttaaggggtatagctttattctgactaaacgattggtcgttaaaggagtactagtgacagataatattgatgattttccaaaggcattagataaattgggttctctggttaagcatggtaagattgacctcttgaaatccgctacccttgaagatggtaccggtgataagttcaagaatgttccattgatatggaagggtctatttagcggtgttaataaaggtaaacttattaccaaggttaacaatgaggagtga

SEQ ID NO: 8098 - DNA, 1098 bp, Artificial Sequence
  Description of Artificial Sequence: Synthetic polynucleotide
atggtattggctaaacaatgggttttgaaaaacttaccaactcctggtgaaccatttaactttcattttcacgatcctgcatgtactttcgagctcattgaaaaggaactctcttctgaacaattaaaggacggtgaattattattggaaacaacttatttatctaatgatcctgcccaaaaattttggatatcttctatggacaaaaattacgccaaaggtgtccagcctggtgaaattattcctgcaagaggaattggtaaagtcttggcctctagaaataaagcattctctcctggcgattatgtctctgcagtgaccggctggactacacatgccataatttctcaagaaaatgttcaagggttgagaaagcttgacaaaaacaaagttggtaaattatggtggtatctctctgtcttaggtggtacgtctttaacagcttattttattttctttacttatgctcaattgcaagaaagagaagaggactatggaaaagtttacttgatctccggtgcagctggtgccgtcggtaccgtttgcattcagttggccttgaacgtttttaaggcttccaaggttattgctatcgcaggtggaccagaaaaggttgcttttgttgaatcctttggtgataatgtagtcggtgttgattataaagatccaagtttcaagcagaaacttatcgaggccgctggaggtgagaataccgtggattactttatcgataatgttggcagtaatgtgttggaagcaggtgttttacttttgaagcaaagggctatgttgatagcctgtggtgctataagtgcctataatgatccatctaaatttgtctttaaggggtatagctttattttgactaaaagattggtcgttaaaggagtattggtgacagataatattgatgattttccaaaggcattagataaattgggttctttggttaagcatggtaagattgacctcttgaaatccgctacccttgaagatggtaccggtgataagttcaagaatgttccattgatatggaagggtttatttagcggtgttaataaaggtaaacttattaccaaggttaacaatgaggagtga

SEQ ID NO: 8099 - DNA, 1692 bp, Saccharomyces cerevisiae
atgagattaagaaccgccattgccacactgtgcctcacggcttttacatctgcaacttcaaacaatagctacatcgccaccgaccaaacacaaaatgcctttaatgacactcacttttgtaaggtcgacaggaatgatcacgttagtcccagttgtaacgtaacattcaatgaattaaatgccataaatgaaaacattagagatgatctttcggcgttattaaaatctgatttcttcaaatactttcggctggatttatacaagcaatgttcattttgggacgccaacgatggtctgtgcttaaaccgcgcttgctctgttgatgtcgtagaggactgggatacactgcctgagtactggcagcctgagatcttgggtagtttcaataatgatacaatgaaggaagcggatgatagcgatgacgaatgtaagttcttagatcaactatgtcaaaccagtaaaaaacctgtagatatcgaagacaccatcaactactgtgatgtaaatgactttaacggtaaaaacgccgttctgattgatttaacagcaaatccggaacgatttacaggttatggtggtaagcaagctggtcaaatttggtctactatctaccaagacaactgttttacaattggcgaaactggtgaatcattggccaaagatgcattttatagacttgtatccggtttccatgcctctatcggtactcacttatcaaaggaatatttgaacacgaaaactggtaaatgggagcccaatctggatttgtttatggcaagaatcgggaactttcctgatagagtgacaaacatgtatttcaattatgctgttgtagctaaggctctctggaaaattcaaccatatttaccagaattttcattctgtgatctagtcaataaagaaatcaaaaacaaaatggataacgttatttcccagctggacacaaaaatttttaacgaagacttagtttttgccaacgacctaagtttgactttgaaggacgaattcagatctcgcttcaagaatgtcacgaagattatggattgtgtgcaatgtgatagatgtagattgtggggcaaaattcaaactaccggttacgcaactgccttgaaaattttgtttgaaatcaacgacgctgatgaattcaccaaacaacatattgttggtaagttaaccaaatatgagttgattgcactattacagactttcggtagattatctgaatctattgaatctgttaacatgttcgaaaaaatgtacgggaaaaggttaaacggttctgaaaacaggttaagctcattcttccaaaataacttcttcaacattttgaaggaggcaggcaaatcgattcgttacaccatagagaacatcaattccactaaagaaggaaagaaaaagactaacaattctcaatcacatgtatttgatgatttaaaaatgcccaaagcagaaatagttccaaggccctctaacggtacagtaaataaatggaagaaagcttggaatactgaagttaacaacgttttagaagcattcagatttatttatagaagctatttggatttacccaggaacatctgggaattatctttgatgaaggtatacaaattttggaataaattcatcggtgttgctgattacgttagtgaggagacacgagagcctatttcctataagctagatatacaataa

SEQ ID NO: 8100 - DNA, 1692 bp, Artificial Sequence
  Description of Artificial Sequence: Synthetic polynucleotide
atgagattaagaaccgccattgccacattgtgcctcacggcttttacatctgcaacttctaacaatagctacatcgccaccgaccaaacacaaaatgcctttaatgacactcacttttgtaaggtcgacaggaatgatcacgttagtcccagttgtaacgtaacattcaatgaattaaatgccataaatgaaaacattagagatgatctttctgcgttattaaaatctgatttcttcaaatactttagattagatttatacaagcaatgttccttttgggacgccaacgatggtctttgcttaaaccgcgcttgctctgttgatgtcgtagaggactgggatacattgcctgagtactggcagcctgagatcttgggtagtttcaataatgatacaatgaaggaagcggatgatagcgatgacgaatgtaagttcttagatcaattatgtcaaaccagtaaaaaacctgtagatatcgaagacaccatcaactactgtgatgtaaatgactttaacggtaaaaacgccgttttgattgatttaacagcaaatccggaaagatttacaggttatggtggtaagcaagctggtcaaatttggtctactatctaccaagacaactgttttacaattggcgaaactggtgaatctttggccaaagatgcattttatagacttgtatccggtttccatgcctctatcggtactcacttatccaaggaatatttgaacacgaaaactggtaaatgggagcccaatttggatttgtttatggcaagaatcgggaactttcctgatagagtgacaaacatgtatttcaattatgctgttgtagctaaggctctctggaaaattcaaccatatttaccagaattttctttctgtgatttggtcaataaagaaatcaaaaacaaaatggataacgttatttcccagttagacacaaaaatttttaacgaagacttagtttttgccaacgacttgagtttgactttgaaggacgaattcagatctcgcttcaagaatgtcacgaagattatggattgtgtgcaatgtgatagatgtagattgtggggcaaaattcaaactaccggttacgcaactgccttgaaaattttgtttgaaatcaacgacgctgatgaattcaccaaacaacatattgttggtaagttaaccaaatatgagttgattgcattattacagactttcggtagattatctgaatctattgaatctgttaacatgttcgaaaaaatgtacgggaaaaggttaaacggttctgaaaacaggttaagctctttcttccaaaataacttcttcaacattttgaaggaggcaggcaaatccattcgttacaccatagagaacatcaattccactaaagaaggaaagaaaaagactaacaattctcaatctcatgtatttgatgatttaaaaatgcccaaagcagaaatagttccaaggccctctaacggtacagtaaataaatggaagaaagcttggaatactgaagttaacaacgttttagaagcattcagatttatttatagaagctatttggatttacccaggaacatctgggaattatctttgatgaaggtatacaaattttggaataaattcatcggtgttgctgattacgttagtgaggagacaagagagcctatttcctataagttggatatacaatga

SEQ ID NO: 8101 - DNA, 213 bp, Saccharomyces cerevisiae
atgtccaaatacgcttggtataccagagttacagatacattacatcgtctaacggtactgacgttggttggtggtacgttatacatgtcgggtggcttagcttacactttatacatgaacggtaagaagtacgaacaacaagtgacccaacaaaaggcacttgaagaagacaatcaacaactgcaaagtcctactgcacctcctaccgagtaa

SEQ ID NO: 8102 - DNA, 213 bp, Artificial Sequence
  Description of Artificial Sequence: Synthetic polynucleotide
atgtccaaatacgcttggtataccagagttacagatacattacatcgtctcacggtattgacgttggttggtggtacgttatacatgagtggtggcttagcttacactttatacatgaacggtaagaagtacgaacaacaagtgacccaacaaaaggcacttgaagaagacaatcaacaattacaaagtcctactgcacctcctaccgagtga

SEQ ID NO: 8103 - DNA, 1542 bp, Saccharomyces cerevisiae
atgaagcaattcaagttggttaatgcggtttccgcatcatttgtgcttattggcttagtgttggccaattcagattcagtgttcgacaagtggacgcaggaagacctggccgattatttacgtgataataagaagagcttggaaaagtacgctacagactccattgaggacttgaaaacggaggcatcgcaggtatgggacaaacacgcgcagcccaaaccatggtggcaggtgtggtctagtgacagcagtagcgtgagcaacagtaaccccggatggtttggttatactggttcttcggatcacccagtttctgactggctctttgacacctggtccacagacagtctacgtaacttcttgaagaaaaacggcgtggatgttgacgacgctaaggcttccaaggactcgctggtgaagactgctaaggagaacttcaacaagatttccaaatctttgaagtcgtcgggatactatccttctagctcttactttgatagctggtcaaccaaagatttgcaaaactggttgaatgacaatggtatcgactacgacaaggcagttcaaagcaaggacgagctagttcagaaagtcaaggaaaacatctaccgaacttcagaaaaggcagaacagcagcgtctgggtttgctagaaagcttggatttggctcaccaacaaatattagacacatcgggacaaataaaagacactgtatttgacaagtggtctagtgatcagttaaccaattggttggagagccacaaggtcaatattgacaagaacatggccaagaaacacgactatttggttagaatggccaaagaaaattctgccaatttgaaagatgatatctactggtacctggactatatgaaaagagagtcttctccatttttgaccaagaccccagaatacgttggttccgtttgggactcttctaaaaatttcctcacaaatttgtactccaagttcagaggtaagactgacaatgtgatcaatgatacttttttggttggcctagactcttggccaaaggacaaattgaaaatgtttttagatgctcgtggtattaagtactcaatgctgtctactgaacatcaattgagagaattagtcaaaaaatccagaaacgaaaaactcaagatcctgccaaaagactaccaaaaatactttgacaacagtaactggtctttggatgacataaagggttggtttgctgacaaaaaggacgacttccaagattctcagacttactccacaattatgcaggattttgacaaggtttccaaaaacacaaatgatgctaaggaccaaatcgctaagacctggtcaaatacctttcagagctggtctcaagaagacctattgcagtacctaaaatcattcggtgttccggttaaacagacttctacgaaggacgacttaatcaacttggccaagcagaatacgcaatggttgttcggcactgttaaggagcctgcttacaagaggtacctacataacgttaaaaactggtcgaaaagcatattagggttcaactaa

SEQ ID NO: 8104 - DNA, 1542 bp, Artificial Sequence
  Description of Artificial Sequence: Synthetic polynucleotide
atgaagcaattcaagttggttaatgcggtttccgcaagttttgtgcttattggcttagtgttggccaattctgattctgtgttcgacaagtggacgcaggaagacttggccgattatttacgtgataataagaagagcttggaaaagtacgctacagactccattgaggacttgaaaacggaggcatcccaggtatgggacaaacacgcgcagcccaaaccatggtggcaggtgtggtctagtgacagcagtagcgtgagcaacagtaaccccggatggtttggttatactggttcttctgatcacccagtttctgactggctctttgacacctggtccacagacagtttacgtaacttcttgaagaaaaacggcgtggatgttgacgacgctaaggcttccaaggactctttggtgaagactgctaaggagaacttcaacaagatttccaaatctttgaagtcttctggatactatccttctagctcttactttgatagctggtctaccaaagatttgcaaaactggttgaatgacaatggtatcgactacgacaaggcagttcaaagcaaggacgagttagttcagaaagtcaaggaaaacatctacagaacttctgaaaaggcagaacagcagcgtttgggtttgttggaaagcttggatttggctcaccaacaaatattagacacatctggacaaataaaagacactgtatttgacaagtggtctagtgatcagttaaccaattggttggagagccacaaggtcaatattgacaagaacatggccaagaaacacgactatttggttagaatggccaaagaaaattctgccaatttgaaagatgatatctactggtacttggactatatgaaaagagagtcttctccatttttgaccaagaccccagaatacgttggttccgtttgggactcttctaaaaatttcctcacaaatttgtactccaagttcagaggtaagactgacaatgtgatcaatgatacttttttggttggccttgactcttggccaaaggacaaattgaaaatgtttttagatgctcgtggtattaagtactccatgctttctactgaacatcaattgagagaattagtcaaaaaatccagaaacgaaaaactcaagatcttgccaaaagactaccaaaaatactttgacaacagtaactggtctttggatgacataaagggttggtttgctgacaaaaaggacgacttccaagattctcagacttactccacaattatgcaggattttgacaaggtttccaaaaacacaaatgatgctaaggaccaaatcgctaagacctggtctaatacctttcagagctggtctcaagaagacttgttgcagtacttgaaatctttcggtgttccggttaaacagacttctacgaaggacgacttaatcaacttggccaagcagaatacgcaatggttgttcggcactgttaaggagcctgcttacaagaggtacttgcataacgttaaaaactggtccaaaagcatattagggttcaactga

SEQ ID NO: 8105 - DNA, 1746 bp, Saccharomyces cerevisiae
atgaactcgttagcttcaaacacaccgctaaatggtactccagtaagcgaggcacccgccacaagctccgagcctgtgaacatgttcgagacaatggtggctaaccctattaaagtgtctcgattacagtctaatggagttctgacgggacctgcagccaatactaagtccatccactattcgctggccaattttaatgtgttccagtcgctacccaaggaaacggccagaggtgtagacgatttgacgaggatggagatggcgttactgagtgggataccggaggagattaagtggtctttaaaaaaatatcttacgtatagtaacaaggcgccatatatgatcagcttacggacattgccggacctgttgccacttttcaagactttcatattgcctttggagcgcatcgtggaaggtcttaacaaatcgtctatatgtgattcaaaggcgatggattctctacaaatgggtctaaatgccttgctgatcctaaggaatctggctcaagatactgattcggtgcagatactagtcaaggatcgagaaatcaaatctttcattcttttcattttgaagaagtttcagtgcgtcgctacaggcgataacaagtggcaattgtacgaaggaaatgcaactttttttaacgagttgacccattatactctggacttgatggaggccatttcgtcctatattgctcctgcaatgaaggatgatcattatttccaaacgctggtgtccatcttgaactacactaaggacagatacatggttatttctatattgaggtctctttcaagattactggttaggtccaaagctaacgaggaaagtgcagcggacaatttggaccataagactctttcgttgatcgtttcctttttactgttagaatgcgatagtgagctgattattgcttcgttggatttcctctatcaatacattttgcccggttctcaaagaatcactgagttattcaagagtaaggagtgctctttgatactggaagccacgctgcctaatttattatcatataatatcgccacaccagattaccatcttttgcaaaagcacaaaattaggttgattaaaaggttgaagcctcccgctccaaaggagcctcccaatttatctgaggatctgtttcaacaacttttcaaacttaacgagcccttgaggtcaaccgcttggttgagatgttgctttgagcctgtacaagaagcagaatttacacaaatatcgctttggagatcctacgaatccaaatttggtcagcctgttcgcgaatccggacgcaaattgttacctgccgtggaattcatcaagaatgtctcgaatgctttcaataacgccgctgctatcgtaatcactgacccggtaaccggcaagaaaaggtttgttatcaagggcattcaaccaagatttaaagctttgggtattgcagacggggaaagagaatcccaggtacccatttcggcactaaaatccaaatttttgaatgactctaaggaaattacacctgcaagacaaaacagcataccagaggtcaaattccctcaagaactctcagatgtttctaaagtggcctgtacgtttttgtgccttttatccaacgacacggatgatggtgctggttccgcattttgtcaacgcatcaggccactggttctacataaattggctgatattccacctttaacattagcattgtctgaatacatggaaaacacgtcggggttatga

SEQ ID NO: 8106 - DNA, 1746 bp, Artificial Sequence
  Description of Artificial Sequence: Synthetic polynucleotide
atgaactctttagcttctaacacaccgttaaatggtactccagtaagcgaggcacccgccacaagctccgagcctgtgaacatgttcgagacaatggtggctaaccctattaaagtgtctagattacagtctaatggagttttgacgggacctgcagccaatactaagtccatccactattctttggccaattttaatgtgttccagtccttgcccaaggaaacggccagaggtgtagacgatttgacgaggatggagatggcgttattaagtgggataccggaggagattaagtggtctttaaaaaaatatcttacgtatagtaacaaggcgccatatatgatcagcttaagaacattgccggacttgttgccacttttcaagactttcatattgcctttggagcgcatcgtggaaggtcttaacaaatcttctatatgtgattctaaggcgatggattctttacaaatgggtttgaatgccttgttgatcttgaggaatttggctcaagatactgattctgtgcagatattggtcaaggatagagaaatcaaatctttcattcttttcattttgaagaagtttcagtgcgtcgctacaggcgataacaagtggcaattgtacgaaggaaatgcaactttttttaacgagttgacccattatactttggacttgatggaggccatttcttcctatattgctcctgcaatgaaggatgatcattatttccaaacgttagtgtccatcttgaactacactaaggacagatacatggttatttctatattgaggtctctttctagattattggttaggtccaaagctaacgaggaaagtgcagcggacaatttggaccataagactctttctttgatcgtttcctttttattattagaatgcgatagtgagttgattattgcttctttggatttcctctatcaatacattttgcccggttctcaaagaatcactgagttattcaagagtaaggagtgctctttgatattggaagccacgttacctaatttattatcttataatatcgccacaccagattaccatcttttgcaaaagcacaaaattaggttgattaaaaggttgaagcctcccgctccaaaggagcctcccaatttatctgaggatttatttcaacaacttttcaaacttaacgagcccttgaggtctaccgcttggttgagatgttgctttgagcctgtacaagaagcagaatttacacaaatatctctttggagatcctacgaatccaaatttggtcagcctgttcgcgaatccggacgcaaattgttacctgccgtggaattcatcaagaatgtctccaatgctttcaataacgccgctgctatcgtaatcactgacccggtaaccggcaagaaaaggtttgttatcaagggcattcaaccaagatttaaagctttgggtattgcagacggggaaagagaatcccaggtacccatttctgcattgaaatccaaatttttgaatgactctaaggaaattacacctgcaagacaaaacagcataccagaggtcaaattccctcaagaactctctgatgtttctaaagtggcctgtacgtttttgtgccttttatccaacgacacggatgatggtgctggttccgcattttgtcaacgcatcaggccattagttttgcataaattggctgatattccacctttaacattagcattgtctgaatacatggaaaacacgtctgggttatga

SEQ ID NO: 8107 - DNA, 1476 bp, Saccharomyces cerevisiae
atgaaactctcaactaaactttgttggtgtggtattaaaggaagacttaggccgcaaaagcaacaacaattacacaatacaaacttgcaaatgactgaactaaaaaaacaaaagaccgctgaacaaaaaaccagacctcaaaatgtcggtattaaaggtatccaaatttacatcccaactcaatgtgtcaaccaatctgagctagagaaatttgatggcgtttctcaaggtaaatacacaattggtctgggccaaaccaacatgtcttttgtcaatgacagagaagatatctactcgatgtccctaactgttttgtctaagttgatcaagagttacaacatcgacaccaacaaaattggtagattagaagtcggtactgaaactctgattgacaagtccaagtctgtcaagtctgtcttgatgcaattgtttggtgaaaacactgacgtcgaaggtattgacacgcttaatgcctgttacggtggtaccaacgcgttgttcaactctttgaactggattgaatctaacgcatgggatggtagagacgccattgtagtttgcggtgatattgccatctacgataagggtgccgcaagaccaaccggtggtgccggtactgttgctatgtggatcggtcctgatgctccaattgtatttgactctgtaagagcttcttacatggaacacgcctacgatttttacaagccagatttcaccagcgaatatccttacgtcgatggtcatttttcattaacttgttacgtcaaggctcttgatcaagtttacaagagttattccaagaaggctatttctaaagggttggttagcgatcccgctggttcggatgctttgaacgttttgaaatatttcgactacaacgttttccatgttccaacctgtaaattggtcacaaaatcatacggtagattactatataacgatttcagagccaatcctcaattgttcccagaagttgacgccgaattagctactcgcgattatgacgaatctttaaccgataagaacattgaaaaaacttttgttaatgttgctaagccattccacaaagagagagttgcccaatctttgattgttccaacaaacacaggtaacatgtacaccgcatctgtttatgccgcctttgcatctctattaaactatgttggatctgacgacttacaaggcaagcgtgttggtttattttcttacggttccggtttagctgcatctctatattcttgcaaaattgttggtgacgtccaacatattatcaaggaattagatattactaacaaattagccaagagaatcaccgaaactccaaaggattacgaagctgccatcgaattgagagaaaatgcccatttgaagaagaacttcaaacctcaaggttccattgagcatttgcaaagtggtgtttactacttgaccaacatcgatgacaaatttagaagatcttacgatgttaaaaaataa

SEQ ID NO: 8108 - DNA, 1476 bp, Artificial Sequence
  Description of Artificial Sequence: Synthetic polynucleotide
atgaaactctccactaaactttgttggtgtggtattaaaggaagacttaggccgcaaaagcaacaacaattacacaatacaaacttgcaaatgactgaattgaaaaaacaaaagaccgctgaacaaaaaaccagacctcaaaatgtcggtattaaaggtatccaaatttacatcccaactcaatgtgtcaaccaatctgagttagagaaatttgatggcgtttctcaaggtaaatacacaattggtcttggccaaaccaacatgtcttttgtcaatgacagagaagatatctactccatgtccttgactgttttgtctaagttgatcaagagttacaacatcgacaccaacaaaattggtagattagaagtcggtactgaaactttgattgacaagtccaagtctgtcaagtctgtcttgatgcaattgtttggtgaaaacactgacgtcgaaggtattgacacgcttaatgcctgttacggtggtaccaacgcgttgttcaactctttgaactggattgaatctaacgcatgggatggtagagacgccattgtagtttgcggtgatattgccatctacgataagggtgccgcaagaccaaccggtggtgccggtactgttgctatgtggatcggtcctgatgctccaattgtatttgactctgtaagagcttcttacatggaacacgcctacgatttttacaagccagatttcaccagcgaatatccttacgtcgatggtcatttttctttaacttgttacgtcaaggctcttgatcaagtttacaagagttattccaagaaggctatttctaaagggttggttagcgatcccgctggttctgatgctttgaacgttttgaaatatttcgactacaacgttttccatgttccaacctgtaaattggtcacaaaatcttacggtagattattatataacgatttcagagccaatcctcaattgttcccagaagttgacgccgaattagctactcgcgattatgacgaatctttaaccgataagaacattgaaaaaacttttgttaatgttgctaagccattccacaaagagagagttgcccaatctttgattgttccaacaaacacaggtaacatgtacaccgcatctgtttatgccgcctttgcatctttattaaactatgttggatctgacgacttacaaggcaagcgtgttggtttattttcttacggttccggtttagctgcatctttgtattcttgcaaaattgttggtgacgtccaacatattatcaaggaattagatattactaacaaattagccaagagaatcaccgaaactccaaaggattacgaagctgccatcgaattgagagaaaatgcccatttgaagaagaacttcaaacctcaaggttccattgagcatttgcaaagtggtgtttactacttgaccaacatcgatgacaaatttagaagatcttacgatgttaaaaaatga

SEQ ID NO: 8109 - DNA, 939 bp, Saccharomyces cerevisiae
atgtcaaaagaagacatagaaggaactaacattctagacgaacctgtccacgggatctatattcctgccgcgctattcgttgttggtgttgcaatcaccacgtatatgtctggtgaattgaaaatcctgtggagtttacccattctcttcatgatcatcttcgtcagagcatactctgcctacaaaagaagaagatcactgtatccagataggtggacttcgttagaattggaagatcaaaccataatttccaagaataccgccctgtatcgttttaagttgaagacaagactggaaagcttggacattcccgctggtcatcatgttgctgtacgcgttccaattgacggcaaacaagaggtcagatactataatccgatcagttctaaactagaaagtggatacttggatttggtggtgaaagcatacgttgatggtaaagtctccaaatatttcgctggcttaaattctggtgacaccgtggatttcaaggggccaataggtactttgaactacgaaccaaattcctccaagcatttaggtatcgtagccggtggttctggtatcacgccagtcctacagatcttgaatgaaatcatcaccgttcctgaagatttgacgaaagtctccctgctatatgccaatgagactgaaaatgacattctattgaaggacgaactggatgagatggccgaaaaatacccacatttccaggtccattacgtggtacactatccatccgacagatggaccggagatgtcggctacatcaccaaggaccagatgaacaggtatctgccggaatattcggaggataacagactcttgatctgtggacctgatggaatgaacaacttggcccttcaatacgctaaagaactgggctggaaggtcaattcaacgagaagttctggcgacgatcaagtcttcgtcttttaa

SEQ ID NO: 8110 - DNA, 939 bp, Artificial Sequence
  Description of Artificial Sequence: Synthetic polynucleotide
atgtccaaagaagacatagaaggaactaacattttggacgaacctgtccacgggatctatattcctgccgcgttattcgttgttggtgttgcaatcaccacgtatatgtctggtgaattgaaaatcttatggagtttacccattctcttcatgatcatcttcgtcagagcatactctgcctacaaaagaagaagatctttgtatccagataggtggacttctttagaattggaagatcaaaccataatttccaagaataccgccttatatcgttttaagttgaagacaagattagaaagcttggacattcccgctggtcatcatgttgctgtacgcgttccaattgacggcaaacaagaggtcagatactataatccgatcagttctaaattagaaagtggatacttggatttggtggtgaaagcatacgttgatggtaaagtctccaaatatttcgctggcttaaattctggtgacaccgtggatttcaaggggccaataggtactttgaactacgaaccaaattcctccaagcatttaggtatcgtagccggtggttctggtatcacgccagtcttacagatcttgaatgaaatcatcaccgttcctgaagatttgacgaaagtctccttattatatgccaatgagactgaaaatgacattttattgaaggacgaattagatgagatggccgaaaaatacccacatttccaggtccattacgtggtacactatccatccgacagatggaccggagatgtcggctacatcaccaaggaccagatgaacaggtatttaccggaatattctgaggataacagactcttgatctgtggacctgatggaatgaacaacttggcccttcaatacgctaaagaattaggctggaaggtcaattctacgagaagttctggcgacgatcaagtcttcgtcttttga

SEQ ID NO: 8111 - DNA, 1338 bp, Saccharomyces cerevisiae
atgagagaggtcattagtattaatgttggtcaagcaggttgtcaaataggtaatgcatgctgggaattgtactccctagagcatggcatcaaggaagacggccatttggaggatggcttgtcaaaacctaagggaggtgaagaaggattttctacattcttccatgaaacggggtacggaaaattcgtcccaagagcaatctacgtggatttagagcccaatgttatcgatgaagtacgtacaggacgtttcaaggagcttttccatccagaacaattgattaacggtaaggaagatgccgccaataactacgcaagaggccattatacagtgggtagagaaatagtggatgaagttgaagaaagaattagaaagatggccgaccaatgtgacggtttacaagggttcttgttcacccactccctcggtggtggaactggttccggtttaggttccctgttattagaaaacttatcgtatgaatacgggaagaaatccaaattggaattcgccgtttatcctgcgcctcaattgtctacttccgtcgtggaaccttacaacacggttttaaccacgcataccaccctggaacacgcagactgtacgtttatggtcgataacgaagccatttacgatatatgcaagaggaacttgggaatttctagaccaagcttcagcaacttgaacgggttgattgcccaagtgatatcatctgttacagcctctttgaggttcgatggttcattaaacgtggatttgaacgaatttcagaccaacttggtaccatatccaagaattcatttccctttggtttcctacgcacccatcttgtccaagaagagggccacccatgaatccaactccgtgtcagaaatcacaaacgcttgtttcgaaccgggcaatcaaatggttaagtgtgacccaacaaaggggaagtacatggctaactgtttgttatacagaggtgacgtggtgaccagagatgtccaaagagccgtcgaacaggtgaagaataaaaaaacagtacaaatggtggattggtgtccaacaggatttaagattggtatttgttatgagccaccaagtgtgataccaagttccgaattagccaatgtggatagagctgtctgcatgctatccaacaccactgccatcgcggacgcttggaagagaatcgatcagaaattcgacctgatgtatgccaaacgtgctttcgtccattggtatgtcggtgaaggtatggaagaaggtgagttcaccgaagctagagaagatttagctgccttagaaagagattatattgaagtgggtgccgattcttacgctgaggagttctaa

SEQ ID NO: 8112 - DNA, 1338 bp, Artificial Sequence
  Description of Artificial Sequence: Synthetic polynucleotide
atgagagaggtcattagtattaatgttggtcaagcaggttgtcaaataggtaatgcatgctgggaattgtactccttggagcatggcatcaaggaagacggccatttggaggatggcttgagtaaacctaagggaggtgaagaaggattttctacattcttccatgaaacggggtacggaaaattcgtcccaagagcaatctacgtggatttagagcccaatgttatcgatgaagtacgtacaggacgtttcaaggagcttttccatccagaacaattgattaacggtaaggaagatgccgccaataactacgcaagaggccattatacagtgggtagagaaatagtggatgaagttgaagaaagaattagaaagatggccgaccaatgtgacggtttacaagggttcttgttcacccactccctcggtggtggaactggttccggtttaggttccttattattagaaaacttatcttatgaatacgggaagaaatccaaattggaattcgccgtttatcctgcgcctcaattgtctacttccgtcgtggaaccttacaacacggttttaaccacgcataccaccttagaacacgcagactgtacgtttatggtcgataacgaagccatttacgatatatgcaagaggaacttgggaatttctagaccaagcttcagcaacttgaacgggttgattgcccaagtgatatcttctgttacagcctctttgaggttcgatggttctttaaacgtggatttgaacgaatttcagaccaacttggtaccatatccaagaattcatttccctttggtttcctacgcacccatcttgtccaagaagagggccacccatgaatccaactccgtgtctgaaatcacaaacgcttgtttcgaaccgggcaatcaaatggttaagtgtgacccaacaaaggggaagtacatggctaactgtttgttatacagaggtgacgtggtgaccagagatgtccaaagagccgtcgaacaggtgaagaataaaaaaacagtacaaatggtggattggtgtccaacaggatttaagattggtatttgttatgagccaccaagtgtgataccaagttccgaattagccaatgtggatagagctgtctgcatgctttccaacaccactgccatcgcggacgcttggaagagaatcgatcagaaattcgacttgatgtatgccaaacgtgctttcgtccattggtatgtcggtgaaggtatggaagaaggtgagttcaccgaagctagagaagatttagctgccttagaaagagattatattgaagtgggtgccgattcttacgctgaggagttctga

SEQ ID NO: 8113 - DNA, 1764 bp, Saccharomyces cerevisiae
atgagttccgtcaataaagatactattcatgttgctgaaagaagtcttcataaagaacaccttaccgaaggtggtaacatggccttccacaaccatttgaatgattttgctcatattgaagatcctctggaaagaagaagattggctttggagtccatcgatgacgaaggtttcggttggcaacaagttaagaccatctccattgctggtgttggtttcttgacagattcttatgatatttttgccattaatttgggtatcactatgatgtcctacgtttactggcacggtagtatgccaggtccaagtcaaaccttgttgaaggtttccacttctgttggtactgttattggtcaatttggttttggtactttagctgatattgttggtcgtaagagaatttatggtatggaacttattatcatgattgtctgtaccattctgcaaaccactgttgctcattctcctgctattaacttcgttgctgttttaacattctaccgtattgtcatgggtattggtatcggtggtgactacccactatcttctattattacttctgaatttgccactaccaaatggagaggtgccatcatgggtgctgtctttgctaaccaagcttggggtcaaatctccggtggtatcatcgctcttatcttggttgctgcttacaagggcgaactagaatacgcaaactctggtgctgaatgtgatgctagatgtcaaaaggcttgtgaccaaatgtggagaatccttattgggttgggtaccgttctagggttggcatgtttgtatttcagattaactattccagaatctcctagatatcaattggatgttaacgctaagttggaacttgctgctgccgcacaagaacaagatggcgaaaagaaaattcacgacaccagtgatgaagacatggcaattaacggtttggaaagagcttctactgccgtcgaatctcttgacaatcatcctccaaaggcttcgttcaaagatttctgcagacattttggtcaatggaagtacggtaagattttgctaggtactgctggttcatggtttaccttagatgttgctttctacgggttgagtttaaacagtgctgttattctgcaaaccatcggttatgccggttccaaaaacgtttacaagaaactgtatgatactgctgtcggtaatctgattttgatttgtgctggttcattacctggttactgggtatccgtcttcactgtcgatataatcggtagaaaaccaattcaattagccggtttcatcatcttgaccgctttgttctgtgtcatcggtttcgcataccataaacttggtgaccatggtctgttggctctttacgtcatttgtcaattcttccaaaacttcggtccaaacacaaccacctttattgttcctggtgagtgtttcccaactcgttacagatctactgctcatggtatttctgctgcatctggtaaggtcggtgccattattgcacaaaccgctttgggtactctaatcgaccataactgtgctagagacggtaagccaaccaactgttggttacctcacgtcatggaaattttcgccttattcatgttgttgggtatcttcacaaccttgttgatcccagaaactaagagaaagactctagaagaaattaacgagctataccacgatgaaatcgatcctgctacgctaaacttcagaaacaagaataatgacattgaatcttccagcccatctcaacttcaacatgaagcataa

SEQ ID NO: 8114 - DNA, 1764 bp, Artificial Sequence
  Description of Artificial Sequence: Synthetic polynucleotide
atgagttccgtcaataaagatactattcatgttgctgaaagaagtcttcataaagaacaccttaccgaaggtggtaacatggccttccacaaccatttgaatgattttgctcatattgaagatcctttggaaagaagaagattggctttggagtccatcgatgacgaaggtttcggttggcaacaagttaagaccatctccattgctggtgttggtttcttgacagattcttatgatatttttgccattaatttgggtatcactatgatgtcctacgtttactggcacggtagtatgccaggtccaagtcaaaccttgttgaaggtttccacttctgttggtactgttattggtcaatttggttttggtactttagctgatattgttggtcgtaagagaatttatggtatggaacttattatcatgattgtctgtaccattttacaaaccactgttgctcattctcctgctattaacttcgttgctgttttaacattctaccgtattgtcatgggtattggtatcggtggtgactacccattatcttctattattacttctgaatttgccactaccaaatggagaggtgccatcatgggtgctgtctttgctaaccaagcttggggtcaaatctccggtggtatcatcgctcttatcttggttgctgcttacaagggcgaattggaatacgcaaactctggtgctgaatgtgatgctagatgtcaaaaggcttgtgaccaaatgtggagaatccttattgggttgggtaccgttttggggttggcatgtttgtatttcagattaactattccagaatctcctagatatcaattggatgttaacgctaagttggaacttgctgctgccgcacaagaacaagatggcgaaaagaaaattcacgacaccagtgatgaagacatggcaattaacggtttggaaagagcttctactgccgtcgaatctcttgacaatcatcctccaaaggcttctttcaaagatttctgcagacattttggtcaatggaagtacggtaagattttgttgggtactgctggttcttggtttaccttagatgttgctttctacgggttgagtttaaacagtgctgttattttacaaaccatcggttatgccggttccaaaaacgtttacaagaaactttatgatactgctgtcggtaatttaattttgatttgtgctggttctttacctggttactgggtatccgtcttcactgtcgatataatcggtagaaaaccaattcaattagccggtttcatcatcttgaccgctttgttctgtgtcatcggtttcgcataccataaacttggtgaccatggtttattggctctttacgtcatttgtcaattcttccaaaacttcggtccaaacacaaccacctttattgttcctggtgagtgtttcccaactcgttacagatctactgctcatggtatttctgctgcatctggtaaggtcggtgccattattgcacaaaccgctttgggtactttgatcgaccataactgtgctagagacggtaagccaaccaactgttggttacctcacgtcatggaaattttcgccttattcatgttgttgggtatcttcacaaccttgttgatcccagaaactaagagaaagactttggaagaaattaacgagttataccacgatgaaatcgatcctgctacgttgaacttcagaaacaagaataatgacattgaatcttccagcccatctcaacttcaacatgaagcatga

SEQ ID NO: 8115 - DNA, 381 bp, Saccharomyces cerevisiae
atgccaagaaatgacagcaatcagtattacgcacgttggtgctgttataggcgccctatacgtgcagcatttgctcgtaagggccctttcaactcatctagcggctatgaagaaaatgttgcccggctgaaaaacacccgttcctctcactgccgcaccgcccgatgccaatttaatagttccacgtggacgtgttatttccagcacgtggggcggaaattagcgacggcaattgattatggttcgccgcagtccatcgaaatcagtgagatcggtgcagttatgcaccaaatgtcgtgtgaaaggctttccttatccctcttctcccgttttgcctgcttattagctagattaaaaacgtgcgtattactcattaattaa

SEQ ID NO: 8116 - DNA, 381 bp, Artificial Sequence
  Description of Artificial Sequence: Synthetic polynucleotide
atgccaagaaatgacagcaatcagtattacgcacgttggtgctgttataggcgccctatacgtgcagcatttgctcgtaagggccctttcaactcttctagcggctatgaagaaaatgttgccaggttgaaaaacacccgttcctctcactgccgcaccgcccgttgccaatttaatagttccacgtggacgtgttatttccagcacgtggggagaaaattagcgacggcaattgattatggttctccgcagtccatcgaaatcagtgagatcggtgcagttatgcaccaaatgtcctgtgaaaggctttccttatccctcttctcccgttttgcctgcttattagctagattaaaaacgtgcgtattactcattaattga

SEQ ID NO: 8117 - DNA, 933 bp, Saccharomyces cerevisiae
atgtcgtcaaataataggaagaaactgcttctgatgggccggtccggctccggtaaatcgtcaatgaggtcgatcatctttagtaactactccgcttttgacactaggagattgggtgccaccattgatgtagagcactcccatttgagatttcttgggaatatgactctaaatctgtgggactgtggtgggcaggacgtgtttatggagaattatttcaccaagcaaaaagaccacattttccagatggtgcaggtgttaattcacgtttttgatgtagagtcaactgaagttctcaaggatattgaaatatttgcaaaagctttgaagcaattaaggaagtactctcccgacgccaaaatttttgttcttctgcataagatggatcttgttcagttggataagagagaggagctgttccaaatcatgatgaaaaacctgagtgaaacgtcttcggaatttgggtttcccaatctgataggttttcctacttcgatttgggatgagagtttatacaaggcatggtcgcagattgtatgctcgctaatacccaatatgtccaaccatcaaagtaatttgaagaagtttaaggagattatgaacgcccttgaaattattcttttcgaaagaacaactttcttagtgatatgctccagtaatggcgaaaatagtaatgaaaatcatgatagttcggataataataatgtcttgctagacccgaagcgattcgaaaagatatccaatataatgaaaaacttcaagcagagttgcacgaaattgaagagcggattcaagactttaatattgaacaacaacatctacgtcagcgagttatcgtccaatatggtgtgttttatagtgttgaaagatatgaatattccacaagaattagtattggaaaacatcaaaaaagccaaagagtttttccaatga

SEQ ID NO: 8118 - DNA, 933 bp, Artificial Sequence
  Description of Artificial Sequence: Synthetic polynucleotide
atgtcttccaataataggaagaaattacttttgatgggccgttccggctccggtaaatcttctatgaggtctatcatctttagtaactactccgcttttgacactaggagattgggtgccaccattgatgtagagcactcccatttgagatttcttgggaatatgactttgaatttatgggactgtggtgggcaggacgtgtttatggagaattatttcaccaagcaaaaagaccacattttccagatggtgcaggtgttaattcacgtttttgatgtagagtctactgaagttctcaaggatattgaaatatttgcaaaagctttgaagcaattaaggaagtactctcccgacgccaaaatttttgttcttttacataagatggatcttgttcagttggataagagagaggagcttttccaaatcatgatgaaaaacttgagtgaaacgtcttctgaatttgggtttcccaatttgataggttttcctacttctatttgggatgagagtttatacaaggcatggtctcagattgtatgctctttgatacccaatatgtccaaccatcaaagtaatttgaagaagtttaaggagattatgaacgcccttgaaattattcttttcgaaagaacaactttcttagtgatatgctccagtaatggcgaaaatagtaatgaaaatcatgatagttctgataataataatgtcttgttggacccgaagagattcgaaaagatatccaatataatgaaaaacttcaagcagagttgcacgaaattgaagagcggattcaagactttaatattgaacaacaacatctacgtcagcgagttatcttccaatatggtgtgttttatagtgttgaaagatatgaatattccacaagaattagtattggaaaacatcaaaaaagccaaagagtttttccaatga

SEQ ID NO: 8119 - DNA, 1542 bp, Saccharomyces cerevisiae
atgctatcgaagaatttgtatagtaacaagaggttgctcacctcgacgaatacgctagtcagattcgcttccaccagatccacaggggtggaaaactccggagcaggtcctacatcttttaagaccatgaaagtcattgaccctcagcacagcgacaaaccaaacgtgctgatactgggttcggggtggggagctatttcgtttttaaagcacattgacaccaagaagtacaacgtttccatcatctctcctagaagctatttcttatttacgcctttgttaccttctgcaccagttgggacagtagacgaaaagtcaattattgagcccatcgttaattttgctctcaagaaaaaggggaacgttacctactatgaggcagaagccacctctatcaatcccgacaggaataccgttaccataaaatcattatctgccgttagccagctataccaacctgaaaaccatctagggctgcatcaagcagaacctgctgaaattaagtacgattatttaatcagtgctgtaggtgcggaacctaacacatttggtattcctggggtcactgattacggtcatttcctgaaggaaattcccaactctttggaaataagaagaacttttgccgccaatctagagaaggctaacttattgccaaagggtgatcccgaaagaagaagactactgtccattgtcgtggttggtggtgggcctactggtgtagaggccgctggtgaactacaggattatgttcaccaggacctgagaaagtttctccctgcattggccgaagaagtccaaattcacttggtcgaagctctgcccatcgttttgaatatgtttgagaaaaagctttcatcatacgcgcaatcacatttagaaaacacttcgatcaaagtacatctgagaacggctgtcgccaaagttgaagaaaagcaattgttggcaaagaccaaacacgaagacggtaaaataaccgaagaaactattccatacggtactttgatttgggccacgggtaacaaggcaagaccggtaatcactgaccttttcaagaaaattcctgagcaaaactcgtccaagagaggattggcagtgaatgactttttgcaggtgaaaggcagcaacaacattttcgccattggtgacaatgcatttgctgggttgccaccaaccgcccaagtagcgcaccaagaggccgaatatttggccaagaattttgataaaatggctcaaataccaaatttccaaaagaatctatcttcaagaaaggataaaattgatctcttgttcgaggagaacaactttaaacctttcaaatacaacgatttaggtgccttagcatacctgggatccgaaagggccattgcaaccatacgttccggtaagagaacattttacaccggtggtggcttaatgaccttctacttatggagaattttgtacttgtccatgattctatctgcaagatcgagattaaaggtctttttcgactggattaaattagcatttttcaaaagagacttttttaaaggattatag

SEQ ID NO: 8120 - DNA, 1542 bp, Artificial Sequence
  Description of Artificial Sequence: Synthetic polynucleotide
atgctttccaagaatttgtatagtaacaagaggttgctcacctctacgaatacgttagtcagattcgcttccaccagatccacaggggtggaaaactccggagcaggtcctacatcttttaagaccatgaaagtcattgaccctcagcacagcgacaaaccaaacgtgttgatattaggttctgggtggggagctatttcctttttaaagcacattgacaccaagaagtacaacgtttccatcatctctcctagaagctatttcttatttacgcctttgttaccttctgcaccagttgggacagtagacgaaaagtctattattgagcccatcgttaattttgctctcaagaaaaaggggaacgttacctactatgaggcagaagccacctctatcaatcccgacaggaataccgttaccataaaatctttatctgccgttagccagttataccaacctgaaaaccatttggggttgcatcaagcagaacctgctgaaattaagtacgattatttaatcagtgctgtaggtgcggaacctaacacatttggtattcctggggtcactgattacggtcatttcttgaaggaaattcccaactctttggaaataagaagaacttttgccgccaatttggagaaggctaacttattgccaaagggtgatcccgaaagaagaagattattatccattgtcgtggttggtggtgggcctactggtgtagaggccgctggtgaattacaggattatgttcaccaggacttgagaaagtttctccctgcattggccgaagaagtccaaattcacttggtcgaagctcttcccatcgttttgaatatgtttgagaaaaagctttcttcctacgcgcaatctcatttagaaaacacttctatcaaagtacatttaagaacggctgtcgccaaagttgaagaaaagcaattgttggcaaagaccaaacacgaagacggtaaaataaccgaagaaactattccatacggtactttgatttgggccacgggtaacaaggcaagaccggtaatcactgaccttttcaagaaaattcctgagcaaaactcttccaagagaggattggcagtgaatgactttttgcaggtgaaaggcagcaacaacattttcgccattggtgacaatgcatttgctgggttgccaccaaccgcccaagtagcgcaccaagaggccgaatatttggccaagaattttgataaaatggctcaaataccaaatttccaaaagaatttatcttctagaaaggataaaattgatctcttgttcgaggagaacaactttaaacctttcaaatacaacgatttaggtgccttagcatacttgggatccgaaagggccattgcaaccatacgttccggtaagagaacattttacaccggtggtggcttaatgaccttctacttatggagaattttgtacttgtccatgattttatctgcaagatctagattaaaggtctttttcgactggattaaattagcatttttcaaaagagacttttttaaaggattatga

SEQ ID NO: 8121 - DNA, 1074 bp, Saccharomyces cerevisiae
atgagcccaagtccatcagtgtcgccaagaaggacgctcaataacaaatcatcttacatcaataacagcggtgggctggtcctgcctcctacgcagtttaatttgaatcagcagccagtcctgagcttccaacaaaaagcgactttcgattccaaccagcagtttttctattatccagagtcacccacaaaaaacctgagaccaaggtttaacagtatttcgcaggttaataaaggagttaatgaagaccattataccgggggcggtagcagtaataataacaggccatctagatatacaaataccatgggcgctgcaaacaccaatgtaaattcccatccgcatcatcagtcggtgtcgcatttaaattctaaatctcttaaattcaatcaaacgaaggaagtgagcagcataaatgaaattatttttccttccagaacgtgtacaaagaaacggtattttaccaagccaattgatttgtatggtacaagaagtagcactagtgtggcacctaagttgacgaattctcccacgaaatcaaaaacaaatttcaacatcaagaagtgcatcttacctaggtccgtcgttaccacatataaattaccatctccagtgcacgaaacgatagacgatatatccaaaaaaatcataatcctgctaatttcgttgaagtttgagaaaaactatcacttcttgcaacctattcaattgtccacaaatagtaagacacggatctcaaaatcactagacgaattatgcggagtgcagctgacatcaacgttacggcaacaaaagcagctgcaaggtaacagcaagcccgtaaagaatctccctaattccaatgcgaagcagagagccggggccagtgtttccacaaatgccaacgaaagctttgaattgagttttgatggaaaggcaatggatagatctgatatatttcgaatggtagattcttttagcatcgccatttcagatgaagatgaggaagatgaggaggaggatagctttcagcagagaagtgcgaacaacagaatcctccctgcggagatactaagtaatgaacctttgaaatga

SEQ ID NO: 8122 - DNA, 1074 bp, Artificial Sequence
  Description of Artificial Sequence: Synthetic polynucleotide
atgagcccaagtccatctgtgtctccaagaaggacgctcaataacaaatcttcttacatcaataacagcggtgggttagtcttacctcctacgcagtttaatttgaatcagcagccagtcttgagcttccaacaaaaagcgactttcgattccaaccagcagtttttctattatccagagtctcccacaaaaaacttgagaccaaggtttaacagtatttctcaggttaataaaggagttaatgaagaccattataccgggggcggtagcagtaataataacaggccatctagatatacaaataccatgggcgctgcaaacaccaatgtaaattcccatccgcatcatcagtctgtgtctcatttaaattctaaatctcttaaattcaatcaaacgaaggaagtgagcagcataaatgaaattatttttccttccagaacgtgtacaaagaaaagatattttaccaagccaattgatttgtatggtacaagaagtagcactagtgtggcacctaagttgacgaattctcccacgaaatctaaaacaaatttcaacatcaagaagtgcatcttacctaggtccgtcgttaccacatataaattaccatctccagtgcacgaaacgatagacgatatatccaaaaaaatcataatcttattgatttctttgaagtttgagaaaaactatcacttcttgcaacctattcaattgtccacaaatagtaagacaagaatctccaaatctttggacgaattatgcggagtgcagttgacaagtacgttaagacaacaaaagcagttacaaggtaacagcaagcccgtaaagaatctccctaattccaatgcgaagcagagagccggggccagtgtttccacaaatgccaacgaaagctttgaattgagttttgatggaaaggcaatggatagatctgatatatttagaatggtagattcttttagcatcgccatttctgatgaagatgaggaagatgaggaggaggatagctttcagcagagaagtgcgaacaacagaatcctccctgcggagatattgagtaatgaacctttgaaatga

SEQ ID NO: 8123 - DNA, 1518 bp, Saccharomyces cerevisiae
atggatagccaagtagaaggcaaaatatccccctcacagaaggagtcctcctccacctcaggcctcgtttcacctagtgaagatggcccagcacatcaaaaaatacacagagaccaattaagtgtggatcaaatcaagaaaatcagagaagaacgtgctcagaagagacaggtacgtaggaactctctaatatcccaagggaaggaccctgacttcccaacgcctgacttacaattcattgaaagaccattcctccctatcaaccatgataattcgaaaggtcttacgccagcgaccatacaagtcacccaagattcattggacgttaaaataatgacctataatactctagcacaaaccttgattaggagagattttttcccagaaagtggaccagcgttaaagtggcataagagatcaaaagttttggtccacgaattgaaaaagtacaggcctgatgtagtatcgttgcaggaggtcgattacaatgaactcaacttctggcaggagaatttccataagttagggtttgatgtgattttcaaaaggcatgaagggaaaactcatggactactagttgcatggaacaataaaaaattccagttagataatgattggatgctggactacgataatatattggcgggaaatgtcatttcagcaagaacaagaactaaaaatattgcccttattatatcgctatatttcaagggtataacagattcatcatcaagaggaattatcgtcgcaaatacacacctattttggcatccctttggggtatttgaaagattaaggcaatcttacttggttttacaaaagatccaggaaattaaagcatgttccaaatataatggctggcatagcctactgatgggtgatttcaataccgaacctgaagagccaccgtacttggccataacgaaaagaccactgatattaaaaggcccaataagagctatggtggaatgctcactagcgtatcggtattcaaaaaaaaggaatggagaagaaagtgaccaggatgatgaagagtgtgatgaaaagtctaggggcgaaggccattcagatcaaccacaaaacccaaaaccagagagctttacagccacaaaggaagaaaaggctctggtaaatcaattagttgcgttgcataattcactacatgtgaaaggcgtatctttgtatgggattggctacggtaaagtgcatcctgaaaatgctaacggaagccacggcgaaccgggactctcaaactgggccaatacatggtgtggattattagactacatattttatatcgagggtgatcataatcaggacacgcgtcagaaagagcctctgaatgcttttgaaggaaataacaacgtaaaaataatcggatatctgaggatgccgtgcgcacaagaaatgcccaaacactcccaacctttcgagggagaatatgctagtgatcacatttccctaatgtgccaaatacgcttgttttttgggggggagaaagtgcatagcttaaaataa

SEQ ID NO: 8124 - DNA, 1518 bp, Artificial Sequence
  Description of Artificial Sequence: Synthetic polynucleotide
atggatagccaagtagaaggcaaaatatccccctctcagaaggagtcctcctccacctctggcctcgtttctcctagtgaagatggcccagcacatcaaaaaatacacagagaccaattaagtgtggatcaaatcaagaaaatcagagaagaacgtgctcagaagagacaggtacgtaggaactctttgatatcccaagggaaggaccctgacttcccaacgcctgacttacaattcattgaaagaccattcctccctatcaaccatgataattctaaaggtcttacgccagcgaccatacaagtcacccaagattctttggacgttaaaataatgacctataatactttggcacaaaccttgattaggagagattttttcccagaaagtggaccagcgttaaagtggcataagagaagtaaagttttggtccacgaattgaaaaagtacaggcctgatgtagtatctttgcaggaggtcgattacaatgaactcaacttctggcaggagaatttccataagttagggtttgatgtgattttcaaaaggcatgaagggaaaactcatggattattggttgcatggaacaataaaaaattccagttagataatgattggatgttggactacgataatatattggcgggaaatgtcatttctgcaagaacaagaactaaaaatattgcccttattatatctttgtatttcaagggtataacagattcttcttctagaggaattatcgtcgcaaatacacaccttttttggcatccctttggggtatttgaaagattaaggcaatcttacttggttttacaaaagatccaggaaattaaagcatgttccaaatataatggctggcatagcttattgatgggtgatttcaataccgaacctgaagagccaccgtacttggccataacgaaaagaccattgatattaaaaggcccaataagagctatggtggaatgctctttagcgtatcgttattctaaaaaaaggaatggagaagaaagtgaccaggatgatgaagagtgtgatgaaaagtctaggggcgaaggccattctgatcaaccacaaaacccaaaaccagagagctttacagccacaaaggaagaaaaggctttggtaaatcaattagttgcgttgcataattctttgcatgtgaaaggcgtatctttgtatgggattggctacggtaaagtgcatcctgaaaatgctaacggaagccacggcgaaccgggactctccaactgggccaatacatggtgtggattattagactacatattttatatcgagggtgatcataatcaggacacgcgtcagaaagagcctttaaatgcttttgaaggaaataacaacgtaaaaataatcggatatttgaggatgccgtgcgcacaagaaatgcccaaacactcccaacctttcgagggagaatatgctagtgatcacatttccttgatgtgccaaatacgcttgttttttgggggggagaaagtgcatagcttaaaatga

SEQ ID NO: 8125 - DNA, 3405 bp, Saccharomyces cerevisiae
atgtcaaattccaattcaaaaaaacctgttgcgaattacgcataccgtcaacagcaagattataatgggatgaacgccatggtgggaaatccaatgatgtatcatcctgttgatttcgtaaacggtgccggccaatatggtccttctcaacacccagcatattacaccaactcaccattacctaatattccaccaacaccttttgatactgcatacggtgccagtctttttccatctcacctattgatgggatctccatttgtttcctcgcctaacatgcaaagtggctataattctgcaagatcatctaatctcaaaagaaaggcttattcgaggcccgtttctaatcataacggttacaacggaaacagtaacagtaaccaaaacaatactaataacggaatggtaacaccctcgaactattatagaatggggagaaattctttctcgaggaacaacaacagtacgaggaatgttactcacaacaacaataaggggtgcgacacccggaacaacagtggaagaagaacattcgcaaggaataacattttcgacgacatacttccagaaatgcttttacaaagacccttttgtattaattacaaggttctaccgactggtgatgatgcttatagaactaggtcgctgcttattgaaaatgtggatcattctattgatttacactctatagtcaaaaattttgtcaaatccaatactctggaaagtgcctacttaattgaaggagggaagagcgatgattcaaaagatgtagagactaaaaatctatccattctaataagctttctaaccaaaggcgactgtttgaacttttacaataacattttacaaaggttatctgaattcaaaacatttttgaaatctgaagcactaaatctgaaatttgtttgtctaaactatgatcccaaatgcctccctacctttattgagagtgaagcgttaacagaaaacgctgaagaagccgacattaccaatggttcaacaatgatcagtgcttcgctgcatcataatatagcgaacaaagatgctacaaggtcgattataattgaattcaaaagccccgtggagaaaagcgatttattcaaaaagaaattacaatttttggacaggtcaaaaaacaaaagatacattttggaatctatcgatttagtgaacacagatgtaccttccaatcaatttcctgaaaattacgccgttttaacctttttgaatatctctatggctattgaagttctcgattatttgaaaaaatactccaaaaacttaggcatttctaaatgtttttacgtatccctagccccgttggtagttagctcagccagatcttcggttgctaatatttacgagggtaaaacgagcacacatcgtttatcggtgccttctgttactgctgggaacaataacgatagcaacaacaacggaaacaataataaaagtaatatgagtggtatcaccacactcaataataatagtagtattggtgtttccgtatacggtcactctaatatgagtttaaccagtctgtcatcatctgtatctttaaatgaagagattgatatgcttgcgacgaaacttcaaggggtagaacttgatgggacttatttagaaatcaactatcgcgactatcaaacaccaactattgaagaacactctactcacttgagcaatgtcaaaatttcaaagacaacagaaaactctaggcaattttctcaagatatcccatcacctttgccattaaatgaacatatgtttatgaatgattctaatcagtccaatggagcgataatacctcaacagttaatagccacaccttctccggtatcccccaatttgcaaatgaatcaaagggtgttgccgaatccaataactcaaagtttggagcaaaatttcaacgtttcggccaaagtggcatcatccatgggttcagacataggcaatagaacaatttatataggaaacattaatccaagatcaaaggcggaggatatctgtaatgtcgtgcgtggaggaatccttcagagcattaagtacataccggagaagaagatatgctttgttactttcatcgaagctccatccgctgtacagttctatgcaaattcatttattgatccaatagtgttacatgggaatatgttgagagttggatgggggcattattctggtccattaccgaaattaatctcgttggctgttacgatcggggcaagtaggaatgtctacgtaagcctaccagagtttgcatttaaggaaaagtttattcacgaccctcagtacaaaaaattgcatgaaacactatctttaccagatgcggaacaactaagagaggactttagtacctatggtgatattgagcagattaactatttgagtgatagccattgctgttggataaatttcatgaatatatcttctgcgattagtcttgttgaagaaatgaataaggaatccacagtacaaaatgaatccggtgaagtgacgcttaaaagggcgactgaggaaaaattcggtggccgttataagggccttctgataaactacggcaaagatcgttgtggcaatataaacaaaaatttgatagcaggtaaaaattcaagattctataagaaagttaaaagaccgagctataatatacgtttgagtaagttggaagaaaagaggaggcagaatgaaatcgatgaaaaggaaaaggcttttgataaacccttgaacttggaatccctaggaattagtctggacgcacataaggacaacggcggtggtgaaacaggaactgcaaataatactgggcatgaaaatgaaagtgaactagaggctgaaaatgaaaacggtaatgagactggaagtttcggtggactgggtctcgctgtggcgagctctgacgtcaaacgtgcgacatcggatgaaactgattatgaagatatatttaacaagtcatcgggatcttccgactcgtcatcagacgtcgaggtcattatgcactccccgagcgatcctgaatacgctttaaaatcacaaactctaagaagctcgagtcagaccgtcattaatagtaagagaccagtaaagatagaagacgaggaagaagccgtaggaatgtcacagctcaattataggtcgtcattaagacaagctcctccaagagctccctcaactttgtcatataatcactcgaagaacaacgaaacgccaatgcaagatattttcacaaatggcgaaacagcaaataacagaaagaagaagagaggatcttttgcaaggcatagaacgataccaggatctgacgtcatggcccaataccttgcacaagtgcaacattcgacatttatgtatgcagccaatattttgggcgcctctgcggaagacaacacgcatcctgacgagtag

SEQ ID NO: 8126 - DNA, 3405 bp, Artificial Sequence
  Description of Artificial Sequence: Synthetic polynucleotide
atgagtaattccaattctaaaaaacctgttgcgaattacgcataccgtcaacagcaagattataatgggatgaacgccatggtgggaaatccaatgatgtatcatcctgttgatttcgtaaacggtgccggccaatatggtccttctcaacacccagcatattacaccaactctccattacctaatattccaccaacaccttttgatactgcatacggtgccagtctttttccatctcacttattgatgggatctccatttgtttcctcccctaacatgcaaagtggctataattctgcaagatcttctaatctcaaaagaaaggcttattctaggcccgtttctaatcataacggttacaacggaaacagtaacagtaaccaaaacaatactaataacggaatggtaacaccctctaactattatagaatggggagaaattctttctctaggaacaacaacagtacgaggaatgttactcacaacaacaataaggggtgcgacaccagaaacaacagtggaagaagaacattcgcaaggaataacattttcgacgacatacttccagaaatgcttttacaaagacccttttgtattaattacaaggttttaccgactggtgatgatgcttatagaactaggtccttacttattgaaaatgtggatcattctattgatttacactctatagtcaaaaattttgtcaaatccaatactttggaaagtgcctacttaattgaaggagggaagagcgatgattctaaagatgtagagactaaaaatttatccattttaataagctttttaaccaaaggcgactgtttgaacttttacaataacattttacaaaggttatctgaattcaaaacatttttgaaatctgaagcattgaatttgaaatttgtttgtttgaactatgatcccaaatgcctccctacctttattgagagtgaagcgttaacagaaaacgctgaagaagccgacattaccaatggttctacaatgatcagtgcttctttgcatcataatatagcgaacaaagatgctacaaggtctattataattgaattcaaaagccccgtggagaaaagcgatttattcaaaaagaaattacaatttttggacaggtccaaaaacaaaagatacattttggaatctatcgatttagtgaacacagatgtaccttccaatcaatttcctgaaaattacgccgttttaacctttttgaatatctctatggctattgaagttctcgattatttgaaaaaatactccaaaaacttaggcatttctaaatgtttttacgtatccttggccccgttggtagttagcagtgccagatcttctgttgctaatatttacgagggtaaaacgagcacacatcgtttatctgtgccttctgttactgctgggaacaataacgatagcaacaacaacggaaacaataataaaagtaatatgagtggtatcaccacactcaataataatagtagtattggtgtttccgtatacggtcactctaatatgagtttaaccagtttatcttcttctgtatctttaaatgaagagattgatatgcttgcgacgaaacttcaaggggtagaacttgatgggacttatttagaaatcaactatcgcgactatcaaacaccaactattgaagaacactctactcacttgagcaatgtcaaaatttccaagacaacagaaaactctaggcaattttctcaagatatcccatctcctttgccattaaatgaacatatgtttatgaatgattctaatcagtccaatggagcgataatacctcaacagttaatagccacaccttctccggtatcccccaatttgcaaatgaatcaaagggtgttgccgaatccaataactcaaagtttggagcaaaatttcaacgtttctgccaaagtggcatcttccatgggttctgacataggcaatagaacaatttatataggaaacattaatccaagatccaaggcggaggatatctgtaatgtcgtgcgtggaggaatccttcagagcattaagtacataccggagaagaagatatgctttgttactttcatcgaagctccatccgctgtacagttctatgcaaattcttttattgatccaatagtgttacatgggaatatgttgagagttggatgggggcattattctggtccattaccgaaattaatctctttggctgttacgatcggggcaagtaggaatgtctacgtaagcttgccagagtttgcatttaaggaaaagtttattcacgaccctcagtacaaaaaattgcatgaaacattatctttaccagatgcggaacaattgagagaggactttagtacctatggtgatattgagcagattaactatttgagtgatagccattgctgttggataaatttcatgaatatatcttctgcgattagtcttgttgaagaaatgaataaggaatccacagtacaaaatgaatccggtgaagtgacgcttaaaagggcgactgaggaaaaattcggtggccgttataagggccttttgataaactacggcaaagatcgttgtggcaatataaacaaaaatttgatagcaggtaaaaattctagattctataagaaagttaaaagaccgagctataatatacgtttgagtaagttggaagaaaagaggaggcagaatgaaatcgatgaaaaggaaaaggcttttgataaacccttgaacttggaatccttgggaattagtttggacgcacataaggacaacggcggtggtgaaacaggaactgcaaataatactgggcatgaaaatgaaagtgaattagaggctgaaaatgaaaacggtaatgagactggaagtttcggtggattaggtctcgctgtggcgagctctgacgtcaaacgtgcgacatctgatgaaactgattatgaagatatatttaacaagtcttctggatcttccgactcttcttctgacgtcgaggtcattatgcactccccgagcgatcctgaatacgctttaaaatctcaaactttgagaagcagtagtcagaccgtcattaatagtaagagaccagtaaagatagaagacgaggaagaagccgtaggaatgtctcagctcaattataggagttctttaagacaagctcctccaagagctccctccactttgagttataatcactccaagaacaacgaaacgccaatgcaagatattttcacaaatggcgaaacagcaaataacagaaagaagaagagaggatcttttgcaaggcatagaacgataccaggatctgacgtcatggcccaataccttgcacaagtgcaacattctacatttatgtatgcagccaatattttgggcgcctctgcggaagacaacacgcatcctgacgagtga

SEQ ID NO: 8127 - DNA, 1629 bp, Saccharomyces cerevisiae
atgggcaatcagtcattagttgtgcttacggaaagtaagggtgagtatgagaatgagacagaactacctgttaaaaaatcgtcacgagataataatatcggagaatctttaacagcaacagcttttacgcagtctgaagatgaaatggtagatagcaatcagaaatggcagaacccaaactattttaaatatgcatggcaagaatatctttttatattcacatgcatgataagtcagcttctaaatcaagcaggcactacacagactctttcgatcatgaatattctttcggacagttttggctcagaaggaaactcaaagtcatggctgatggcatcttttccgctagtttcaggctcatttattttgattagtggcagactaggtgacatatacggattaaaaaaaatgttgttagtaggatatgttctggttattatatggtctttgatttgtgggattaccaagtattctggtagcgatactttttttattattagtagagccttccaagggctagggattgcatttgttttacctaatgtgctgggaataattggtaatatatatgtaggtggtacttttcgtaaaaacatcgtgattagttttgttggtgcgatggcccctattggagcaactttaggttgtctttttgcaggactgatcggtaccgaggacccaaaacaatggccatgggcattctacgcgtatagcatagccgctttcattaattttgtgctctccatatatgccattccgagtactataccaacaaatattcatcatttttctatggattggattggttctgttttgggcgtgataggtctcattttattaaattttgtgtggaaccaagctcctatatcgggttggaaccaggcttacatcatcgtaattttaatcatttctgtgatttttcttgtcgttttcatcatttatgagattcgatttgccaagactccactattgccgcgcgcagttataaaggatcgtcatatgattcaaattatgctggctttattctttggatggggctcttttggcatctttacgttttattatttccaatttcaattaaatataaggcagtacacggcattatgggctggtggaacttactttatgtttttaatttggggtattattgccgccttactggtaggatttactatcaagaatgtgtctccatcagtgtttttgttcttttctatggtagcattcaatgtgggctcaataatggcaagtgttacaccggttcacgagacatactttcgtactcagttaggaacgatgataattttaagttttgggatggatctttcatttcctgcttcttccattatctttagtgataatttaccgatggagtaccaaggcatggctgggtcattggtgaatactgttgtcaattactccatgtccttgtgtctcggtatgggtgccacagtagagacacaggtcaattcagacggaaagcatcttttgaaaggctatagaggtgctcagtaccttgggataggattggcaagtttagcatgcatgattagcgggctttacatggtcgaaagcttcataaaaggccgcagggcaagagctgctgcagaatacgattgcactgtggcttag

SEQ ID NO: 8128 - DNA, 1629 bp, Artificial Sequence
  Description of Artificial Sequence: Synthetic polynucleotide
atgggcaatcagtctttagttgtgcttacggaaagtaagggtgagtatgagaatgagacagaattacctgttaaaaaatcttctagagataataatatcggagaatctttaacagcaacagcttttacgcagtctgaagatgaaatggtagatagcaatcagaaatggcagaacccaaactattttaaatatgcatggcaagaatatctttttatattcacatgcatgataagtcagcttttgaatcaagcaggcactacacagactctttctatcatgaatattctttctgacagttttggctctgaaggaaactccaagtcttggttaatggcatcttttccgttggtttctggctcttttattttgattagtggcagattaggtgacatatacggattaaaaaaaatgttgttagtaggatatgttttggttattatatggtctttgatttgtgggattaccaagtattctggtagcgatactttttttattattagtagagccttccaagggttagggattgcatttgttttacctaatgtgttgggaataattggtaatatatatgtaggtggtacttttcgtaaaaacatcgtgattagttttgttggtgcgatggcccctattggagcaactttaggttgtctttttgcaggattgatcggtaccgaggacccaaaacaatggccatgggcattctacgcgtatagcatagccgctttcattaattttgtgctctccatatatgccattccgagtactataccaacaaatattcatcatttttctatggattggattggttctgttttgggcgtgataggtctcattttattaaattttgtgtggaaccaagctcctatatctggttggaaccaggcttacatcatcgtaattttaatcatttctgtgatttttcttgtcgttttcatcatttatgagattagatttgccaagactccattgttgccgcgcgcagttataaaggatcgtcatatgattcaaattatgttggctttattctttggatggggctcttttggcatctttacgttttattatttccaatttcaattaaatataaggcagtacacggcattatgggctggtggaacttactttatgtttttaatttggggtattattgccgccttattggtaggatttactatcaagaatgtgtctccatctgtgtttttgttcttttctatggtagcattcaatgtgggctctataatggcaagtgttacaccggttcacgagacatactttcgtactcagttaggaacgatgataattttaagttttgggatggatctttcttttcctgcttcttccattatctttagtgataatttaccgatggagtaccaaggcatggctgggtctttggtgaatactgttgtcaattactccatgtccttgtgtctcggtatgggtgccacagtagagacacaggtcaatagtgacggaaagcatcttttgaaaggctatagaggtgctcagtaccttgggataggattggcaagtttagcatgcatgattagcgggctttacatggtcgaaagcttcataaaaggccgcagggcaagagctgctgcagaatacgattgcactgtggcttga

SEQ ID NO: 8129 - DNA, 1608 bp, Saccharomyces cerevisiae
atgggcatgttttttaatttaaggtcaaatataaagaagaaagccatggacaatggactaagcctgcccatttcaaggaacggtagctcgaacaacatcaaggacaaacgctcagagcataactccaactcattaaagggcaaatacaggtaccagccgcgctccacaccgtctaaattccagcttacggtgagtatcacatctcttattattatcgccgttctgtcgttatatctctttatatcatttctctccggaatgggcattggtgtatccacgcaaaatggtaggtcgttgttgggttcctcaaaatcctccgaaaattacaagactatcgacctagaagatgaagaatattacgactatgattttgaggatatcgatcctgaagtgatttcaaaatttgatgatggtgtgcaacattatctaatatcacaatttggttcagaagtgttgactcccaaggatgatgaaaaataccaaagggaactcaacatgctttttgattccactgttgaggagtacgacctgtcgaattttgaaggtgctccgaatggattggaaacacgtgatcacattcttttatgcattccactaagaaacgctgcggatgtattgccattaatgttcaagcatttaatgaacctaacctatccacacgagctgattgatctggcctttttagtcagtgattgctcagaaggtgacactacgttggatgctttaatagcgtattctaggcacttacaaaatggcacgttgtctcagatttttcaagagattgacgctgtcattgattcgcaaacaaaaggcaccgataaattatatcttaaatatatggacgaaggttatatcaaccgtgtccaccaggcattttcaccaccattccatgaaaattatgacaagccatttagatcagtacaaattttccaaaaggattttggccaagtaattggacaaggttttagtgacagacatgccgttaaggttcaaggtataagacgaaaactaatggggagggcaagaaattggttaactgccaatgctttgaaaccttaccactcatgggtttattggagagatgctgatgtagagctgtgccctggttcagtcattcaagatttgatgagcaaaaactacgatgttatcgtccctaacgtttggagaccactacctacatttttgggaactgaacaaccatatgatttgaattcttggatggaatctcaggaggcactagcattggcaaagactcttgacgaagatgatgttattgtagaaggctatgcagaatatcctacgtggagagttcacttagcctatatcagagatgcagaaggtgatccaaatgaagcggtggacttggacggtgtagggggagtttctattttggcgaaggccaaaatatttagaaacggggtacagtttcctgcatttacttttgaaaatcatgcagaaacagaagcatttggtaaaatggcaaagaaaatggggtacagggttggtggtttaccgcattatactatttggcatatttatgaaccgagcgatgacgatttgaaggaaattgcgtcaagggaaagagagaagagaagacaatcagagtaa

SEQ ID NO: 8130 - DNA, 1608 bp, Artificial Sequence
  Description of Artificial Sequence: Synthetic polynucleotide
atgggcatgttttttaatttaaggtctaatataaagaagaaagccatggacaatggattaagcttgcccatttctaggaacggtagcagtaacaacatcaaggacaaacgcagtgagcataactccaactctttaaagggcaaatacaggtaccagccgcgctccacaccgtctaaattccagcttacggtgagtatcacatctcttattattatcgccgttttatctttatatctctttatatcctttctctccggaatgggcattggtgtatccacgcaaaatggtaggtctttgttgggttcctctaaatcctccgaaaattacaagactatcgacttggaagatgaagaatattacgactatgattttgaggatatcgatcctgaagtgatttccaaatttgatgatggtgtgcaacattatttgatatctcaatttggttctgaagtgttgactcccaaggatgatgaaaaataccaaagggaactcaacatgctttttgattccactgttgaggagtacgacctttctaattttgaaggtgctccgaatggattggaaacacgtgatcacattcttttatgcattccattgagaaacgctgcggatgtattgccattaatgttcaagcatttaatgaacttgacctatccacacgagttgattgatttggcctttttagtcagtgattgcagtgaaggtgacactacgttggatgctttaatagcgtattctaggcacttacaaaatggcacgttgtctcagatttttcaagagattgacgctgtcattgattctcaaacaaaaggcaccgataaattatatcttaaatatatggacgaaggttatatcaaccgtgtccaccaggcattttctccaccattccatgaaaattatgacaagccatttagatctgtacaaattttccaaaaggattttggccaagtaattggacaaggttttagtgacagacatgccgttaaggttcaaggtataagaagaaaattaatggggagggcaagaaattggttaactgccaatgctttgaaaccttaccactcttgggtttattggagagatgctgatgtagagctctgccctggttctgtcattcaagatttgatgagcaaaaactacgatgttatcgtccctaacgtttggagaccattgcctacatttttgggaactgaacaaccatatgatttgaattcttggatggaatctcaggaggcattggcattggcaaagactcttgacgaagatgatgttattgtagaaggctatgcagaatatcctacgtggagagttcacttagcctatatcagagatgcagaaggtgatccaaatgaagcggtggacttggacggtgtagggggagtttctattttggcgaaggccaaaatatttagaaacggggtacagtttcctgcatttacttttgaaaatcatgcagaaacagaagcatttggtaaaatggcaaagaaaatggggtacagggttggtggtttaccgcattatactatttggcatatttatgaaccgagcgatgacgatttgaaggaaattgcgtccagggaaagagagaagagaagacaaagtgagtga

SEQ ID NO: 8131 - DNA, 1533 bp, Saccharomyces cerevisiae
atgacttccaaaacgtcagaaagtggtaccggtacccaaagtaccatagttcagctgaggaacctaccggatttgacggaaattagtcacttggaaatagatgctcccgtagttgaaattctaaagaaaacagtacttttccagttgaattcgttgaacatctgcatttcaaactttgcattggatgagctggtcaacctcgtgaccgtccaaatggacggcatgtttcggaacctgcacaatttaacacttttacaaagaaggtcgcaagcttctcaagcagatttgaaattgttgcttcgagagtttaacctggatgcgccctccctttatcagcagtttcaggcctcagaattcatcaaatcgaagcattccacggaatatgaaaaattgatgagctggtcgtctcttgctgctttaccgcataacgaagaagatgaagaggacgaattgaataatatcgaggagcaacagaacgagatcaacgttttgctgcctccctctaacccactggaaaaacagataccgagttggctgcccaactttccgcctgaccatacctataagtttacacctgagttcaaccatccaattactgatctaaaaaccatcaagaaagaaatagtaaaagaaagccaagagtctgaaaaggcactattgaacttgaacaaaagtctctcccacatatcatcagcgtcaaataccccgcaaccgccgggtttagacgatgaggacgctatcgagcaacaattggagatttggggcaacgcgctggaagaaaggaaaccaaccataactgaaaagtccttcaatgaaaacaatatcgagcagtatgcgaagtatagagtggaattggcgagagaacgtgtcacgaaatttgaagtgaatcagttgaaaagaacaaaaaatccattcttgaaaatttctgaaactctctaccttccagagagtcctcaccagtctcacaaaaccatacaaaaaaccatagaattgcaatttcgtaagtctatgacactattcatgcacaatttacctaaggtccagaagttgaagaaggaaaaaatacgaatggccaaggaagaaagagcaaaatcgctaaaacgtcggcaagaagagcttatttcacaacgaacaaagagggaacaagatgaaggccatgatcttgagcttctactaaataacgagcacgcaagggacgctgcagacgacacgaccacccctaatgcattaaacaactctaccatagttatcaacacaaacgccgaggatgaggacgatgacataaacttatttggcatcttagggagcagtgaagatgagaatgaaatgtcgagtatgcctgcggagaacctggtcgcggaatcggaaccgccaacaatgacagcgcaagatactacaaatactacacctgtagcacataacacaaccaatatcgatgctactacaagtcactctcctcattcgacgcctaatgaaaacgccccgacatctcctcctgcagatatagccacagatcacgatataactatgtaa

SEQ ID NO: 8132 - DNA, 1533 bp, Artificial Sequence
  Description of Artificial Sequence: Synthetic polynucleotide
atgacttccaaaacgagtgaaagtggtaccggtacccaaagtaccatagttcagttgaggaacttaccggatttgacggaaattagtcacttggaaatagatgctcccgtagttgaaattttgaagaaaacagtacttttccagttgaattctttgaacatctgcatttccaactttgcattggatgagttggtcaacctcgtgaccgtccaaatggacggcatgtttagaaacttgcacaatttaacacttttacaaagaaggtctcaagcttctcaagcagatttgaaattgttgcttcgtgagtttaaccttgatgcgccctccctttatcagcagtttcaggccagtgaattcatcaaatccaagcattccacggaatatgaaaaattgatgagctggtcttctcttgctgctttaccgcataacgaagaagatgaagaggacgaattgaataatatcgaggagcaacagaacgagatcaacgttttgttacctccctctaacccattggaaaaacagataccgagttggttgcccaactttccgcctgaccatacctataagtttacacctgagttcaaccatccaattactgatttgaaaaccatcaagaaagaaatagtaaaagaaagccaagagtctgaaaaggcattattgaacttgaacaaaagtctctcccacatatcttctgcgtctaataccccgcaaccgccgggtttagacgatgaggacgctatcgagcaacaattggagatttggggcaacgcgttagaagaaaggaaaccaaccataactgaaaagtccttcaatgaaaacaatatcgagcagtatgcgaagtatagagtggaattggcgagagaacgtgtcacgaaatttgaagtgaatcagttgaaaagaacaaaaaatccattcttgaaaatttctgaaactctctaccttccagagagtcctcaccagtctcacaaaaccatacaaaaaaccatagaattgcaatttcgtaagtctatgacattgttcatgcacaatttacctaaggtccagaagttgaagaaggaaaaaataagaatggccaaggaagaaagagcaaaatctttgaaacgtagacaagaagagcttatttctcaaagaacaaagagggaacaagatgaaggccatgatcttgagcttttattgaataacgagcacgcaagggacgctgcagacgacacgaccacccctaatgcattaaacaactctaccatagttatcaacacaaacgccgaggatgaggacgatgacataaacttatttggcatcttagggagcagtgaagatgagaatgaaatgagcagtatgcctgcggagaacttggtcgcggaaagtgaaccgccaacaatgacagcgcaagatactacaaatactacacctgtagcacataacacaaccaatatcgatgctactacaagtcactctcctcattctacgcctaatgaaaacgccccgacatctcctcctgcagatatagccacagatcacgatataactatgtga

SEQ ID NO: 8133 - DNA, 747 bp, Saccharomyces cerevisiae
atggcgaaaactttggcacaaggaaggaaacctggaagcggcagaaagcccggaaaagggaagacgttgagagagggaagaaagcctggcagtggtaggaggaggaggcaagatactgggggtaaagagaccgacgggtctcagcaagatcaggagtcgcgtcttattagttccagggacatggaagctgtggacgcactgagagagttgacgcacagcccgtcgtctcactcagctcataattcatcagcagcaccaccgccgcatgcagcagcggcgtcaacttcattgcctccatctctggattatacccatcagtcattcatggatcaacaacaacaacagcagcagcagcagcagcaacaactactacagcaacagagagtggacgtcgttccgcccaagccgttcatcacccacaagatcctgttatcttcaacgggaaactctggcggccacgtgaattcaaattacaacgccgaccacagcattaatcataattcaaaccacaaccttaacagcaacgtgaacgtgaacatgaactttactataaatgggagcaatcaagacccgtcatcttctttcctgatggggccctacaactacttacagcggcctttcattgtgaaaccatatcttgatctgtccacaagcacagcagcatcaaatcagccacggacgcaaccatcgccggcagcacatatcactaagaattccgattctacagagaaaaacgcaaccatatga

SEQ ID NO: 8134 - DNA, 747 bp, Artificial Sequence
  Description of Artificial Sequence: Synthetic polynucleotide
atggcgaaaactttggcacaaggaaggaaacctggaagcggcagaaagcccggaaaagggaagacgttgagagagggaagaaagcctggcagtggtaggaggaggaggcaagatactgggggtaaagagaccgacgggtctcagcaagatcaggagtctcgtcttattagttccagggacatggaagctgtggacgcattgagagagttgacgcacagcccgtcttctcactctgctcataattcttctgcagcaccaccgccgcatgcagcagcggcgtctacttctttgcctccatctttagattatacccatcagtctttcatggatcaacaacaacaacagcagcagcagcagcagcaacaattattgcagcaacagagagtggacgtcgttccgcccaagccgttcatcacccacaagatcttattatcttctacgggaaactctggcggccacgtgaatagtaattacaacgccgaccacagcattaatcataatagcaaccacaaccttaacagcaacgtgaacgtgaacatgaactttactataaatgggagcaatcaagacccgtcttcttctttcttaatggggccctacaactacttacagaggcctttcattgtgaaaccatatcttgatttatccacaagcacagcagcatctaatcagccaagaacgcaaccatctccggcagcacatatcactaagaattccgattctacagagaaaaacgcaaccatatga

SEQ ID NO: 8135 - DNA, 891 bp, Saccharomyces cerevisiae
atggactctcttgaagctagattacaattcattcaggtcctgaagaacctgcaaaagacgctgcacaagaccagagactctatcacatcatcgtcgaccaccacaccaccgtcatcgcaacaaaagctgaacaatgaccctatacagttctacttgagaaactacagacatcactacgaggacttccaccaatgtttgttcgatacaaccatgaagatggacccactagatagactggacgtagtgatatactatgttagaataataagaaacttatatccgcatagccattccaataccaatgttacaaaagtgttaaacgaagtgctactcatggacatagacttggtttttgagctttgtctgccctgccaggactggaaatccctcacgaatcaagccacctgtaaagagctattccttgacttatccaaactaatccattacgacgccaccagcgtcacgcacacaccatcagacaccacactcatagacgctactacctggtacagtgtcaagacagagaggactacaaaggactataaagaatcattgcaacgaacggagtctctgcttaaggacagagacttgaagaaattggctttctttcagcagttcaattccgatacaactgcgatcaacccggacttacagacgcagccaaccaatgcaaacattttgttgcacaggatggaagcagacagggaactgcacaagaggtcgaaagagacaagttggtacatcgaaaggccctccaacgatatactggatgaatccgaatttaaaagcttgtggacgcattttgaaactactgattccggatttgataaggacgattacaaaaatatcaaggctttaaatgacattgcgaaggcatcttacatatattag

SEQ ID NO: 8136 - DNA, 891 bp, Artificial Sequence
  Description of Artificial Sequence: Synthetic polynucleotide
atggactctcttgaagctagattacaattcattcaggtcttgaagaacttacaaaagacgttgcacaagaccagagactctatcacatcttcttccaccaccacaccaccgtcttctcaacaaaagttgaacaatgaccctatacagttctacttgagaaactacagacatcactacgaggacttccaccaatgtttgttcgatacaaccatgaagatggacccattagatagattagacgtagtgatatactatgttagaataataagaaacttatatccgcatagccattccaataccaatgttacaaaagtgttaaacgaagtgcttctcatggacatagacttggtttttgagctttgtttgccctgccaggactggaaatccctcacgaatcaagccacctgtaaagagcttttccttgacttatccaaattaatccattacgacgccaccagcgtcacgcacacaccatctgacaccacactcatagacgctactacctggtacagtgtcaagacagagaggactacaaaggactataaagaatctttgcaaagaacggagtctttacttaaggacagagacttgaagaaattggctttctttcagcagttcaattccgatacaactgcgatcaacccggacttacagacgcagccaaccaatgcaaacattttgttgcacaggatggaagcagacagggaattgcacaagaggtccaaagagacaagttggtacatcgaaaggccctccaacgatatattggatgaatccgaatttaaaagcttgtggacgcattttgaaactactgattccggatttgataaggacgattacaaaaatatcaaggctttaaatgacattgcgaaggcatcttacatatattga

SEQ ID NO: 8137 - DNA, 2763 bp, Saccharomyces cerevisiae
atgacttttacattctccacttcatcaaggaaaaatgggagacctcctttaaaatcagtttctacggaagataacattcatctattgaggaagcggcgtcaacagcagctgtcaagtaattctacagataattcgctgcatccaaatagtgggcagactccacgtgcaagtgacagccaggacgatgacatacgcagcgcttcaacaaccaatttagaccgtttacgacaagaacgagaggaaaattcactggaaatggactgcacacagtcaagattatctcatagagcaaatatgctagtggatgtcctaccatcttttgagatgtataatgccttgcacagacacatacctcaaggaaacgttgatcccgatagacatgatttccccccttcttatcaagaagttcgcactcaaagaatgactatattgcccagcaatgataattccgtggaaaggtcacaattgacagcagtgccaggatccgaaaacgcatgtaataatgcgactgcccattctcttaccaacctacatcctctacaaacacaacatcttacaataaacagtacaagaagtggtggacagtcgctccattcttcatcagacaccaatatcagtcaaataccgttcgaagatgatctaaacgactcggataacatttttatagacaagttatacaccttacccaagttatccactcctatcgaaattgatataagaataacgaaaactgcatcaatacctcatgagcgtcctgaggaacagtcaatattgaaggaatacacctcgggtgatattattcatggttattgtttaattgaaaatcggtcctctcaaccactgaaatttgaaatgttttatgtcactttagaagcgtacatatctgtaattgaccgtcagaaagggaaaagaacgttaaagagatttttaagaatggtcgatttgagcgcatcttggtcttatacaaacataaccccaagtacgggtattaatattgtccccggtgaaagggattttgacgatgccatcattggtctttcaaacagcagagaattgaagccgaacacaaagtataagaaattcttcatgttcaagcttcctacacagttattggacgtgacttgcaaacaagagcaattctcacactgccttctgcctcccagctttggtatcgacaagtataaaaataattgtaaatactctggcataaaagtaaatagtgtccttggctgtgggcatttaggtacaaaaggttcacccattctgacacttgacatggcagatgataatttatcaataaattatacaattgatgccaaaattgtcggtaaagataaaagaacatctaagctgaatattatgaaagaaaaagaatataacttgagagttatgcccttcccctttgctggtgtcactaatcaacaaaacgagaaaacgtgtttgagacaactgaaaaatttggaaagcttgattgaagatagatttgaagctttgaacaagattttcaagaaactggaattaaatgaggccatttcgaatgtagatattcatgacacagatataagcgggactttggacggtaatgaagatttggattccgatgagatattaagacgtaagctagatcaactgcacatcaataacaggattgatgataccgccagccaatcaccatcctatgactccaaaaatatggctccaaaggaaaacctagtcgagactgagttacgctataagtttaaaaataagaataaatcaaattcaagtttattttctcattttttgagttcatcagaaacggggtcatcttcaactggtccacatgtatataattccggattgattgtattatcagttaaaaaaccgcaatctacattaccttattggtcaccatcattgttgagaaaaaccaacaaatttgaagcaaagagtgaacaagaaaaggaaaactggcaaaggttaatgggcatgcttccagaaggagtgaaaaccccactgaccaagttagatgtacatttgacttgtatccaatctaataatagtgcaggacataagccgccagaaataagctctgtaacgacagaatttgtggtcatcacagcaaagtctgataattcgattcctatcaaattctgcactgaactgttgatgaatgagaatagattaaacaaactaaagacaaaatttttgacgtatcagaaaaaagttcatgaatatcgtaaaaaatttgaagaaaaccatgcgaagctaaacgagctttataatagaaatagagatcatttcactccaaaagagcttttgttcacaaatttcatatctgatcaaataaacaatgatattgacagtttagctggattaaaagttaacattattgatttacatgatatcttcaaaaagcaaatacatacttttgaagaagaaaacgaggatattatttcgaagaaaggaagttccaatcctccttccgcgtcatccagtaataataatttcttacaagcaacatttagcaatggtgcatccaccgctactaagtttactcagcaaattgtgcatgaatgggaaaaagttaagccattacagtataagagggatgttacagttaatttgaagctcaaccccaacattaaagaaacgttagtgcccaatcttgaaacgtgtttgtgttgtagattttattgtgttcgagtaaacatcaaatttgataaccacttgggttctatgaaagttgatattccggttgatgtgaaaaagttacaaatttag

SEQ ID NO: 8138 - DNA, 2763 bp, Artificial Sequence
  Description of Artificial Sequence: Synthetic polynucleotide
atgacttttacattctccacttcttccaggaaaaatgggagacctcctttaaaatctgtttctacggaagataacattcatcttttgaggaagagacgtcaacagcagttatccagtaattctacagataattctttgcatccaaatagtgggcagactccacgtgcaagtgacagccaggacgatgacatacgcagcgcttctacaaccaatttagaccgtttaagacaagaaagagaggaaaattctttggaaatggactgcacacagtctagattatctcatagagcaaatatgttggtggatgtcttgccatcttttgagatgtataatgccttgcacagacacatacctcaaggaaacgttgatcccgatagacatgatttccccccttcttatcaagaagttcgcactcaaagaatgactatattgcccagcaatgataattccgtggaaaggtctcaattgacagcagtgccaggatccgaaaacgcatgtaataatgcgactgcccattctcttaccaacttacatcctttacaaacacaacatcttacaataaacagtacaagaagtggtggacagagcctccattcttcttctgacaccaatatcagtcaaataccgttcgaagatgatttgaacgacagtgataacatttttatagacaagttatacaccttacccaagttatccactcctatcgaaattgatataagaataacgaaaactgcatctatacctcatgagcgtcctgaggaacagagtatattgaaggaatacacctctggtgatattattcatggttattgtttaattgaaaatagatcctctcaaccattgaaatttgaaatgttttatgtcactttagaagcgtacatatctgtaattgaccgtcagaaagggaaaagaacgttaaagagatttttaagaatggtcgatttgagcgcatcttggtcttatacaaacataaccccaagtacgggtattaatattgtccccggtgaaagggattttgacgatgccatcattggtctttccaacagcagagaattgaagccgaacacaaagtataagaaattcttcatgttcaagcttcctacacagttattggacgtgacttgcaaacaagagcaattctctcactgccttttacctcccagctttggtatcgacaagtataaaaataattgtaaatactctggcataaaagtaaatagtgtccttggctgtgggcatttaggtacaaaaggttctcccattttaacacttgacatggcagatgataatttatctataaattatacaattgatgccaaaattgtcggtaaagataaaagaacatctaagttgaatattatgaaagaaaaagaatataacttgagagttatgcccttcccctttgctggtgtcactaatcaacaaaacgagaaaacgtgtttgagacaattgaaaaatttggaaagcttgattgaagatagatttgaagctttgaacaagattttcaagaaattagaattaaatgaggccatttctaatgtagatattcatgacacagatataagcgggactttggacggtaatgaagatttggattccgatgagatattaagacgtaagttggatcaattacacatcaataacaggattgatgataccgccagccaatctccatcctatgactccaaaaatatggctccaaaggaaaacttggtcgagactgagttacgctataagtttaaaaataagaataaatctaatagtagtttattttctcattttttgagttcttctgaaacggggagttcttctactggtccacatgtatataattccggattgattgtattaagtgttaaaaaaccgcaatctacattaccttattggtctccatctttgttgagaaaaaccaacaaatttgaagcaaagagtgaacaagaaaaggaaaactggcaaaggttaatgggcatgcttccagaaggagtgaaaaccccattgaccaagttagatgtacatttgacttgtatccaatctaataatagtgcaggacataagccgccagaaataagctctgtaacgacagaatttgtggtcatcacagcaaagtctgataattctattcctatcaaattctgcactgaattattgatgaatgagaatagattaaacaaattgaagacaaaatttttgacgtatcagaaaaaagttcatgaatatcgtaaaaaatttgaagaaaaccatgcgaagttgaacgagctttataatagaaatagagatcatttcactccaaaagagcttttgttcacaaatttcatatctgatcaaataaacaatgatattgacagtttagctggattaaaagttaacattattgatttacatgatatcttcaaaaagcaaatacatacttttgaagaagaaaacgaggatattatttccaagaaaggaagttccaatcctccttccgcgtcttccagtaataataatttcttacaagcaacatttagcaatggtgcatccaccgctactaagtttactcagcaaattgtgcatgaatgggaaaaagttaagccattacagtataagagggatgttacagttaatttgaagctcaaccccaacattaaagaaacgttagtgcccaatcttgaaacgtgtttgtgttgtagattttattgtgttagagtaaacatcaaatttgataaccacttgggttctatgaaagttgatattccggttgatgtgaaaaagttacaaatttga

SEQ ID NO: 8139 - DNA, 924 bp, Saccharomyces cerevisiae
atgttgatttcttcacggatcgttcgaagctcgctggtaaatgtcccgctaagattatctaggtgttttacgcaagctcacagagcatgcaaagaagaagaagttaatagtcctttatcatccgcagctgaacagccagagcagaagtatacgcattttggttcgaagactgtattgaagtctaccaagcagaagttagttggtgatgtcttttcttccgtggccaatcggtatgacttgatgaatgatgttatgtcattaggaattcatagattgtggaaggaccattttatcaataaactagatgcgggaaaaaggccaaactctacgactcctttgaacttcatagatgtggctgggggatccggtgatattgctttcggattactagaccatgctgagtcgaaatttggtgacactgagtctacaatggatattgtagatatcaaccctgacatgcttaaagaaggtgagaagagagccatggaacaaggaaaatatttcaaggatcctcgtgtgagatttttggtttctaatggtgagaaactagaggagattgattctgattccaaggacatctacacagtctccttcggtatcagaaatttcaccgatattcaaaagggtttaaacactgcttatagagttttgaaaccgggcggtattttttattgtctagaattttccaaaattgagaatcccctaatggactttgcttaccaacagtgggctaaggtcctacctgtaatgggctcgatgattgctaatgactacgactcttaccagtatttggtggagtctatcgaaagatttcctgaccaagaaacgttcaaatccatgattgagaaggcaggattcaaatctgctggctacgaaagtttaacttttggtatatgtgccatccattggggcattaaagtttaa

SEQ ID NO: 8140 - DNA, 924 bp, Artificial Sequence
  Description of Artificial Sequence: Synthetic polynucleotide
atgttgatttcttccagaatcgttaggagcagtttagtaaatgtcccgttaagattatctaggtgttttacgcaagctcacagagcatgcaaagaagaagaagttaatagtcctttatcttccgcagctgaacagccagagcagaagtatacgcattttggttccaagactgtattgaagtctaccaagcagaagttagttggtgatgtcttttcttccgtggccaatagatatgacttgatgaatgatgttatgtctttaggaattcatagattgtggaaggaccattttatcaataaattggatgcgggaaaaaggccaaactctacgactcctttgaacttcatagatgtggctgggggatccggtgatattgctttcggattattagaccatgctgagagtaaatttggtgacactgagtctacaatggatattgtagatatcaaccctgacatgcttaaagaaggtgagaagagagccatggaacaaggaaaatatttcaaggatcctcgtgtgagatttttggtttctaatggtgagaaattagaggagattgattctgattccaaggacatctacacagtctccttcggtatcagaaatttcaccgatattcaaaagggtttaaacactgcttatagagttttgaaaccgggcggtattttttattgtttagaattttccaaaattgagaatcccttgatggactttgcttaccaacagtgggctaaggtcttacctgtaatgggctctatgattgctaatgactacgactcttaccagtatttggtggagtctatcgaaagatttcctgaccaagaaacgttcaaatccatgattgagaaggcaggattcaaatctgctggctacgaaagtttaacttttggtatatgtgccatccattggggcattaaagtttga

SEQ ID NO: 8141 - DNA, 2829 bp, Saccharomyces cerevisiae
atggtactgatggaagatatgcaaaacaaagatggccataatactgtagaaaacagtagtggtggtacggacagtaataataatattcaaatgaggcgaatgaggaagacacagctgtccaagaaggagctttttgagaagaggaaatctgacgtgttaattgctgccaagtctttagatacagaaattcagaatgtgaaaaatttgaagcgattgtcgattggttcaatggatttggtaattgaccctgagctagagttcaaagtgaacagtagaaactcatattcttcagattcctcaaaggaatcccttcaagaatcgctccatgaagagaacattatacgatcagaacaaaaggaagaacaagggagcgaagacaatgatgcatatgaagagggcgatgctactaatgtcgacgacagtatagatatcactcaaacagagtatttgcatgatgaagaaacattggagaaggaaaaaatcatccgtaatgcttcttcatccacttcatcttcagcaagagtaacgtcgaggaacagaaggctcagtggagtaaagacattggctcacgatgttgtattggatgtggagaacgaccacgattcaaaaatggttgatttaactcaaaaccttttgtgggtgcccgctgaccaacatcctaacgttaagcccgaaaactatttggaattgatccaggacactttacaaaacattcaaataagcacaaatcaagacattgatgaaaacaaattagaactgggtaacaatcatgtaatttcgaatagaaaacgcacgggctctgtagttagaaggccttctcggttgaagacatcttataccaagtttgatgacgaacctccccttgcagacaaaccacaagaaggagaaatacaagtggataagcgaatatcctcatctgacatcaaaaccataagatctgtatctttgaaagaaattactgaagagcttactaagatttccaataatgccggtttaacggactcagatgcggtgactttagccagaagcttgagcatgtcagggtcatttaccaacgaaagtcttcatttgaacggcaatcacactgaaaatgataacgaatttgcatcaaatatgtttaatgaaactggacttaccataccagagagatcttctctaaggaggtctaaattcaacacatataagatcagactagagggtagtagccttccacaggcggtaaaactcaatagcctaatgaatatacaaactaatgacaatcgcagaagtgcatcatcgcctgcctcctacacacaagtgcctcaggagcaagcatcattgaatgattttcacgagattttcgaccattacagaagaacaagtactgattggagtaccgaaaatgagaaatacgttgatagcaccaactactattcggatgaagaagatttgacacatgcatctatttctcaagagagcagtcttttatctacagatagttctaacaacagcgttttaataaagccgcataacactggttcgatgatttctgaaaaattggatcagcacgttagctcgagtgaaaaatcaaataccaataacagcgaagcaaatcatggctggtcatggttgaattctagcaatggaagtttgaacgctaatgaacaaacttatcaacagcttacagatgatgaagacgatgaagaatgtgtggacaatgaaaaagctgactttgttaacttgagtgtatcgaggagagcgaaatctaccaaacgtgcctctgaaagaataaaccattccaaaaatagacattcgccaattttccagatacattctgaagaagcaaaatccgtggtaatcactccttcagtcgtttcttcatctgaatcccagccatctaagcctactgcaccggcagtcgtggagaaaaaggtagaactgcctactgacacccaagccagtacacataagaaaaattccttggagaaaaggcttgccaaattattcaaaagaaaacaacataatggtacctgcaaatcagatgtgaaagtaatcaaaaaaagtgttaaaaaagaactgaaaaagaaggcttcgcattcgagtttatcaaaattcaggaaaagtcccaagaaaaagccccaagaagcggaagttgaacgcccttcatcccccaccaaaacaattaccaccgaagatatagatacagcaagcgtcattgaaccagaagtgagaagttcaaatgcttccacccttcttcctgacagccatactagccacagttctgaatttgtggtggaaactataagcgagttagatggcgacgattcatttgatattagtggtggtgatgtaaactacgacgtcgaagtgcactctagtatcagtagagatacgacagctggactagaagaggatataggagcagagagagaagacaacacttcacctactgcccctcaaatctcaactttgcctccaagaaaattgacatttgaagatgtcgttaaaccagattactcaaacgctccaataaaattcacagacagtgcttttggattcccattaccaatgataaccaactctacagtgattatgtttgaccatcgtctaggaattaatgttgaaagggctatttacagactcagccatctgaagcttagcgatcccgggagggaattaagacaacaagtattgctaagtaacttcatgtactcctacttgaatttagtcaatcataccttatacatggagcaggtgggcactggagatatagccttcaatggtgattctgccttgggaatgatggacaaaaatgattctgatggcacaatcttaattccagacatttaa

SEQ ID NO: 8142 - DNA, 2829 bp, Artificial Sequence
  Description of Artificial Sequence: Synthetic polynucleotide
atggtattaatggaagatatgcaaaacaaagatggccataatactgtagaaaacagtagtggtggtacggacagtaataataatattcaaatgaggagaatgaggaagacacagttgtccaagaaggagctttttgagaagaggaaatctgacgtgttaattgctgccaagtctttagatacagaaattcagaatgtgaaaaatttgaagagattgtctattggttctatggatttggtaattgaccctgagttagagttcaaagtgaacagtagaaacagttattcttctgattcctccaaggaatcccttcaagaatctctccatgaagagaacattataagaagtgaacaaaaggaagaacaagggagcgaagacaatgatgcatatgaagagggcgatgctactaatgtcgacgacagtatagatatcactcaaacagagtatttgcatgatgaagaaacattggagaaggaaaaaatcatccgtaatgcttcttcttccacttcttcttctgcaagagtaacgtctaggaacagaaggctcagtggagtaaagacattggctcacgatgttgtattggatgtggagaacgaccacgattctaaaatggttgatttaactcaaaaccttttgtgggtgcccgctgaccaacatcctaacgttaagcccgaaaactatttggaattgatccaggacactttacaaaacattcaaataagcacaaatcaagacattgatgaaaacaaattagaattgggtaacaatcatgtaatttctaatagaaaacgcacgggctctgtagttagaaggccttctagattgaagacatcttataccaagtttgatgacgaacctccccttgcagacaaaccacaagaaggagaaatacaagtggataagagaatatcctcttctgacatcaaaaccataagatctgtatctttgaaagaaattactgaagagcttactaagatttccaataatgccggtttaacggacagtgatgcggtgactttagccagaagcttgagcatgagtgggtcttttaccaacgaaagtcttcatttgaacggcaatcacactgaaaatgataacgaatttgcatctaatatgtttaatgaaactggacttaccataccagagagatcttctttgaggaggtctaaattcaacacatataagatcagattggagggtagtagccttccacaggcggtaaaactcaatagcttgatgaatatacaaactaatgacaatcgcagaagtgcatcttctcctgcctcctacacacaagtgcctcaggagcaagcaagtttgaatgattttcacgagattttcgaccattacagaagaacaagtactgattggagtaccgaaaatgagaaatacgttgatagcaccaactactattctgatgaagaagatttgacacatgcatctatttctcaagagagcagtcttttatctacagatagttctaacaacagcgttttaataaagccgcataacactggttctatgatttctgaaaaattggatcagcacgttagcagtagtgaaaaatctaataccaataacagcgaagcaaatcatggctggtcctggttgaattctagcaatggaagtttgaacgctaatgaacaaacttatcaacagcttacagatgatgaagacgatgaagaatgtgtggacaatgaaaaagctgactttgttaacttgagtgtaagtaggagagcgaaatctaccaaacgtgcctctgaaagaataaaccattccaaaaatagacattctccaattttccagatacattctgaagaagcaaaatccgtggtaatcactccttctgtcgtttcttcttctgaatcccagccatctaagcctactgcaccggcagtcgtggagaaaaaggtagaattacctactgacacccaagccagtacacataagaaaaattccttggagaaaaggcttgccaaattattcaaaagaaaacaacataatggtacctgcaaatctgatgtgaaagtaatcaaaaaaagtgttaaaaaagaattgaaaaagaaggcttctcattctagtttatccaaattcaggaaaagtcccaagaaaaagccccaagaagcggaagttgaacgcccttcttcccccaccaaaacaattaccaccgaagatatagatacagcaagcgtcattgaaccagaagtgagaagtagtaatgcttccacccttcttcctgacagccatactagccacagttctgaatttgtggtggaaactataagcgagttagatggcgacgattcttttgatattagtggtggtgatgtaaactacgacgtcgaagtgcactctagtatcagtagagatacgacagctggattagaagaggatataggagcagagagagaagacaacacttctcctactgcccctcaaatctctactttgcctccaagaaaattgacatttgaagatgtcgttaaaccagattactctaacgctccaataaaattcacagacagtgcttttggattcccattaccaatgataaccaactctacagtgattatgtttgaccatcgtttaggaattaatgttgaaagggctatttacagactcagccatttgaagcttagcgatcccgggagggaattaagacaacaagtattgttaagtaacttcatgtactcctacttgaatttagtcaatcataccttatacatggagcaggtgggcactggagatatagccttcaatggtgattctgccttgggaatgatggacaaaaatgattctgatggcacaatcttaattccagacatttga

SEQ ID NO: 8143 - DNA, 318 bp, Saccharomyces cerevisiae
atgtccaagagtaatacttataggatgctcgtcttactagaagacgacaccaagataaataaagaagatgaaaaatttttgaaaggtaagccgggaaaaatgcatgaatttgttgacgagttgatacttccatttaatgttgacgaactggacgaattaaatacctggtttgataagttcgatgccgaaatatgtataccgaacgaaggtcatatcaaatacgaaattagtagcgatggtttaattgtacttatgctagataaggaaattgaagaggttgtcgaaaaagtaaagaaatttgtcgaagagaataactga

SEQ ID NO: 8144 - DNA, 318 bp, Artificial Sequence
  Description of Artificial Sequence: Synthetic polynucleotide
atgtccaagagtaatacttataggatgctcgtcttattggaagacgacaccaagataaataaagaagatgaaaaatttttgaaaggtaagccgggaaaaatgcatgaatttgttgacgagttgatacttccatttaatgttgacgaattagacgaattaaatacctggtttgataagttcgatgccgaaatatgtataccgaacgaaggtcatatcaaatacgaaattagtagcgatggtttaattgtacttatgcttgataaggaaattgaagaggttgtcgaaaaagtaaagaaatttgtcgaagagaataactga

SEQ ID NO: 8145 - DNA, 1005 bp, Saccharomyces cerevisiae
atggaaaaggacgcattggaggttagactgaagtctattagacattcgctggacaagaataccaaacttttaccgggaaaatataggaatactctaggagagcgacttattaccaaatggaggtacaagaagaaatcccataatggcagttcaatgttgcctgaaaaatgtaagagccacgtgcaattgtatgatgatttggtacaagaaagctctaaacattttgttggtttccgattacacgatcttcgggccttgttgaaaagaatatgctccattcaaaactacacaaggcatgtgctcattgaatgggacgttcgatgggtcaatccactgactctagcatccaagggctgggagccgtaccaaagtgcatcccagtcgcaagtgccatttaagtgctgttgttgccatgccattatgacaattcctttattaaaaaatggcgatgatgtcgccgattacaccatgaaattgaatgaaaaaatctggaattccaatataattggaaatcatctccaaaagtgtccgtggagggaaaatcaggttgatttaaacaaagagtattatttaagctcacaaaaccttataagggaaattgaaagaattcatacagaaattgacagaattgtttccggatcaaatgaatttagccttaaaagaaactcttcccgtatatttcattacttgtctgagaaagaaatacaaaaattggcattttttttcgattgtaaagactattctctcgtaggtctgttgcttctcggctacacgaaattccagaaggatgatctggttcaatgcacggcttgctttcatcgagcatccctgaagaagttagaatatacagaatttaacggacacgctctatggtgtcggtattacaacaaagagttgttgcccacaatgttgctggagttaatcggcaaggaggacaaactaataacgaaattgggcgtgggagaaagactaaataaattagaggctgttctacaaactttataa

SEQ ID NO: 8146 - DNA, 1005 bp, Artificial Sequence
  Description of Artificial Sequence: Synthetic polynucleotide
atggaaaaggacgcattggaggttagattaaagtctattagacattctttggacaagaataccaaacttttaccgggaaaatataggaatactttgggagagaggcttattaccaaatggaggtacaagaagaaatcccataatggcagttctatgttgcctgaaaaatgtaagagccacgtgcaattgtatgatgatttggtacaagaaagctctaaacattttgttggtttcagattacacgatcttcgtgccttgttgaaaagaatatgctccattcaaaactacacaaggcatgtgctcattgaatgggacgttcgttgggtcaatccattgactttggcatccaagggctgggagccgtaccaaagtgcatcccagtctcaagtgccatttaagtgctgttgttgccatgccattatgacaattcctttattaaaaaatggcgatgatgtcgccgattacaccatgaaattgaatgaaaaaatctggaattccaatataattggaaatcatctccaaaagtgtccgtggagggaaaatcaggttgatttaaacaaagagtattatttaagctctcaaaaccttataagggaaattgaaagaattcatacagaaattgacagaattgtttccggaagtaatgaatttagccttaaaagaaactcttcccgtatatttcattacttgtctgagaaagaaatacaaaaattggcattttttttcgattgtaaagactattctctcgtaggtttattgcttctcggctacacgaaattccagaaggatgatttggttcaatgcacggcttgctttcatagagcatccttgaagaagttagaatatacagaatttaacggacacgctttatggtgtagatattacaacaaagagttgttgcccacaatgttgttggagttaatcggcaaggaggacaaattgataacgaaattgggcgtgggagaaagattgaataaattagaggctgttttgcaaactttatga

SEQ ID NO: 8147 - DNA, 681 bp, Saccharomyces cerevisiae
atgcctattatgttggaagactaccaaaagaactttctagagttggccatcgaatgccaggctctaagatttggttcattcaagttgaaatcaggtagagaatcgccatatttctttaatttgggattgttcaatactggtaaattgctttccaatttggctactgcgtatgcaattgccatcatacaatctgatttgaaatttgatgtgattttcggtcctgcctacaaaggtatcccacttgctgctattgtttgtgtgaaattggcggagattggtggctctaaatttcaaaacattcagtacgcttttaacagaaaggaagccaaagatcatggtgaaggtggtatcattgtcggctctgccctagagaacaagagaatattaatcatcgacgacgtcatgactgctggtactgccattaacgaggcctttgagatcatcagtaacgccaagggtcaggtagttggctccataattgctcttgatagacaggaagttgtgagtactgacgataaagaaggactcagcgccactcaaactgttagcaaaaaatacggtatcccagtcttgagcattgtctccttaattcacataattacctatttggaaggcagaataacagcagaagagaaaagcaagatcgaacaataccttcaaacctacggtgcctccgcttaa

SEQ ID NO: 8148 - DNA, 681 bp, Artificial Sequence
  Description of Artificial Sequence: Synthetic polynucleotide
atgcctattatgttggaagactaccaaaagaactttttggagttggccatcgaatgccaggctttgagatttggttctttcaagttgaaatctggtagagaatctccatatttctttaatttgggattgttcaatactggtaaattgctttccaatttggctactgcgtatgcaattgccatcatacaatctgatttgaaatttgatgtgattttcggtcctgcctacaaaggtatcccacttgctgctattgtttgtgtgaaattggcggagattggtggctctaaatttcaaaacattcagtacgcttttaacagaaaggaagccaaagatcatggtgaaggtggtatcattgtcggctctgccttagagaacaagagaatattaatcatcgacgacgtcatgactgctggtactgccattaacgaggcctttgagatcatcagtaacgccaagggtcaggtagttggctccataattgctcttgatagacaggaagttgtgagtactgacgataaagaaggactcagcgccactcaaactgttagcaaaaaatacggtatcccagtcttgagcattgtctccttaattcacataattacctatttggaaggcagaataacagcagaagagaaaagcaagatcgaacaataccttcaaacctacggtgcctccgcttga

SEQ ID NO: 8149 - DNA, 822 bp, Saccharomyces cerevisiae
atgcctagattagaagagattgacgatttcaatgatatcgacgaccttgatatggaattggccgagttagatccatctttgaggacgccgatcgctcccaagataacgcctaaggttgtaaggagccaggaccaagagaaccctgcatttttacctggcacgaataacaacagtaatagcaacaacaatagtagcaacgaaaaagagcagttgagttttattaacccaaaaactggtaaggttgaacgttcggaggctatttcgaagaaagatttagaagaagtcaaaagattccaagtactctatccatgttactttgacataaacagatcacataaggaagggagaagggttcctaaggagttggctgttgaaaatcctttggctaaaactatggcagatgctgtccgtgaattgggaatattatgcatttttgaaggtgaaaaatgtcacccacaagattttggtaatcctggtagaattcgtgtacttttcaaagaaaatggacaattaattggcgcagccactaaattcaaaggtggaaagaggcaattaatgaaagctgttggggagtatatgaaaagacatccaactactattgaatctttaagggagattccatatggccctgatttcgacaatattgaattcaaaaagattccacgtgtaaagggattcaaaatgaatgagattgttccgctgcatagtccgttcttgatgggccacccaatgacaaaatctgtttacgaaactcctaagattacagcggcagaaaagtcgttcaagccaccaaaaaataagtacaaagtagttagaagatga

SEQ ID NO: 8150 - DNA, 822 bp, Artificial Sequence
  Description of Artificial Sequence: Synthetic polynucleotide
atgcctagattagaagagattgacgatttcaatgatatcgacgaccttgatatggaattggccgagttagatccatctttgaggacgccgatcgctcccaagataacgcctaaggttgtaaggagccaggaccaagagaaccctgcatttttacctggcacgaataacaacagtaatagcaacaacaatagtagcaacgaaaaagagcagttgagttttattaacccaaaaactggtaaggttgaacgtagtgaggctatttccaagaaagatttagaagaagtcaaaagattccaagtactctatccatgttactttgacataaacagaagccataaggaagggagaagggttcctaaggagttggctgttgaaaatcctttggctaaaactatggcagatgctgtccgtgaattgggaatattatgcatttttgaaggtgaaaaatgtcacccacaagattttggtaatcctggtagaattcgtgtacttttcaaagaaaatggacaattaattggcgcagccactaaattcaaaggtggaaagaggcaattaatgaaagctgttggggagtatatgaaaagacatccaactactattgaatctttaagggagattccatatggccctgatttcgacaatattgaattcaaaaagattccacgtgtaaagggattcaaaatgaatgagattgttccgcttcatagtccgttcttgatgggccacccaatgacaaaatctgtttacgaaactcctaagattacagcggcagaaaagagtttcaagccaccaaaaaataagtacaaagtagttagaagatga

SEQ ID NO: 8151 - DNA, 3384 bp, Saccharomyces cerevisiae
atgcctaagtttccacagtttcgattgattttagttttgttttacttaatatcaatgatacaatggtcggtaatcactttttcgctggggttctttcttaatgtctgcatctttgcgtacttcgtattcttcaaatccttgcctgatttaccgaaacctcagccaagatttgttgatatcgtaccggaaagttcgaatactgtggatgttgataaagaattgaagtctgtcgagggtttaatacaagatgggaacgcgcaaattgggaaagaattagagagtattgttaatttaattattaaagattttgttcagccttggttcacaaaaatcgataagaatagtgacgcagagttcctcaaagtaataaagtggagattattacaaacgctcctagtggtgaaggacaagttgatgaagaatgatagtgccagcttgattgttctgaagctgttgcctatatttaacaaacatttcagcactttttgtgatgccagagaagctgtgctaagcgatttgactcttgaaaggcataaatcagccaacatcgatctacaaattgccgttgagtttaataaaaattacaaaatacataaatcattatcattgaagccgaatgctcttcagaaagaaattgaaaaatccataaggaaaactgtaatcgggctccttcctcacctttttgataatgatgagttagattcattgcttgttttcacattaatgacggaagttctcactacgtgcattatttctccattaattttcaaatttactgatccagatagttggaatttaagaattgtaagcctttcacaaaattatttcgaggaaaagcacaaagttcacaagataagaagaatgttgagtaaagagttacaagatcatagaaaagtgatgaatgacgtagcgaacaaagatgttggagaaccctcaagtgaaaaattggagcttaatgctgaatatactggaaaacaattcgagcattatctcaaccagttggactccttgttggatttaagtgatatcaaatatgttgcgtattcattggccctcaaaatataccaattgaaagaaaatgaacatttgaccaaggaaaatttgaagtataagaaacgattactgctttccttaaatttgattgaatcaaagttatcgttccctggctcggaaattgatacggcaagcaaaaagcttgcaagagaggctaattatcccgatttaaatatggataatggaatagtattgaaggaaatggcttcatttcttacctccatcacattgaaggacattgtagacgatagcgagtttcttcctttttttgaatcatttttaggcagtgttcctgaaacacagggttcaacatttttagagtattcgcaaacaattgaatcattcaaaaatcccttggaagatgctacatctgaagatataatttctggttattcaggaattagcacaatgcaactgcaagagatttcttcaaagttttttcataacaataacttgcaaaatatgaaattgctggatgaaggtttagtgaaaaatataatacttttcagaaattcatttcaaatcaacaacgatgaagacacatttatcctagctcggaaaagcgttttactactacagacagaggctataaagtatctcgatgatagatttttacctcttttcaagaaaacaccttcatttctcaaaatgctttcaacgtcccacatcatttcgactgatatatatgctcactttctgagtagaatcggtggtgttaacaatccagaacaaaacaaaataataaaagataatgtgaagactgattttatgaatcctgtcagaatattcgcaaaccccggcatcacagatgctttagataatatagtgaatggatcgggatccaagccgcataaatcaagaataagctcaaatccccgttattctcagctctttggttcagaaaatgacaacattttcaaagataaactcttcgacgatgaaaacgataatacctcagaaatttctgttgtcgaggatcagttggatcacccacgtaatatggagaaagtaagtgtttccagcgggaattcaggcctaaatcctagccaattttatgggtcaaacaactttagggataatatagcatccttgactatttcaattgatcagattgagaaagagcttgaacttttaaggcatttgattttgaaggcagatctgaccaacaatcaaatgcagttgaaaattttaaaaaagtcacaaagaaccctattaaaggaactagaaatgaaggaactgttgaaacagcaatatatggtacaagaaaatggtaatagtttgttcagaaaaactaagatatacattaggtcgtacttcagtgagaattctagtaatggcctaaaagaaataacttattatatcatcaatatccatcattttaacaatgggcaggtaagttcttgggatatggcaaggagatataatgaattttttgaattaaatacatatttgaaaaagaattttagggatctgatgaggcagttgcaagatttgttcccgtcaaaagtgaaaatgtcattgaaatatcatgttacaaaaacattgctttatgaggaacgaaagcaaaaacttgaaaagtacttgcgagaactattatctatttctgaaatatgcgaagataacattttcagaagatttttgacagatcctaccccattcaaactgaacaaggaatatatgcatgatgatattctggaggagccacttcatgaacctattggtagtagtaatagcacaagtaatagcagttctgttgttgatttacaaagctctgaagacggcggtgaattgaatttctatgaagatgaaagacattttttcaccgattctggctatcctttttattcgcaaaataaatcttttgttaaacagatatgtgacttatttatttcgctctttgctttaaataaggccaacgcgggttggttaagaggaagggctataattaccgttttacaacagcttcttgggagcactattgaaaagtatataaaggtcagcattcaaaaattgagatcagaggatcaagtatttgaagcaatagttacattcaagaatatgctatggggtgataacggtctgttcgaaagaaaaagaaatgaaacggcagaggcaacaagaagcgaaggtgaaaggttacggacggaacaactcgctttaaccagtttgcaaagactcttcgcagacacttgtggtcgtgtagttggtctaagagattctcatgaagctgctggccgggtccatgccatgctacagaatccgtatttaaatgccagcttactgttggaagctcttgatgcaattttattggacataatatgtaatgactga

SEQ ID NO: 8152 - DNA, 3384 bp, Artificial Sequence
  Description of Artificial Sequence: Synthetic polynucleotide
atgcctaagtttccacagtttagattgattttagttttgttttacttaatatccatgatacaatggtctgtaatcactttttctttagggttctttcttaatgtctgcatctttgcgtacttcgtattcttcaaatccttgcctgatttaccgaaacctcagccaagatttgttgatatcgtaccggaaagtagtaatactgtggatgttgataaagaattgaagtctgtcgagggtttaatacaagatgggaacgcgcaaattgggaaagaattagagagtattgttaatttaattattaaagattttgttcagccttggttcacaaaaatcgataagaatagtgacgcagagttcctcaaagtaataaagtggagattattacaaacgctcttggtggtgaaggacaagttgatgaagaatgatagtgccagcttgattgttttgaagttgttgcctatatttaacaaacatttcagcactttttgtgatgccagagaagctgtgttgagcgatttgactcttgaaaggcataaaagtgccaacatcgatttgcaaattgccgttgagtttaataaaaattacaaaatacataaatctttatctttgaagccgaatgctcttcagaaagaaattgaaaaatccataaggaaaactgtaatcgggctccttcctcacctttttgataatgatgagttagattctttgcttgttttcacattaatgacggaagttctcactacgtgcattatttctccattaattttcaaatttactgatccagatagttggaatttaagaattgtaagcctttctcaaaattatttcgaggaaaagcacaaagttcacaagataagaagaatgttgagtaaagagttacaagatcatagaaaagtgatgaatgacgtagcgaacaaagatgttggagaacccagtagtgaaaaattggagcttaatgctgaatatactggaaaacaattcgagcattatctcaaccagttggactccttgttggatttaagtgatatcaaatatgttgcgtattctttggccctcaaaatataccaattgaaagaaaatgaacatttgaccaaggaaaatttgaagtataagaaaagattattactttccttaaatttgattgaatccaagttatctttccctggctctgaaattgatacggcaagcaaaaagcttgcaagagaggctaattatcccgatttaaatatggataatggaatagtattgaaggaaatggcttcttttcttacctccatcacattgaaggacattgtagacgatagcgagtttcttcctttttttgaaagttttttaggcagtgttcctgaaacacagggttctacatttttagagtattctcaaacaattgaatctttcaaaaatcccttggaagatgctacatctgaagatataatttctggttattctggaattagcacaatgcaattacaagagatttcttccaagttttttcataacaataacttgcaaaatatgaaattgttggatgaaggtttagtgaaaaatataatacttttcagaaattcttttcaaatcaacaacgatgaagacacatttatcttggctagaaaaagcgttttattattgcagacagaggctataaagtatctcgatgatagatttttacctcttttcaagaaaacaccttcttttctcaaaatgctttctacgtcccacatcatttctactgatatatatgctcactttttgagtagaatcggtggtgttaacaatccagaacaaaacaaaataataaaagataatgtgaagactgattttatgaatcctgtcagaatattcgcaaaccccggcatcacagatgctttagataatatagtgaatggatctggatccaagccgcataaatctagaataagcagtaatccccgttattctcagctctttggttctgaaaatgacaacattttcaaagataaactcttcgacgatgaaaacgataataccagtgaaatttctgttgtcgaggatcagttggatcacccacgtaatatggagaaagtaagtgtttccagcgggaatagtggcttgaatcctagccaattttatgggtctaacaactttagggataatatagcatccttgactatttccattgatcagattgagaaagagcttgaacttttaaggcatttgattttgaaggcagatttgaccaacaatcaaatgcagttgaaaattttaaaaaagtctcaaagaaccttattaaaggaattggaaatgaaggaattattgaaacagcaatatatggtacaagaaaatggtaatagtttgttcagaaaaactaagatatacattaggtcttacttcagtgagaattctagtaatggcttgaaagaaataacttattatatcatcaatatccatcattttaacaatgggcaggtaagttcttgggatatggcaaggagatataatgaattttttgaattaaatacatatttgaaaaagaattttagggatttgatgaggcagttgcaagatttgttcccgtccaaagtgaaaatgtctttgaaatatcatgttacaaaaacattgctttatgaggaaagaaagcaaaaacttgaaaagtacttgagagaattattatctatttctgaaatatgcgaagataacattttcagaagatttttgacagatcctaccccattcaaattgaacaaggaatatatgcatgatgatattttagaggagccacttcatgaacctattggtagtagtaatagcacaagtaatagcagttctgttgttgatttacaaagctctgaagacggcggtgaattgaatttctatgaagatgaaagacattttttcaccgattctggctatcctttttattctcaaaataaatcttttgttaaacagatatgtgacttatttatttctctctttgctttaaataaggccaacgcgggttggttaagaggaagggctataattaccgttttacaacagcttcttgggagcactattgaaaagtatataaaggtcagcattcaaaaattgagaagtgaggatcaagtatttgaagcaatagttacattcaagaatatgttatggggtgataacggtcttttcgaaagaaaaagaaatgaaacggcagaggcaacaagaagcgaaggtgaaaggttaagaacggaacaactcgctttaaccagtttgcaaagactcttcgcagacacttgtggtcgtgtagttggtttaagagattctcatgaagctgctggcagagtccatgccatgttacagaatccgtatttaaatgccagcttattattggaagctcttgatgcaattttattggacataatatgtaatgactga

SEQ ID NO: 8153 - DNA, 4968 bp, Saccharomyces cerevisiae
atggctacaccttcatttggcaattcctctccacaattgaccttcactcatgttgctaattttatgaacgatgctgctgctgatgtatccgctgtggatgccaagcaattggcccaaataagacagtttttgaaagctaacaagacaaatcttatcgagagtctgaacacaataaggcagaatgtaacttcttccggcgatcataacaagttacgctctacaattgcaaacttattgcaaataaacgtcgataatgatccattctttgctcaatctgaggacctttctcatgctgtagaattctttatgtctgagagatcatctagacttcatatagtatactcacttctcgttaaccctgacatcgacctcgagacatattcatttattgacaacgatagattcaatgtagtggggaaattgatttctataatatcatctgtaatccagaactacgacattattacagcttcatctttagcacatgattataataacgatcaagacatgttcacaattgtctcattggtgcagttaaaaaaattttctgatttgaagtttatcttgcagatattacaaattttgaatttaatgatcctcaacacaaaagtaccagtagatatcgtcaatcaatggtttctacagtatcaaaatcaatttgttgaattttgcagaaatataaattcaacagacaagagtatagatacctcgtcactacaattgtacaagtttcagaatttccaagacctcagttacctctcagaaacgcttatttccaggatttcatctttatttactatcacaactatattgatacttggactgaacacttcaatcgcgcaatttgatattcagtcacctttgtacatggatacagaaactttcgacaccgtcaatagcgctctagagaatgatgtagcaaccaatatcgtcaacgaggaccccattttccatccaatgattcattactcctggtcatttatactttattataggcgagcattacaatcgtcggaatcatttgatgattcagacataacgaaatttgctctgtttgctgaatcacatgatgttcttcaaaaattgaatactctctcagaaattctatcctttgatcctgtttacaccacagtaataacagtatttttggagttttctttaaattttattcctataactgcatctacttcccgggttttcgccaagataatttcaaaggcaccagagcagttcattgagaatttcttaactaatgacacttttgagaaaaaattgagcatcataaaggctaaattgcccctattgaacgaatcactgatcccgctaattaatttagccttaattgataccgagtttgccaattttgaattaaaagatatatgttcatttgctgttaccaaaagtagtttgaacgatttggattatgacttaattgctgatacaataacaaactcttcttcatcctccgatattatagtgcctgatttgatagagttgaagtctgatttactagtggcgccacccttagaaaacgaaaactctaattgtctcttgtcaataccaaaatcaacaaagggaaaaattcttactatcaaacaacaacaacaacaacaacaacaacagaatggacaacagccgccaactacttccaatttgattattttcctttacaaattcaatggttggtctttggtgggtagaatattgcaaaatctattacattcatatatggaaaagggtacacaactggatgacttacaacatgaattgatgatatccataataaagttagtcactaacgttgtcgatccgaaaacctcgatcgagaaatctagtgaaattctgtcatatttatcaaattctctggatacttcagccagcaccataaatggagcgtcgattatccaagtaattttcgagatttttgaaatatcactacaaagaaaagattatacctcaattgtacaatgttgtgaatttatgactatgctgacaccgaattaccttcatcttgtttcttcttacttgaacaaatcggatttgttagacaaatatggtaagactggtctttccaatatgatactcggttcggttgaattatctacgggggattacacattcactatccaattgcttaagctaacaaaagtctttattcgagaatctctctcattgaaaaatatccatatttccaagagaagtaaaattgatattattaataagttgattctacatgcaattcatatctttgagagttattacaactggaagtacaacaacttcttacaaaaattcgaaattgccttccatttgacattaattttttatgatgtacttcatgacgttttcaccataaatccacatcaaaaggatcagttaatcatttcctcgtcagcaaacaaattgttgcagttatttttgactcccatggattccattgatttggctccaaatactttgacgaatattctgatttcaccattgaataccacaacaaaaattttaggcgacaaaattttgggtaatttatatagcaaggtaatgaataactccttcaagctgtgcacgcttttgatcgctattcgaggtagcaatcgtgatttaaagccaagcaacctggaaaaattgcttttcataaattcatcaaaattggttgacgtttataccctaccaagttatgttcatttcaaagtgcagatcatagagttgttaagctatttagtagaggctccttggaatgacgactatccatttctgttatctttccttggtgaagcaaagtcaatggcatttttgaaagaagtcctgtcggacctgagctctccagtgcaagattggaaccttctccgaagtttgtacattttttttactaccctattagaaagtaaacaagatgggttatctatcctcttcttaacaggtcaatttgcctccaataaaaaaattaatgacgaatcctccatagacaaaaagagttctatattaactgttttgcaaaagaattctttactattagattcaacgcctgaagaagtaagttgcaagttattagaaacgataacatatgttttaaacacttggacaaattctaaaatattcataaaagatcctaaatttgtgaattccttattggctaagttgaaggactcaaaaaaattatttcagaaaaaggaaaatttgactcgtgacgaaactgtttctttgattaagaaatacaaattgatctcaaggattgtagaaatatttgcgttgtgtatttacaactccactgattcaaactcggaaattttaaattttttgaatcaggaagacttgtttgaattagttcatcatttcttccaaattgatgggttcaataaaacttttcatgatgaattaaacttaaaatttaaagagaaatggcccagtttagagcttcagtcgttccaaaaaattccattatccagaataaacgaaaatgagaatttcggttatgatattccgttattagatatagttttaaaagctgaccgtagttggaacgaaccaagtaagagtcagacaaattttaaggaggaaataacagacgcttcattaaatttgcagtatgtcaattacgaaatatctaccgcaaaagcatggggcgcactaatcaccacgtttgtgaagaggagcactgttccgttaaatgatggttttgtcgacttggtagagcatttcctcaagttaaatattgattttggttcagataaacaaatgtttacccaaatatatctggaaagaattgagttgtcgttttacattttatattcgttcaagttgtcgggaaaattgttgaaggaagaaaagataattgaattgatgaacaagatttttacaattttcaaatctggtgagattgactttattaaaaatattggtaagtcactaaaaaataacttttatagacctcttttgagatctgtcttagttcttctcgagttagtctcgtcaggagatcgttttatcgaattaatatctgatcaactactggaattttttgaattagtgtttagtaagggtgtttatttgatactgtctgagatattatgtcagatcaataaatgctccacgaggggtttaagcaccgatcacaccacccaaattgtcaacttggaggataatactcaggatttattgttattattatcactcttcaagaagatcaccaatgtgaatccctctaaaaacttcaatgttattctagcatcatccctaaacgaagtaggaactttgaaagttatactgaacctatattcaagcgcgcatttgataaggattaacgatgaaccaattcttgggcaaattactctgacctttatctccgaattgtgttctattgagccaattgctgcaaaactcatcaacagtggattgtatagcgttctattggaaagtccactatctgttgcaatacagcaaggtgatataaaacctgaattttcgcctagattgcacaacatttggagcaatggtttgttatccattgttctactactattaagtcagttcggtatcaaggttttacctgagacgtgcctatttgtttcatattttggaaaacaaataaaatctacaatatataactggggtgacaacaagttagcagtgtcaagttcgttgataaaggaaacgaatcaattggttttattgcaaaaaatgctaaacttgctaaattaccaagaattgtttattcagcctaaaaactctgatgatcaacaagaagctgtagaattggttattggtctagattctgaacatgataaaaaaaggttaagcgctgcattaagcaagtttctaacacatccaaaatacttgaattcaagaataatacctacaactttagaagagcaacagcagttggaggatgaatcaagcagattggagttcgtcaagggtatcagcagagacattaaagcattacaagattcactatttaaggacgtttaa

SEQ ID NO: 8154 - DNA, 4968 bp, Artificial Sequence
  Description of Artificial Sequence: Synthetic polynucleotide
atggctacaccttcttttggcaattcctctccacaattgaccttcactcatgttgctaattttatgaacgatgctgctgctgatgtatccgctgtggatgccaagcaattggcccaaataagacagtttttgaaagctaacaagacaaatcttatcgagagtttgaacacaataaggcagaatgtaacttcttccggcgatcataacaagttacgctctacaattgcaaacttattgcaaataaacgtcgataatgatccattctttgctcaatctgaggacctttctcatgctgtagaattctttatgtctgagagatcttctagacttcatatagtatactctcttctcgttaaccctgacatcgacctcgagacatattcttttattgacaacgatagattcaatgtagtggggaaattgatttctataatatcttctgtaatccagaactacgacattattacagcttcttctttagcacatgattataataacgatcaagacatgttcacaattgtctctttggtgcagttaaaaaaattttctgatttgaagtttatcttgcagatattacaaattttgaatttaatgatcctcaacacaaaagtaccagtagatatcgtcaatcaatggtttttgcagtatcaaaatcaatttgttgaattttgcagaaatataaattctacagacaagagtatagatacctcttctttacaattgtacaagtttcagaatttccaagacctcagttacctctctgaaacgcttatttccaggatttcttctttatttactatcacaactatattgatacttggattgaacacttctatcgcgcaatttgatattcagtctcctttgtacatggatacagaaactttcgacaccgtcaatagcgctttggagaatgatgtagcaaccaatatcgtcaacgaggaccccattttccatccaatgattcattactcctggtcttttatactttattataggagagcattacaatcttctgaaagttttgatgattctgacataacgaaatttgctttgtttgctgaaagtcatgatgttcttcaaaaattgaatactctctctgaaattttatcctttgatcctgtttacaccacagtaataacagtatttttggagttttctttaaattttattcctataactgcatctacttccagagttttcgccaagataatttccaaggcaccagagcagttcattgagaatttcttaactaatgacacttttgagaaaaaattgagcatcataaaggctaaattgcccttattgaacgaatctttgatcccgttgattaatttagccttaattgataccgagtttgccaattttgaattaaaagatatatgttcctttgctgttaccaaaagtagtttgaacgatttggattatgacttaattgctgatacaataacaaactcttcttcttcctccgatattatagtgcctgatttgatagagttgaagtctgatttattggtggcgccacccttagaaaacgaaaactctaattgtctcttgagcataccaaaatctacaaagggaaaaattcttactatcaaacaacaacaacaacaacaacaacaacagaatggacaacagccgccaactacttccaatttgattattttcctttacaaattcaatggttggtctttggtgggtagaatattgcaaaatttattacattcttatatggaaaagggtacacaattggatgacttacaacatgaattgatgatatccataataaagttagtcactaacgttgtcgatccgaaaacctctatcgagaaatctagtgaaattttatcttatttatccaattctttagatacttctgccagcaccataaatggagcgtccattatccaagtaattttcgagatttttgaaatatctttacaaagaaaagattatacctctattgtacaatgttgtgaatttatgactatgttaacaccgaattaccttcatcttgtttcttcttacttgaacaaatctgatttgttagacaaatatggtaagactggtctttccaatatgatactcggttctgttgaattatctacgggggattacacattcactatccaattgcttaagttaacaaaagtctttattagagaatctctctctttgaaaaatatccatatttccaagagaagtaaaattgatattattaataagttgattttgcatgcaattcatatctttgagagttattacaactggaagtacaacaacttcttacaaaaattcgaaattgccttccatttgacattaattttttatgatgtacttcatgacgttttcaccataaatccacatcaaaaggatcagttaatcatttcctcttctgcaaacaaattgttgcagttatttttgactcccatggattccattgatttggctccaaatactttgacgaatattttaatttctccattgaataccacaacaaaaattttaggcgacaaaattttgggtaatttatatagcaaggtaatgaataactccttcaagttgtgcacgcttttgatcgctattagaggtagcaatcgtgatttaaagccaagcaacttggaaaaattgcttttcataaattcttctaaattggttgacgtttataccttgccaagttatgttcatttcaaagtgcagatcatagagttgttaagctatttagtagaggctccttggaatgacgactatccatttttattatctttccttggtgaagcaaagtctatggcatttttgaaagaagtcctttctgacttgagctctccagtgcaagattggaaccttctcagaagtttgtacattttttttactaccttattagaaagtaaacaagatgggttatctatcctcttcttaacaggtcaatttgcctccaataaaaaaattaatgacgaatcctccatagacaaaaagagttctatattaactgttttgcaaaagaattctttattattagattctacgcctgaagaagtaagttgcaagttattagaaacgataacatatgttttaaacacttggacaaattctaaaatattcataaaagatcctaaatttgtgaattccttattggctaagttgaaggactctaaaaaattatttcagaaaaaggaaaatttgactcgtgacgaaactgtttctttgattaagaaatacaaattgatctccaggattgtagaaatatttgcgttgtgtatttacaactccactgattccaactctgaaattttaaattttttgaatcaggaagacttgtttgaattagttcatcatttcttccaaattgatgggttcaataaaacttttcatgatgaattaaacttaaaatttaaagagaaatggcccagtttagagcttcagtctttccaaaaaattccattatccagaataaacgaaaatgagaatttcggttatgatattccgttattagatatagttttaaaagctgaccgtagttggaacgaaccaagtaagagtcagacaaattttaaggaggaaataacagacgcttctttaaatttgcagtatgtcaattacgaaatatctaccgcaaaagcatggggcgcattaatcaccacgtttgtgaagaggagcactgttccgttaaatgatggttttgtcgacttggtagagcatttcctcaagttaaatattgattttggttctgataaacaaatgtttacccaaatatatttggaaagaattgagttgagtttttacattttatattctttcaagttgagtggaaaattgttgaaggaagaaaagataattgaattgatgaacaagatttttacaattttcaaatctggtgagattgactttattaaaaatattggtaagtctttgaaaaataacttttatagacctcttttgagatctgtcttagttcttctcgagttagtcagtagtggagatcgttttatcgaattaatatctgatcaattattggaattttttgaattagtgtttagtaagggtgtttatttgatattatctgagatattatgtcagatcaataaatgctccacgaggggtttaagcaccgatcacaccacccaaattgtcaacttggaggataatactcaggatttattgttattattatctctcttcaagaagatcaccaatgtgaatccctctaaaaacttcaatgttattttggcatcttccttgaacgaagtaggaactttgaaagttatattaaacttatattctagcgcgcatttgataaggattaacgatgaaccaattcttgggcaaattactttgacctttatctccgaattgtgttctattgagccaattgctgcaaaactcatcaacagtggattgtatagcgttttattggaaagtccattatctgttgcaatacagcaaggtgatataaaacctgaattttctcctagattgcacaacatttggagcaatggtttgttatccattgttttgttattattaagtcagttcggtatcaaggttttacctgagacgtgcttatttgtttcttattttggaaaacaaataaaatctacaatatataactggggtgacaacaagttagcagtgtccagttctttgataaaggaaacgaatcaattggttttattgcaaaaaatgttgaacttgttgaattaccaagaattgtttattcagcctaaaaactctgatgatcaacaagaagctgtagaattggttattggtttggattctgaacatgataaaaaaaggttaagcgctgcattaagcaagtttttaacacatccaaaatacttgaattctagaataatacctacaactttagaagagcaacagcagttggaggatgaaagtagcagattggagttcgtcaagggtatcagcagagacattaaagcattacaagattctttatttaaggacgtttga

SEQ ID NO: 8155 - DNA, 1407 bp, Saccharomyces cerevisiae
atggaagcttcacatttgcaaatctactggcatgattcacaacccgtttactcgctcacattccaaaagaacagtgcgaacgacaagcttttcaccgctggtggtgataacaaggttaggatatggaagttgaacagagatgaaaacggacaaaatgggggggtgcgtaagattgaaagccttgactttcttggctcgctgacgcatcacgaacaggccataaatgtaatccgattcaactcgaagggtgacgtactggcgtctgcgggcgatgacggccaagtgctgctatggaagcaagaagatccaaatacacagcaagaatctgtggtcagaccattcggaatggatgcggagactagtgaagcagacgagaacaaggagaaatgggttgtgtggaaacggctgcgtggtggtagcggtgctactgcggcggcagagatttacgatctagcgtggtcacctgataacaggaacatagtggtggcatgtatggacaattcgatacgactgttcgatgttggagctgggatgctggtatgcggccagtcggatcatggtcactacgtccaaggtgttgcatgggacccattaaatcagtttattctctcacagtctgcggaccggtctctgcatgtatatggagtcattctttcatctgcaggagtggttacagggctgaaacttagaagtaagattgccaaggcagaactgccttgtccaggtgatgtcctgaggacaaattacctttttcacaacgagacgctaccttcattctttaggcgatgcagcatatcgccttgtggtggtttggtcgtaattcccagtggtgtgtataaggtggctggtgatgaagtcgcgaactgcgtatacgtgtatactagatctggaatactgaacagcgctggtggcgttaaaaaccggcctgcgattagaatcccatctttgaagaaaccagcgctgatggcggctttctcgcccgtattttacgaaacgtgccagaagagtgtgcttaagctgccctataagctagtatttgccatagcaacgactaacgaagtactcgtgtacgacacggatgtattggagccgttatgcgttgtgggaaatatacattactcacccataactgatttagcatggtctgaggatggctcgaccctactaatctcatcaacagacggattctgttcgtatgtatcgatcgacacagaaacgcaattcggttcaaggatagagccgccagcgatgcatgcagagccactagacactgacgagagcgcggtagcggctaagaaccagcgcgaggcaggtgggatcgtgaacatgctgccggtgaagaagatcccctgcaatagtagcgatagtaaaaagaggcgcatacatcctacgccagtcgatttgtga

SEQ ID NO: 8156 - DNA, 1407 bp, Artificial Sequence
  Description of Artificial Sequence: Synthetic polynucleotide
atggaagcttctcatttgcaaatctactggcatgattctcaacccgtttactccctcacattccaaaagaacagtgcgaacgacaagcttttcaccgctggtggtgataacaaggttaggatatggaagttgaacagagatgaaaacggacaaaatgggggggtgcgtaagattgaaagccttgactttcttggctctttgacgcatcacgaacaggccataaatgtaatcagattcaactccaagggtgacgtattggcgtctgcgggcgatgacggccaagtgcttttatggaagcaagaagatccaaatacacagcaagaatctgtggtcagaccattcggaatggatgcggagactagtgaagcagacgagaacaaggagaaatgggttgtgtggaaaagattacgtggtggtagcggtgctactgcggcggcagagatttacgatttggcgtggtctcctgataacaggaacatagtggtggcatgtatggacaattctataaggttgttcgatgttggagctgggatgttggtatgcggccagagcgatcatggtcactacgtccaaggtgttgcatgggacccattaaatcagtttattctctctcagtctgcggacagatctttgcatgtatatggagtcattctttcttctgcaggagtggttacagggttgaaacttagaagtaagattgccaaggcagaattaccttgtccaggtgatgtcttgaggacaaattacctttttcacaacgagacgttaccttctttctttaggagatgcagcatatctccttgtggtggtttggtcgtaattcccagtggtgtgtataaggtggctggtgatgaagtcgcgaactgcgtatacgtgtatactagatctggaatattaaacagcgctggtggcgttaaaaacagacctgcgattagaatcccatctttgaagaaaccagcgttaatggcggctttctctcccgtattttacgaaacgtgccagaagagtgtgcttaagttgccctataagttggtatttgccatagcaacgactaacgaagtactcgtgtacgacacggatgtattggagccgttatgcgttgtgggaaatatacattactctcccataactgatttagcatggtctgaggatggctctaccttattgatctcttctacagacggattctgttcttatgtatctatcgacacagaaacgcaattcggttctaggatagagccgccagcgatgcatgcagagccattggacactgacgagagcgcggtagcggctaagaaccagcgcgaggcaggtgggatcgtgaacatgttaccggtgaagaagatcccctgcaatagtagcgatagtaaaaagaggcgcatacatcctacgccagtcgatttgtga

SEQ ID NO: 8157 - DNA, 354 bp, Saccharomyces cerevisiae
atggatggatcgactatagtgtttatactgacgatggtgtgcttgtttgtttacaccgtgaaacacaggggcgccaagcaagtaccctcgcgaaccgtacaggatgccaaaccggcgccctcggtcgccaccaacgacccttctccggagccagtaccatcggctccggaggaacgcgttgctcggttaaacagacatggtagtgatcgaaagagagccgttaatagtgacatggttgaaatcgtgatgacgatggcgccacatgtgcctcaggaaaaagtcgtgcaagatctcaggaacacagggtccattgagcacacaatggaaaatatcttcgctggcaaactagattag

SEQ ID NO: 8158 - DNA, 354 bp, Artificial Sequence
  Description of Artificial Sequence: Synthetic polynucleotide
atggatggatctactatagtgtttatattaacgatggtgtgcttgtttgtttacaccgtgaaacacaggggcgccaagcaagtaccctctcgtaccgtacaggatgccaaaccggcgccctctgtcgccaccaacgacccttctccggagccagtaccatctgctccggaggaacgcgttgctagattaaacagacatggtagtgatagaaagagagccgttaatagtgacatggttgaaatcgtgatgacgatggcgccacatgtgcctcaggaaaaagtcgtgcaagatctcaggaacacagggtccattgagcacacaatggaaaatatcttcgctggcaaattggattga

SEQ ID NO: 8159 - DNA, 174 bp, Saccharomyces cerevisiae
atgtataaatgtgtcccgagttattattctaaagcgggcaccattgtagtaacttattgcgaaatttctgctcttctcgtctcgctcaaaaatcgcgttcagggtaaaaggggcgaaacagagggccagatagaaatttcgagaaaagcgggtcaccccgcccctgcattttga

SEQ ID NO: 8160 - DNA, 174 bp, Artificial Sequence
  Description of Artificial Sequence: Synthetic polynucleotide
atgtataaatgtgtcccgagttattattctaaagcgggcaccattgtagtaacttattgcgaaatttctgctcttctcgtctctctcaaaaatcgcgttcagggtaaaaggggcgaaacagagggccagatagaaatttctagaaaagcgggtcaccccgcccctgcattttga

SEQ ID NO: 8161 - DNA, 3297 bp, Saccharomyces cerevisiae
atggctctcatcgtggcatctttgtttttgccctaccaaccacaattcgagcttgacacctctctccctgagaactcgcaggtggactcatctctcgtgaacatccaggctatggccaatgaccaacagcaacaacgtgcgctttctaacaacatctcacaggaatcattggtcgcgccagcaccagaacaaggtgtccccccagcaatctcaaggagtgccaccaggtcacccagtgctttcaaccgcgcctcgtctacgacaaatactgccactttagatgatcttgtctcttcggacatattcatggaaaacttgactgcgaatgcaactacctcacatacgccaacaagcaagactatgcttaaaccccggaaaaatggttccgtggaacgattcttctccccttcttccaatattcccacggatcgcatcgcatcgccaatccagcatgagcatgactccggttcgagaattgcttcgccaatccaacagcaacagcaggaccccacgaccaacttattaaagaacgtcaacaagtcattgttagtgcactcactgttgaacaacacctcacaaactagcctagaaggacccaacaaccacattgttaccccgaaatcgagggcgggcaacaggcctacttcggcggctacttctttagttaataggaccaaacaaggttcggcctcctctggatcttctgggtcttctgcgccaccttccattaaaaggattacgccccacttgactgcgtctgctgcaaaacagcgtcccttattggctaaacagccttctaatctgaaatattcggagttagcagatatttcgtcgagtgagacgtcttcgcagcataatgagtcggacccggatgatctaactactgcccctgacgaggaatatgtttctgatttggaaatggatgacgcgaagcaggactacaaggttccaaagttcggcggctattccaataaatctaaacttaagaaatatgcgctgttaaggtcatctcaggagctgtttagccgtcttccatggtcgatcgttccctctatcaaaggtaatggcgccatgaagaacgccataaacactgcagtcttggagaatatcattccgcaccgtcatgttaagtgggtcggtaccgtcggaatcccaacggatgagattccggaaaatatccttgcgaacatctctgactctttaaaagacaagtacgactcctatcctgtccttacggacgacgacaccttcaaagccgcatacaaaaactactgtaaacaaatcttgtggcctacgctgcattaccagattccagacaatccgaactcgaaggcttttgaagatcactcttggaagttctatagaaacttaaaccaaaggtttgcggacgcgatcgttaaaatctataagaaaggtgacaccatctggattcatgattaccatttaatgctggttccgcagatggtgagagacgtcttgccttttgccaaaataggatttaccttacatgtctcgttccccagtagtgaagtgtttaggtgtctggctcagcgtgagaagatcttagaaggcttgaccggtgcagactttgtcggcttccagacgagggagtatgcaagacatttcttacagacgtctaaccgtctgctaatggcggacgtggtacatgatgaagagctaaagtataacggcagagtcgtttctgtgaggttcaccccagttggtatcgacgcctttgatttgcaatcgcaattgaaggatggaagtgtcatgcaatggcgtcaattgattcgtgaaagatggcaagggaaaaaactaattgtgtgtcgtgatcaattcgatagaattagaggtattcacaagaaattgttggcttatgaaaaattcttggtcgaaaatccggaatacgtggaaaaatcgactttaattcaaatctgtattggaagcagtaaggatgtagaactggagcgccagatcatgattgtcgtggatagaatcaactcgctatccaccaatattagtatttctcaacctgtggtgtttttgcatcaagatctagatttttctcagtatttagctttgagttcagaggcagatttgttcgtagtcagctctctaagggaaggtatgaacttgacatgtcacgaatttatcgtttgttctgaggacaaaaatgctcccctactgttgtcagaatttactggtagtgcatctttattgaatgatggcgctataataattaacccatgggataccaagaacttctcacaagccattctcaaggggttggagatgccattcgataagagaaggccacagtggaagaaattgatgaaagacattatcaacaacgactctacaaactggatcaagacttctttacaagatattcatatttcgtggcaattcaatcaagaaggttccaagatcttcaaattgaatacaaaaacactgatggaagattaccagtcatctaaaaagcgtatgtttgttttcaacattgctgaaccaccttcatcgagaatgatttccatactgaatgacatgacttctaagggcaatatcgtttacatcatgaactcatttccaaagcccattctggaaaatctttacagtcgtgtgcaaaacattgggttgattgccgagaatggtgcatacgttagtctgaacggtgtatggtacaacattgttgatcaagtcgattggcgtaacgatgtagccaaaattctcgaggacaaagtggagagattacctggctcgtactacaagataaatgagtccatgatcaagttccacactgaaaatgcggaagatcaagatcgtgtagctagtgttatcggtgatgccatcacacatatcaatactgtttttgaccacagaggtattcatgcctacgtttacaaaaacgttgtttccgtacaacaagtgggactttccttatcggcagctcaatttcttttcagattctataattctgcttcggatccactggatacgagttccggccaaatcacaaatattcagacaccatctcaacaaaatccttcagatcaagaacaacaacctccagcctctcccactgtgtcgatgaaccatattgatttcgcatgtgtctctggttcatcgtctcctgtgcttgaaccattgttcaaattggtcaatgatgaagcaagtgaagggcaagtaaaagccggacacgccattgtttatggtgatgctacttctacttatgccaaagaacatgtaaatgggttaaacgaacttttcacgatcatttcaagaatcattgaagattaa

SEQ ID NO: 8162 - DNA, 3297 bp, Artificial Sequence
  Description of Artificial Sequence: Synthetic polynucleotide
atggctctcatcgtggcatctttgtttttgccctaccaaccacaattcgagcttgacacctctctccctgagaactctcaggtggactcttctctcgtgaacatccaggctatggccaatgaccaacagcaacaacgtgcgctttctaacaacatctctcaggaatctttggtcgcgccagcaccagaacaaggtgtccccccagcaatctccaggagtgccaccaggtctcccagtgctttcaaccgcgcctcttctacgacaaatactgccactttagatgatcttgtctcttctgacatattcatggaaaacttgactgcgaatgcaactaccagtcatacgccaacaagcaagactatgcttaaacccagaaaaaatggttccgtggaaagattcttctccccttcttccaatattcccacggatcgcatcgcatctccaatccagcatgagcatgactccggttccagaattgcttctccaatccaacagcaacagcaggaccccacgaccaacttattaaagaacgtcaacaagtctttgttagtgcactctttgttgaacaacacctctcaaactagcttggaaggacccaacaaccacattgttaccccgaaatctagggcgggcaacaggcctactagtgcggctacttctttagttaataggaccaaacaaggttctgcctcctctggatcttctgggtcttctgcgccaccttccattaaaaggattacgccccacttgactgcgtctgctgcaaaacagcgtcccttattggctaaacagccttctaatttgaaatattctgagttagcagatatttcttccagtgagacgtcttctcagcataatgagagtgacccggatgatttgactactgcccctgacgaggaatatgtttctgatttggaaatggatgacgcgaagcaggactacaaggttccaaagttcggcggctattccaataaatctaaacttaagaaatatgcgttattaaggtcttctcaggagttatttagccgtcttccatggtctatcgttccctctatcaaaggtaatggcgccatgaagaacgccataaacactgcagtcttggagaatatcattccgcaccgtcatgttaagtgggtcggtaccgtcggaatcccaacggatgagattccggaaaatatccttgcgaacatctctgactctttaaaagacaagtacgactcctatcctgtccttacggacgacgacaccttcaaagccgcatacaaaaactactgtaaacaaatcttgtggcctacgttgcattaccagattccagacaatccgaactccaaggcttttgaagatcactcttggaagttctatagaaacttaaaccaaaggtttgcggacgcgatcgttaaaatctataagaaaggtgacaccatctggattcatgattaccatttaatgcttgttccgcagatggtgagagacgtcttgccttttgccaaaataggatttaccttacatgtctctttccccagtagtgaagtgtttaggtgtttggctcagcgtgagaagatcttagaaggcttgaccggtgcagactttgtcggcttccagacgagggagtatgcaagacatttcttacagacgtctaaccgtttgttgatggcggacgtggtacatgatgaagagttgaagtataacggcagagtcgtttctgtgaggttcaccccagttggtatcgacgcctttgatttgcaatctcaattgaaggatggaagtgtcatgcaatggcgtcaattgattcgtgaaagatggcaagggaaaaaattgattgtgtgtcgtgatcaattcgatagaattagaggtattcacaagaaattgttggcttatgaaaaattcttggtcgaaaatccggaatacgtggaaaaatctactttaattcaaatctgtattggaagcagtaaggatgtagaattagagcgccagatcatgattgtcgtggatagaatcaactctttatccaccaatattagtatttctcaacctgtggtgtttttgcatcaagatttggatttttctcagtatttagctttgagtagtgaggcagatttgttcgtagtcagctctttgagggaaggtatgaacttgacatgtcacgaatttatcgtttgttctgaggacaaaaatgctcccttattattgagtgaatttactggtagtgcatctttattgaatgatggcgctataataattaacccatgggataccaagaacttctctcaagccattctcaaggggttggagatgccattcgataagagaaggccacagtggaagaaattgatgaaagacattatcaacaacgactctacaaactggatcaagacttctttacaagatattcatatttcttggcaattcaatcaagaaggttccaagatcttcaaattgaatacaaaaacattgatggaagattaccagtcttctaaaaagcgtatgtttgttttcaacattgctgaaccaccttcttctagaatgatttccatattgaatgacatgacttctaagggcaatatcgtttacatcatgaactcttttccaaagcccattttggaaaatctttacagtcgtgtgcaaaacattgggttgattgccgagaatggtgcatacgttagtttgaacggtgtatggtacaacattgttgatcaagtcgattggcgtaacgatgtagccaaaattctcgaggacaaagtggagagattacctggctcttactacaagataaatgagtccatgatcaagttccacactgaaaatgcggaagatcaagatcgtgtagctagtgttatcggtgatgccatcacacatatcaatactgtttttgaccacagaggtattcatgcctacgtttacaaaaacgttgtttccgtacaacaagtgggactttccttaagtgcagctcaatttcttttcagattctataattctgcttctgatccattagatacgagttccggccaaatcacaaatattcagacaccatctcaacaaaatccttctgatcaagaacaacaacctccagcctctcccactgtgtccatgaaccatattgatttcgcatgtgtctctggttcttcttctcctgtgcttgaaccattgttcaaattggtcaatgatgaagcaagtgaagggcaagtaaaagccggacacgccattgtttatggtgatgctacttctacttatgccaaagaacatgtaaatgggttaaacgaacttttcacgatcatttctagaatcattgaagattga

SEQ ID NO: 8163 - DNA, 2643 bp, Saccharomyces cerevisiae
atgggaatttccagcaagaatggccctaaaaaaatgggaagggcaaagacgtttactgggtgttggacgtgcagaggaagaaaagttaagtgtgatcttcggcatccccactgccaacgatgtgaaaagtctaatttgccttgtggcggttatgatatcaaactccggtggtctaagcctatgcaatttgacccgtacggtgtcccaatcccacaaaattctcctgcaactactacgaacttatcaggtagtgtcgatgaaccacaataccaacgacggaacatcgattttgtgcgctatgatgaagaatacgtgtatcatgaagatatggatgatgagctaacaatgctgcatactcccccaattgagaaaataagcgataacaagacgtggatcataaagaaatttggggtgtttaaaggaacagataagatcgacaagcagtacgctccaaggaagaagcgcaataggaaaagagttgccaaaagcttggagagctcagcttctatttcgttatcttctttaccatcttcttcaactatttcctttccaattagacatattgaagacaagttgagaaataaagggcatgtaaagacaggtattctctctgctaatgatggtgttccaccaacaccaaatcttttagattatgactggaacaatctgaatataacaggttacgaatggatctcgagtgaactcagagatgatgcattattgtcagcggtgaccttacagggacatcacttaggacacacacagccacaagaaatctcattagaggaaaactctaatgtcgtgagtggggaagagcatgtgaatgccaaagaacatggatgtgcctttgaggctgataatcaaggttcatcaactttacctaataaagcagccagtgccaatgataaactttaccagcaaaacttgaagttactcttccagaaaaactcttcgaacagtgaggaaccagaccctcaagcattgatcgacgatgtgttcgtcaatattgaaccaagatctctgcccgcatctgatctgaataaaataactctagctcctccaaatgaagaatcacgcatgcctaagtccatgttagaactcacatcctattccagtgacctaccacctgaattggtagatattatacccaaaacagaccttaccgtacatggtttagcgagatttcttttaaatcattattttaataatgttgcagataaaatgacagtggtcgtgctcgaaaagaacccatggaaaacattatacttccccagagccttgatggcattaggcgatttagcgggtttgggacaatcctccaactcgaggaatgcgttgttgaatgctcttcttgctgtctcttgcttccacttgcaaagcaagtacccaaggaactacaaactacaaaaatactttctgggcctaggtatcgaattgagaaatcaagcctcgaactttctaagattatgtttgaacacaaaatcaagcatacctgagaaatataaagacgtactaactgcgatcttatctatgaactctattgatgttgtatgggggacgatggcagattgccaggatcacttggctctttgtgaagacttcgttgagtcaagaatgaaactaagacctaatatttctgaaaagacaaaaaccttacacaggattttctcgtttctgaagttaattcaagatagcactgcgttggataaagtcagggcaaaggaaattgttattttaccaagtgaagaagatgataattacaaaccattagatacatctaacgctactaccagtagcagtgagccaagagttgacgttgtgcaggaaggtttatttagagaggcactcaatgaaaatgacggcaaaatacatattgaattcgttaaggagcctatcacaaacgtatccgctgactctactccatcttcgaccactcctccaatttttaccaacatagcaacagaaagttactataataaatctgatatatctaagctagtatcgaagactgatgaaaacataattggtacagattcactctatggattgcctaattcattaatattactattttcagactgtgttaggatagtgagacataatgaatattataatttaacttacctacctgtaccccgaaaatttaatgaactctcgttaaatttcgaaaaaagattattgaaatggaaatcagaatggaacttccatcaagaaaattcggagggaaaaagcttcataaactcaacggctgaagcactatatcaccatacaatgagcttttatttcagtttaattatttattattttacaatggcaagaagtttaaattgccaatttctacaaaactatgttgccaaagtattagatcacttaaatgcaatggaagaattggtggatcaaaaaaaagtgaaaattgtccctttaatttggcaaggtttcatggcaggatgtgcttgcacagatgaaaacagacagcaagagtttagaagatgggcagccaaattagctgaaagtggagtgggctcctattggggagccaggcaagtaatgttggaagtttggaggcgacggaaagaggatgagccgggcgataattggtattctgtttataaagattgggaaatgaatctgatgctatcataa

SEQ ID NO: 8164 - DNA, 2643 bp, Artificial Sequence
  Description of Artificial Sequence: Synthetic polynucleotide
atgggaatttccagcaagaatggccctaaaaaaatgggaagggcaaagacgtttactgggtgttggacgtgcagaggaagaaaagttaagtgtgatcttcgtcatccccactgccaaagatgtgaaaagtctaatttgccttgtggcggttatgatatcaaactcagatggtctaagcctatgcaatttgacccgtacggtgtcccaatcccacaaaattctcctgcaactactacgaacttatctggtagtgtcgatgaaccacaataccaaagaagaaacatcgattttgtgcgctatgatgaagaatacgtgtatcatgaagatatggatgatgagttgacaatgttgcatactcccccaattgagaaaataagcgataacaagacgtggatcataaagaaatttggggtgtttaaaggaacagataagatcgacaagcagtacgctccaaggaagaagcgcaataggaaaagagttgccaaaagcttggagagcagtgcttctatttctttatcttctttaccatcttcttctactatttcctttccaattagacatattgaagacaagttgagaaataaagggcatgtaaagacaggtattctctctgctaatgatggtgttccaccaacaccaaatcttttagattatgactggaacaatttgaatataacaggttacgaatggatctccagtgaactcagagatgatgcattattgagtgcggtgaccttacagggacatcacttaggacacacacagccacaagaaatctctttagaggaaaactctaatgtcgtgagtggggaagagcatgtgaatgccaaagaacatggatgtgcctttgaggctgataatcaaggttcttctactttacctaataaagcagccagtgccaatgataaactttaccagcaaaacttgaagttactcttccagaaaaactcttccaacagtgaggaaccagaccctcaagcattgatcgacgatgtgttcgtcaatattgaaccaagatctttacccgcatctgatttgaataaaataactttggctcctccaaatgaagaatctcgcatgcctaagtccatgttagaactcacatcctattccagtgacttaccacctgaattggtagatattatacccaaaacagaccttaccgtacatggtttagcgagatttcttttaaatcattattttaataatgttgcagataaaatgacagtggtcgtgctcgaaaagaacccatggaaaacattatacttccccagagccttgatggcattaggcgatttagcgggtttgggacaatcctccaacagcaggaatgcgttgttgaatgctcttcttgctgtctcttgcttccacttgcaaagcaagtacccaaggaactacaaattacaaaaatactttttgggcttgggtatcgaattgagaaatcaagcctccaactttttaagattatgtttgaacacaaaaagtagcatacctgagaaatataaagacgtattgactgcgatcttatctatgaactctattgatgttgtatgggggacgatggcagattgccaggatcacttggctctttgtgaagacttcgttgagagcagaatgaaattgagacctaatatttctgaaaagacaaaaaccttacacaggattttctcctttttgaagttaattcaagatagcactgcgttggataaagtcagggcaaaggaaattgttattttaccaagtgaagaagatgataattacaaaccattagatacatctaacgctactaccagtagcagtgagccaagagttgacgttgtgcaggaaggtttatttagagaggcactcaatgaaaatgacggcaaaatacatattgaattcgttaaggagcctatcacaaacgtatccgctgactctactccatcttccaccactcctccaatttttaccaacatagcaacagaaagttactataataaatctgatatatctaagttggtatccaagactgatgaaaacataattggtacagattctctctatggattgcctaattctttaatattacttttttctgactgtgttaggatagtgagacataatgaatattataatttaacttacttacctgtacccagaaaatttaatgaactctctttaaatttcgaaaaaagattattgaaatggaaaagtgaatggaacttccatcaagaaaattctgagggaaaaagcttcataaactccacggctgaagcattatatcaccatacaatgagcttttatttcagtttaattatttattattttacaatggcaagaagtttaaattgccaatttttgcaaaactatgttgccaaagtattagatcacttaaatgcaatggaagaattggtggatcaaaaaaaagtgaaaattgtccctttaatttggcaaggtttcatggcaggatgtgcttgcacagatgaaaacagacagcaagagtttagaagatgggcagccaaattagctgaaagtggagtgggctcctattggggagccaggcaagtaatgttggaagtttggaggaggagaaaagaggatgagccgggcgataattggtattctgtttataaagattgggaaatgaatttaatgctttcctga

SEQ ID NO: 8165 - DNA, 504 bp, Saccharomyces cerevisiae
atgtctaggaagctgaaaaaaacgaatctgtttaacaaggatgtaagttccttgctttacgcttacggcgatgtgccgcagccactacaagctactgtgcagtgtttggatgaattggtatctggatatttggtggatgtttgtactaacgcattccatacagcccagaattctcagcgcaataagctccgattggaagatttcaagtttgccctccgtaaagacccgataaagcttgggagagcagaagaactgatagctactaataagttgattacggaagctaagaagcagttcaatgagacagacaatcaaaattcattaaagaggtacagagaagaggatgaagagggtgacgagatggaagaggatgaggatgagcagcaggtgacggatgatgatgaggaagcagcgggccgtaatagcgctaaacaatcaacagattcgaaggcaacaaagattaggaagcaggggcctaaaaacctcaagaaaacaaaaaaatga

SEQ ID NO: 8166 - DNA, 504 bp, Artificial Sequence
  Description of Artificial Sequence: Synthetic polynucleotide
atgtctaggaagttgaaaaaaacgaatttatttaacaaggatgtaagttccttgctttacgcttacggcgatgtgccgcagccattgcaagctactgtgcagtgtttggatgaattggtatctggatatttggtggatgtttgtactaacgcattccatacagcccagaattctcagcgcaataagctccgtttggaagatttcaagtttgccctccgtaaagacccgataaagcttgggagagcagaagaattgatagctactaataagttgattacggaagctaagaagcagttcaatgagacagacaatcaaaattctttaaagaggtacagagaagaggatgaagagggtgacgagatggaagaggatgaggatgagcagcaggtgacggatgatgatgaggaagcagcgggccgtaatagcgctaaacaaagtacagattctaaggcaacaaagattaggaagcaggggcctaaaaacctcaagaaaacaaaaaaatga

SEQ ID NO: 8167 - DNA, 1356 bp, Saccharomyces cerevisiae
atgactgatgatgaaaagagggagatattgaaagaatttgatcctttcagccaattggaacaggcaaatggcaacccagataaagatgtgaagtttaaaaaggatgatcctaatagggcagcggcagaagaaactaatagggacatatccgcgcaggacaaaggagatgaggagccattttatgactttcaaatattcattaagcagcttcagactcctggtgcagatcctctggttaaatatacgaaatcattcttacgtaacttcttggcgcaaagacttctatggacggtcagcgaagaaataaaactcatcagtgactttaagaccttcatttacgataaattcactctttacgagcctttccgaagtcttgacaattccaagatgagaaatgccaaggaaggtatggaaaagttaataatggggaaactatattctcgctgtttttcaccaagtctttatgaaattctgcagaaaccattagacgatgagcatatgaaagatttaaccaacgatgacacattactagaaaagattaggcattatagattcataagccccattatgttagatattcctgatactatgccgaatgccaggctgaataagtttgtccatttggccagtaaagagttgggcaaaataaataggtttaagtcaccaagggacaagatggtttgcgttttgaatgcaagcaaggttatatttggtttactaaaacataccaagttggaacaaaatggcgctgacagctttatacctgtgctaatatactgtattttgaaaggacaagtacgatatctagtttcgaatgtgaactacatcgaaagattcagatcaccagacttcattcggggcgaagaggaatattacttgagcagtcttcaggctgctcttaacttcattatgaacttgactgaacgttctttaactatcgaagatcacgaagattttgaagaggcataccaaagaaattttaaacaactagcagaagaaaaagaggaagaagagaagaaaaaacaactagagattccggatgagttacagccaaacggcactttactgaaacccttagacgaagttaccaatattgtaatttctaaattcaatgaactgttttctccaattggagagcccacacaagaagaggcattgaaatctgaacagagcaataaagaagaagacgtttcttcgttaattaagaaaattgaagagaacgaacgaaaggacacgttgaacacattacagaatatgtttccagatatggacccaagcctgatagaggatgtttgtattgctaaaaaatcgcgtattgggccctgtgttgatgctctactttctctgtcagaataa

SEQ ID NO: 8168 - DNA, 1356 bp, Artificial Sequence
  Description of Artificial Sequence: Synthetic polynucleotide
atgactgatgatgaaaagagggagatattgaaagaatttgatcctttcagccaattggaacaggcaaatggcaacccagataaagatgtgaagtttaaaaaggatgatcctaatagggcagcggcagaagaaactaatagggacatatccgcgcaggacaaaggagatgaggagccattttatgactttcaaatattcattaagcagcttcagactcctggtgcagatcctttggttaaatatacgaaatctttcttacgtaacttcttggcgcaaagacttttatggacggtcagcgaagaaataaaactcatcagtgactttaagaccttcatttacgataaattcactctttacgagcctttcagaagtcttgacaattccaagatgagaaatgccaaggaaggtatggaaaagttaataatggggaaactttattctcgctgtttttctccaagtctttatgaaattttacagaaaccattagacgatgagcatatgaaagatttaaccaacgatgacacattattggaaaagattaggcattatagattcataagccccattatgttagatattcctgatactatgccgaatgccaggttgaataagtttgtccatttggccagtaaagagttgggcaaaataaataggtttaagtctccaagggacaagatggtttgcgttttgaatgcaagcaaggttatatttggtttattgaaacataccaagttggaacaaaatggcgctgacagctttatacctgtgttgatatactgtattttgaaaggacaagtaagatatttggtttctaatgtgaactacatcgaaagattcagatctccagacttcattagaggcgaagaggaatattacttgagcagtcttcaggctgctcttaacttcattatgaacttgactgaacgttctttaactatcgaagatcacgaagattttgaagaggcataccaaagaaattttaaacaattggcagaagaaaaagaggaagaagagaagaaaaaacaattggagattccggatgagttacagccaaacggcactttattgaaacccttagacgaagttaccaatattgtaatttctaaattcaatgaattattttctccaattggagagcccacacaagaagaggcattgaaatctgaacagagcaataaagaagaagacgtttcttctttaattaagaaaattgaagagaacgaaagaaaggacacgttgaacacattacagaatatgtttccagatatggacccaagcttgatagaggatgtttgtattgctaaaaaatctcgtattgggccctgtgttgatgctttactttctttatctgaatga

SEQ ID NO: 8169 - DNA, 1578 bp, Saccharomyces cerevisiae
atgtgcgggattctattgcattattgtccaaacaataactacctgaatgatgagttaatcgaatttccagaaggaactgaatttggagatacaacatgtaccaatgaatcgtcgattttcaacaaaatcattccgtacatagccgcaagaggtccaaactactcctctcttcgagctgtcaaagcttatcgaataagttggttttcttctgttttatctttgaggcagcctttcacgaaacagagtattaacgtggatgacagatatttcctacaattcaatggtgagttatacaataaagagatatcgcagggtgataatgatagtctttatattgcttctatgttgcagaatttgaaagagggtatgggcgttattgatgttataaaatcactggaaggcgagtatgcttatactatatatgacgtgaactcatccaaactctatttcggcagagatccaattggcaggcgaagtttgtcttattcggtcactccagacaacgaattgtacgtcgctagtgtaacggggtctgctgggtcctttcaagattgtataggtggagttatttatgaatatgatacacgaactaagttgttaaattccaatcagaggtcacatcttccatacgaagtgacatcagagatagatctgaatttcacatcattgtcagaggtgtctaaaaatttatatgctgtgctacgtgattctgtaaaaaaaagggtagagtccatacatcccaggcatattgaaaactctcctattgcggtactattctcaggaggaattgattgttcagtaatagtagcgttgatctgcgaggtgttgcaagaaaatgattataaatgtggaaaaccagttatagagcttctaaatgtatccttcgaaaaccccaggactggtctttttcccagtgatacacctgatagaaaactgtccattaacagtgcaaagactttacaaaacttatatcctaatgttgatatcaaactggttgaagttgacgttccttatgatgagtatttaaaatggaagccatttgttatcaatttaatgtatcctaaacagactgaaatggacttgtctatagccattgcttttttttttgcgtcgagaggtagaggtttcttaacttctctgaatggggaaagaacgccatatcagcgccatgggatagtgttattcagcggactgggagcagacgaactctacggtggatatcacaagtttgccaacaaaccaccccatgaacttgtggaggaacttacaaggcaaataaacaacatttatgatcgcaacctgaatcgtgatgataaagtgatagctcataatggcgtggaggtgagatacccatttttagatgaatatgttataaagttatctacagcagaaattcccattaatttcaaggttaacaaattaatccttcgaaaagttgcctcgcagtatttgaagttggatggaatatcatcagaaccaaaaagggccattcaattcggtgctaaaagcgctaaaatgacaaaggatggtaataagcatggaacagatttattaaaagaaaataggaattgttcataa

SEQ ID NO: 8170 - DNA, 1578 bp, Artificial Sequence
  Description of Artificial Sequence: Synthetic polynucleotide
atgtgcgggattttattgcattattgtccaaacaataactacttgaatgatgagttaatcgaatttccagaaggaactgaatttggagatacaacatgtaccaatgaaagttctattttcaacaaaatcattccgtacatagccgcaagaggtccaaactactcctctcttagagctgtcaaagcttatagaataagttggttttcttctgttttatctttgaggcagcctttcacgaaacagagtattaacgtggatgacagatatttcttacaattcaatggtgagttatacaataaagagatatctcagggtgataatgatagtctttatattgcttctatgttgcagaatttgaaagagggtatgggcgttattgatgttataaaatctttggaaggcgagtatgcttatactatatatgacgtgaactcttccaaactctatttcggcagagatccaattggcaggagaagtttgtcttattctgtcactccagacaacgaattgtacgtcgctagtgtaacggggtctgctgggtcctttcaagattgtataggtggagttatttatgaatatgatacaagaactaagttgttaaattccaatcagaggagccatcttccatacgaagtgacaagtgagatagatttgaatttcacatctttgagtgaggtgtctaaaaatttatatgctgtgttgcgtgattctgtaaaaaaaagggtagagtccatacatcccaggcatattgaaaactctcctattgcggtattattcagtggaggaattgattgttctgtaatagtagcgttgatctgcgaggtgttgcaagaaaatgattataaatgtggaaaaccagttatagagcttttgaatgtatccttcgaaaaccccaggactggtctttttcccagtgatacacctgatagaaaactttccattaacagtgcaaagactttacaaaacttatatcctaatgttgatatcaaattggttgaagttgacgttccttatgatgagtatttaaaatggaagccatttgttatcaatttaatgtatcctaaacagactgaaatggacttgtctatagccattgcttttttttttgcgtccagaggtagaggtttcttaacttctttgaatggggaaagaacgccatatcagcgccatgggatagtgttattcagcggacttggagcagacgaactctacggtggatatcacaagtttgccaacaaaccaccccatgaacttgtggaggaacttacaaggcaaataaacaacatttatgatcgcaacttgaatcgtgatgataaagtgatagctcataatggcgtggaggtgagatacccatttttagatgaatatgttataaagttatctacagcagaaattcccattaatttcaaggttaacaaattaatccttagaaaagttgcctctcagtatttgaagttggatggaatatcttctgaaccaaaaagggccattcaattcggtgctaaaagcgctaaaatgacaaaggatggtaataagcatggaacagatttattaaaagaaaataggaattgttcttga

SEQ ID NO: 8171 - DNA, 633 bp, Saccharomyces cerevisiae
atgaacaatactgatcctacttcatttgaaagtatattggctggtgtggccaaattgagaaaggaaaagagtggtgcagatactactggatctcaatcgttagaaatagatgcatcaaaactccagcagcaggaaccgcaaacatcaagacgcataaattcaaaccaggtcataaacgccttcaatcagcaaaaaccggaagaatggaccgactcaaaggctacagatgactataatcgaaagagacccttcaggagtactcgaccgggaaaaactgtactagtgaacactacccaaaaagaaaatccactcctgaaccacttaaagagcaccaattggagatatgtatcttcaacaggaattaatatgatatactacgactatctagttcgtggaagaagtgtactgttcttaactttgacttatcacaaattatatgtcgattatatctctaggagaatgcagcccttatctagaaacgaaaataatatactgatattcatagtagacgataacaactctgaagatacccttaatgacattacaaaactatgtatgttcaacggatttactctacttttagcatttaattttgaacaagctgcaaaatatattgaatatttgaatttatga

SEQ ID NO: 8172 - DNA, 633 bp, Artificial Sequence
  Description of Artificial Sequence: Synthetic polynucleotide
atgaacaatactgatcctacttcttttgaaagtatattggctggtgtggccaaattgagaaaggaaaagagtggtgcagatactactggatctcaatctttagaaatagatgcatccaaactccagcagcaggaaccgcaaacatctagacgcataaatagcaaccaggtcataaacgccttcaatcagcaaaaaccggaagaatggaccgactccaaggctacagatgactataatagaaagagacccttcaggagtactagaccgggaaaaactgtattggtgaacactacccaaaaagaaaatccactcttgaaccacttaaagagcaccaattggagatatgtatcttctacaggaattaatatgatatactacgactatttggttcgtggaagaagtgtattattcttaactttgacttatcacaaattatatgtcgattatatctctaggagaatgcagcccttatctagaaacgaaaataatatattaatattcatagtagacgataacaactctgaagatacccttaatgacattacaaaattatgtatgttcaacggatttactttacttttagcatttaattttgaacaagctgcaaaatatattgaatatttgaatttatga

SEQ ID NO: 8173 - DNA, 492 bp, Saccharomyces cerevisiae
atgtcctctcaaaaaatcgatttaactaaactaaatcccgagcagctgaatgctgtaaaacagcaattcgaccaagaattgcagcatttcacacagtccttgcaagcattaaccatggctaagggcaagttcacagaatgtattgatgatattaaaacagtctcccaagcaggaaatgaagggcaaaaactactggttccagcatctgcatcattatacatcccaggtaagattgtagacaataagaaattcatggtcgacattggtacaggatattacgttgaaaagagcgctgaagcagcaatcgcattttaccaaaagaaagtagacaagcttaacaaagaatctgtacagatccaagatattattaaggaaaagacccagtattccttgtccatcgaggcccaaataagacaagccgctattagacagcatgaagcgatgagtaaacaacaacagcagcaacaaaaaaaggagtcgtctacagcctag

SEQ ID NO: 8174 - DNA, 492 bp, Artificial Sequence
  Description of Artificial Sequence: Synthetic polynucleotide
atgtcctctcaaaaaatcgatttaactaaattgaatcccgagcagttgaatgctgtaaaacagcaattcgaccaagaattgcagcatttcacacagtccttgcaagcattaaccatggctaagggcaagttcacagaatgtattgatgatattaaaacagtctcccaagcaggaaatgaagggcaaaaattattggttccagcatctgcatctttatacatcccaggtaagattgtagacaataagaaattcatggtcgacattggtacaggatattacgttgaaaagagcgctgaagcagcaatcgcattttaccaaaagaaagtagacaagcttaacaaagaatctgtacagatccaagatattattaaggaaaagacccagtattccttgtccatcgaggcccaaataagacaagccgctattagacagcatgaagcgatgagtaaacaacaacagcagcaacaaaaaaaggagtcttctacagcctga

SEQ ID NO: 8175 - DNA, 2700 bp, Saccharomyces cerevisiae
atggcaaaaaagaaatctaagagcagatccaagagttctagaagagttttggatgctttgcaacttgctgagagagaaattaatggtgaattcgataactccagcgacaatgacaaaagacatgatgctcgtcgtaatggtacagttgtcaacttgttaaaaaggtcaaaaggtgacactaacagtgatgaagatgatatcgattctgagtcgtttgaagatgaggagttgaactctgatgaagcgttgggctctgatgatgactatgacattttgaattccaaattctcacaaactattcgtgacaagaaggagaatgcaaactaccaagaagaagaggatgaaggtgggtatacttccattgatgaagaagatttgatgccactgtctcaagtgtgggacatggatgagaaaaccgcacagagtaacggcaatgatgacgaagacgcttctccacaattaaaattgcaagatacagatataagttccgaatcaagcagttccgaagaaagcgaatcggaatctgaagatgatgaagaggaagaggatcccttcgacgaaatatctgaagatgaagaagacatcgaattgaatacaattacctcaaaactgattgatgaaaccaaaagtaaagctccaaagagactagatacgtatggctcaggtgaggccaatgagtatgttttgccctctgcaaatgcagctagtggagcttctgggaaattgagtttgacggatatgatgaacgttattgatgacaggcaagttattgaaaacgctaacttgcttaagggtaagtcgtcgacgtatgaagttccgctaccacaacgtatccaacaaagacacgatcgtaaggcagcatacgagatctctaggcaagaagtgagtaagtggaatgatatcgtccaacagaacagaagggctgatcatttaatcttcccgctgaacaaacccaccgaacataaccacgcctcggctttcactagaactcaagatgttcctcaaacagaattacaggagaaggtagatcaagttcttcaagagagtaatttagcgaacccagaaaaagactcaaagtttgaagagttgagcactgctaaaatgacacccgaggagatgagaaagaggactaccgaaatgagattgatgagagaattgatgtttagagaagaaagaaaagctaggaggttgaagaaaataaaatctaagacatatcgtaagatcaagaaaaaggaattgatgaaaaatagagagctagctgctgtttccagcgacgaagacaacgaagatcatgatatcgctagggctaaagaaagaatgactctaaaacacaagacaaattccaagtgggctaaagatatgatcaaacatggtatgacaaatgacgctgaaaccagagaagaaatggaagagatgctaagacaaggtgaacgtttaaaggcaaaaatgttggatagaaattctgatgatgaagaggatggtcgtgtgcaaacattaagtgatgttgaaaatgaggagaaagagaatatagactcagaagcattgaagagtaaattgggtaaaactggcgtaatgaatatggcctttatgaagaatggtgaagctagagaaagagaggcgaacaaagaaaccttacgtcaattaagggccgttgaaaatggtgatgatattaagctcttcgaaagtgacgaggaagagacgaatggagagaatattcaaataaataagggcagaagaatatataccccaggttccttggaatccaacaaagacatgaatgaactaaatgaccacactagaaaagagaataaagttgacgaatcaagaagtttggaaaaccgactaagggccaagaatagtgggcaatcgaaaaatgcaagaactaacgcagaaggcgcaataattgtggaggaggaaagtgatggtgaacctcttcaagacggtcagaataatcaacaggatgaagaagcaaaagatgttaatccttggttagctaatgaaagtgatgaagaacacactgtcaagaaacaatcttccaaagttaacgttattgacaaagacagttctaaaaatgttaaggccatgaacaaaatggagaaagctgagctaaagcaaaagaaaaagaagaaaggtaagtcaaacgatgatgaagatctcttgttgacggcggatgattctacacggctaaagatagtcgatccatatggtggttctgatgacgaacaaggggataatgtattcatgttcaagcagcaagacgtcattgcggaagcctttgctggcgacgacgtggtagcagaatttcaggaggaaaagaaacgtgtcattgatgatgaagatgataaagaagttgataccactttacctggttggggtgaatgggccggtgcaggttctaaaccaaaaaataagaagcgtaaattcatcaaaaaggttaagggtgttgttaataaagacaaaagaagagataagaatctacaaaatgtgatcataaatgaaaaagttaataagaaaaacttgaaataccaatcttcagcggtaccattcccattcgaaaatagagaacaatatgaaagatctttacgtatgccgataggtcaagaatggacatccagagcatctcatcaagagcttatcaaaccgagaatcatgactaagccaggccaagttattgatcctttgaaggcaccatttaagtaa

SEQ ID NO: 8176 - DNA, 2700 bp, Artificial Sequence
  Description of Artificial Sequence: Synthetic polynucleotide
atggcaaaaaagaaatctaagagcagatccaagagttctagaagagttttggatgctttgcaacttgctgagagagaaattaatggtgaattcgataactccagcgacaatgacaaaagacatgatgctcgtcgtaatggtacagttgtcaacttgttaaaaaggtccaaaggtgacactaacagtgatgaagatgatatcgattctgagtcttttgaagatgaggagttgaactctgatgaagcgttgggctctgatgatgactatgacattttgaattccaaattctctcaaactattcgtgacaagaaggagaatgcaaactaccaagaagaagaggatgaaggtgggtatacttccattgatgaagaagatttgatgccattatctcaagtgtgggacatggatgagaaaaccgcacagagtaacggcaatgatgacgaagacgcttctccacaattaaaattgcaagatacagatataagttccgaaagtagcagttccgaagaaagcgaaagtgaatctgaagatgatgaagaggaagaggatcccttcgacgaaatatctgaagatgaagaagacatcgaattgaatacaattacctccaaattgattgatgaaaccaaaagtaaagctccaaagagattagatacgtatggcagtggtgaggccaatgagtatgttttgccctctgcaaatgcagctagtggagcttctgggaaattgagtttgacggatatgatgaacgttattgatgacaggcaagttattgaaaacgctaacttgcttaagggtaagtcttctacgtatgaagttccgttaccacaacgtatccaacaaagacacgatcgtaaggcagcatacgagatctctaggcaagaagtgagtaagtggaatgatatcgtccaacagaacagaagggctgatcatttaatcttcccgttgaacaaacccaccgaacataaccacgcctctgctttcactagaactcaagatgttcctcaaacagaattacaggagaaggtagatcaagttcttcaagagagtaatttagcgaacccagaaaaagactccaagtttgaagagttgagcactgctaaaatgacacccgaggagatgagaaagaggactaccgaaatgagattgatgagagaattgatgtttagagaagaaagaaaagctaggaggttgaagaaaataaaatctaagacatatcgtaagatcaagaaaaaggaattgatgaaaaatagagagttggctgctgtttccagcgacgaagacaacgaagatcatgatatcgctagggctaaagaaagaatgactttgaaacacaagacaaattccaagtgggctaaagatatgatcaaacatggtatgacaaatgacgctgaaaccagagaagaaatggaagagatgttgagacaaggtgaacgtttaaaggcaaaaatgttggatagaaattctgatgatgaagaggatggtcgtgtgcaaacattaagtgatgttgaaaatgaggagaaagagaatatagactctgaagcattgaagagtaaattgggtaaaactggcgtaatgaatatggcctttatgaagaatggtgaagctagagaaagagaggcgaacaaagaaaccttacgtcaattaagggccgttgaaaatggtgatgatattaagctcttcgaaagtgacgaggaagagacgaatggagagaatattcaaataaataagggcagaagaatatataccccaggttccttggaatccaacaaagacatgaatgaattgaatgaccacactagaaaagagaataaagttgacgaatctagaagtttggaaaacagattaagggccaagaatagtgggcaaagtaaaaatgcaagaactaacgcagaaggcgcaataattgtggaggaggaaagtgatggtgaacctcttcaagacggtcagaataatcaacaggatgaagaagcaaaagatgttaatccttggttagctaatgaaagtgatgaagaacacactgtcaagaaacaatcttccaaagttaacgttattgacaaagacagttctaaaaatgttaaggccatgaacaaaatggagaaagctgagttgaagcaaaagaaaaagaagaaaggtaagtctaacgatgatgaagatctcttgttgacggcggatgattctacaaggttaaagatagtcgatccatatggtggttctgatgacgaacaaggggataatgtattcatgttcaagcagcaagacgtcattgcggaagcctttgctggcgacgacgtggtagcagaatttcaggaggaaaagaaacgtgtcattgatgatgaagatgataaagaagttgataccactttacctggttggggtgaatgggccggtgcaggttctaaaccaaaaaataagaagcgtaaattcatcaaaaaggttaagggtgttgttaataaagacaaaagaagagataagaatttacaaaatgtgatcataaatgaaaaagttaataagaaaaacttgaaataccaatcttctgcggtaccattcccattcgaaaatagagaacaatatgaaagatctttacgtatgccgataggtcaagaatggacatccagagcatctcatcaagagcttatcaaaccgagaatcatgactaagccaggccaagttattgatcctttgaaggcaccatttaagtga

SEQ ID NO: 8177 - DNA, 753 bp, Saccharomyces cerevisiae
atgaccgacagatattctttttcgttgaccactttttctcccagcggtaaattgggtcaaattgattacgccttgacggcagtaaaacaaggtgtcacctcattgggtataaaagctacgaatggtgtagtaattgccacagaaaagaagtcgtcctcgccactggccatgtcagaaacactttcgaaggtatccttactaacaccggacattggtgcagtatattccggtatggggcctgattatagagttttagtggataaatcaagaaaggtagcacatactagttataaacgaatttatggtgaataccctcccaccaaattactggtttctgaagtagccaaaataatgcaagaggctacacagtccggtggtgtcagaccctttggtgtttcactgttgattgctggccacgacgaatttaatgggtttagtttatatcaagtggatccttccggttcctacttcccttggaaagccaccgctataggaaaaggttctgtggcggcaaaaacgtttttagagaaaagatggaatgatgaactggaactagaagacgccattcatattgccttactaacgctgaaggagtcggtagagggcgaattcaatggtgacaccattgaactggctattattggcgatgagaaccctgacttgctaggctacactggtattccaaccgataaaggccctagatttagaaaattaacttctcaagaaataaatgatagattagaagcattatga

SEQ ID NO: 8178 - DNA, 753 bp, Artificial Sequence
  Description of Artificial Sequence: Synthetic polynucleotide
atgaccgacagatattctttttctttgaccactttttctcccagcggtaaattgggtcaaattgattacgccttgacggcagtaaaacaaggtgtcacctctttgggtataaaagctacgaatggtgtagtaattgccacagaaaagaagtcttcctctccattggccatgtctgaaacactttccaaggtatccttattaacaccggacattggtgcagtatattccggtatggggcctgattatagagttttagtggataaatctagaaaggtagcacatactagttataaaagaatttatggtgaataccctcccaccaaattattggtttctgaagtagccaaaataatgcaagaggctacacagtccggtggtgtcagaccctttggtgtttctttgttgattgctggccacgacgaatttaatgggtttagtttatatcaagtggatccttccggttcctacttcccttggaaagccaccgctataggaaaaggttctgtggcggcaaaaacgtttttagagaaaagatggaatgatgaattggaattggaagacgccattcatattgccttattgacgttgaaggagagtgtagagggcgaattcaatggtgacaccattgaattggctattattggcgatgagaaccctgacttgttgggctacactggtattccaaccgataaaggccctagatttagaaaattaacttctcaagaaataaatgatagattagaagcattatga

SEQ ID NO: 8179 - DNA, 3609 bp, Saccharomyces cerevisiae
atggctttcaaatcattcatatactctaaaggttatcatcgttccgccgctcaaaagaaaactgcaacatcttttttcgatagctcctaccagtatctaaggcaaaaccaaggtttggtaaattcggatcccgtacttcatgcatctcatctacatcctcatccggtcgtagtagcgaatgtaaactataacaacgtagatgatattttgcatccgcacgacctggattctagcataaacaacactaacaaccccctcacccacgaagaactactttataaccaaaacgtttcccttcgatcgctgaagcagcagcaaagtacaaactatgttaataacaacaacaacaatcaacataggtattattctaccggccccacattaccaacaaaccaatatgaccccttaaactttagtaataggaacttccaagatctatcattaaaaacatcacaaccatcagtacaacagccacaaaatgagtacagccttctaaaagacgaaaacgctccagtttggaaggaggacacagaaccatgcctgaataaatctacatacttgcaaactcatattgatgaaattaatcgttgttacgaacaaaaaaattataacaaaatcaactctttatatcaatcattgaaaagaaatgatatcgttccgccactggaaatatttacgaaggttttggactctctttgcaaaaggccgctagataacaatgatttagacaacaaaatgtacgaactcttgacgtgctaccaagatatgatcaacaatagattaaaacctcctgatgagatttataatattgtactattgtctcttttcaagggctcaattttggcctatcagttcgaaaatccaaacggtagtgatttttacaaaattgccattgaattattcaatacgaccaccaacgatccaaagcaaaaaagtgtggttaagtttcgcaatttttccaaagatgttctcgactataaccttttagcgatgaacatctatccgggccatatcaccctgtcaaaagcccaacaagttattaaatcttcacctgcctttatcaaagattctttttacttcatagcatgcttctcatacgctaaattaacaaatgataagtttgccattaaagaactttatgaagatttcagactatctttatcatctggcagtccagaccaaggcttatttgatgaccagtttgaaatttacagcgtgattctttctagttttattgaaactggcgaagttgaactggctaccaatcttttggacgatttagtttccaaaattcaaagctcaaatggtctcgcttccaatatttctttattgctatcgagtttcttaatttcgatgagtaaggtagatccttcaaaagcttatgaaatatggtttaaattccataatttaaattggatacctgagttctcttacgaattttatttggttttcatggcaaacagtttccaagattggaatttgactaagaaaatatatgactatatttttcctatggaaagaaatttgtctccattaaaaaaacaaaaattatcagattacttactgcatccaatcggtgttgactccattacgacctctttgttagattattctttacaattgaaagataatgaagttattatgaaaattctagaagagtccattgtcaaaaatttttcttttgatattggcatttatccatttgttttcaattatttaagagaaattcagtgcggcgaggactaccttatgagatttattgaatcacacgctgagtttatcaagaagagcaactcaattaacaaatttcaattcttaaatatgatagttgataatttccaatcacaatcattattaaacaaaatatcccacgcaaagtttttcaaaaacttcgtagaagatttcaatttagaaaactgtgaattggtcagctataatgggctaatatcatgcattaataacttcattaaaattccaaagacaataaaggatttcccatacattctggagattcatgcaattttggtaacaaaattatttgattttgacacttacccaattttgcaaaatggcaacaacgaggttcttttgaagtttagagatcaaattgaacatcagtttaaaatgttagctcaaaacttctgcagattaaacctagatcctaatttgttagcaggtgtcgtatctcaagctatgaaaatggttaacctagatgacaccgctaatggacaagatttattgaactttttcaatcatccaggtgattgggacaaatcttatcctttgtcactaggttctttcatcaggaactcacccagaggtggtataagagaatttacgaaattgagcaaagaaggttattgctttgattatgacacttataaagaattgataattaaacgagctattaacaaacaaattattgacaagtgcttagaggtatgccctgattcaattgaactaaaaaatatcgtaaatttgatgatttcaaagattcctggtaggaacctaacccaattgataatcaataatccaaaatttagcaaagtttttgtgccaaatttaagaaatgattctatgttaaaattaatcgaaaactgcgaatctttatcgaatttcataagaatctgtgatttcccagaaaagttcaaaagtattgctattcaagccgaaaacaaaaatgctattgagctgatttatgaaagactgtttgacggcggtaagtacgcagatattttgagatataataatattgttccggtgttaaatttggaacttttattaaaatcttgtatcaggtctggtgaattcaagaagtatgaaagtctctctaaaaagtttaatgacaaaataagcgaatcatcaaaaattgatattcagctagaatatttaattaataagaatgatttaaaaggggcattcacgctgtttgaaaagactccaagggagctgagaaccccccataagactatggacctttatacatttgccttatttttggatagtttcaataggaacatcacgtattatgaaagtccggaaaatacattacaattcgccaatattttatccagccaaacaagcttcataaatttactatcgacgtacaacttaattgcccattcagatcacctcatgaacttcaacgtcggtggaatggcagcaaaagttaaaaaagaaatcctgaatcaaatgctaaacaatttgtatgattccatcagactattgtctcccagcattgaaaatgacaaatcaatgaaggaaaaattgagagaaaaagtaaagaactactgcagattcaaagcttatttgaagtcacctgaattggacatggatgaactgaagaccttggtttcagtcgagtcttttttaaatcctttcactccttcaatgttgttcaataacttgatcgaaactatttatataaacgaacacgcttcctcgttagtccttcagaatgggttgatctattcactccaacagaaaggtctcaataagatactgagctatctagaagaaagcttcatcactagtggaaatgatgccaatattgaaaaggtcagggaattcaggtcccttttaaggaagagcaagcctcttcaagcatga

SEQ ID NO: 8180 - DNA, 3609 bp, Artificial Sequence
  Description of Artificial Sequence: Synthetic polynucleotide
atggctttcaaatctttcatatactctaaaggttatcatcgttccgccgctcaaaagaaaactgcaacatcttttttcgatagctcctaccagtatttgaggcaaaaccaaggtttggtaaattctgatcccgtacttcatgcatctcatttgcatcctcatccggtcgtagtagcgaatgtaaactataacaacgtagatgatattttgcatccgcacgacttggattctagcataaacaacactaacaaccccctcacccacgaagaattgctttataaccaaaacgtttcccttagatctttgaagcagcagcaaagtacaaactatgttaataacaacaacaacaatcaacataggtattattctaccggccccacattaccaacaaaccaatatgaccccttaaactttagtaataggaacttccaagatttatctttaaaaacatctcaaccatctgtacaacagccacaaaatgagtacagccttttgaaagacgaaaacgctccagtttggaaggaggacacagaaccatgcttgaataaatctacatacttgcaaactcatattgatgaaattaatcgttgttacgaacaaaaaaattataacaaaatcaactctttatatcaatctttgaaaagaaatgatatcgttccgccattggaaatatttacgaaggttttggactctctttgcaaaaggccgttagataacaatgatttagacaacaaaatgtacgaactcttgacgtgctaccaagatatgatcaacaatagattaaaacctcctgatgagatttataatattgtacttttgtctcttttcaagggctccattttggcctatcagttcgaaaatccaaacggtagtgatttttacaaaattgccattgaattattcaatacgaccaccaacgatccaaagcaaaaaagtgtggttaagtttcgcaatttttccaaagatgttctcgactataaccttttagcgatgaacatctatccgggccatatcaccttatccaaagcccaacaagttattaaatcttctcctgcctttatcaaagattctttttacttcatagcatgcttctcttacgctaaattaacaaatgataagtttgccattaaagaactttatgaagatttcagattatctttatcttctggcagtccagaccaaggcttatttgatgaccagtttgaaatttacagcgtgattctttctagttttattgaaactggcgaagttgaattggctaccaatcttttggacgatttagtttccaaaattcaaagcagtaatggtctcgcttccaatatttctttattgctttccagtttcttaatttccatgagtaaggtagatccttccaaagcttatgaaatatggtttaaattccataatttaaattggatacctgagttctcttacgaattttatttggttttcatggcaaacagtttccaagattggaatttgactaagaaaatatatgactatatttttcctatggaaagaaatttgtctccattaaaaaaacaaaaattaagtgattacttattacatccaatcggtgttgactccattacgacctctttgttagattattctttacaattgaaagataatgaagttattatgaaaattttggaagagtccattgtcaaaaatttttcttttgatattggcatttatccatttgttttcaattatttaagagaaattcagtgcggcgaggactaccttatgagatttattgaatctcacgctgagtttatcaagaagagcaactctattaacaaatttcaattcttaaatatgatagttgataatttccaatctcaatctttattaaacaaaatatcccacgcaaagtttttcaaaaacttcgtagaagatttcaatttagaaaactgtgaattggtcagctataatgggttgatatcttgcattaataacttcattaaaattccaaagacaataaaggatttcccatacattttagagattcatgcaattttggtaacaaaattatttgattttgacacttacccaattttgcaaaatggcaacaacgaggttcttttgaagtttagagatcaaattgaacatcagtttaaaatgttagctcaaaacttctgcagattaaaccttgatcctaatttgttagcaggtgtcgtatctcaagctatgaaaatggttaaccttgatgacaccgctaatggacaagatttattgaactttttcaatcatccaggtgattgggacaaatcttatcctttgtccttgggttctttcatcaggaactctcccagaggtggtataagagaatttacgaaattgagcaaagaaggttattgctttgattatgacacttataaagaattgataattaaaagagctattaacaaacaaattattgacaagtgcttagaggtatgccctgattctattgaattgaaaaatatcgtaaatttgatgatttccaagattcctggtaggaacttgacccaattgataatcaataatccaaaatttagcaaagtttttgtgccaaatttaagaaatgattctatgttaaaattaatcgaaaactgcgaatctttatccaatttcataagaatctgtgatttcccagaaaagttcaaaagtattgctattcaagccgaaaacaaaaatgctattgagttgatttatgaaagattatttgacggcggtaagtacgcagatattttgagatataataatattgttccggtgttaaatttggaacttttattaaaatcttgtatcaggtctggtgaattcaagaagtatgaaagtctctctaaaaagtttaatgacaaaataagcgaatcttctaaaattgatattcagttagaatatttaattaataagaatgatttaaaaggggcattcacgttgtttgaaaagactccaagggagttaagaaccccccataagactatggacctttatacatttgccttatttttggatagtttcaataggaacatcacgtattatgaaagtccggaaaatacattacaattcgccaatattttatccagccaaacaagcttcataaatttattatctacgtacaacttaattgcccattctgatcacctcatgaacttcaacgtcggtggaatggcagcaaaagttaaaaaagaaatcttgaatcaaatgttgaacaatttgtatgattccatcagattattgtctcccagcattgaaaatgacaaatctatgaaggaaaaattgagagaaaaagtaaagaactactgcagattcaaagcttatttgaagtctcctgaattggacatggatgaattgaagaccttggtttctgtcgagtcttttttaaatcctttcactccttctatgttgttcaataacttgatcgaaactatttatataaacgaacacgcttcctctttagtccttcagaatgggttgatctattccctccaacagaaaggtctcaataagatattaagctatttggaagaaagcttcatcactagtggaaatgatgccaatattgaaaaggtcagggaattcaggtcccttttaaggaagagcaagcctcttcaagcatga

SEQ ID NO: 8181 - DNA, 2007 bp, Saccharomyces cerevisiae
atggagcggcctggcttggtattgcaggaccttccacccgaaatcctgataaacatcttttctcacttagacgaaaaggacttgttcacgttgcaagaactttctacgcatttccggaacttaattcacgatgaagaactttggaagaacctgtttaagtctagagttcacacgactcatttccccacattttctcagtcttcgaaatttagtgtagagtatattgaaaggacacggggtcttcatcattggcagcataacaaggctataagaaccaaatacacaataattccgacgagaaactgggatcagcccagtatagaacgcatagtgtttgattatccacgagttgcagcttataatgatggtaccattacaattttacagttacaaaatcacaaaaggcagaagaaatttaagaaattgatttatattccatgtacaacaccacaaggttgttctaccatggacttcaatattaatgctgcagtgtttggtaggtttgacggcagagtgtttggaaaactgctaagtaacaaatcgtacttaacgcccgtgatggaatttacgggaaggcatagtgcaggcgttactgccatttgtaattcagaatcctgggacacgtcaagagaggactggtctgttagtggctctgaaaacggtgaaattatatggtggtgcgaaaataagcttgttaagatgtggaaggtttctaatagggtaatttggaaactggctttttttaaagattggaccttaattatggatgatgaaaagctgtacattatccatcaaatgcaggaattgcacagtattgatattcctaaggatctggacgaacagcctatgagggtacggtttttcaagatggatttcggttccatgactttggtacttgctgacctgaataacgtttatacaatatcggtcaatcccaatggtaacttcggcaatttgagaaagttggagatgcctgaacaaatatgcgcagttgaaatagatgaaaaaacttctcaaagggaacaaaactggcaatttgctggtgatgacggctgctatatcagtcttttgacgacacagaacactttatacattatcaatataagagatctttcttcgtcaggcttaaaagttcaatgtaagataagttttgatgagcaggtatacgtatcgcaggtgacaaatttaatagttgtggtagcattgccaaatgttcttcaaatattgaacgcgatgacaggcgagttaataaagacagtgttgaaaaccgagaagtttcccgaatttttgaaggtatcgcaggataaaatcattatgggaagcggtaacgttttgaattatttaaagtttgtttcaagtgattcaaagaaacatcaccattccactaaaggtaaaaacacagtaagcaataagtggaatgaaactttgaacacggagctgcaatattatgatgaagatgaagaccttagaagaaaaagacagtcagaaatatcaagattgatcgatgcgtatggtggagaccttgaactttcaggcgacaccgatgaagaaaacgacattcagttgagaattgcactcttagaatcacaggaggcgcaagcacggaatcaagctgaagcgggggagcctgtcggagatgatgaagatgagcagttaagaagggcgctggaggaatctcaactgatatatgagacgcaaacgaatagctctgcgaatcatggtaataatacgaatgatgagatagatgaagatgatgaagagtttctcagagccatcagacaatcaagagtggaggacgaaaggagaagacatcttagaaatcatactacaggtcgacgaaatgggcccttgagcgacgataattttgctacatatggtgcagcagagtcatccgaacgaacctcaactgagaacactatcggtagttctgttggcgttgatgctagtaataatgttgatgaagacttacaattggccattgcgttgtcattgagtgaaatcaattga

SEQ ID NO: 8182 - DNA, 2007 bp, Artificial Sequence
  Description of Artificial Sequence: Synthetic polynucleotide
atggagagacctggcttggtattgcaggaccttccacccgaaatcttaataaacatcttttctcacttagacgaaaaggacttgttcacgttgcaagaactttctacgcatttcagaaacttaattcacgatgaagaactttggaagaacttgtttaagtctagagttcacacgactcatttccccacattttctcagtcttctaaatttagtgtagagtatattgaaaggacaagaggtcttcatcattggcagcataacaaggctataagaaccaaatacacaataattccgacgagaaactgggatcagcccagtatagaacgcatagtgtttgattatccaagagttgcagcttataatgatggtaccattacaattttacagttacaaaatcacaaaaggcagaagaaatttaagaaattgatttatattccatgtacaacaccacaaggttgttctaccatggacttcaatattaatgctgcagtgtttggtaggtttgacggcagagtgtttggaaaattattaagtaacaaatcttacttaacgcccgtgatggaatttacgggaaggcatagtgcaggcgttactgccatttgtaattctgaatcctgggacacgtccagagaggactggtctgttagtggctctgaaaacggtgaaattatatggtggtgcgaaaataagcttgttaagatgtggaaggtttctaatagggtaatttggaaattggctttttttaaagattggaccttaattatggatgatgaaaagttgtacattatccatcaaatgcaggaattgcacagtattgatattcctaaggatttggacgaacagcctatgagggtaagatttttcaagatggatttcggttccatgactttggtacttgctgacttgaataacgtttatacaatatctgtcaatcccaatggtaacttcggcaatttgagaaagttggagatgcctgaacaaatatgcgcagttgaaatagatgaaaaaacttctcaaagggaacaaaactggcaatttgctggtgatgacggctgctatatcagtcttttgacgacacagaacactttatacattatcaatataagagatctttcttcttctggcttaaaagttcaatgtaagataagttttgatgagcaggtatacgtatctcaggtgacaaatttaatagttgtggtagcattgccaaatgttcttcaaatattgaacgcgatgacaggcgagttaataaagacagtgttgaaaaccgagaagtttcccgaatttttgaaggtatctcaggataaaatcattatgggaagcggtaacgttttgaattatttaaagtttgtttctagtgattctaagaaacatcaccattccactaaaggtaaaaacacagtaagcaataagtggaatgaaactttgaacacggagttacaatattatgatgaagatgaagaccttagaagaaaaagacagtctgaaatatctagattgatcgatgcgtatggtggagaccttgaactttctggcgacaccgatgaagaaaacgacattcagttgagaattgcactcttagaatctcaggaggcgcaagcaagaaatcaagctgaagcgggggagcctgtcggagatgatgaagatgagcagttaagaagggcgctcgaggaatctcaattgatatatgagacgcaaacgaatagctctgcgaatcatggtaataatacgaatgatgagatagatgaagatgatgaagagtttctcagagccatcagacaatctagagtggaggacgaaaggagaagacatcttagaaatcatactacaggtagaagaaatgggcccttgagcgacgataattttgctacatatggtgcagcagagtcttccgaaagaacctctactgagaacactatcggtagttctgttggcgttgatgctagtaataatgttgatgaagacttacaattggccattgcgttgtctttgagtgaaatcaattga

SEQ ID NO: 8183 - DNA, 939 bp, Saccharomyces cerevisiae
atgtcgatagtagagacatgcatatcttttgtttcgacaaatccgttttatccattttgtactggattgcttctgaattgtgtggttacacctctttacttttggaaaacgcaaaatggtagaatcgtggtcgtttcattgctgcaattcgtagtactttatgccacagcgtttatttcgattggaactgataaatctctttacagaaataaatgggtcgcgctaccgctatccaagaagacccgcatttctcgtaatactagtctgtactgcttcaagttaaagtacccatttgaaagattgcatattcccatgggataccacctggcagtaagggttacaataaatggtgagcgattagtgaggtactatacgccagtaaatgttcctaatacggagggtcacttggaattagtagtcaagacgtataaacatggtgtcgtttctaagtattttgataaattaaaaattcgccagtatgttgaatttaaagggccgttaggtgagctggaatatgatcaggacaccgcaacagagttgggtataatcgcaggggggtctggtataacccctgtattgcaagtgctgcaagaaatcataccctctccagaagacctaacacacatttctttgatatacgcaaacgaaacagaggatgacattctcatgaaatcgcaactagaccacatggctaaggagtacccgcattttaaagttcattatgtaattcataagccaaacggtaaatggaacggtgatgttgggtacgtaactctagaggaaatgaaaagatacctacctaaacaagcggaggaccatcgtttattgatttgcggaccacctaaaatgaatgaaatggttttgaattatgcaaaggagttggggtggagtaatgggtttcacaaaggtaatggaaccgataaagtttttgttttttaa

SEQ ID NO: 8184 - DNA, 939 bp, Artificial Sequence
  Description of Artificial Sequence: Synthetic polynucleotide
atgagtatagtagagacatgcatatcttttgtttctacaaatccgttttatccattttgtactggattgcttttgaattgtgtggttacacctctttacttttggaaaacgcaaaatggtagaatcgtggtcgtttctttgttgcaattcgtagtactttatgccacagcgtttatttccattggaactgataaatctctttacagaaataaatgggtcgcgttaccgttatccaagaagacccgcatttctcgtaatactagtttatactgcttcaagttaaagtacccatttgaaagattgcatattcccatgggataccacttggcagtaagggttacaataaatggtgagagattagtgaggtactatacgccagtaaatgttcctaatacggagggtcacttggaattagtagtcaagacgtataaacatggtgtcgtttctaagtattttgataaattaaaaattcgccagtatgttgaatttaaagggccgttaggtgagttagaatatgatcaggacaccgcaacagagttgggtataatcgcaggggggtctggtataacccctgtattgcaagtgttgcaagaaatcataccctctccagaagacttgacacacatttctttgatatacgcaaacgaaacagaggatgacattctcatgaaatctcaattggaccacatggctaaggagtacccgcattttaaagttcattatgtaattcataagccaaacggtaaatggaacggtgatgttgggtacgtaactttagaggaaatgaaaagatacttacctaaacaagcggaggaccatcgtttattgatttgcggaccacctaaaatgaatgaaatggttttgaattatgcaaaggagttggggtggagtaatgggtttcacaaaggtaatggaaccgataaagtttttgttttttga

SEQ ID NO: 8185 - DNA, 1581 bp, Saccharomyces cerevisiae
atgtctactatcccatttagaaagaactatgtgttcaaaaactgggccggaatttattctgcaaaaccagaacgttacttccaaccaagttcaattgatgaggttgtcgagttagtaaagagtgccaggctagctgaaaaaagcttagttactgttggttcgggccattctcctagtaacatgtgcgttactgatgaatggcttgttaacttagacagattggacaaagtacaaaagtttgttgaatatcctgagttacattatgccgatgtcacagttgatgccggtatgaggctttaccaattgaatgaatttttgggtgcgaaaggttactctatccaaaatttaggctctatctcagaacaaagtgttgctggcataatctctactggtagtcatggttcctcaccttatcacggtttgatttcttctcaatacgtaaacttgactattgttaatggtaagggcgaattgaagttcttggatgctgaaaacgatccagaagtctttaaagctgctttactttcagttggaaaaattggtatcattgtctctgctactatcagggttgttcccggcttcaatattaaatccactcaagaagtgattacttttgaaaaccttttgaagcaatgggataccctatggacttcatctgaatttatcagagtttggtggtacccttatactagaaaatgtgttctatggaggggtaacaaaactacagatgcccaaaatggtccagccaagtcatggtggggtaccaagctgggtagatttttctacgaaactctattatggatctctaccaaaatctatgcgccattaaccccatttgtggaaaagttcgttttcaacaggcaatacgggaaattggagaagagctctactggtgatgttaatgttaccgattctatcagcggatttaatatggactgtttgttttcacaatttgttgatgaatgggggtgccctatggataatggtttggaagtcttacgttcattggatcattctattgcgcaggctgccataaacaaagaattttatgtccacgtgcctatggaagtccgttgctcaaatactacattaccttctgaacccttggatactagcaagagaacaaacaccagtcccggtcccgtttatggcaatgtgtgccgcccattcctggataacacaccatcccattgcagatttgctccgttggaaaatgttaccaacagtcagttgacgttgtacataaatgctaccatttataggccgtttggctgtaatactccaattcataaatggtttaccctttttgaaaatactatgatggtagcgggaggtaagccacattgggccaagaacttcctaggctcaaccactctagctgctggaccagtgaaaaaggatactgattacgatgactttgaaatgagggggatggcattgaaggttgaagaatggtatggcgaggatttgaaaaagttccggaaaataagaaaggagcaagatcccgataatgtattcttggcaaacaaacagtgggctatcataaatggtattatagatcctagtgagttgtccgactag

SEQ ID NO: 8186 - DNA, 1581 bp, Artificial Sequence
  Description of Artificial Sequence: Synthetic polynucleotide
atgtctactatcccatttagaaagaactatgtgttcaaaaactgggccggaatttattctgcaaaaccagaacgttacttccaaccaagttctattgatgaggttgtcgagttagtaaagagtgccaggttggctgaaaaaagcttagttactgttggttctggccattctcctagtaacatgtgcgttactgatgaatggcttgttaacttagacagattggacaaagtacaaaagtttgttgaatatcctgagttacattatgccgatgtcacagttgatgccggtatgaggctttaccaattgaatgaatttttgggtgcgaaaggttactctatccaaaatttaggctctatcagtgaacaaagtgttgctggcataatctctactggtagtcatggttcctccccttatcacggtttgatttcttctcaatacgtaaacttgactattgttaatggtaagggcgaattgaagttcttggatgctgaaaacgatccagaagtctttaaagctgctttactttctgttggaaaaattggtatcattgtctctgctactatcagggttgttcccggcttcaatattaaatccactcaagaagtgattacttttgaaaaccttttgaagcaatgggataccttatggacttcttctgaatttatcagagtttggtggtacccttatactagaaaatgtgttttatggaggggtaacaaaactacagatgcccaaaatggtccagccaagtcttggtggggtaccaagttgggtagatttttctacgaaactttattatggatctctaccaaaatctatgcgccattaaccccatttgtggaaaagttcgttttcaacaggcaatacgggaaattggagaagagctctactggtgatgttaatgttaccgattctatcagcggatttaatatggactgtttgttttctcaatttgttgatgaatgggggtgccctatggataatggtttggaagtcttacgttctttggatcattctattgcgcaggctgccataaacaaagaattttatgtccacgtgcctatggaagtccgttgctccaatactacattaccttctgaacccttggatactagcaagagaacaaacaccagtcccggtcccgtttatggcaatgtgtgccgcccattcttggataacacaccatcccattgcagatttgctccgttggaaaatgttaccaacagtcagttgacgttgtacataaatgctaccatttataggccgtttggctgtaatactccaattcataaatggtttaccctttttgaaaatactatgatggtagcgggaggtaagccacattgggccaagaacttcttgggctctaccactttggctgctggaccagtgaaaaaggatactgattacgatgactttgaaatgagggggatggcattgaaggttgaagaatggtatggcgaggatttgaaaaagttcagaaaaataagaaaggagcaagatcccgataatgtattcttggcaaacaaacagtgggctatcataaatggtattatagatcctagtgagttgtccgactga

SEQ ID NO: 8187 - DNA, 1344 bp, Saccharomyces cerevisiae
atgagagaagttattagtattaatgtcggtcaagctggttgtcagattggtaatgcctgttgggaattatattcccttgagcacggtattaagccggatggacatctagaagatggcctttcaaagccgaagggaggagaagagggtttctccacgtttttccatgaaaccggctacggtaagttcgttccaagggctatttacgtggatttagagcccaacgttattgacgaagtccgtaacggtccttacaaggacttgttccatccagaacagttgatcagtggtaaggaggacgcggctaataattatgcaagaggccattacaccgttggtagagaaattttgggcgatgttctggataggattagaaaactggcagaccaatgtgatgggttacaagggttcttgtttacccattctcttggtggtggtactggttccggtctagggtccttactgttggaagaactatccgctgaatacggtaagaaatccaagctggaatttgccgtataccctgctccacaagtgtctacttctgtggttgagccttacaacacagttttaactacacatactacattggaacatgcagattgtactttcatggtcgataatgaggctatttacgacatgtgcaaaagaaacttggatatcccaagaccaagctttgcaaacttaaacaacctaattgctcaagtggtatcatctgttacagcatcattgagattcgacggttcattaaatgtagatttgaacgaatttcaaaccaatttggttccatatccaagaattcatttccccttagtttcatattctccagtcttatccaaatcaaaggcattccatgagtccaactctgtgtcagaaattacaaacgcttgttttgaacctggtaaccagatggtcaagtgtgatccaagagatggtaaatacatggctacttgtctgttatacaggggtgatgtggtaacaagagatgttcaaagagctgtcgagcaggtgaaaaacaagaagaccgtccaattggttgattggtgtccaactggtttcaagatcggtatttgctacgaacctccaactgccacaccaaactcacaattggccactgtggatagggccgtctgtatgttgtcaaataccacatccattgctgaggcttggaagagaatcgatagaaaattcgatttaatgtatgccaaacgtgctttcgtccactggtatgtcggtgaaggtatggaagaaggtgaattcaccgaagctagagaagatttggctgctttagaaagagattacatcgaagtgggtgccgactcatacgctgaggaagaggaattttaa

SEQ ID NO: 8188 - DNA, 1344 bp, Artificial Sequence
  Description of Artificial Sequence: Synthetic polynucleotide
atgagagaagttattagtattaatgtcggtcaagctggttgtcagattggtaatgcctgttgggaattatattcccttgagcacggtattaagccggatggacatttggaagatggcctttccaagccgaagggaggagaagagggtttctccacgtttttccatgaaaccggctacggtaagttcgttccaagggctatttacgtggatttagagcccaacgttattgacgaagtccgtaacggtccttacaaggacttgttccatccagaacagttgatcagtggtaaggaggacgcggctaataattatgcaagaggccattacaccgttggtagagaaattttgggcgatgttttggataggattagaaaattggcagaccaatgtgatgggttacaagggttcttgtttacccattctcttggtggtggtactggttccggtttggggtccttattattggaagaattatccgctgaatacggtaagaaatccaagttggaatttgccgtataccctgctccacaagtgtctacttctgtggttgagccttacaacacagttttaactacacatactacattggaacatgcagattgtactttcatggtcgataatgaggctatttacgacatgtgcaaaagaaacttggatatcccaagaccaagctttgcaaacttaaacaacttgattgctcaagtggtatcttctgttacagcaagtttgagattcgacggttctttaaatgtagatttgaacgaatttcaaaccaatttggttccatatccaagaattcatttccccttagtttcttattctccagtcttatccaaatccaaggcattccatgagtccaactctgtgtctgaaattacaaacgcttgttttgaacctggtaaccagatggtcaagtgtgatccaagagatggtaaatacatggctacttgtcttttatacaggggtgatgtggtaacaagagatgttcaaagagctgtcgagcaggtgaaaaacaagaagaccgtccaattggttgattggtgtccaactggtttcaagatcggtatttgctacgaacctccaactgccacaccaaactctcaattggccactgtggatagggccgtctgtatgttgagcaataccacatccattgctgaggcttggaagagaatcgatagaaaattcgatttaatgtatgccaaacgtgctttcgtccactggtatgtcggtgaaggtatggaagaaggtgaattcaccgaagctagagaagatttggctgctttagaaagagattacatcgaagtgggtgccgactcttacgctgaggaagaggaattttga

SEQ ID NO: 8189 - DNA, 1257 bp, Saccharomyces cerevisiae
atggactatttacatgtatataacaacaaccaggcgcacgttcccagaacacctccaggcaggcagtgcctatcgcccgttctgcccccaatcatattggcgttagatcaacaacattcgctgacatttgggtactccagccccaggtgcttgccaacacccatattgccttctatgagcacaaatacgcccgtccattggtcacaacaggttgtcactatccctgtcgctgtacgaaatcatgccgcaatgatgcctattatcacacctatgacctccccaagacctcagtttgaagcaacggctccctcaccccctttggccccggtcgccataaagctgccagatttgaaactaccaccgtcgcctgtgcccagcacagtagaggacagagtttcacatcctatcctgcccaaaattgtgatcgggaatggcggcggccgtgatgttgagcgagatagtaccgaggaattaattaggaagattccaaactacattggttgtgcaaaaacaaaggcacaattgagcaaagttaggtctggtaaacaactaattgcatgcgcacaggaatatcaccatccagtaaacaaggacgagatcgaaaatatcaacaacattctaaacttcagggactttattttcaagcatccaaaatcctccttcgagttcctatgtaccctgtcgtttgagcagttcgttagagtatattcattcattagtttcatctacaggacaaagaaaatcaataagaacaagtacgaactcgtttgtgagatgaatgttcacgagcaactcagcaataagcgtatacaaagaacaaggactcctgaaaagtacaaaatacatttgatctgcgagtcaaaactcatactgaccttcaaccactgtacgaagacagtaaaatttgagtctatcaatggcgggcactgccatccgatttcagccaaccacattatcaagccctccctcttccttacccactgcattaataaatgctaccagaccgtgtcagaccctaccgatttgaaattggcattgagagacgccttagaagcccttgatcatgaaaggataggattgtctttcttaaagaggagacatttcaagtgctcacaccaagcatcatcactctcgaatgccagcgccacattgaagaaacaagaagatcatgacacatttggtgtacatacaggaataattcatacggcaaatttcttcatgtttaatgcatctagcgatatattccagaggaactaa

SEQ ID NO: 8190 - DNA, 1257 bp, Artificial Sequence
  Description of Artificial Sequence: Synthetic polynucleotide
atggactatttacatgtatataacaacaaccaggcgcacgttcccagaacacctccaggcaggcagtgcctttctcccgttttgcccccaatcatattggcgttagatcaacaacattctttaacatttgggtactccagccccaggtgcttgccaacacccatattgccttctatgagcacaaatacgcccgtccattggtctcaacaggttgtcactatccctgtcgctgtaagaaatcatgccgcaatgatgcctattatcacacctatgacctccccaagacctcagtttgaagcaacggctccctctccccctttggccccggtcgccataaagttaccagatttgaaattaccaccgtctcctgtgcccagcacagtagaggacagagtttctcatcctatcttgcccaaaattgtgatcgggaatggcggcggccgtgatgttgagagagatagtaccgaggaattaattaggaagattccaaactacattggttgtgcaaaaacaaaggcacaattgagcaaagttaggtctggtaaacaattgattgcatgcgcacaggaatatcaccatccagtaaacaaggacgagatcgaaaatatcaacaacattttgaacttcagggactttattttcaagcatccaaaatcctccttcgagttcttgtgtaccttatcttttgagcagttcgttagagtatattctttcattagtttcatctacaggacaaagaaaatcaataagaacaagtacgaactcgtttgtgagatgaatgttcacgagcaactcagcaataagcgtatacaaagaacaaggactcctgaaaagtacaaaatacatttgatctgcgagagtaaactcatattgaccttcaaccactgtacgaagacagtaaaatttgagtctatcaatggcgggcactgccatccgatttctgccaaccacattatcaagccctccctcttccttacccactgcattaataaatgctaccagaccgtgagcgaccctaccgatttgaaattggcattgagagacgccttagaagcccttgatcatgaaaggataggattgtctttcttaaagaggagacatttcaagtgctcccaccaagcatcttctctctctaatgccagcgccacattgaagaaacaagaagatcatgacacatttggtgtacatacaggaataattcatacggcaaatttcttcatgtttaatgcatctagcgatatattccagaggaactga

SEQ ID NO: 8191 - DNA, 1950 bp, Saccharomyces cerevisiae
atggtttcagcgcaagtggctaccgagctaggacagcctataccactggacactcaacatgcggtatctgtatgtttcccgacatggaaatctgtaatttcgtatgtggagaaagaccccaaagttttagggtgtttaaagtctggctaccccaggttttggatccacccctcgattcaaaagctgcgtgatattttaatagaaaagtatgctaaagaaaacgaaacgtgcttttgcttcccctcttatagagttgccaaacggtgcagagagtatgtaagaaggaagtgcgcgcatcgcaatggcaaagtaaggatattacagttagccacggcgaaacctatcaacgaggagcagaagacgtggaaaagagagtgtaagattgcggtagtgtttgtagatggggcatacgagaatatattaaaacagtattggcaatacaccggagagatcatctcaagcagactagctgaatatgttttgcatgaacttttcatggtagaaaagaaatccagccctgcagaggaaaaggaatacatagagatgcggtatggcaggaatctgaattttgcatttgccgatcgagccaaggaattgattaagaagaggatcgctacaaaggttatagataaagatgagcacgatgaggaggaaaactaccatttcttagcaggtaaccaagatgaacaggacttccaggacacgtttctggattcatccctcaatgaggctaaccacggagaagatcatgacggcgggattagcggtgaagtagacagtcaagaagaaccgcataatggccttgtttccactatacccccggagcccatcgaaatgagcacgatagaggaagagcaatccgtagaggaagatgccgggaggtgtgcattaagggtttgccctgagagagacgtttttttgtttccgagcggcatggcgtcgatattcactgcgcatagattgctgttgcaatgggactcactgcgtttgaatagatccagaaatggaagcgacgtcacctcgtcacctccgaataagaagaccgtgatttttgggttcccttatgcggatacattacatgtcttgcaagagtttaatgaaacgtatttcttgggagaaggagatgagtcttcaatgaaagaactaacaaaaattttacattccggggagcaaattcttgccgtttttatagagaccccatcaaacccactattaaaaatgggaaatttactggaactgaaaaggctttcggaattatttgggtttttcattatcattgatgaaactgtgggtggaatagttaatattgacggtctaccgtttgctgatatcgtttgcagttcattgacgaagacatttagtggggactctaacgtcattggtggttcaatggttttaaatccacaaagccgggtatacgagtttgcctcccgttttatgcaattagaagacgaatatgaagatttattatggtgcgaagacgcaatttacctggaaagaaattccagagatttcattgctagaaccatcaggatcaactacagcaccgaatacctcttagataaaatactgaagccacacgtaggcgaaaataaactattcaagaaaatctactaccctaatctaacctcaaaagaaacactaaccaactatgacatggtgaggtgtaagaaagaaggtggatacggcgggctcttttcactaacgttccatgacgaagatcatgctgcggccttttatgacaatctaaagctgaacaagggtccttccttgggcacaaatttcacactcgcattcccctatacgctcatgacatactaccacgaactcgacatggctgaaaaatttggggttgagagaaatcttctcagaatcagcgtaggcctcgaaagtcagtcaatattgggcaagatcttccaagaggcaattgataaaacggtagaaatatga

SEQ ID NO: 8192 - DNA, 1950 bp, Artificial Sequence
  Description of Artificial Sequence: Synthetic polynucleotide
atggtttctgcgcaagtggctaccgagttaggacagcctataccattggacactcaacatgcggtatctgtatgtttcccgacatggaaatctgtaatttcttatgtggagaaagaccccaaagttttagggtgtttaaagtctggctaccccaggttttggatccacccctctattcaaaagttgcgtgatattttaatagaaaagtatgctaaagaaaacgaaacgtgcttttgcttcccctcttatagagttgccaaaagatgcagagagtatgtaagaaggaagtgcgcgcatcgcaatggcaaagtaaggatattacagttagccacggcgaaacctatcaacgaggagcagaagacgtggaaaagagagtgtaagattgcggtagtgtttgtagatggggcatacgagaatatattaaaacagtattggcaatacaccggagagatcatcagtagcagattggctgaatatgttttgcatgaacttttcatggtagaaaagaaatccagccctgcagaggaaaaggaatacatagagatgagatatggcaggaatttgaattttgcatttgccgatagagccaaggaattgattaagaagaggatcgctacaaaggttatagataaagatgagcacgatgaggaggaaaactaccatttcttagcaggtaaccaagatgaacaggacttccaggacacgtttttggattcttccctcaatgaggctaaccacggagaagatcatgacggcgggattagcggtgaagtagacagtcaagaagaaccgcataatggccttgtttccactatacccccggagcccatcgaaatgagcacgatagaggaagagcaatccgtagaggaagatgccgggaggtgtgcattaagggtttgccctgagagagacgtttttttgtttccgagcggcatggcgtctatattcactgcgcatagattgttgttgcaatgggactctttacgtttgaatagatccagaaatggaagcgacgtcacctcttctcctccgaataagaagaccgtgatttttgggttcccttatgcggatacattacatgtcttgcaagagtttaatgaaacgtatttcttgggagaaggagatgagtcttctatgaaagaattaacaaaaattttacattccggggagcaaattcttgccgtttttatagagaccccatctaacccattattaaaaatgggaaatttattggaattgaaaaggctttctgaattatttgggtttttcattatcattgatgaaactgtgggtggaatagttaatattgacggtttaccgtttgctgatatcgtttgcagttctttgacgaagacatttagtggggactctaacgtcattggtggttctatggttttaaatccacaaagcagagtatacgagtttgcctcccgttttatgcaattagaagacgaatatgaagatttattatggtgcgaagacgcaatttacttggaaagaaattccagagatttcattgctagaaccatcaggatcaactacagcaccgaatacctcttagataaaatattgaagccacacgtaggcgaaaataaattattcaagaaaatctactaccctaatttgacctccaaagaaacattaaccaactatgacatggtgaggtgtaagaaagaaggtggatacggcgggctcttttctttgacgttccatgacgaagatcatgctgcggccttttatgacaatttgaagttgaacaagggtccttccttgggcacaaatttcacactcgcattcccctatacgctcatgacatactaccacgaactcgacatggctgaaaaatttggggttgagagaaatcttctcagaatcagcgtaggcctcgaaagtcagagtatattgggcaagatcttccaagaggcaattgataaaacggtagaaatatga

SEQ ID NO: 8193 - DNA, 180 bp, Saccharomyces cerevisiae
atgttgaaaagattccctacccctatccttaaagtatactggcctttctttgtggctggcgccgcagtgtattatggtatgagtaaagctgctgacctttcttctaacacgaaggaatttatcaatgatccaagaaatcccagattcgcaaaaggtggaaagtttgtggaagttgattga

SEQ ID NO: 8194 - DNA, 180 bp, Artificial Sequence; identical to SEQ ID NO: 8193
  Description of Artificial Sequence: Synthetic polynucleotide

SEQ ID NO: 8195 - DNA, 3756 bp, Saccharomyces cerevisiae
atgtcatcggaagaattcaaaggacttccgatcaaacgagatatatcctccactatctatgctgatagacctccagcattatctgctcctccgtgcgttggtgctactgggaatgataaaatacaagtactaccgatccccaagaaatctaggactatcaaaaccgataagccaagacctttcctatgccacatctgtacaagggggttcgtgagacaagagcatttaaaacgacatcaaagagcacatacgaacgagaaaccctttctctgtgtcttttgcggaaggtgttttgcaagaagggatctggttttgcggcatcaacataaactacactcagcactggtttctaaagaatctataaactctaaggataaaactgaaatagatgctatcaatgataagaatataattcagattcaaggcaataagcaaacaattttaccaacgcctagcaatccgctagcaaagacggcagtacagttgaaaaaagccgccaaagagaaaaaaaatggtaagcaaggcaaattagacctgagtccttcatacggggcaaataatcatagtacagacgtttcaccgtcagtggggaactcatcaacacctgctgtaatcgaagagacagactcgtcttcccattttccgcttccagatacaaatattccgaccaaatcaaagaggcatgcatcattttcggcatctagcgcattcacatatagttcagataactttcaaaagctacatcaacaagcaaaatcggattttgatgaactacaggaaagtatccctcaccaagtgggattttctacaccccaattaacggcacaacaacttatagaaaatgctattgaatctggtgttgtggacttggaaactttggatttaccgccatttttatcgttagatggcttaccacccgcgagctcaagtgctgctgtagcagcatccgagcagatagatatctgtccctcctctgcgacagacactatctctggcgctaacagtactccaaaccaagcagcaacagctcctccttttcaattaccaatagcaagggaaagcagttccttgtttttggcaaataccccttatttatctgactttttaacaatgggatcttcctatggtggttctggagggtttgccaaatctatcactgctgatcccagtttggactatttcaactacaaaaaccattcgcatccagattcaaggcataacaacagctccagcggtatcaattatagcaataataaaaacaacaatgaatcaattgaaaaatctcaaaacaacagtaacgtaatcaatgaaactattgaccacactgacatccatgcccatcacgcggatgctcatgatgactccttcatagaaagtgaagagtggctctctaagtttattatggactctcagattgataatgatcttaaacttaatataaaccattttaacgatattgggtttaacaatttacaccctcaaaatcctacgacccattctgaaccaagaaatatgcataatgaaaacagagatatgcaccgatctgcaagcaaatttcaatctgtatcggaaaacatctctccaagggaacaaatgtctttgtttaaaactaaacagaacaaggccatttcaaaatttctgtctgacgagaaaattccttcaactgcgtcaccatcttcctctgcttcgccagttcagtttgataaaaaaaatgttgacatcaatgaatttttactggacgagtccgtgtccaacttattcacgactaggcaaattgatttattcaagaaaaatgtgaacttatattcaccactatttcaaaatcaaaaagacgcagtctcatctacaagcctgacgccatcgttgactacacaaactgcaacgacacaatcggggccagggtggacagattcctcccaaaagctgactttctttacagaacagttgagaaatttaattattaaagaaaacaatctaaagtctaatctctttcccactgttgatgaactgaatcattatgtcgatttatatcaagtggaatttcataaatatttcccctttattcatttatactcaattataccatccagtgaaaactatcctttagtaatatccatcagtatgattggtgctctttacggatttcattccacacatgcactactattgtcgaaaatagcaaggacgagagttagaatgttcctagaaaatactcgaagcaatcatgataagacaccaatttggctaatgcaatctttagtcttattaacgtttaccagcattttctccaatgatatgaatgcctttagaaccgtgaatacccagataatgattttggttcagttgattaaaatttcaaagttgaattacccattagaaaacttcattaagccaccgatcgaaagtgaccatgttttagaatatcaagataaccccgctgttttgaaccagttcaaggctcaatacaatacccgtgaacaaataaacagaaatttcaaatattttatcttagcacaatcaagaataagaatatgccacatagtcctgctgatttctaacctctttaaatccttagtggatttcgattgttgttttcattccatagatttgaagtgtggtgttccttgttacaacgaggtactgttcttttgcgaaaattcaagaacttggaatgagaacttgacgagattcaatatcgttttggattccaagttttccctaattgaagtatctaatggtgaatcaaactacgagaagtgcttgatgtatttgtcaaacggtaatccttatctttataaaaacgctaaaatctcattcaagactttgctatctttactgatctctattcatgaaaagataaacatcgaaagagatgcgttgaaagatagttacgaaagcgatttccatgcgaagaatgttcagtggcggatgcattcaagacccttggtcgccacaatgctaaaacattgggaactactttacatcaaaaatggtgggatattggctctcagtgacgaaaacctgccaataataaatactaatccgtcgtttagattgataattcccttgtacttctttgcaaagctaaggaagtgccttgatattgctccaacactaagatgcatttggaaccaagactggaactcaatgaatagctctttagaaaaagtgtgctacgagcgggaatcactacgagaggccacagagtacgctgtatccgttatcactttctggattgatactgtctctgtaatgaagggtaaatcgacacagactccaatcttcaccattacttgtatttttgtttcgatattggtcatagcggggtacatgaggagattggaagactttgctcaaaacaaaaacagtgattgtatgattggtagtttaaaaagcactgacaggatcttgtggttaaaagcattcaaaactttgaagaggatcgaatcacatttatctgaaagagagtataaattacaaacatttgctgagtttttaagggttccagataatggcagtcttgatattgagagtttggactcatccttaatagagaatactttgaattcacatgatgttaccaatcaagcgctggacataatcacgagaacaagattgtcatcaagaacattgtattgcggtgctagaattcttggcgatacaccagtctggcccgtatctctgttgtttgctcatgccttacaatctagggctatttacaatatcaaccacaggaaatctgtaaacagtgtatag

SEQ ID NO: 8196 - DNA, 3756 bp, Artificial Sequence
  Description of Artificial Sequence: Synthetic polynucleotide
atgtcttctgaagaattcaaaggacttccgatcaaaagagatatatcctccactatctatgctgatagacctccagcattatctgctcctccgtgcgttggtgctactgggaatgataaaatacaagtattaccgatccccaagaaatctaggactatcaaaaccgataagccaagacctttcttgtgccacatctgtacaagggggttcgtgagacaagagcatttaaaaagacatcaaagagcacatacgaacgagaaaccctttctctgtgtcttttgcggaaggtgttttgcaagaagggatttggttttgagacatcaacataaattacactctgcattggtttctaaagaatctataaactctaaggataaaactgaaatagatgctatcaatgataagaatataattcagattcaaggcaataagcaaacaattttaccaacgcctagcaatccgttggcaaagacggcagtacagttgaaaaaagccgccaaagagaaaaaaaatggtaagcaaggcaaattagacttgagtccttcttacggggcaaataatcatagtacagacgtttctccgtctgtggggaactcttctacacctgctgtaatcgaagagacagactcttcttcccattttccgcttccagatacaaatattccgaccaaatccaagaggcatgcaagtttttctgcatctagcgcattcacatatagttctgataactttcaaaagttgcatcaacaagcaaaatctgattttgatgaattacaggaaagtatccctcaccaagtgggattttctacaccccaattaacggcacaacaacttatagaaaatgctattgaatctggtgttgtggacttggaaactttggatttaccgccatttttatctttagatggcttaccacccgcgagcagtagtgctgctgtagcagcatccgagcagatagatatctgtccctcctctgcgacagacactatctctggcgctaacagtactccaaaccaagcagcaacagctcctccttttcaattaccaatagcaagggaaagcagttccttgtttttggcaaataccccttatttatctgactttttaacaatgggatcttcctatggtggttctggagggtttgccaaatctatcactgctgatcccagtttggactatttcaactacaaaaaccattctcatccagatagtaggcataacaacagctccagcggtatcaattatagcaataataaaaacaacaatgaaagtattgaaaaatctcaaaacaacagtaacgtaatcaatgaaactattgaccacactgacatccatgcccatcacgcggatgctcatgatgactccttcatagaaagtgaagagtggctctctaagtttattatggactctcagattgataatgatcttaaacttaatataaaccattttaacgatattgggtttaacaatttacaccctcaaaatcctacgacccattctgaaccaagaaatatgcataatgaaaacagagatatgcacagatctgcaagcaaatttcaatctgtatctgaaaacatctctccaagggaacaaatgtctttgtttaaaactaaacagaacaaggccatttccaaatttttatctgacgagaaaattccttccactgcgtctccatcttcctctgcttctccagttcagtttgataaaaaaaatgttgacatcaatgaatttttattagacgagtccgtgtccaacttattcacgactaggcaaattgatttattcaagaaaaatgtgaacttatattctccattatttcaaaatcaaaaagacgcagtcagctctacaagcttaacgccatctttgactacacaaactgcaacgacacaaagtgggccagggtggacagattcctcccaaaagttgactttctttacagaacagttgagaaatttaattattaaagaaaacaatttgaagtctaatctctttcccactgttgatgaattgaatcattatgtcgatttatatcaagtggaatttcataaatatttcccctttattcatttatactctattataccatccagtgaaaactatcctttagtaatatccatcagtatgattggtgctctttacggatttcattccacacatgcattattattgagtaaaatagcaaggacgagagttagaatgttcttggaaaatactagaagcaatcatgataagacaccaatttggttaatgcaatctttagtcttattaacgtttaccagcattttctccaatgatatgaatgcctttagaaccgtgaatacccagataatgattttggttcagttgattaaaatttccaagttgaattacccattagaaaacttcattaagccaccgatcgaaagtgaccatgttttagaatatcaagataaccccgctgttttgaaccagttcaaggctcaatacaatacccgtgaacaaataaacagaaatttcaaatattttatcttagcacaatctagaataagaatatgccacatagtcttattgatttctaacctctttaaatccttagtggatttcgattgttgttttcattccatagatttgaagtgtggtgttccttgttacaacgaggtattattcttttgcgaaaattctagaacttggaatgagaacttgacgagattcaatatcgttttggattccaagttttccttgattgaagtatctaatggtgaatctaactacgagaagtgcttgatgtatttgtctaacggtaatccttatctttataaaaacgctaaaatctctttcaagactttgttatctttattgatctctattcatgaaaagataaacatcgaaagagatgcgttgaaagatagttacgaaagcgatttccatgcgaagaatgttcagtggagaatgcattccagacccttggtcgccacaatgttgaaacattgggaattgctttacatcaaaaatggtgggatattggctctcagtgacgaaaacttaccaataataaatactaatccgtcctttagattgataattcccttgtacttctttgcaaagttaaggaagtgccttgatattgctccaacattaagatgcatttggaaccaagactggaactccatgaatagctctttagaaaaagtgtgctacgagagagaatctttaagagaggccacagagtacgctgtatccgttatcactttctggattgatactgtctctgtaatgaagggtaaatctacacagactccaatcttcaccattacttgtatttttgtttctatattggtcatagcggggtacatgaggagattggaagactttgctcaaaacaaaaacagtgattgtatgattggtagtttaaaaagcactgacaggatcttgtggttaaaagcattcaaaactttgaagaggatcgaaagtcatttatctgaaagagagtataaattacaaacatttgctgagtttttaagggttccagataatggcagtcttgatattgagagtttggactcttccttaatagagaatactttgaattctcatgatgttaccaatcaagcgttggacataatcacgagaacaagattgagtagtagaacattgtattgcggtgctagaattcttggcgatacaccagtctggcccgtatctttgttgtttgctcatgccttacaatctagggctatttacaatatcaaccacaggaaatctgtaaacagtgtatga

SEQ ID NO: 8197 - DNA, 1272 bp, Saccharomyces cerevisiae
atgactgaacctgccctgagtagcgctaataacgctctgatgcaaaaactaacaggtcgacaactttttgacaagatcggccgtcctactaggatcgttgcaccaatggtagaccaatccgaattagcatggcgtattctatcgagaagatacggtgcaaccttggcgtacactcccatgttacatgcaaaattatttgctacctcgaagaaatatagagaagataattggtcttccttagacggctctagcgtagataggccgttggttgtacagttctgcgctaatgacccagagtatctattggcggcagctaaactggtggaagataaatgcgatgcggtagatttgaatttgggctgtcctcaaggcatagctaagaaaggtcactatgggtcatttttgatggaagaatgggaccttatacacaatttaatcaacaccttgcacaaaaatttgaaagttccagttacagcaaaaatacgtatatttgacgactgtgaaaagagtttgaattacgccaagatggtgctggatgctggagctcaatttttaaccgtccatgggagagtaagagagcaaaaaggacaaaaaactggtttagctaactgggaaacaatcaaatacctaagagataatttacctaaagaaaccgtgttttttgctaacgggaatatcttatatcctgaagatatttcacgttgtatggaacatatcggtgctgacgcagtgatgagtgctgaggggaacttatacaatcctggtgttttcaatgtaggccaaactaagaacaaggagaagatatttccacgcgtagataagattatcagagagtatttccagattgtcaaagaatgccaggaatctaaagcctccaagacagcaatgaaatcacatttttttaagattttaaggcctttcttgccgcatcatactgatattaggtcaacacttgctactatgaatgcaaaagccacgtgggaagaatgggaggaacaagtagtgaagcctgtcgaaaaagtagtgcaagaaatatttgaacagccagatatcgctattaaggatgaaattactatcggcgaaaagcaatcatggggtggttcatatagaactgttccatactggagatgtcaaccatattttaggcctgttaacggtatcacaggtgataaaagagttatgcaaggcctcatagatgaaagcgtgaacaagaaacgtaaagctgacgtgccattagaatctgctgataaaaagaaggacgtgaaagcttaa

SEQ ID NO: 8198 - DNA, 1272 bp, Artificial Sequence
  Description of Artificial Sequence: Synthetic polynucleotide
atgactgaacctgccttgagtagcgctaataacgctttgatgcaaaaattaacaggtagacaactttttgacaagatcggccgtcctactaggatcgttgcaccaatggtagaccaatccgaattagcatggcgtattttatctagaagatacggtgcaaccttggcgtacactcccatgttacatgcaaaattatttgctacctccaagaaatatagagaagataattggtcttccttagacggctctagcgtagataggccgttggttgtacagttctgcgctaatgacccagagtatcttttggcggcagctaaattagtggaagataaatgcgatgcggtagatttgaatttgggctgtcctcaaggcatagctaagaaaggtcactatgggtcttttttgatggaagaatgggaccttatacacaatttaatcaacaccttgcacaaaaatttgaaagttccagttacagcaaaaatacgtatatttgacgactgtgaaaagagtttgaattacgccaagatggtgttggatgctggagctcaatttttaaccgtccatgggagagtaagagagcaaaaaggacaaaaaactggtttagctaactgggaaacaatcaaatacttgagagataatttacctaaagaaaccgtgttttttgctaacgggaatatcttatatcctgaagatatttctcgttgtatggaacatatcggtgctgacgcagtgatgagtgctgaggggaacttatacaatcctggtgttttcaatgtaggccaaactaagaacaaggagaagatatttccacgcgtagataagattatcagagagtatttccagattgtcaaagaatgccaggaatctaaagcctccaagacagcaatgaaatctcatttttttaagattttaaggcctttcttgccgcatcatactgatattaggtctacacttgctactatgaatgcaaaagccacgtgggaagaatgggaggaacaagtagtgaagcctgtcgaaaaagtagtgcaagaaatatttgaacagccagatatcgctattaaggatgaaattactatcggcgaaaagcaaagttggggtggttcttatagaactgttccatactggagatgtcaaccatattttaggcctgttaacggtatcacaggtgataaaagagttatgcaaggcctcatagatgaaagcgtgaacaagaaacgtaaagctgacgtgccattagaatctgctgataaaaagaaggacgtgaaagcttga

SEQ ID NO: 8199 - DNA, 606 bp, Saccharomyces cerevisiae
atgtcagccaatgtacaagaagctgcaaatgcagctatagagccggccagtttcgttaaagtcccaatgcctgagccaccaagtagtttgcaacaattgatcaatgattggcaattaatcaagcatagagaaggtgggtattttaaggaaacagataggtctccctacaccatggaagtagaaaaaccagtaaatggaggctcaggtaatactgaaatggtaacaagaaatcaatctacgttgatctattatctactaacccccgacagcccaattgggaaatttcataagaatattaacaggatcatacatatcttacaaagaggcaagggtcaatacgttctagtatatcctgatggtcaagtgaagtcatttaaagttggttttgactataagaatggagaagtctcgcaatgggttgtccccggaggtgtgtttaaggcaagtttccttctgccaaacgaagaatttgacaacggtttcttgattagtgaagtagtggtaccaggttttgactttgaggaccataccttcttgaagggtgaagatgaactgaaacatcttgtgggacctgaaaaggcagctgagttagcttttttagcttga

SEQ ID NO: 8200 - DNA, 606 bp, Artificial Sequence
  Description of Artificial Sequence: Synthetic polynucleotide
atgtctgccaatgtacaagaagctgcaaatgcagctatagagccggccagtttcgttaaagtcccaatgcctgagccaccaagtagtttgcaacaattgatcaatgattggcaattaatcaagcatagagaaggtgggtattttaaggaaacagataggtctccctacaccatggaagtagaaaaaccagtaaatggaggcagtggtaatactgaaatggtaacaagaaatcaatctacgttgatctattatttattaacccccgacagcccaattgggaaatttcataagaatattaacaggatcatacatatcttacaaagaggcaagggtcaatacgttttggtatatcctgatggtcaagtgaagagctttaaagttggttttgactataagaatggagaagtctctcaatgggttgtccccggaggtgtgtttaaggcaagtttccttttaccaaacgaagaatttgacaacggtttcttgattagtgaagtagtggtaccaggttttgactttgaggaccataccttcttgaagggtgaagatgaattgaaacatcttgtgggacctgaaaaggcagctgagttagcttttttagcttga

SEQ ID NO: 8201 - DNA, 549 bp, Saccharomyces cerevisiae
atgtttaaacgttccatcattcaacagtcccgcttattctccaattctgcttctagactaggtaaaaaagtgttctttgatcctgcggtcaatggaaccaaaatcggcagaatagaatttgaattatatgataatgtggttcctaaaactgctgaaaatttcagagccttatgtaccggcgaaaagggctggggctataaaggtgtccctttccacagaatcatcccagacttcatgatccaaggtggtgacactgatttgactaacggttttgggggcaaatccatttacggttccaagttcgctgacgaaaattttgtcaaaaagcatgacaaggcaggtttgttatctatggcaaatgctggaccaaacactaacggttctcaattcttcattaccactgtgccttgtccatggttggatggaaaacacgttgtctttggtgaggtaaccaaaggtatggacattgtcaaagcaatcgaatcatacggtactgcttctggtaaaccaagagctgaaatcgttatcgaagaagctggtgagttatga

SEQ ID NO: 8202 - DNA, 549 bp, Artificial Sequence
  Description of Artificial Sequence: Synthetic polynucleotide
atgtttaaacgttccatcattcaacagtcccgcttattctccaattctgcttctagattaggtaaaaaagtgttctttgatcctgcggtcaatggaaccaaaatcggcagaatagaatttgaattatatgataatgtggttcctaaaactgctgaaaatttcagagccttatgtaccggcgaaaagggctggggctataaaggtgtccctttccacagaatcatcccagacttcatgatccaaggtggtgacactgatttgactaacggttttgggggcaaatccatttacggttccaagttcgctgacgaaaattttgtcaaaaagcatgacaaggcaggtttgttatctatggcaaatgctggaccaaacactaacggttctcaattcttcattaccactgtgccttgtccatggttggatggaaaacacgttgtctttggtgaggtaaccaaaggtatggacattgtcaaagcaatcgaatcttacggtactgcttctggtaaaccaagagctgaaatcgttatcgaagaagctggtgagttatga

SEQ ID NO: 8203 - DNA, 480 bp, Saccharomyces cerevisiae
atggggatatattcattttggatctttgataggcattgtaactgtatatttgatagagaatggacattggcgtccaatagcgcaagtggtacaataaactccaaacagaatgaagaagatgcaaaacttctgtatggtatgatattttcgttacgctccattacacaaaagctctccaaagggtctgttaaaaatgacatacggagtatatctacaggaaagtatagagtccacacatactgtacagcttcagggctatggtttgttctattgtccgactttaaacagcagtcttacactcaggttttacagtatatttacagccatatttatgtcaaatacgtgagcaacaacttattatcaccgtacgatttcgctgaaaacgaaaatgaaatgagaggtcaagggacaagaaagatcaccaatagaaactttatatccgttctcgagtcatttctagcaccaatggttaatcagtga

SEQ ID NO: 8204 - DNA, 480 bp, Artificial Sequence
  Description of Artificial Sequence: Synthetic polynucleotide
atggggatatattctttttggatctttgataggcattgtaactgtatatttgatagagaatggacattggcgtccaatagcgcaagtggtacaataaactccaaacagaatgaagaagatgcaaaacttttatatggtatgatattttctttacgctccattacacaaaagctctccaaagggtctgttaaaaatgacataagaagtatatctacaggaaagtatagagtccacacatactgtacagcttctgggttgtggtttgttttattgtccgactttaaacagcagtcttacactcaggttttacagtatatttacagccatatttatgtcaaatacgtgagcaacaacttattatctccgtacgatttcgctgaaaacgaaaatgaaatgagaggtcaagggacaagaaagatcaccaatagaaactttatatccgttctcgagtcttttttggcaccaatggttaatcagtga

SEQ ID NO: 8205 - DNA, 2835 bp, Saccharomyces cerevisiae
atggacacgcagattgcaataactggcgttgccgtcgggaaagaaatcaataatgataattcaaagaccgaccaaaaagtttctttgccgaaggcggatgtcccatgcatagataaggccacacaaactattatagaaggatgctccaaagatgaccctaggctttcgtatcctacaaaactagagactactgaaaaggggaagaccaaaagaaactcatttgcttgtgtatgctgccattccttgaagcaaaaatgtgagccttctgatgttaacgatatttataggaaaccttgtcgaaggtgtctgaaacacaagaagctgtgcaagtttgatctttcaaaaaggacaaggaagagaaagcctagatcaaggtcacccacaccttttgaatcgccgatggtgaatgtctctactaaaagcaaaggcccaacagattctgaagaatctagcttgaaggatggtacatcttacctcgccagtttcccttctgacccaaacgctaaacaatttccaaactctcggacagtcttacctggacttcaacaaagtttatccgatctttggtcaactttaagccaaccaccctcatatggagcaagagaggccgaaaccacatctaccggagagataaccaccaataatcatacaaaatccaatggcagtgtgcccacaaatccagcagttttagcatctaacgatgagcatactaatattagtgatgcgccagttatatacagtacctacaactcccccgtaccgatttcatctgcgcctaccagcattaacagcgaggcactgttcaaacataggcctaaaattgtgggtgatgaggaaacacagaacgtcaaagtgaaaagacaaaagaaatcatactctagacatatgacacggtcgttcaggaagcagctacaatcactgattatttctcaaaaaggtaaaattagagatatttcgatgaagcttgacacttggtcaaagcagtggaatgaccttgttgaaaagagcatgtttttgccaaccattgcagatcctgtatcagtaggaatcatatctcatgaagaagcgacgcttcgcttacatctttataaaaccgagatttcatatttgtcaaaattaccattcataaaggtcgaagagaatgttagtgtcgatgaattaagaaagaagaaacctattttattctccgtcattatgtcatgtgtttcaattgtactaacacccaaacaaaccaccagaggaactattatgaagcttgatagttttgtactaaacttaattacaaatcagattttcaaggctaataataaatctatcgaaatcatcgaatcactgtctacattatgtctatggtataatttttttgaatggtcaagtaaaacgagataccatatatttaattacatctgttgctgtttaactagagatttggggcctacctatgtcaatcgatcctttggtatgtttagtgacgaggatccaaagagattcaagtcacctttggaactttacagtaatggcgccagtttaactttattggtatacatttccgcactcaatatttcaatttttctacgtcaatcaatacaagctcgttggagtcacgtcacggaaaaggcctgcgaggatttagttaaagagacgaaaaaatcgcgacattatgacaacgataaactattacttgattcagctgatgatcccatcttggttcaatttgctaaaatgaaccacgtcttggaaaatattcacacacacctacatgagagagatctaaatgatgacgagtttgatgatcctatttttactaaaaagtatcttaataaactaatggaaaaataccacaagcaattgcaagagattttcactaaacttgacagaaacaggccaagagtgattgcattttattactctgtagaagcttatttataccagtataaacttgcagtattcatcggggaaatgtcgcataccataaacgaaaaagtcgaattgcccagagaaataatggatgattttgttaaatgctatcattgctgtaaatctgcccttgaggaattttccaagttggagccaattttaattacctcattacctttatttcatacttccaggatcatatataccgttggtatgctcttattaaagctgcgctattccgtagtcgctattccttcgtttcacgatttaatgccccttacagatgatgctattgccttggtaataggggtaaacaatcttttagaaaaaacatcagagctgtatcccttcaacaactctctttacaaatttaggtatgttattgcgttattttgtcaaacctacgcaaacaaagttattgatgttgctgatcgctacaatgcagaaagggagaaactaaaggaaaagcaggtcatagacgaagtaagcaatggccacgatggtacgaagccaataaatgcatatgtaaccgagtcacaaaagatgccaacagaagaagatccaattatcgacaataatacaaaccaaaacataaccgctgtacctgatgaaatgctgccagtatactcaagagttcgtgacgatactgccgcaatgaacctgaatattaacagtacttcatatatgaatgaatccccacatgaacaccgagagagtatgacaggcacaactctattaccaccaccatttatttctaatgatgtgactaactctgctgactcaactaatataaaaccatcacctagttcatcggtagacaacttgaacgattatttgacggatataaactccttagcatggggcgttaattcattaaatgacgagttttggacagaccttttcatgaatgatatttga

SEQ ID NO: 8206 - DNA, 2835 bp, Artificial Sequence
  Description of Artificial Sequence: Synthetic polynucleotide
atggacacgcagattgcaataactggcgttgccgtcgggaaagaaatcaataatgataattctaagaccgaccaaaaagtttctttgccgaaggcggatgtcccatgcatagataaggccacacaaactattatagaaggatgctccaaagatgaccctaggctttcctatcctacaaaattagagactactgaaaaggggaagaccaaaagaaactcttttgcttgtgtatgctgccattccttgaagcaaaaatgtgagccttctgatgttaacgatatttataggaaaccttgtagaaggtgtttgaaacacaagaagttgtgcaagtttgatctttctaaaaggacaaggaagagaaagcctagaagtaggtctcccacaccttttgaatctccgatggtgaatgtctctactaaaagcaaaggcccaacagattctgaagaatctagcttgaaggatggtacatcttacctcgccagtttcccttctgacccaaacgctaaacaatttccaaactctcgcacagtcttacctggacttcaacaaagtttatccgatctttggtctactttaagccaaccaccctcttatggagcaagagaggccgaaaccacatctaccggagagataaccaccaataatcatacaaaatccaatggcagtgtgcccacaaatccagcagttttagcatctaacgatgagcatactaatattagtgatgcgccagttatatacagtacctacaactcccccgtaccgatttcttctgcgcctaccagcattaacagcgaggcattattcaaacataggcctaaaattgtgggtgatgaggaaacacagaacgtcaaagtgaaaagacaaaagaaatcttactctagacatatgacaagatctttcaggaagcagttacaaagtttgattatttctcaaaaaggtaaaattagagatatttccatgaagcttgacacttggtccaagcagtggaatgaccttgttgaaaagagcatgtttttgccaaccattgcagatcctgtatctgtaggaatcatatctcatgaagaagcgacgcttcgcttacatctttataaaaccgagatttcttatttgagtaaattaccattcataaaggtcgaagagaatgttagtgtcgatgaattaagaaagaagaaacctattttattctccgtcattatgtcctgtgtttctattgtattaacacccaaacaaaccaccagaggaactattatgaagcttgatagttttgtattgaacttaattacaaatcagattttcaaggctaataataaatctatcgaaatcatcgaatctttatctacattatgtttatggtataatttttttgaatggtctagtaaaacgagataccatatatttaattacatctgttgctgtttaactagagatttggggcctacctatgtcaatagatcctttggtatgtttagtgacgaggatccaaagagattcaagtctcctttggaactttacagtaatggcgccagtttaactttattggtatacatttccgcactcaatatttccatttttttacgtcaaagtatacaagctcgttggagtcacgtcacggaaaaggcctgcgaggatttagttaaagagacgaaaaaatctagacattatgacaacgataaattattacttgattctgctgatgatcccatcttggttcaatttgctaaaatgaaccacgtcttggaaaatattcacacacacttgcatgagagagatttgaatgatgacgagtttgatgatcctatttttactaaaaagtatcttaataaattaatggaaaaataccacaagcaattgcaagagattttcactaaacttgacagaaacaggccaagagtgattgcattttattactctgtagaagcttatttataccagtataaacttgcagtattcatcggggaaatgtcccataccataaacgaaaaagtcgaattgcccagagaaataatggatgattttgttaaatgctatcattgctgtaaatctgcccttgaggaattttccaagttggagccaattttaattaccagtttacctttatttcatacttccaggatcatatataccgttggtatgctcttattaaagttgcgctattccgtagtcgctattccttcttttcacgatttaatgccccttacagatgatgctattgccttggtaataggggtaaacaatcttttagaaaaaacaagtgagttgtatcccttcaacaactctctttacaaatttaggtatgttattgcgttattttgtcaaacctacgcaaacaaagttattgatgttgctgatcgctacaatgcagaaagggagaaattgaaggaaaagcaggtcatagacgaagtaagcaatggccacgatggtacgaagccaataaatgcatatgtaaccgagtctcaaaagatgccaacagaagaagatccaattatcgacaataatacaaaccaaaacataaccgctgtacctgatgaaatgcttccagtatactctagagttcgtgacgatactgccgcaatgaacttgaatattaacagtacttcttatatgaatgaatccccacatgaacacagggagagtatgacaggcacaactttattaccaccaccatttatttctaatgatgtgactaactctgctgactctactaatataaaaccatctcctagttcttctgtagacaacttgaacgattatttgacggatataaactccttagcatggggcgttaattctttaaatgacgagttttggacagaccttttcatgaatgatatttga

SEQ ID NO: 8207 - DNA, 3165 bp, Saccharomyces cerevisiae
atgccgccgctattcaagggactgaaacagatggcaaagccaattgcctatgtttcaagattttcggcgaaacgaccaattcatataatacttttttctctaatcatatccgcattcgcttatctatccgtcattcagtattacttcaatggttggcaactagattcaaatagtgtttttgaaactgctccaaataaagactccaacactctatttcaagaatgttcccattactacagagattcctctctagatggttgggtatcaatcaccgcgcatgaagctagtgagttaccagccccacaccattactatctattaaacctgaacttcaatagtcctaatgaaactgactccattccagaactagctaacacggtttttgagaaagataatacaaaatatattctgcaagaagatctcagtgtttccaaagaaatttcttctactgatggaacgaaatggaggttaagaagtgacagaaaaagtcttttcgacgtaaagacgttagcatattctctctacgatgtattttcagaaaatgtaacccaagcagacccgtttgacgtccttattatggttactgcctacctaatgatgttctacaccatattcggcctcttcaatgacatgaggaagaccgggtcaaatttttggttgagcgcctctacagtggtcaattctgcatcatcacttttcttagcattgtatgtcacccaatgtattctaggcaaagaagtttccgcattaactctttttgaaggtttgcctttcattgtagttgttgttggtttcaagcacaaaatcaagattgcccagtatgccctggagaaatttgaaagagtcggtttatctaaaaggattactaccgatgaaatcgtttttgaatccgtgagcgaagagggtggtcgtttgattcaagaccatttgctttgtatttttgcctttatcggatgctctatgtatgctcaccaattgaagactttgacaaacttctgcatattatcagcatttatcctaatttttgaattgattttaactcctacattttattctgctatcttagcgcttagactggaaatgaatgttatccacagatctactattatcaagcaaacattagaagaagacggtgttgttccatctacagcaagaatcatttctaaagcagaaaagaaatccgtatcttctttcttaaatctcagtgtggttgtcattatcatgaaactctctgtcatactgttgtttgtcttcatcaacttttataactttggtgcaaattgggtcaatgatgccttcaattcattgtacttcgataaggaacgtgtttctctaccagattttattacctcgaatgcctctgaaaactttaaagagcaagctattgttagtgtcaccccattattatattacaaacccattaagtcctaccaacgcattgaggatatggttcttctattgcttcgtaatgtcagtgttgccattcgtgataggttcgtcagtaaattagttctttccgccttagtatgcagtgctgtcatcaatgtgtatttattgaatgctgctagaattcataccagttatactgcagaccaattggtgaaaactgaagtcaccaagaagtcttttactgctcctgtacaaaaggcttctacaccagttttaaccaataaaacagtcatttctggatcgaaagtcaaaagtttatcatctgcgcaatcgagctcatcaggaccttcatcatctagtgaggaagatgattcccgcgatattgaaagcttggataagaaaatacgtcctttagaagaattagaagcattattaagtagtggaaatacaaaacaattgaagaacaaagaggtcgctgccttggttattcacggtaagttacctttgtacgctttggagaaaaaattaggtgatactacgagagcggttgcggtacgtaggaaggctctttcaattttggcagaagctcctgtattagcatctgatcgtttaccatataaaaattatgactacgaccgcgtatttggcgcttgttgtgaaaatgttataggttacatgcctttgcccgttggtgttataggccccttggttatcgatggtacatcttatcatataccaatggcaactacagagggttgtttggtagcttctgccatgcgtggctgtaaggcaatcaatgctggcggtggtgcaacaactgttttaactaaggatggtatgacaagaggcccagtagtccgtttcccaactttgaaaagatctggtgcctgtaagatatggttagactcagaagagggacaaaacgcaattaaaaaagcttttaactctacatcaagatttgcacgtctgcaacatattcaaacttgtctagcaggagatttactcttcatgagatttagaacaactactggtgacgcaatgggtatgaatatgatttctaaaggtgtcgaatactcattaaagcaaatggtagaagagtatggctgggaagatatggaggttgtctccgtttctggtaactactgtaccgacaaaaaaccagctgccatcaactggatcgaaggtcgtggtaagagtgtcgtcgcagaagctactattcctggtgatgttgtcagaaaagtgttaaaaagtgatgtttccgcattggttgagttgaacattgctaagaatttggttggatctgcaatggctgggtctgttggtggatttaacgcacatgcagctaatttagtgacagctgttttcttggcattaggacaagatcctgcacaaaatgttgaaagttccaactgtataacattgatgaaagaagtggacggtgatttgagaatttccgtatccatgccatccatcgaagtaggtaccatcggtggtggtactgttctagaaccacaaggtgccatgttggacttattaggtgtaagaggcccgcatgctaccgctcctggtaccaacgcacgtcaattagcaagaatagttgcctgtgccgtcttggcaggtgaattatccttatgtgctgccctagcagccggccatttggttcaaagtcatatgacccacaacaggaaacctgctgaaccaacaaaacctaacaatttggacgccactgatataaatcgtttgaaagatgggtccgtcacctgcattaaatcctaa

SEQ ID NO: 8208 - DNA, 3165 bp, Artificial Sequence
  Description of Artificial Sequence: Synthetic polynucleotide
atgccgccgcttttcaagggattgaaacagatggcaaagccaattgcctatgtttctagattttctgcgaaaaggccaattcatataatacttttttctttgatcatatccgcattcgcttatttatccgtcattcagtattacttcaatggttggcaattggattctaatagtgtttttgaaactgctccaaataaagactccaacactttatttcaagaatgttcccattactacagagattcctctttagatggttgggtatctatcaccgcgcatgaagctagtgagttaccagccccacaccattactatcttttaaacttgaacttcaatagtcctaatgaaactgactccattccagaattggctaacacggtttttgagaaagataatacaaaatatattttacaagaagatctcagtgtttccaaagaaatttcttctactgatggaacgaaatggaggttaagaagtgacagaaaaagtcttttcgacgtaaagacgttagcatattctctctacgatgtattttctgaaaatgtaacccaagcagacccgtttgacgtccttattatggttactgcctacttgatgatgttctacaccatattcggcctcttcaatgacatgaggaagaccgggtctaatttttggttgagcgcctctacagtggtcaattctgcatcttctcttttcttagcattgtatgtcacccaatgtattttgggcaaagaagtttccgcattaactctttttgaaggtttgcctttcattgtagttgttgttggtttcaagcacaaaatcaagattgcccagtatgccttagagaaatttgaaagagtcggtttatctaaaaggattactaccgatgaaatcgtttttgaatccgtgagcgaagagggtggtcgtttgattcaagaccatttgctttgtatttttgcctttatcggatgctctatgtatgctcaccaattgaagactttgacaaacttctgcatattaagtgcatttatcttgatttttgaattgattttaactcctacattttattctgctatcttagcgcttagattagaaatgaatgttatccacagatctactattatcaagcaaacattagaagaagacggtgttgttccatctacagcaagaatcatttctaaagcagaaaagaaatccgtatcttctttcttaaatctcagtgtggttgtcattatcatgaaactctctgtcatattattgtttgtcttcatcaacttttataactttggtgcaaattgggtcaatgatgccttcaattctttgtacttcgataaggaacgtgtttctttaccagattttattacctctaatgcctctgaaaactttaaagagcaagctattgttagtgtcaccccattattatattacaaacccattaagtcctaccaacgcattgaggatatggttcttttattgcttcgtaatgtcagtgttgccattcgtgataggttcgtcagtaaattagttctttccgccttagtatgcagtgctgtcatcaatgtgtatttattgaatgctgctagaattcataccagttatactgcagaccaattggtgaaaactgaagtcaccaagaagtcttttactgctcctgtacaaaaggcttctacaccagttttaaccaataaaacagtcatttctggatctaaagtcaaaagtttatcttctgcgcaaagcagctcttctggaccttcttcttctagtgaggaagatgattcccgcgatattgaaagcttggataagaaaatacgtcctttagaagaattagaagcattattaagtagtggaaatacaaaacaattgaagaacaaagaggtcgctgccttggttattcacggtaagttacctttgtacgctttggagaaaaaattaggtgatactacgagagcggttgcggtacgtaggaaggctctttctattttggcagaagctcctgtattagcatctgatcgtttaccatataaaaattatgactacgaccgcgtatttggcgcttgttgtgaaaatgttataggttacatgcctttgcccgttggtgttataggccccttggttatcgatggtacatcttatcatataccaatggcaactacagagggttgtttggtagcttctgccatgcgtggctgtaaggcaatcaatgctggcggtggtgcaacaactgttttaactaaggatggtatgacaagaggcccagtagtccgtttcccaactttgaaaagatctggtgcctgtaagatatggttagactctgaagagggacaaaacgcaattaaaaaagcttttaactctacatctagatttgcacgtttacaacatattcaaacttgtttggcaggagatttactcttcatgagatttagaacaactactggtgacgcaatgggtatgaatatgatttctaaaggtgtcgaatactctttaaagcaaatggtagaagagtatggctgggaagatatggaggttgtctccgtttctggtaactactgtaccgacaaaaaaccagctgccatcaactggatcgaaggtcgtggtaagagtgtcgtcgcagaagctactattcctggtgatgttgtcagaaaagtgttaaaaagtgatgtttccgcattggttgagttgaacattgctaagaatttggttggatctgcaatggctgggtctgttggtggatttaacgcacatgcagctaatttagtgacagctgttttcttggcattaggacaagatcctgcacaaaatgttgaaagttccaactgtataacattgatgaaagaagtggacggtgatttgagaatttccgtatccatgccatccatcgaagtaggtaccatcggtggtggtactgttttggaaccacaaggtgccatgttggacttattaggtgtaagaggcccgcatgctaccgctcctggtaccaacgcacgtcaattagcaagaatagttgcctgtgccgtcttggcaggtgaattatccttatgtgctgccttggcagccggccatttggttcaaagtcatatgacccacaacaggaaacctgctgaaccaacaaaacctaacaatttggacgccactgatataaatcgtttgaaagatgggtccgtcacctgcattaaatcctga

SEQ ID NO: 8209 - DNA, 1236 bp, Saccharomyces cerevisiae
atgtctgatttgttaccactagctacctacagtttgaatgttgaaccttataccccggttccagcaatcgacgtcacgatgcccatcaccgttcgtattactatggctgctttgaacccggaagccatcgatgaagagaacaaaccatcgactttaagaattatcaaaagaaacccggactttgaagatgatgattttttaggtggtgattttgatgaagacgaaatagacgaagaatcctctgaggaagaagaagaggaaaaaacccaaaagaaaaagaagagtaaaggcaagaaggctgaaagtgaaagtgaggatgatgaagaagacgatgacgaggacgatgagttccaagaatccgtccttttgactttatctccggaagcccaataccaacaatctttggacttgaccattactccagaagaagaagtccaattcattgtcactggttcttacgctatctccttgagcggtaactatgttaagcatccatttgatactccaatgggagtcgaaggtgaagacgaagatgaagacgctgacatctatgacagtgaagactacgacttgaccccagatgaggatgaaattattggcgacgacatggacgacttggatgacgaagaggaagaagaagttcgtattgaagaagtccaagaagaagatgaagaagataatgatggagaagaagaacaagaagaagaagaagaagaagaacaaaaagaagaagttaagccagaacctaagaaaagcaaaaaggaaaaaaagagaaagcacgaagagaaagaagaagaaaagaaagctaaaaaagtaaagaaggtcgaattcaagaaggacttagaggagggtccaacaaaacccaaaagcaaaaaggaacaagataagcataaaccaaagagtaaggttttggaaggcggcatagtaatcgaagaccgtactatcggtgatggcccacaggctaagagaggtgccagagtaggcatgaggtacattggtaagttaaagaacggtaaagttttcgacaagaacaccagcggtaaaccatttgcattcaaacttggccgtggtgaagttatcaaaggctgggacattggtgttgccggtatgtctgttggtggcgaacgtagaatcatcattccagcaccatatgcctacgggaagcaagctctgccaggtattcctgccaattccgaactgacattcgacgttaaattggtttctatgaaaaactag

SEQ ID NO: 8210 - DNA, 1236 bp, Artificial Sequence
  Description of Artificial Sequence: Synthetic polynucleotide
atgtctgatttgttaccattggctacctacagtttgaatgttgaaccttataccccggttccagcaatcgacgtcacgatgcccatcaccgttcgtattactatggctgctttgaacccggaagccatcgatgaagagaacaaaccatctactttaagaattatcaaaagaaacccggactttgaagatgatgattttttaggtggtgattttgatgaagacgaaatagacgaagaatcctctgaggaagaagaagaggaaaaaacccaaaagaaaaagaagagtaaaggcaagaaggctgaaagtgaaagtgaggatgatgaagaagacgatgacgaggacgatgagttccaagaatccgtccttttgactttatctccggaagcccaataccaacaatctttggacttgaccattactccagaagaagaagtccaattcattgtcactggttcttacgctatctccttgagcggtaactatgttaagcatccatttgatactccaatgggagtcgaaggtgaagacgaagatgaagacgctgacatctatgacagtgaagactacgacttgaccccagatgaggatgaaattattggcgacgacatggacgacttggatgacgaagaggaagaagaagttcgtattgaagaagtccaagaagaagatgaagaagataatgatggagaagaagaacaagaagaagaagaagaagaagaacaaaaagaagaagttaagccagaacctaagaaaagcaaaaaggaaaaaaagagaaagcacgaagagaaagaagaagaaaagaaagctaaaaaagtaaagaaggtcgaattcaagaaggacttagaggagggtccaacaaaacccaaaagcaaaaaggaacaagataagcataaaccaaagagtaaggttttggaaggcggcatagtaatcgaagaccgtactatcggtgatggcccacaggctaagagaggtgccagagtaggcatgaggtacattggtaagttaaagaacggtaaagttttcgacaagaacaccagcggtaaaccatttgcattcaaacttggccgtggtgaagttatcaaaggctgggacattggtgttgccggtatgtctgttggtggcgaacgtagaatcatcattccagcaccatatgcctacgggaagcaagctttgccaggtattcctgccaattccgaattaacattcgacgttaaattggtttctatgaaaaactga

SEQ ID NO: 8211 - DNA, 531 bp, Saccharomyces cerevisiae
atgagtgcccaaaaagctccaaagtggtatccatccgaagacgtcgctgctctaaagaagaccagaaaggctgctcgcccacaaaagttgcgtgcctctctagttccaggtaccgtcttgatcttactagctggtcgtttcagaggtaagagagttgtttacttgaagcatctagaagacaacactttgttgatttctggtccattcaaggtcaatggtgttcctttgagaagagtcaatgctcgttacgtcattgctacctctactaaggtttctgtcgaaggtgtcaacgttgaaaaattcaatgtcgaatactttgctaaggaaaaattgactaagaaggaaaagaaggaagctaacttgttcccagaacaacaaaacaaggaaatcaaggctgaacgtgttgaagaccaaaaggttgtcgacaaggctttgattgctgaaatcaagaagactccattattgaagcaatacttgtctgcttctttctctttgaagaacggtgacaagccacacatgttgaaattttaa

SEQ ID NO: 8212 - DNA, 531 bp, Artificial Sequence
  Description of Artificial Sequence: Synthetic polynucleotide
atgagtgcccaaaaagctccaaagtggtatccatccgaagacgtcgctgctttgaagaagaccagaaaggctgctcgcccacaaaagttgcgtgcctctttggttccaggtaccgtcttgatcttattagctggtcgtttcagaggtaagagagttgtttacttgaagcatttggaagacaacactttgttgatttctggtccattcaaggtcaatggtgttcctttgagaagagtcaatgctcgttacgtcattgctacctctactaaggtttctgtcgaaggtgtcaacgttgaaaaattcaatgtcgaatactttgctaaggaaaaattgactaagaaggaaaagaaggaagctaacttgttcccagaacaacaaaacaaggaaatcaaggctgaacgtgttgaagaccaaaaggttgtcgacaaggctttgattgctgaaatcaagaagactccattattgaagcaatacttgtctgcttctttctctttgaagaacggtgacaagccacacatgttgaaattttga

SEQ ID NO: 8213 - DNA, 4638 bp, Saccharomyces cerevisiae
atgactggcatcaaagctcaagtccatcccccacctgatagtaccctatttcatgaggaggagaagaagaaagtaggaggcaatttacctcaaaaggtcataaatcaacaagaaaggggttctgatcacgctccatcgggtcaccatcaataccaccaactgattaaccatgacgcaaatgacacaaagacctcaaattcagtttctgatgtgtctaaaggtcagaaaactgctgactccaacccggaaggtaagaaacagtcatcaaaagacatatttgttgcctccagcgctcaaaaaaccaatcaattgcccggtcccaacccacagggaagcataggagccgtgccattggaaggtttacgtccgaaggaattcagatcagcaccatctaggaagccaaataaattcgacacttcgattactaagcctggcgtcttagacgacttaggcaaacttgatgaaaaggatattaaggaaaaatttcacctagattccgacgacaagttatttccatggcaaaatgttggtgagttccatgcttcaggaaagggttcgccaaatacaaagatgtccagggttataaaagcttacattctggaaaatttttataacgattggtactgtaatatagccaccgttcttggaacttgtttcttctcatggttatttgcttacattgggttttcatggtggtctatgatatttatcttcttgggaactgcgaccgtttacaacgcagaatatacaagattcaacagaaatatcagagatgacttgaaaagagttacagtcgaagaaaccttgtcggatcgcgttgaatccactacgtggttgaattcatttttatcaaaattttgggtgatttacatgccagttttatctcaacaagtcaaagataacgttaaccctcaactggcaggtgttgctccaggttacggtatcgatgcgttagctatcgatgaattcactctgggctctaaagctcccaccataaaaggtattaaatcgtacaccaagactggtaaaaacactgttgaaatggattggtcatttgcattcaccccaagcgatgtctcggatatgacagctactgaagctagggagaagatcaatccaaaaatatctctgggtgtcacgttaggaaaaagttttgtctctaaaacaatgcctattttggttgaagacattaacgttgctggtaaaatgcgtattaaagttgaatttggtaaagctttcccaaatatcaaaattgtttctttacaacttttagaaccacctttgattgatttcgcactgaaaccaattggtggtgatactttaggtcttgatgttatgtcattcttgcctggtttgaagagttttgttaaaaacattatcaactccaatatagggcctatgctattccctccgaaccatttggatattaatgttgaagacattatggctgctcaatcaaaagaagctattggtgtccttgccgtaaccattgcttctgccgactctttgaaaggctcagatttcattaccaatactgtcgatccttatattgttatgactaccgaagatgctgtgcctggtacagatgaagaagtgcgtacatctatcaaatcaaatgttaaaaatccacgttggaacgaaaccaaatatctattattaaacaccttagagcaaaagttaaacttaaagtgctttgacttcaatgatgtaagaaaagataccgtaattggtgatcttcaacttgacttggcagatttactacaaaaccctgttttggataatcaaactgctgaattaagatccggtacaaaatcaaaaggtattttacattattccttacactggttccctgtgaaagaagataaatcagaggaaaaagcagttgagcgtgccgaagctaaggccaagggcaagaaagaagatgaaaacgaggacactactgaaaaagaagaagacgagaatgaagaaagttctcaaactgatgtcgggattgccaagatcactttacaaaaggtcaaatatctggatacaaccagttctatgaccggtagcttgagcccatgtgctgaattattcattgatggacaaaaagtaaagagctatagaactttgagacgtatcaatgagccatcttggaatgagaccatcgaagttttggttccatcaaaatctaactctaagtttgtcctaaaaatattcgatgacagaatgaatggtaaggcgctgatctgtgagtattcatcttctttagatgatataatgactactttagacactgctcaagagtttgttaaaggctcaccacaaggtgacatttatttggatgtttcttggaaatcaattgaaatgaccggagcttttgccgctgcaaactctgtaagcgaacctattggttgtattaagctagacgttaaggatgccattatcaagggtgacttatccggtgtaggggatgttgatccatattacaccgtatcgttgaatagacgtgttctttacaagtccatatatcattctgatacggatcatcccatttttgacaacagcacctacgttcctatcttctctccaaatcaaattttgactctcgaatttcatgattatcaaaagatcggcaaagaccgtttcattggctctgtacaaattcctacatcaaatgttttcaaaaaagatcctaaatcaggaaaatatgttgggaataatggcaaagaagaaatttcaaaactaaaattaaaagaccacgaacacaaagttaccgaaagcattgtcaatgtttcaacaacatttatcccaatcaatctggtgtattcccctgaggagttggtgaatgttgagaaactagaaaaggagttgaaggaaaagaagaaaaaattcgaagctacccaagaagaaaacgagcaagagatggaaaaaaatccaaaggaatgggaagttgccgagatcgaagacccatttgacagcgatgaaaaaaaaataaacaggaaggccaagttatctttaaacgagttgatcaagcaaaaatctggtattttgtctatgcaaatattggaagggactttgagcccatcctctgcttacctagaaatcttagcggatgacatttcgtaccctgtattcatttgcatgaaaccatctcaaggtaaactaaactcggagatggcaaatattttcattagagatttgaattacagtaaactacattttagagtatcgaagaaacatattgccaaagattcagatgatgtcatatccgaaacttcctatagtacattgaagctactaaagcaagcttacgaagagcccatgtggttaaacttcaatgggtctaaaatgaaggtaagatttttgtacacgcccactagcgtgaaactgcctagcagtgaaagtgttgaagacactggttatttgaatataaagcttatttccggacacggtctgaagtccgcagataggaatggctattcagatccatttgttcacatctttgtcaatgataaaaaagttttcaaatcgaacattaaaaagaaaacattggatcccgtatggaacgaagatgctaaaataccaatcctttcaagaagtaagaatcaagtcatatttaatgttcttgattgggatcgtgcaggtgataatgacgacttaggccaagcttcacttgacgtttcctcattagaagttggtaaaacttacaactggaatttgaatttaaacacacaaggaagtatcaaattacaaggttcattcaacccagaatatatcaagccaagttttgatatcgtgaaaggcggtatcactgataagccgatgaaaatagccagtggtgcagcccatgcaactgttggcatagctggtactggtataggagcagcaacaggagttgccactggtggtttaaagaaaggtggtcaccttctaaaatctctaggtggcaatccaatgaaaagaagcaagagcagcaatggaaatgagtccaacggtgcaaaaaaatcatcagagaaaaaatcttttgataggagatccccaagtaatttgaatagcactagtgtaacaccaagagcttcactagactatgatccatcagtacctaacacaagttacgcgcccgttcaaagcgcatctcctgtagtcaagccaactgacaacacttctagctcaagcaacaaaaaagatacccctagtagcaactctagaggacattctcgtgcaagcagttttgcgcgtactttagctcctcatggcacttacaatggttttattaccgtggttgctgcggaaaacgttgccaagcatgttcaaattaagatctctttaactcaaggtggtagactaaaacacatatacaaaacgaaaagccaaaaagccaataatgatggtgttgccgtatttgatgaagagtgctcgttcaaggcttctcccgaagccaatttggtactgggtgcaatttcccatcaaagactatcgagggacaaagatcttggtattgctcaaatcaacttgggtgaccctcaaattcaacaagatggccaaatttctgtaaaattaggagacggtcatctgattgtaaagattaattacggtaaagacaagaatggtcaggtacctcccgtgccagaagttcctcaagaatacacgcagtaa

SEQ ID NO: 8214 - DNA, 4638 bp, Artificial Sequence
  Description of Artificial Sequence: Synthetic polynucleotide
atgactggcatcaaagctcaagtccatcccccacctgatagtaccttatttcatgaggaggagaagaagaaagtaggaggcaatttacctcaaaaggtcataaatcaacaagaaaggggttctgatcacgctccatctggtcaccatcaataccaccaattgattaaccatgacgcaaatgacacaaagacctctaattctgtttctgatgtgtctaaaggtcagaaaactgctgactccaacccggaaggtaagaaacagtcttctaaagacatatttgttgcctccagcgctcaaaaaaccaatcaattgcccggtcccaacccacagggaagcataggagccgtgccattggaaggtttacgtccgaaggaattcagaagtgcaccatctaggaagccaaataaattcgacacttctattactaagcctggcgtcttagacgacttaggcaaacttgatgaaaaggatattaaggaaaaatttcacttggattccgacgacaagttatttccatggcaaaatgttggtgagttccatgcttctggaaagggttctccaaatacaaagatgtccagggttataaaagcttacattttggaaaatttttataacgattggtactgtaatatagccaccgttcttggaacttgtttcttcagttggttatttgcttacattgggttttcttggtggtctatgatatttatcttcttgggaactgcgaccgtttacaacgcagaatatacaagattcaacagaaatatcagagatgacttgaaaagagttacagtcgaagaaaccttgagtgatcgcgttgaatccactacgtggttgaattcttttttatccaaattttgggtgatttacatgccagttttatctcaacaagtcaaagataacgttaaccctcaattggcaggtgttgctccaggttacggtatcgatgcgttagctatcgatgaattcactttgggctctaaagctcccaccataaaaggtattaaatcttacaccaagactggtaaaaacactgttgaaatggattggtcttttgcattcaccccaagcgatgtctctgatatgacagctactgaagctagggagaagatcaatccaaaaatatctttgggtgtcacgttaggaaaaagttttgtctctaaaacaatgcctattttggttgaagacattaacgttgctggtaaaatgcgtattaaagttgaatttggtaaagctttcccaaatatcaaaattgtttctttacaacttttagaaccacctttgattgatttcgcattgaaaccaattggtggtgatactttaggtcttgatgttatgagtttcttgcctggtttgaagagttttgttaaaaacattatcaactccaatatagggcctatgcttttccctccgaaccatttggatattaatgttgaagacattatggctgctcaaagtaaagaagctattggtgtccttgccgtaaccattgcttctgccgactctttgaaaggcagtgatttcattaccaatactgtcgatccttatattgttatgactaccgaagatgctgtgcctggtacagatgaagaagtgcgtacatctatcaaatctaatgttaaaaatccacgttggaacgaaaccaaatatcttttattaaacaccttagagcaaaagttaaacttaaagtgctttgacttcaatgatgtaagaaaagataccgtaattggtgatcttcaacttgacttggcagatttattacaaaaccctgttttggataatcaaactgctgaattaagatccggtacaaaatctaaaggtattttacattattccttacactggttccctgtgaaagaagataaaagtgaggaaaaagcagttgagcgtgccgaagctaaggccaagggcaagaaagaagatgaaaacgaggacactactgaaaaagaagaagacgagaatgaagaaagttctcaaactgatgtcgggattgccaagatcactttacaaaaggtcaaatatttggatacaaccagttctatgaccggtagcttgagcccatgtgctgaattattcattgatggacaaaaagtaaagagctatagaactttgagacgtatcaatgagccatcttggaatgagaccatcgaagttttggttccatctaaatctaactctaagtttgtcttgaaaatattcgatgacagaatgaatggtaaggcgttgatctgtgagtattcttcttctttagatgatataatgactactttagacactgctcaagagtttgttaaaggctctccacaaggtgacatttatttggatgtttcttggaaatccattgaaatgaccggagcttttgccgctgcaaactctgtaagcgaacctattggttgtattaagttggacgttaaggatgccattatcaagggtgacttatccggtgtaggggatgttgatccatattacaccgtatctttgaatagacgtgttctttacaagtccatatatcattctgatacggatcatcccatttttgacaacagcacctacgttcctatcttctctccaaatcaaattttgactctcgaatttcatgattatcaaaagatcggcaaagaccgtttcattggctctgtacaaattcctacaagtaatgttttcaaaaaagatcctaaaagtggaaaatatgttgggaataatggcaaagaagaaatttccaaattgaaattaaaagaccacgaacacaaagttaccgaaagcattgtcaatgtttctacaacatttatcccaatcaatttggtgtattcccctgaggagttggtgaatgttgagaaattagaaaaggagttgaaggaaaagaagaaaaaattcgaagctacccaagaagaaaacgagcaagagatggaaaaaaatccaaaggaatgggaagttgccgagatcgaagacccatttgacagcgatgaaaaaaaaataaacaggaaggccaagttatctttaaacgagttgatcaagcaaaaatctggtattttgtctatgcaaatattggaagggactttgagcccatcctctgcttacttggaaatcttagcggatgacatttcttaccctgtattcatttgcatgaaaccatctcaaggtaaattgaacagtgagatggcaaatattttcattagagatttgaattacagtaaattgcattttagagtatccaagaaacatattgccaaagattctgatgatgtcatatccgaaacttcctatagtacattgaagttattgaagcaagcttacgaagagcccatgtggttaaacttcaatgggtctaaaatgaaggtaagatttttgtacacgcccactagcgtgaaattacctagcagtgaaagtgttgaagacactggttatttgaatataaagcttatttccggacacggtttgaagtccgcagataggaatggctattctgatccatttgttcacatctttgtcaatgataaaaaagttttcaaaagtaacattaaaaagaaaacattggatcccgtatggaacgaagatgctaaaataccaatcctttctagaagtaagaatcaagtcatatttaatgttcttgattgggatcgtgcaggtgataatgacgacttaggccaagcttctcttgacgtttcctctttagaagttggtaaaacttacaactggaatttgaatttaaacacacaaggaagtatcaaattacaaggttctttcaacccagaatatatcaagccaagttttgatatcgtgaaaggcggtatcactgataagccgatgaaaatagccagtggtgcagcccatgcaactgttggcatagctggtactggtataggagcagcaacaggagttgccactggtggtttaaagaaaggtggtcaccttttgaaatctttgggtggcaatccaatgaaaagaagcaagagcagcaatggaaatgagtccaacggtgcaaaaaaatcttctgagaaaaaatcttttgataggagatccccaagtaatttgaatagcactagtgtaacaccaagagcttctttggactatgatccatctgtacctaacacaagttacgcgcccgttcaaagcgcatctcctgtagtcaagccaactgacaacacttctagcagcagcaacaaaaaagatacccctagtagcaactctagaggacattctcgtgcaagcagttttgcgcgtactttagctcctcatggcacttacaatggttttattaccgtggttgctgcggaaaacgttgccaagcatgttcaaattaagatctctttaactcaaggtggtagattgaaacacatatacaaaacgaaaagccaaaaagccaataatgatggtgttgccgtatttgatgaagagtgctctttcaaggcttctcccgaagccaatttggtattgggtgcaatttcccatcaaagattatctagggacaaagatcttggtattgctcaaatcaacttgggtgaccctcaaattcaacaagatggccaaatttctgtaaaattaggagacggtcatttgattgtaaagattaattacggtaaagacaagaatggtcaggtacctcccgtgccagaagttcctcaagaatacacgcagtga

SEQ ID NO: 8215 - DNA, 1824 bp, Saccharomyces cerevisiae
atggagctgatactaaacagcctcatttctgatgatttaacagaggaacaaaaacggttaagtcttgatttcctacaggatatcctacaatctaacacgaaagactatgaaagttatttttcatctagggctgttcctggtagcataactgaagacatagcagaaattgatgctgaattatctgcccttgatagaaagataaggaaaacactactagataatacgtctcagattatcggaaatattcttgaaaacgatgatagggctcaattggatgatatagccaagtctttggagcaattatgggaattggatactaatattaataaggcagccgatcgaaacgttacaaatgacgatataaacaatgaaagcgtttctattgatgactttttggaagacgataaagaagacaacgacacaggtcgcatcatgacgactgagagtaacaatctggcaagaaagaagaaggaggatgagtttcacaaggcattaagtaggttaagaaacagaatttcaactaaagaagatgacaaggacgacattagatctgacacattagtcactgtactagaaaatttggatagcattacggatttgatggaactaccatttttggcccgcacatgtatcagaacaggtcattaccaggaggccgtcatgctatacacacacactacttccctgaggtcaagattccctggttcaaccattgtggatgaagtttgcgaaaaagttttaaacgaaattagtactaccatgttatccgggctggtaaaattactgtctactaatgtatcagtaaactcactaaagaaaatactacagtacttgaattcaattccaccatttgatggaaagactaataaatcattattaagtgtgtttttagccatgagatacaaattcattaccgatgaaatagcatcatatcctttggacgttgagtcttctaatgaatctttaattgaaatgatggttaagaggaaaattgaagtcctcagggaacatgtctacatgtccttgaatgtctttctgaaaagcttcttgtatgatacaaatgacttagagattcctttcccagaggaactagaaagtactgtgctaaggataaatgggactaacgaagagaaagaaattgaagaaaaggagaaagaaacaaagaaggaagaatatcaaaaacaagatagcgtagcgaacaatgaagaagatgtgacagaaaataaatcgatagaagatgtacaagaggaagtacaaggcaaagtggaaggcgaagatgatggagcagaaaggaaaacagaaaatgagatagaaaatgaaacagtaaacaaaacagaagacaaggctgaaaaagaaaaagaggaagaagtaaataccaaagataacaaggcagaaaaagaggaagaagaaattaataaggttgaggtgaccccagaagagccaagcaaaagcatagataacaaggcagaaaaagaagaagaagaaattaataaggttgaagtgaccccagaggagccaagcaaaaagattcggacttcaaaaagggaaaacaaaatacctacaaatgcagtcatgttgcaattcgttgataagtgcataacatacgtattaaaagacctcactcgtgggttaaatagcatcaagctgagtgactccgtttgcctgcagttggtgtactgttcattccgtctttgcgacctgaatcgaaactaccaccacctcttcctaaaaaaaatcaatgacactagcttgtttacgaccgagcagctcgcccgggcaattgacaagagagcagaactggcctctaaatatatatactcctag

SEQ ID NO: 8216 - DNA, 1824 bp, Artificial Sequence
  Description of Artificial Sequence: Synthetic polynucleotide
atggagttgatattaaacagcctcatttctgatgatttaacagaggaacaaaaaagattaagtcttgatttcttacaggatatcttgcaatctaacacgaaagactatgaaagttatttttcttctagggctgttcctggtagcataactgaagacatagcagaaattgatgctgaattatctgcccttgatagaaagataaggaaaacattgttggataatacgtctcagattatcggaaatattcttgaaaacgatgatagggctcaattggatgatatagccaagtctttggagcaattatgggaattggatactaatattaataaggcagccgatagaaacgttacaaatgacgatataaacaatgaaagcgtttctattgatgactttttggaagacgataaagaagacaacgacacaggtcgcatcatgacgactgagagtaacaatttggcaagaaagaagaaggaggatgagtttcacaaggcattaagtaggttaagaaacagaatttctactaaagaagatgacaaggacgacattagatctgacacattagtcactgtattggaaaatttggatagcattacggatttgatggaattaccatttttggcccgcacatgtatcagaacaggtcattaccaggaggccgtcatgctttacacacacactacttccttaaggagcagattccctggttctaccattgtggatgaagtttgcgaaaaagttttaaacgaaattagtactaccatgttatccgggttggtaaaattattatctactaatgtatctgtaaactctttgaagaaaatattacagtacttgaattctattccaccatttgatggaaagactaataaatctttattaagtgtgtttttagccatgagatacaaattcattaccgatgaaatagcaagttatcctttggacgttgagtcttctaatgaatctttaattgaaatgatggttaagaggaaaattgaagtcctcagggaacatgtctacatgtccttgaatgtctttttgaaaagcttcttgtatgatacaaatgacttagagattcctttcccagaggaattggaaagtactgtgttaaggataaatgggactaacgaagagaaagaaattgaagaaaaggagaaagaaacaaagaaggaagaatatcaaaaacaagatagcgtagcgaacaatgaagaagatgtgacagaaaataaatctatagaagatgtacaagaggaagtacaaggcaaagtggaaggcgaagatgatggagcagaaaggaaaacagaaaatgagatagaaaatgaaacagtaaacaaaacagaagacaaggctgaaaaagaaaaagaggaagaagtaaataccaaagataacaaggcagaaaaagaggaagaagaaattaataaggttgaggtgaccccagaagagccaagcaaaagcatagataacaaggcagaaaaagaagaagaagaaattaataaggttgaagtgaccccagaggagccaagcaaaaagattagaacttctaaaagggaaaacaaaatacctacaaatgcagtcatgttgcaattcgttgataagtgcataacatacgtattaaaagacctcactcgtgggttaaatagcatcaagttgagtgactccgtttgcttacagttggtgtactgttctttccgtctttgcgacttgaatagaaactaccaccacctcttcttgaaaaaaatcaatgacactagcttgtttacgaccgagcagctcgccagagcaattgacaagagagcagaattggcctctaaatatatatactcctga

SEQ ID NO: 8217 - DNA, 1755 bp, Saccharomyces cerevisiae
atgtccgctaaatcgtttgaagtcacagatccagtcaattcaagtctcaaagggtttgcccttgctaacccctccattacgctggtccctgaagaaaaaattctcttcagaaagaccgattccgacaagatcgcattaatttctggtggtggtagtggacatgaacctacacacgccggtttcattggtaagggtatgttgagtggcgccgtggttggcgaaatttttgcatccccttcaacaaaacagattttaaatgcaatccgtttagtcaatgaaaatgcgtctggcgttttattgattgtgaagaactacacaggtgatgttttgcattttggtctgtccgctgagagagcaagagccttgggtattaactgccgcgttgctgtcataggtgatgatgttgcagttggcagagaaaagggtggtatggttggtagaagagcattggcaggtaccgttttggttcataagattgtaggtgccttcgcagaagaatattctagtaagtatggcttagacggtacagctaaagtggctaaaattatcaacgacaatttggtgaccattggatcttctttagaccattgtaaagttcctggcaggaaattcgaaagtgaattaaacgaaaaacaaatggaattgggtatgggtattcataacgaacctggtgtgaaagttttagaccctattccttctaccgaagacttgatctccaagtatatgctaccaaaactattggatccaaacgataaggatagagcttttgtaaagtttgatgaagatgatgaagttgtcttgttagttaacaatctcggcggtgtttctaattttgttattagttctatcacttccaaaactacggatttcttaaaggaaaattacaacataaccccggttcaaacaattgctggcacattgatgacctccttcaatggtaatgggttcagtatcacattactaaacgccactaaggctacaaaggctttgcaatctgattttgaggagatcaaatcagtactagacttgttgaacgcatttacgaacgcaccgggctggccaattgcagattttgaaaagacttctgccccatctgttaacgatgacttgttacataatgaagtaacagcaaaggccgtcggtacctatgactttgacaagtttgctgagtggatgaagagtggtgctgaacaagttatcaagagcgaaccgcacattacggaactagacaatcaagttggtgatggtgattgtggttacactttagtggcaggagttaaaggcatcaccgaaaaccttgacaagctgtcgaaggactcattatctcaggcggttgcccaaatttcagatttcattgaaggctcaatgggaggtacttctggtggtttatattctattcttttgtcgggtttttcacacggattaattcaggtttgtaaatcaaaggatgaacccgtcactaaggaaattgtggctaagtcactcggaattgcattggatactttatacaaatatacaaaggcaaggaagggatcatccaccatgattgatgctttagaaccattcgttaaagaatttactgcatctaaggatttcaataaggcggtaaaagctgcagaggaaggtgctaaatccactgctacattcgaggccaaatttggcagagcttcgtatgtcggcgattcatctcaagtagaagatcctggtgcagtaggcctatgtgagtttttgaagggggttcaaagcgccttgtaa

SEQ ID NO: 8218 - DNA, 1755 bp, Artificial Sequence
  Description of Artificial Sequence: Synthetic polynucleotide
atgtccgctaaaagttttgaagtcacagatccagtcaatagtagtctcaaagggtttgcccttgctaacccctccattacgttagtccctgaagaaaaaattctcttcagaaagaccgattccgacaagatcgcattaatttctggtggtggtagtggacatgaacctacacacgccggtttcattggtaagggtatgttgagtggcgccgtggttggcgaaatttttgcatccccttctacaaaacagattttaaatgcaatccgtttagtcaatgaaaatgcgtctggcgttttattgattgtgaagaactacacaggtgatgttttgcattttggtttatccgctgagagagcaagagccttgggtattaactgccgcgttgctgtcataggtgatgatgttgcagttggcagagaaaagggtggtatggttggtagaagagcattggcaggtaccgttttggttcataagattgtaggtgccttcgcagaagaatattctagtaagtatggcttagacggtacagctaaagtggctaaaattatcaacgacaatttggtgaccattggatcttctttagaccattgtaaagttcctggcaggaaattcgaaagtgaattaaacgaaaaacaaatggaattgggtatgggtattcataacgaacctggtgtgaaagttttagaccctattccttctaccgaagacttgatctccaagtatatgcttccaaaacttttggatccaaacgataaggatagagcttttgtaaagtttgatgaagatgatgaagttgtcttgttagttaacaatctcggcggtgtttctaattttgttattagttctatcacttccaaaactacggatttcttaaaggaaaattacaacataaccccggttcaaacaattgctggcacattgatgacctccttcaatggtaatgggttcagtatcacattattaaacgccactaaggctacaaaggctttgcaatctgattttgaggagatcaaatctgtattggacttgttgaacgcatttacgaacgcaccgggctggccaattgcagattttgaaaagacttctgccccatctgttaacgatgacttgttacataatgaagtaacagcaaaggccgtcggtacctatgactttgacaagtttgctgagtggatgaagagtggtgctgaacaagttatcaagagcgaaccgcacattacggaattagacaatcaagttggtgatggtgattgtggttacactttagtggcaggagttaaaggcatcaccgaaaaccttgacaagctttccaaggactctttatctcaggcggttgcccaaatttctgatttcattgaaggctctatgggaggtacttctggtggtttatattctattcttttgtctggtttttctcacggattaattcaggtttgtaaatccaaggatgaacccgtcactaaggaaattgtggctaagtctctcggaattgcattggatactttatacaaatatacaaaggcaaggaagggatcttccaccatgattgatgctttagaaccattcgttaaagaatttactgcatctaaggatttcaataaggcggtaaaagctgcagaggaaggtgctaaatccactgctacattcgaggccaaatttggcagagcttcttatgtcggcgattcttctcaagtagaagatcctggtgcagtaggcctctgtgagtttttgaagggggttcaaagcgccttgtga

SEQ ID NO: 8219 - DNA, 1659 bp, Saccharomyces cerevisiae
atgagtaccgactttgatagaatttacttgaaccaatctaaatttagcggtagattccgtattgctgattctgggttagggtggaaaattagtaccagtggtggctctgcagcaaatcaggcaagaaaaccatttttattaccagccacagaattatctaccgtccaatggagtaggggctgcaggggttacgacttgaagataaataccaaaaatcaaggtgttatccaactagatggattttctcaggatgactataacttaatcaagaatgatttccatcgccgttttaatattcaggtagagcaaagagaacattccttacgtggttggaactggggtaagacagaccttgccaggaatgaaatggtttttgctttaaatggtaaaccaacttttgaaattccttatgctagaataaataatacaaatttgacctctaaaaatgaagtaggaatagaatttaatattcaagatgaagagtaccaaccagccggtgacgaattggtagagatgaggttctatattcctggtgttattcaaacaaacgtcgatgaaaacatgaccaaaaaggaagagtcaagcaacgaggtcgtaccaaagaaagaagatggtgctgaaggagaagatgtacaaatggcagtagaggaaaagagtatggcagaagcattctatgaagaactaaaggaaaaggcagacatcggggaagtcgctggtgatgcaatagtttccttccaagacgtcttttttaccacgccaagaggtcgttatgatatcgatatttacaagaactccattagactcaggggtaagacctatgaatacaaattgcaacatcgtcaaatacaaagaattgtttcgttaccaaaggcagatgatatccatcacttattggttttggcaattgaacctcctttacgtcaaggacagaccacctacccctttcttgtcttacaatttcagaaagatgaggaaacagaagtgcaattgaatctagaagatgaagattatgaggaaaattataaggataaattgaaaaaacaatatgatgctaaaactcatatagttttaagtcatgtattaaaaggtctgactgaccgtagagtcattgttcctggagaatataaatccaaatatgatcagtgtgcagtttcatgttctttcaaagcaaacgaaggttatttgtatccattagataacgctttcttctttttaactaagccaactttgtacataccattcagtgatgttagcatggtaaacatttcaagagcaggacaaacttctacgtcatcgaggacgtttgatttggaagtggtactgcgttcaaatagaggttctaccacttttgccaacatcagtaaggaagagcagcaattattggaacaattcctaaagtctaaaaacctaagggtgaagaatgaagatagagaggtacaagaaaggttacaaaccgctttaggttcagacagtgacgaagaggatattaatatgggttccgctggtgaagatgatgaatcagtagatgaggattttcaggtcagctctgataatgacgcagacgaagttgcagaagagtttgattcagatgcggctttaagtgatgctgaggggggtagcgacgaagaaaggccttcgaagaagcctaaggtagaatag

SEQ ID NO: 8220 - DNA, 1659 bp, Artificial Sequence
  Description of Artificial Sequence: Synthetic polynucleotide
atgagtaccgactttgatagaatttacttgaaccaatctaaatttagcggtagattccgtattgctgattctgggttagggtggaaaattagtaccagtggtggctctgcagcaaatcaggcaagaaaaccatttttattaccagccacagaattatctaccgtccaatggagtaggggctgcaggggttacgacttgaagataaataccaaaaatcaaggtgttatccaattggatggattttctcaggatgactataacttaatcaagaatgatttccatcgccgttttaatattcaggtagagcaaagagaacattccttacgtggttggaactggggtaagacagaccttgccaggaatgaaatggtttttgctttaaatggtaaaccaacttttgaaattccttatgctagaataaataatacaaatttgacctctaaaaatgaagtaggaatagaatttaatattcaagatgaagagtaccaaccagccggtgacgaattggtagagatgaggttctatattcctggtgttattcaaacaaacgtcgatgaaaacatgaccaaaaaggaagagagcagcaacgaggtcgtaccaaagaaagaagatggtgctgaaggagaagatgtacaaatggcagtagaggaaaagagtatggcagaagcattctatgaagaattgaaggaaaaggcagacatcggggaagtcgctggtgatgcaatagtttccttccaagacgtcttttttaccacgccaagaggtcgttatgatatcgatatttacaagaactccattagactcaggggtaagacctatgaatacaaattgcaacatcgtcaaatacaaagaattgtttctttaccaaaggcagatgatatccatcacttattggttttggcaattgaacctcctttacgtcaaggacagaccacctacccctttcttgtcttacaatttcagaaagatgaggaaacagaagtgcaattgaatttggaagatgaagattatgaggaaaattataaggataaattgaaaaaacaatatgatgctaaaactcatatagttttaagtcatgtattaaaaggtttgactgaccgtagagtcattgttcctggagaatataaatccaaatatgatcagtgtgcagtttcttgttctttcaaagcaaacgaaggttatttgtatccattagataacgctttcttctttttaactaagccaactttgtacataccattcagtgatgttagcatggtaaacatttctagagcaggacaaacttctacgtcttccaggacgtttgatttggaagtggtattacgttccaatagaggttctaccacttttgccaacatcagtaaggaagagcagcaattattggaacaattcttgaagtctaaaaacttgagggtgaagaatgaagatagagaggtacaagaaaggttacaaaccgctttaggttctgacagtgacgaagaggatattaatatgggttccgctggtgaagatgatgaaagtgtagatgaggattttcaggtcagctctgataatgacgcagacgaagttgcagaagagtttgattctgatgcggctttaagtgatgctgaggggggtagcgacgaagaaaggccttctaagaagcctaaggtagaatga

SEQ ID NO: 8221 - DNA, 1395 bp, Saccharomyces cerevisiae
atggctttgactcagtttgaaaatgatttggaaatattaagagatatgtacccagaactggaaatgaaatcggtaaaagtagaggaggaaggtgaattccctcaaagaattaacggaaagttactgttcaagatatcactattggccgatgtaaatattgagttcggcgagcaacatatgttactttcaaacttatctaatgaatgcgtggagttcaccatatatagctgtcattatccggacattcgacggtgtgttgttatggatatcaaatccttatggatatcaacagatgaaaagaagatgttaattgacaaagcgctgagactcgttgaagaaactgtagatatgagtattgagttcgcggattcgtttacctccatccttatcctcatctttgggtttcttatagatgatacagctatattactattccctaatggaataagaaagtgcctgacacaggatcagtatgacttgtttaagcagataagtgaggaagccaccctccaaaaagtgagcagatctaactaccattgttgtatttgtatggaaatggaaaagggtgttagaatgatcaaattgccatgtgaaaatgcgaatgtagaacactatctttgcagaggatgcgccaaatcttatttcactgcaatgattcaggaaaaccgaatatccagtgtaagatgtccacaatgcgaatacaaagaattaaaactagaagatttcaagagctataaaaaaatgctgaaggcattgtttacacctttgattccagtgtccttcttaaaagaggttatcgatacagagctatgtgaaagatacgaaaaaatgttctacaaccaggcggctacaagactctcaaaatattgtccgtatgcttgtgtgacttgtcgaagatgtgatagttggtgcacaaaagaagacctcgatgatgcgatgattcagtgtcaaaaatgtcattttgtattttgctttgactgcttgcatgcctggcatggttacaacaataaatgtggcaagaaagtttcgttatcgaccgatattattgaggaatatctagatgataccgttacttcatatgagagaaagcggaaactggaggcaaaatatgggagaagagtattagaacttgaagtcaatgattaccttgctgaaaaaatgttagatttagcgattaaaaaagagggttcgaatttgcagcgatgtccaaagtgtaaggtagttgtagaaagaagtgaaggttgcaataaaatgaaatgcgaagtatgcgggacgctgttctgttttatatgcggagtattactttatcctgaggacccttatgaacattttagagaagcatattcaggctgttatggacgattgtttgaaggtatgcctggcacagaaacttga

SEQ ID NO: 8222 - DNA, 1395 bp, Artificial Sequence
  Description of Artificial Sequence: Synthetic polynucleotide
atggctttgactcagtttgaaaatgatttggaaatattaagagatatgtacccagaattggaaatgaaatctgtaaaagtagaggaggaaggtgaattccctcaaagaattaacggaaagttattattcaagatatctttgttggccgatgtaaatattgagttcggcgagcaacatatgttactttccaacttatctaatgaatgcgtggagttcaccatatatagctgtcattatccggacattagaagatgtgttgttatggatatcaaatccttatggatatctacagatgaaaagaagatgttaattgacaaagcgttaagactcgttgaagaaactgtagatatgagtattgagttcgcggattcttttacctccatccttatcctcatctttgggtttcttatagatgatacagctatattattattccctaatggaataagaaagtgcttaacacaggatcagtatgacttgtttaagcagataagtgaggaagccaccctccaaaaagtgagcagatctaactaccattgttgtatttgtatggaaatggaaaagggtgttagaatgatcaaattgccatgtgaaaatgcgaatgtagaacactatctttgcagaggatgcgccaaatcttatttcactgcaatgattcaggaaaacagaatatccagtgtaagatgtccacaatgcgaatacaaagaattaaaattagaagatttcaagagctataaaaaaatgttgaaggcattgtttacacctttgattccagtgtccttcttaaaagaggttatcgatacagagctctgtgaaagatacgaaaaaatgttctacaaccaggcggctacaagactctctaaatattgtccgtatgcttgtgtgacttgtagaagatgtgatagttggtgcacaaaagaagacctcgatgatgcgatgattcagtgtcaaaaatgtcattttgtattttgctttgactgcttgcatgcctggcatggttacaacaataaatgtggcaagaaagtttctttatctaccgatattattgaggaatatttggatgataccgttacttcttatgagagaaagagaaaattagaggcaaaatatgggagaagagtattagaacttgaagtcaatgattaccttgctgaaaaaatgttagatttagcgattaaaaaagagggtagtaatttgcagcgttgtccaaagtgtaaggtagttgtagaaagaagtgaaggttgcaataaaatgaaatgcgaagtatgcgggacgcttttctgttttatatgcggagtattactttatcctgaggacccttatgaacattttagagaagcatattctggctgttatggaagattgtttgaaggtatgcctggcacagaaacttga

SEQ ID NO: 8223 - DNA, 1059 bp, Saccharomyces cerevisiae
atggcaggattgaagacatttgatgcgtttccaaaaactgaagaacagtacaagaagaaatccaccaagggtggcttaacatctttgttgacatatctgtttctgttgtttatagcatggaccgagtttggtgaatacttcggtggttatattgaccagcagtacgtagtggacagtcaagttagagataccgttcaaattaatatggatatatacgtcaacacgaaatgtgattggttgcaaatcaacgtcagagaccaaacaatggatcggaaacttgtattagaggaattgcaattggaagagatgccattctttattccttatgacacaaaagtcaatgatatcaatgaaattattacgccggaattggatgaaatcttaggggaagctatcccagcagaatttagagaaaaactagatactaggtcattttttgatgaaagtgatcctaacaaggcacatcttccggaattcaatgggtgccatgtatttgggtccattccggtaaatagagttagtggcgaattgcagattacagcgaagagtttaggttacgtggcttcacgcaaagcaccactggaagaattaaaatttaatcatgttattaatgagttctcttttggtgatttctatccatatattgataacccattggataacactgcacagtttaatcaggatgaacctttaactacttacgtctattacacatctgttgtgcccactcttttcaagaaattgggggcagaagtggatactaatcaatattctgttaacgattaccgctatttgtacaaagatgtcgctgctaaaggtgataaaatgccgggcatcttcttcaaatacaatttcgaaccattatccatagtagtttctgatgttcgtttaagctttatacagtttttggtcagattagtggcaatctgctcatttttggtctactgtgcttcgtggattttcacactactggatatggctcttatcaccatcatgggacctaagtggtccttgcgttatcagccagatgataaaactaagggtattttagataggtag

SEQ ID NO: 8224 - DNA, 1059 bp, Artificial Sequence
  Description of Artificial Sequence: Synthetic polynucleotide
atggcaggattgaagacatttgatgcgtttccaaaaactgaagaacagtacaagaagaaatccaccaagggtggcttaacatctttgttgacatatttatttttattgtttatagcatggaccgagtttggtgaatacttcggtggttatattgaccagcagtacgtagtggacagtcaagttagagataccgttcaaattaatatggatatatacgtcaacacgaaatgtgattggttgcaaatcaacgtcagagaccaaacaatggataggaaacttgtattagaggaattgcaattggaagagatgccattctttattccttatgacacaaaagtcaatgatatcaatgaaattattacgccggaattggatgaaatcttaggggaagctatcccagcagaatttagagaaaaattggatactaggtctttttttgatgaaagtgatcctaacaaggcacatcttccggaattcaatgggtgccatgtatttgggtccattccggtaaatagagttagtggcgaattgcagattacagcgaagagtttaggttacgtggctagtcgcaaagcaccattggaagaattaaaatttaatcatgttattaatgagttctcttttggtgatttctatccatatattgataacccattggataacactgcacagtttaatcaggatgaacctttaactacttacgtctattacacatctgttgtgcccactcttttcaagaaattgggggcagaagtggatactaatcaatattctgttaacgattaccgctatttgtacaaagatgtcgctgctaaaggtgataaaatgccgggcatcttcttcaaatacaatttcgaaccattatccatagtagtttctgatgttcgtttaagctttatacagtttttggtcagattagtggcaatctgctcttttttggtctactgtgcttcttggattttcacattattagatatggctcttatcaccatcatgggacctaagtggtccttgcgttatcagccagatgataaaactaagggtattttagataggtga

SEQ ID NO: 8225 - DNA, 1110 bp, Saccharomyces cerevisiae
atgttattccctaaacgtctgattgtgtggggtgttctattgattttaagtttatcacaatttgtcctctacctgccagccacaacatgtacgaactctaagggacttaggttatgcgctccacagtttactataactgtgattggaggatccagtactgcaaatgagtttattgcaagtgtaagagaatttctgcgattgatttcgtacctgacaattgacatgggttggtcgaatgaattcactgatccaagtgtgtatgaggatgaaaatttggtggacacatttcagcctgataaggtttttgagctcaattattttggattttgtaaacggagtaataaaagcaaagtttattgtacctctaatgagaattatggcatggacgtacttgaagtacttgtcagagacgtcgggattcaattaggtaacatttccactacacgatcgaatgaaaccaaaaaattcggagactctctcgtattgacctaccgtttggcattgacatctattcgtgattttttgaaacacgacaagcacacaggaaatgccctatcaaaggctttgattggcagtcctgatccaaatgtaaaaggcgtgtcaccaacaaaaaactatctgaaaggcgtcaacctggcatttatactgatgatgttcaacggcatggttttttactttgcagtgttggaaataatagtcggattcctcagtatctgcgtagtgtcagcctttgggggagcacttagtgttgggaaacgacaccgcttatttcctatgcttttgaagtcatcaagttcaatattagttgttattgctacattgacaatattatgtaacatcgtatatttgattgcactgaaaacattagaacctgaagaggtaacagacgtaggatctgacaacgctgctgtacacactacaggctgggaactgttaaaagtaaacgtgggaagtgggttcattatggggctcgccaggtatgccatccagtgggtcctattggtactcgcatttcttgcagcaaatcattacaaagctaagcccaaaaagtctgataagtatacagaagacacatctaactccccttctccagacttgatggagaagtaa

SEQ ID NO: 8226 - DNA, 1110 bp, Artificial Sequence
  Description of Artificial Sequence: Synthetic polynucleotide
atgttattccctaaacgtttaattgtgtggggtgttttattgattttaagtttatctcaatttgtcctctacttgccagccacaacatgtacgaactctaagggacttaggttatgcgctccacagtttactataactgtgattggaggatccagtactgcaaatgagtttattgcaagtgtaagagaatttttaagattgatttcttacttgacaattgacatgggttggtctaatgaattcactgatccaagtgtgtatgaggatgaaaatttggtggacacatttcagcctgataaggtttttgagctcaattattttggattttgtaaaagaagtaataaaagcaaagtttattgtacctctaatgagaattatggcatggacgtacttgaagtacttgtcagagacgtcgggattcaattaggtaacatttccactacaagatctaatgaaaccaaaaaattcggagactctctcgtattgacctaccgtttggcattgacatctattcgtgattttttgaaacacgacaagcacacaggaaatgccttgtccaaggctttgattggcagtcctgatccaaatgtaaaaggcgtgtctccaacaaaaaactatttgaaaggcgtcaacttggcatttatattaatgatgttcaacggcatggttttttactttgcagtgttggaaataatagtcggattcctcagtatctgcgtagtgtctgcctttgggggagcacttagtgttgggaaaagacaccgcttatttcctatgcttttgaagagtagtagtagtatattagttgttattgctacattgacaatattatgtaacatcgtatatttgattgcattgaaaacattagaacctgaagaggtaacagacgtaggatctgacaacgctgctgtacacactacaggctgggaattattaaaagtaaacgtgggaagtgggttcattatggggctcgccaggtatgccatccagtgggtcttattggtactcgcatttcttgcagcaaatcattacaaagctaagcccaaaaagtctgataagtatacagaagacacatctaactccccttctccagacttgatggagaagtga

SEQ ID NO: 8227 - DNA, 2745 bp, Saccharomyces cerevisiae
atggcaaaaacgttgaaggatttacagggttgggagataataacaactgatgagcagggaaatataatcgatggaggtcagaagagattacgccgaagaggtgcaaaaactgaacattacttaaagagaagttctgatggaattaaactaggtcgtggtgatagtgtagtcatgcacaacgaagccgctgggacttactccgtttatatgatccaggagttgagacttaatacattaaataatgttgtcgaactctgggctctcacctatttacgatggtttgaagtcaatcctttagctcattataggcagtttaatcctgacgctaacattttgaatcgtcctttaaattattacaataaactgttttctgaaactgcaaataaaaatgaactgtatctcactgcagaattagccgaattgcagctatttaactttatcagggttgccaacgtaatggatggaagcaaatgggaagtattgaaaggaaatgtcgatccagaaagagactttacagttcgttatatttgtgagccgactggggagaaatttgtggacattaatattgaggatgtcaaagcttacataaagaaagtggagccaagggaagcccaggaatatttgaaagatttaacacttccatcaaagaagaaagagatcaaaagaggtcctcaaaagaaagataaggctactcaaacggcacaaatttcagacgcagaaacaagagctacagatataacggataatgaggacggtaatgaagatgaatcatctgattatgaaagtccgtcagatatcgacgttagcgaggatatggacagcggtgaaatatccgcagatgagcttgaggaagaagaagacgaagaagaagacgaagacgaagaagagaaagaagctaggcatacaaattcaccaaggaaaagaggccgtaagataaaactaggtaaagatgatattgacgcttctgtacaacctccccccaaaaaaagaggtcgtaaacctaaagatcctagtaaaccgcgtcagatgctattgatatcttcatgccgtgcaaataatactcctgtgattaggaaatttacaaaaaagaatgttgctagggcgaaaaagaaatataccccgttttcgaaaagatttaaatctatagctgcaataccagatttaacttcattacctgaattttacggaaattcttcggaattgatggcatcaaggtttgaaaacaaattaaaaacaacccaaaagcatcagattgtagaaacaattttttctaaagtcaaaaaacagttgaactcttcgtatgtcaaagaagaaatattgaagtctgcaaatttccaagattatttaccggctagggagaatgaattcgcctcaatttatttaagtgcatatagtgccattgagtccgactccgctactactatatacgtggctggtacgcctggtgtagggaaaactttaaccgtaagggaagtcgtaaaggaactactatcgtcttctgcacaacgagaaataccagactttctttatgtggaaataaatggattgaaaatggtaaaacccacagactgttacgaaactttatggaacaaagtgtcaggagaaaggttaacatgggcagcttcaatggagtcactagagttttactttaaaagagttccaaaaaataagaagaaaaccattgtagtcttgttggacgaactcgatgccatggtaacgaaatctcaagatattatgtacaattttttcaattggactacttacgaaaatgccaaacttattgtcattgcagtagccaatacaatggacttaccagaacgtcagctaggcaataagattacttcaagaattgggtttaccagaattatgttcactgggtatacgcacgaagagctaaaaaatatcattgatttaagactgaaggggttgaacgactcatttttctatgttgatacaaaaactggcaatgctattttgattgatgcggctggaaacgacactacagttaagcaaacgttgcctgaagacgtgaggaaagttcgcttaagaatgagtgctgatgccattgaaatagcttcgagaaaagtagcaagtgttagtggtgatgcaagaagagcattgaaggtttgtaaaagagcagctgaaattgctgaaaaacactatatggctaagcatggttatggatatgatggaaagacggttattgaagatgaaaatgaggagcaaatatacgatgatgaagacaaggatcttattgaaagtaacaaagccaaagacgataatgatgacgatgatgacaatgatggggtacaaacagttcacatcacgcacgttatgaaagccttaaacgaaactttaaattctcatgtaattacgtttatgacgcgactttcatttacagcaaaactgtttatttatgcattattaaacttgatgaaaaagaacggatctcaagagcaagaactgggcgatattgtcgatgaaatcaagttacttattgaagtaaatggcagtaataagtttgtcatggagatagccaaaacattgttccaacagggaagtgataatatttctgaacaattgagaattatatcatgggatttcgttctcaatcagttacttgacgcgggaatattgtttaaacaaactatgaagaacgatagaatatgttgtgtcaagctaaatatatcagtagaagaagccaaaagagccatgaatgaggatgagacattgagaaatttatag

SEQ ID NO: 8228 - DNA, 2745 bp, Artificial Sequence
  Description of Artificial Sequence: Synthetic polynucleotide
atggcaaaaacgttgaaggatttacagggttgggagataataacaactgatgagcagggaaatataatcgatggaggtcagaagagattacgcagaagaggtgcaaaaactgaacattacttaaagagaagttctgatggaattaaattgggtcgtggtgatagtgtagtcatgcacaacgaagccgctgggacttactccgtttatatgatccaggagttgagacttaatacattaaataatgttgtcgaactctgggctctcacctatttaagatggtttgaagtcaatcctttagctcattataggcagtttaatcctgacgctaacattttgaatcgtcctttaaattattacaataaattattttctgaaactgcaaataaaaatgaattgtatctcactgcagaattagccgaattgcagttatttaactttatcagggttgccaacgtaatggatggaagcaaatgggaagtattgaaaggaaatgtcgatccagaaagagactttacagttcgttatatttgtgagccgactggggagaaatttgtggacattaatattgaggatgtcaaagcttacataaagaaagtggagccaagggaagcccaggaatatttgaaagatttaacacttccatctaagaagaaagagatcaaaagaggtcctcaaaagaaagataaggctactcaaacggcacaaatttctgacgcagaaacaagagctacagatataacggataatgaggacggtaatgaagatgaaagctctgattatgaaagtccgagtgatatcgacgttagcgaggatatggacagcggtgaaatatccgcagatgagcttgaggaagaagaagacgaagaagaagacgaagacgaagaagagaaagaagctaggcatacaaattctccaaggaaaagaggccgtaagataaaattgggtaaagatgatattgacgcttctgtacaacctccccccaaaaaaagaggtcgtaaacctaaagatcctagtaaaccgcgtcagatgcttttgatatctagttgccgtgcaaataatactcctgtgattaggaaatttacaaaaaagaatgttgctagggcgaaaaagaaatataccccgttttccaaaagatttaaatctatagctgcaataccagatttaacttctttacctgaattttacggaaattcttctgaattgatggcaagcaggtttgaaaacaaattaaaaacaacccaaaagcatcagattgtagaaacaattttttctaaagtcaaaaaacagttgaactcttcttatgtcaaagaagaaatattgaagtctgcaaatttccaagattatttaccggctagggagaatgaattcgcctctatttatttaagtgcatatagtgccattgagtccgactccgctactactatatacgtggctggtacgcctggtgtagggaaaactttaaccgtaagggaagtcgtaaaggaattattatcttcttctgcacaaagagaaataccagactttctttatgtggaaataaatggattgaaaatggtaaaacccacagactgttacgaaactttatggaacaaagtgtctggagaaaggttaacatgggcagcttccatggagtctttggagttttactttaaaagagttccaaaaaataagaagaaaaccattgtagtcttgttggacgaactcgatgccatggtaacgaaatctcaagatattatgtacaattttttcaattggactacttacgaaaatgccaaacttattgtcattgcagtagccaatacaatggacttaccagaacgtcagttaggcaataagattacttccagaattgggtttaccagaattatgttcactgggtatacgcacgaagagttgaaaaatatcattgatttaagattaaaggggttgaacgactcttttttctatgttgatacaaaaactggcaatgctattttgattgatgcggctggaaacgacactacagttaagcaaacgttgcctgaagacgtgaggaaagttcgcttaagaatgagtgctgatgccattgaaatagcttccagaaaagtagcaagtgttagtggtgatgcaagaagagcattgaaggtttgtaaaagagcagctgaaattgctgaaaaacactatatggctaagcatggttatggatatgatggaaagacggttattgaagatgaaaatgaggagcaaatatacgatgatgaagacaaggatcttattgaaagtaacaaagccaaagacgataatgatgacgatgatgacaatgatggggtacaaacagttcacatcacgcacgttatgaaagccttaaacgaaactttaaattctcatgtaattacgtttatgacgagactttcttttacagcaaaattatttatttatgcattattaaacttgatgaaaaagaacggatctcaagagcaagaattaggcgatattgtcgatgaaatcaagttacttattgaagtaaatggcagtaataagtttgtcatggagatagccaaaacattgttccaacagggaagtgataatatttctgaacaattgagaattatatcttgggatttcgttctcaatcagttacttgacgcgggaatattgtttaaacaaactatgaagaacgatagaatatgttgtgtcaagttgaatatatctgtagaagaagccaaaagagccatgaatgaggatgagacattgagaaatttatga

SEQ ID NO: 8229 - DNA, 738 bp, Saccharomyces cerevisiae
atggctacaccaagcacgggagcaaacaattctatacctgcggtacgaaatcaggttgaagttcaggttggattagtaggggatgcacaagtagggaaaacatcgctgatggtgaagtacgtacagaacatatacgataaggaatacacacagacgctgggagtgaactttttgaaaagaaaagtaagcatacgctccacggatattatattttctataatggatttaggcggacaaagagaattcatcaacatgctcccaattgcgacggtagggtcttcagtgatcatatttctgtttgacctgacacgtccagagacgttgagttcaataaaggagtggtataggcaggcgtacgggctaaatgattcggcaattcctattttggtgggcacaaagtacgatttactaatagacttagacccggaatatcaggaacaaatctcgagaacgagtatgaagtatgcacaggtcatgaatgctcctcttatattctgctctactgccaaatctataaacattcaaaaaattttcaaaattgcactggcaaagatctttaatttgacattaaccatcccagaaatcaatgaaatcggcgatcctcttttgatatataagcacctaggtggccagcaacatcgacatcataacaaaagtcaggatagaaagagccataatatcaggaagccctcctcgtcgccctcatctaaggcaccatcgccgggcgttaatacatga

SEQ ID NO: 8230 - DNA, 738 bp, Artificial Sequence
  Description of Artificial Sequence: Synthetic polynucleotide
atggctacaccaagcacgggagcaaacaattctatacctgcggtaagaaatcaggttgaagttcaggttggattagtaggggatgcacaagtagggaaaacatctttgatggtgaagtacgtacagaacatatacgataaggaatacacacagacgttgggagtgaactttttgaaaagaaaagtaagcatacgctccacggatattatattttctataatggatttaggcggacaaagagaattcatcaacatgctcccaattgcgacggtagggtcttctgtgatcatatttttgtttgacttgacacgtccagagacgttgagtagtataaaggagtggtataggcaggcgtacgggttaaatgattctgcaattcctattttggtgggcacaaagtacgatttattgatagacttagacccggaatatcaggaacaaatctccagaacgagtatgaagtatgcacaggtcatgaatgctcctcttatattctgctctactgccaaatctataaacattcaaaaaattttcaaaattgcattggcaaagatctttaatttgacattaaccatcccagaaatcaatgaaatcggcgatcctcttttgatatataagcacttgggtggccagcaacatcgtcatcataacaaaagtcaggatagaaagagccataatatcaggaagccctcctcttctccctcttctaaggcaccatctccgggcgttaatacatga

SEQ ID NO: 8231 - DNA, 768 bp, Saccharomyces cerevisiae
atggctgttggtaagaataagagactatccagaggtaagaagggtttgaagaagaaggtcgttgacccatttaccagaaaggaatggttcgatattaaagccccatccacttttgaaaacagaaatgttggtaagactttagttaacaagtccactggtttgaagaatgcttccgatgctttgaagggtagagttgtcgaagtttgtttggctgacttgcaaggttctgaagaccattctttcagaaaggtcaagttgagagtcgatgaagttcaaggtaagaacttgttgaccaacttccacggtatggacttcactaccgacaaattgagatcaatggtcagaaaatggcaaactttgatcgaagctaatgttaccgttaagacttccgatgattacgttttgagaatctttgctattgccttcaccagaaagcaagctaaccaagttaagagacactcttacgctcaatcttcccacatcagagctatcagaaaagttatttctgaaatcttgaccagagaagttcaaaactctactttggctcaattgacctccaaattgattccagaagttatcaacaaggaaatcgaaaatgctaccaaggacatcttcccactacaaaacatccacgttagaaaggttaagttattgaaacaaccaaagttcgacgttggtgctttgatggctttgcatggtgaaggttccggtgaagaaaagggtaagaaggtttctggtttcaaggatgaagtcttggaaactgtgtaa

SEQ ID NO: 8232 - DNA, 768 bp, Artificial Sequence
  Description of Artificial Sequence: Synthetic polynucleotide
atggctgttggtaagaataagagattatccagaggtaagaagggtttgaagaagaaggtcgttgacccatttaccagaaaggaatggttcgatattaaagccccatccacttttgaaaacagaaatgttggtaagactttagttaacaagtccactggtttgaagaatgcttccgatgctttgaagggtagagttgtcgaagtttgtttggctgacttgcaaggttctgaagaccattctttcagaaaggtcaagttgagagtcgatgaagttcaaggtaagaacttgttgaccaacttccacggtatggacttcactaccgacaaattgagaagtatggtcagaaaatggcaaactttgatcgaagctaatgttaccgttaagacttccgatgattacgttttgagaatctttgctattgccttcaccagaaagcaagctaaccaagttaagagacactcttacgctcaatcttcccacatcagagctatcagaaaagttatttctgaaatcttgaccagagaagttcaaaactctactttggctcaattgacctccaaattgattccagaagttatcaacaaggaaatcgaaaatgctaccaaggacatcttcccattgcaaaacatccacgttagaaaggttaagttattgaaacaaccaaagttcgacgttggtgctttgatggctttgcatggtgaaggttccggtgaagaaaagggtaagaaggtttctggtttcaaggatgaagtcttggaaactgtgtga

SEQ ID NO: 8233 - DNA, 1179 bp, Saccharomyces cerevisiae
atgcctctgtcacaaaaacaaatagaccaagttagaaccaaagtgcactacagtgaagtagatactccattcaataaatatttagacatcttaggaaaagtaaccaagctgacaggaagcattataaatggcacattatccaatgatgatagcaagattgaaaaacttactgagcaaaatatctcccaactaaaagaaagtgctcatcttcgatttttggatctgcagtcatcaattgacacaaagaaagtagcagacgaaaattgggaaacatgccaacaggagacattggccaagctggaaaatctcaaagataaattgcctgatataaagagcatccatagcaagttgcttttacgtattggaaaactacaaggtctttacgattctgtccaagtaattaacagagaggtggaaggcttgtcagaaggccgtaccagccttgtggtgacacgtgcggaatgggagaaagaacttggcactgatctggtcaagtttttaattgaaaagaattatctcaaactagttgatccgggcctgaaaaaggatagttcagaggagagatatcgtatttatgacgatttctctaagggcccaaaagagttagaaagtatcaacgcctcaatgaaatcggatatagaaaacgtaaggcaggaggtatcgtcttacaaagagaagtggctaagagatgcagaaatatttggcaagatcacatcaatattcaaagaagaacttctgaagagagatggcctgctcaatgaggcagaaggagataacattgatgaagattatgaatcggatgaagatgaggaaagaaaagagaggtttaaaaggcagagatcaatggtggaagtgaatactatagaaaatgtggacgaaaaagaggaaagcgatcatgaatatgacgatcaggaggatgaagaaaatgaagaggaagatgatatggaagtagacgttgaggatataaaagaggataatgaagttgatggggaaagcagtcaacaagaagataatagtcgccagggtaataatgaggaaacagacaaagaaactggagtgatagaagagccagatgcggttaatgacgcagaggaggcagatagcgatcactcaagcaggaaacttggaggcactacaagcgattttagtgcgtcttcctctgttgaagaagtaaaatga

SEQ ID NO: 8234 - DNA, 1179 bp, Artificial Sequence
  Description of Artificial Sequence: Synthetic polynucleotide
atgcctttatctcaaaaacaaatagaccaagttagaaccaaagtgcactacagtgaagtagatactccattcaataaatatttagacatcttaggaaaagtaaccaagttaacaggaagcattataaatggcacattatccaatgatgatagcaagattgaaaaacttactgagcaaaatatctcccaattgaaagaaagtgctcatcttagatttttggatttacagtcttccattgacacaaagaaagtagcagacgaaaattgggaaacatgccaacaggagacattggccaagttggaaaatctcaaagataaattgcctgatataaagagcatccatagcaagttgcttttacgtattggaaaattacaaggtctttacgattctgtccaagtaattaacagagaggtggaaggcttgagtgaaggccgtaccagccttgtggtgacacgtgcggaatgggagaaagaacttggcactgatttggtcaagtttttaattgaaaagaattatctcaaattggttgatccgggcttgaaaaaggatagtagtgaggagagatatcgtatttatgacgatttctctaagggcccaaaagagttagaaagtatcaacgcctctatgaaatctgatatagaaaacgtaaggcaggaggtatcttcttacaaagagaagtggttgagagatgcagaaatatttggcaagatcacatctatattcaaagaagaacttttgaagagagatggcttgctcaatgaggcagaaggagataacattgatgaagattatgaaagtgatgaagatgaggaaagaaaagagaggtttaaaaggcagagaagtatggtggaagtgaatactatagaaaatgtggacgaaaaagaggaaagcgatcatgaatatgacgatcaggaggatgaagaaaatgaagaggaagatgatatggaagtagacgttgaggatataaaagaggataatgaagttgatggggaaagcagtcaacaagaagataatagtcgccagggtaataatgaggaaacagacaaagaaactggagtgatagaagagccagatgcggttaatgacgcagaggaggcagatagcgatcacagtagcaggaaacttggaggcactacaagcgattttagtgcgtcttcctctgttgaagaagtaaaatga

SEQ ID NO: 8235 - DNA, 2580 bp, Saccharomyces cerevisiae
atgccaaagtggataagatcaacattgaatcatattataccaagaaggccatttatctgtagtttcaacagttttcttttactcaaaaacgtatcgcacgccaaactatcgttttctatgagtagtcgtggtttcaggtctaataactttattcaagcacaattgaagcatccttccatactttcaaaagaagacctagatttgctctctgattcggatgattgggaagaacctgattgcatacagttagaaactgagaagcaagaaaagaaaattatcactgacatacataaagaagacccggtggacaaaaagcctatgagggataaaaatgtcatgaattttatcaataaagacagtcctttatcctggaacgatatgtttaaacccagtataatacaaccaccgcagttaatttctgaaaactcatttgaccagagcagtcaaaaaaaatcgagatcgacaggattcaagaatccattaagaccagcgttgaaaaaggaaagttcttttgatgaacttcaaaataattctatatctcaagagagaagtttggaaatgataaatgaaaacgaaaagaagaaaatgcaatttggagaaaagattgctgttttgacgcaaagacctagcttcactgaattgcagaatgaccaagatgacagtaacttgaatccccataatggtgtgaaagtcaagataccgatttgcttaagcaaagaacaagaaagtatcatcaagttggcagaaaatggccacaacattttttatacagggagtgccggtaccggtaaatccattcttttacgtgaaatgataaaagttttaaaaggcatatatggtagggagaatgttgcagtcactgcttccacgggtttagctgcttgtaatatcggtggtataaccatacactcgttcgctggtataggattaggaaaaggtgatgcggataaactctataaaaaagttcgtaggtctcgaaagcacctaaggcgctgggaaaatattggtgctttggttgtcgatgaaatatcaatgttagacgcagaactgcttgataaactcgatttcatagctagaaaaatacggaaaaatcatcaacccttcggtggaattcaactcatcttctgtggcgattttttccagttaccgccagtatcaaaagatcctaatagaccaactaagtttgctttcgaatccaaggcttggaaagaaggtgtaaagatgacgattatgctacaaaaggtttttagacagcgaggcgatgttaagttcattgacatgttgaatcggatgagactaggcaatattgatgatgaaacagaaagagagttcaagaagctttctagaccattgccagacgatgaaattattcccgcggaactttatagtaccagaatggaagtagaaagggccaataattcaaggctaagtaaattgccaggccaggtgcatatttttaatgcaatcgatggcggtgctttggaagacgaagagttaaaggaaaggctgttacaaaattttttagctccaaaggaattacatttgaaagttggcgctcaggttatgatggtaaaaaatctagacgcaacattagttaatggatcccttggtaaagtcatcgaattcatggatccagaaacatatttttgctatgaggcgctaacaaacgatccatctatgcctccagaaaaactcgagacttgggcagaaaacccttcaaaactaaaagctgcaatggagagggagcaaagtgatggggaagaaagtgcggtagctagtcgcaaatcttcagtgaaggagggatttgctaagagtgatataggtgagccggtctctcccctagattcctcagtttttgacttcatgaagagagtcaagacagatgacgaagttgtgctggaaaatataaaacgcaaggaacaactgatgcagaccatacatcaaaactctgcaggaaaacgaaggttacctctcgtgagattcaaagcttctgatatgagtacgaggatggtgcttgtcgagccggaggattgggcgatagaagacgaaaatgaaaagccactggtatcaagggttcaattaccgctaatgcttgcctggtcactatccattcacaaatctcagggtcagacacttccaaaagttaaagtggatttacgtagagtattcgaaaagggtcaggcgtacgttgccctttctagagctgtttcaagagaaggactacaggtgttaaattttgacagaactaggatcaaagcacatcaaaaggtaattgatttttatcttactttatcttcagccgaaagtgcctataagcaacttgaggcagatgagcaagtgaaaaaaaggaagttagactacgcaccaggccctaaatataaggctaaatccaagtcaaagtcaaattctccagcacccatatcagcgaccacacaatctaataatggtatcgcagcgatgttgcaaagacacagtaggaagagatttcagttgaaaaaagagtctaatagtaatcaagttcattcattggtttccgacgaacctcgtggtcaggataccgaagaccacatcttagaataa

SEQ ID NO: 8236 - DNA, 2580 bp, Artificial Sequence
  Description of Artificial Sequence: Synthetic polynucleotide
atgccaaagtggataagatctacattgaatcatattataccaagaaggccatttatctgtagtttcaacagttttcttttactcaaaaacgtaagccacgccaaattatctttttctatgagtagtcgtggtttcaggtctaataactttattcaagcacaattgaagcatccttccatactttctaaagaagacttggatttgctctctgattctgatgattgggaagaacctgattgcatacagttagaaactgagaagcaagaaaagaaaattatcactgacatacataaagaagacccggtggacaaaaagcctatgagggataaaaatgtcatgaattttatcaataaagacagtcctttatcctggaacgatatgtttaaacccagtataatacaaccaccgcagttaatttctgaaaactcttttgaccagagcagtcaaaaaaaatctagatctacaggattcaagaatccattaagaccagcgttgaaaaaggaaagttcttttgatgaacttcaaaataattctatatctcaagagagaagtttggaaatgataaatgaaaacgaaaagaagaaaatgcaatttggagaaaagattgctgttttgacgcaaagacctagcttcactgaattgcagaatgaccaagatgacagtaacttgaatccccataatggtgtgaaagtcaagataccgatttgcttaagcaaagaacaagaaagtatcatcaagttggcagaaaatggccacaacattttttatacagggagtgccggtaccggtaaatccattcttttacgtgaaatgataaaagttttaaaaggcatatatggtagggagaatgttgcagtcactgcttccacgggtttagctgcttgtaatatcggtggtataaccatacactctttcgctggtataggattaggaaaaggtgatgcggataaactctataaaaaagttcgtaggtctagaaagcacttgaggcgctgggaaaatattggtgctttggttgtcgatgaaatatccatgttagacgcagaattgcttgataaactcgatttcatagctagaaaaataagaaaaaatcatcaacccttcggtggaattcaactcatcttctgtggcgattttttccagttaccgccagtatccaaagatcctaatagaccaactaagtttgctttcgaatccaaggcttggaaagaaggtgtaaagatgacgattatgttacaaaaggtttttagacagagaggcgatgttaagttcattgacatgttgaatagaatgagattgggcaatattgatgatgaaacagaaagagagttcaagaagctttctagaccattgccagacgatgaaattattcccgcggaactttatagtaccagaatggaagtagaaagggccaataattctaggttgagtaaattgccaggccaggtgcatatttttaatgcaatcgatggcggtgctttggaagacgaagagttaaaggaaaggttattacaaaattttttagctccaaaggaattacatttgaaagttggcgctcaggttatgatggtaaaaaatttggacgcaacattagttaatggatcccttggtaaagtcatcgaattcatggatccagaaacatatttttgctatgaggcgttaacaaacgatccatctatgcctccagaaaaactcgagacttgggcagaaaacccttccaaattgaaagctgcaatggagagggagcaaagtgatggggaagaaagtgcggtagctagtcgcaaatcttctgtgaaggagggatttgctaagagtgatataggtgagccggtctctcccttagattcctctgtttttgacttcatgaagagagtcaagacagatgacgaagttgtgttggaaaatataaaacgcaaggaacaattgatgcagaccatacatcaaaactctgcaggaaaaagaaggttacctctcgtgagattcaaagcttctgatatgagtacgaggatggtgcttgtcgagccggaggattgggcgatagaagacgaaaatgaaaagccattagtaagtagggttcaattaccgttaatgcttgcctggtctttatccattcacaaatctcagggtcagacacttccaaaagttaaagtggatttacgtagagtattcgaaaagggtcaggcgtacgttgccctttctagagctgtttctagagaaggattacaggtgttaaattttgacagaactaggatcaaagcacatcaaaaggtaattgatttttatcttactttatcttctgccgaaagtgcctataagcaacttgaggcagatgagcaagtgaaaaaaaggaagttagactacgcaccaggccctaaatataaggctaaatccaagtccaagagcaattctccagcacccatatctgcgaccacacaatctaataatggtatcgcagcgatgttgcaaagacacagtaggaagagatttcagttgaaaaaagagtctaatagtaatcaagttcattctttggtttccgacgaacctcgtggtcaggataccgaagaccacatcttagaatga

SEQ ID NO: 8237 - DNA, 1131 bp, Saccharomyces cerevisiae
atgtcttataaattcggcaaacttgccattaataaaagtgagctatgtctagcaaatgtgctacaggctggccaatcctttcgatggatttgggatgaaaagttaaaccagtacagcactacaatgaagataggccagcaagaaaagtattcagtagtgattttgaggcaagatgaagagaatgagatcctggaatttgttgctgtcggcgactgtggcaatcaggacgccttaaaaactcatctaatgaaatattttagattggacgtgtcactgaagcacttattcgataatgtttggattccaagcgataaagcatttgcgaaactttctccacaaggcatccgtatcttggcccaggaaccatgggagacattgatttcctttatttgctcgagtaataataacatttcaagaattacgagaatgtgcaatagcctttgctctaatttcgggaacttaatcacaacaatagatggggtcgcctaccattcgtttcctacaagtgaggagctaacttctcgagccactgaagccaagttgcgtgagctgggctttggatatagagctaagtatattatcgaaaccgcgagaaaactggtgaatgataaagctgaagctaatattacttctgacaccacataccttcaaagtatctgtaaagatgctcaatatgaagacgttagagagcacctcatgtcctacaatggtgtaggccccaaagttgctgattgcgtttgtctaatgggacttcacatggatggcatcgtccccgtagatgtccatgttagtagaattgcgaagagggactaccaaatatctgcgaacaagaaccatctcaaagaattgaggacaaaatacaacgccttacctatctcaagaaaaaaaatcaacctagagctcgaccatattagattaatgctttttaaaaaatggggatcatacgctggttgggcccaaggtgtcctattctctaaagaaatcggagggactagtggtagcactacaactggtactataaagaagagaaaatgggatatgataaaggaaacggaagcaattgttacgaaacaaatgaaactgaaagttgaattgtctgatcttcacatcaaagaagcaaaaatagattag

SEQ ID NO: 8238 - DNA, 1131 bp, Artificial Sequence
  Description of Artificial Sequence: Synthetic polynucleotide
atgtcttataaattcggcaaacttgccattaataaaagtgagctctgtttggcaaatgtgttacaggctggccaatcctttagatggatttgggatgaaaagttaaaccagtacagcactacaatgaagataggccagcaagaaaagtattctgtagtgattttgaggcaagatgaagagaatgagatcttggaatttgttgctgtcggcgactgtggcaatcaggacgccttaaaaactcatttaatgaaatattttagattggacgtgtctttgaagcacttattcgataatgtttggattccaagcgataaagcatttgcgaaactttctccacaaggcatccgtatcttggcccaggaaccatgggagacattgatttcctttatttgcagcagtaataataacatttctagaattacgagaatgtgcaatagcctttgctctaatttcgggaacttaatcacaacaatagatggggtcgcctaccattcttttcctacaagtgaggagttaacttctcgtgccactgaagccaagttgcgtgagttgggctttggatatagagctaagtatattatcgaaaccgcgagaaaattagtgaatgataaagctgaagctaatattacttctgacaccacataccttcaaagtatctgtaaagatgctcaatatgaagacgttagagagcacctcatgtcctacaatggtgtaggccccaaagttgctgattgcgtttgtttgatgggacttcacatggatggcatcgtccccgtagatgtccatgttagtagaattgcgaagagggactaccaaatatctgcgaacaagaaccatctcaaagaattgaggacaaaatacaacgccttacctatctccagaaaaaaaatcaacttggagctcgaccatattagattaatgctttttaaaaaatggggatcttacgctggttgggcccaaggtgtccttttctctaaagaaatcggagggactagtggtagcactacaactggtactataaagaagagaaaatgggatatgataaaggaaacggaagcaattgttacgaaacaaatgaaattgaaagttgaattgtctgatcttcacatcaaagaagcaaaaatagattga

SEQ ID NO: 8239 - DNA, 5040 bp, Saccharomyces cerevisiae
atgcgttcaatgaattgcactacgaacaacaccaacaataccggccaaaacacgaaaaacagtcttggctccagctttaattccagtaattatacttcttatagattccagacatgtctcaccgaccagattatttctgaggcgcagacgtggtcactttcatccctcttcaacttctcgtgggttgtgtcctactttgttatgggtgcctctcgtatgatcttcaggtacggttggtatctggcaactttatcgcttttaaggattccgaagtggatcttcttcaagttacaccatgttcagttcactctttccttttggctgatcctgtttgccctagccgtcatagtctttgtgacttacaccatcatgaaggagagaattctatcccagtacaagaggctgaccccggagttcttgccgctggaaaatacaggtaaatctggctccagcgccaatatcaatgcagcttccactcagtcagccaacgcgccacccgccataggttcctctaccacgggtgcaagctcgattatagactcaaaaaagcattcattgaaagatggcaacgaaaacgaaacctttctttcatcttaccttgaccaatttctcagcgccatcaaaatctttggctatctggaaaaaccagtcttccatgacctgaccaagaatatgaaaactcaaaaaatggatgagggtgagattttactgttggacagtactattgggtttgccatcgtcgttgaaggcaccctgcagttatatcatgaagtagatcattcagataaggaccatggcgatgaaactgaccacagtgacacggatggtcttgacgaccaggatagagatgaagaagacgaagaagaagatgatgacattgataactacgacaccaaatcttgttcttctaacctcatcgatgaagaagatgaatccgttggttacattcatctgaaaaatggactgggaaattttcaactgctaaatacagtcaagccaggaaacccgctgacctccctcgtgagcattttaaacttattcacgcattccatgtcctcgtatggcaacagtaactttccctctgagttatcgtcacctatagacacaacggtgtcggtcaacaatatgttctgctcatcagagcagaacttctccaacacagattccatgacaaactccaccaacagctttccaacgttcccctcttcaatgcctaaacttgtcgcccgtgcggctacagactgcacaattggtattatcccacctcaatcgtttgccaaattaaccgcaaaatacccacggtctgcttcccatatcatacagatggttctcaccaagctataccatgttacgttccaaactgctcacgactacttaggtttaacaaaggagatcatggatatcgaagttttactaaataaatccatcgtttatgaattgccttattatttgaaagaggccgttattcgtaagtttaaaactgtagataagtcgagcggatcggctgatttagaaccgaaacccaaaaatagtaatgcttcctctaaattgaagaaaccgcccaaagcgaagccatctgatggtatcattcaatcgcttaagattgctaacgccaacgctaacacaagttcgaattccctttcactgaaaccagaattcacccaccatccaagttcgagacatgtcgtactgggttcaagagaccaatttaatcctggtgatttactgtcaaatgtcccactgtctagaactatggatattctgtcacccaacccaatccataataacaaccgcaataaatcaaacggtattaacacttctacctctaaccaacataagcgatcttctaggagtagcagtaacaatgcttccgtacactctaagaagttttcttctttgtccccagaattgcgcaacgcacaacttagtacatcgcccttgtccttggataatacttctgttcatgaccatatccacccaagtcccgttcatttgaagggacgggtctctccaagacctaatttactgcccacaacatccttttctgctgcccaggaagaaaccgaggactctgctttaagaatggctttagttgaggcaatgttaacatacttgggtgtaaacaaaagcaatatgtccgtttcatcttcttcgatagcaaatatgtcttctttaaactctcctcaacttaatgaaatgtatagccgccgtccaagtaacgcaagttttctgatgtcccctcactgtacaccatctgacatttccgtagcttcatcatttgcctctcctcaaactcaaccgacaatgttaagaatcctacccaaagaatacactatcagcaataaaaggcataataaaagtaaaagccaggacaaaaaaaaacctagagcttacaaagaggagttgacacccaatttggatttcgaagatgtcaagaaagactttgcacaaggcattcagttgaagttctttaaaaagggcaccacaattgttgagcagaacgctcgtggtaaaggcctattctatatcatttccgggaaagttaatgtgacaacaaattcgtcctcgtcagtagtatcatcaatgtctaaaccagagcaggtttcagcccaaagttcacacaagggtgaaaatcctcatcatactcaacatttgttatactctgtaggatctggtggtattgtgggctacttgtcctctctaattggttacaaatcatttgttaatatcgttgccaagagcgatgtctatgttggatttttatctagtgcaaccttagaaagattgtttgataaatatttcctaatctacttacggatttctgattcattaaccaaattgctatcttcaaggttattaaagctcgaccatgctttagaatgggttcacttgagggcttctgaaactctattttcacaaggtgactcggctaacggtatttatgttgtcctgaatggtagactaaggcagctacaacagcagtcattgtcaaactccaatacaagttccgaagaagttgaaactcagaacattattctaggagaactggcccagggggagagttttggtgaagttgaagtgcttaccgctatgaatagatattcaacgatagtggcagtgagggattctgaattagcgagaattccgagaacattattcgaactattagctcttgaacatccatctatcatgattagagtttccagattagttgctaaaaaaattgtcggagatagaactgttccagcattaacaggcgatccattatctataaaggaaaacgacttcacttctttaatacctccaacgaaagcgtcttactctagctctttaagtcataaaccccaaaatattacttctggcacaattacttttagaaccatcactatcttaccaattaccagtggactacctgtagaagcatttgctatgaagttagtgcaagctttcaaacaggtaggaaggaccacgattggtttaaatcaaagaactaccctaacacatttaggtcgtcatgcatttgacagattgtccaaattaaaacaaagtggttactttgctgaactagaagaaatgtaccagactgttgtttatatatcagatacaccagttaaatctaattggacaagaacctgtattgcgcaaggtgattgtattctcttactagcagatgctagatctccatcagccgaaataggagaatatgaaaagttattactaaattcaaagactaccgcaaggaccgagttaattcttctacaccctgaaaggtatgtggaaccaggactaacccataagtggttacgctataggccatgggttcattcgcatcatcacattcaatttagtttgacaggaacaaccttgatgaacgaaggcaaaatgcacgttttgaataatggtgccttggcattaatggataagttgattcaaacagaattcagtagaaaaactcaacagaatatatcaaaactacttccagattctatcaagaacaccgtagaaaacttttcttcaagattcatgaaaagtaaaagacaatattacacaccagttcataggcataaaaatgattttctaagattggctagaattctttctggacaagctattggacttgtcctcggaggaggaggtgcgagaggtattagtcatttgggtgtcattcaagctattgaagaacaaggtattccggtcgacgttattggaggaacatcgattggttcctttgttggcggtttgtacgcgaaggattatgatttggtgccaatttacggccgcgtgaagaagtttgctggtcgaatttcctctatatggagaatgttaacagatttaacctggccggttacttcttatactactggtcacgaatttaatagaggtatttggaaaactttcggggatacaagaattgaagacttctggatccagtattattgtaattctactaatataaccgattcggttcaagaaatacattcctttggttatgcgtggaggtacatcagagcttcgatgtctcttgctggtcttttacctcctttggaagagaacgggtctatgttactggatggtggttatgttgataatttaccagtaactgagatgagagcgcgtggttgccaaactatatttgcagtagatgtaggttctgcagatgatagaacgcctatggaatatggtgactccctaaatgggttttggatcattttcaatagatggaatccattttcttctcatccaaacatacccaatatggcagagattcaagttagattgggttacgtcgcatcagtaaatgctttagagaaagcgaaaaatacaccaggtgtcgtttatgtgagaccacctattgaagaatatgccacattagactttagcaagttcgaagaaatttatcatgtgggtgtagactatggtcgtatctttttgcaagggcttattgacgacgacaagatgccatatatacctggttcacaagaaaccactttgaattctcaagttcctgagtttttattacatagaagaaatagtatttga

SEQ ID NO: 8240 - DNA, 5040 bp, Artificial Sequence
  Description of Artificial Sequence: Synthetic polynucleotide
atgcgttccatgaattgcactacgaacaacaccaacaataccggccaaaacacgaaaaacagtcttggctccagctttaattccagtaattatacttcttatagattccagacatgtctcaccgaccagattatttctgaggcgcagacgtggagtctttcctccctcttcaacttcagttgggttgtgtcctactttgttatgggtgcctctcgtatgatcttcaggtacggttggtatttggcaactttatctcttttaaggattccgaagtggatcttcttcaagttacaccatgttcagttcactctttccttttggttgatcttatttgccttggccgtcatagtctttgtgacttacaccatcatgaaggagagaattttatcccagtacaagaggttgaccccggagttcttgccgttggaaaatacaggtaaatctggctccagcgccaatatcaatgcagcttccactcagtctgccaacgcgccacccgccataggttcctctaccacgggtgcaagctctattatagactctaaaaagcattctttgaaagatggcaacgaaaacgaaacctttctttcttcttaccttgaccaatttctcagcgccatcaaaatctttggctatttggaaaaaccagtcttccatgacttgaccaagaatatgaaaactcaaaaaatggatgagggtgagattttattattggacagtactattgggtttgccatcgtcgttgaaggcaccttgcagttatatcatgaagtagatcattctgataaggaccatggcgatgaaactgaccacagtgacacggatggtcttgacgaccaggatagagatgaagaagacgaagaagaagatgatgacattgataactacgacaccaaatcttgttcttctaacctcatcgatgaagaagatgaatccgttggttacattcatttgaaaaatggacttggaaattttcaattattgaatacagtcaagccaggaaacccgttaacctccctcgtgagcattttaaacttattcacgcattccatgtccagctatggcaacagtaactttccctctgagttatcttctcctatagacacaacggtgtctgtcaacaatatgttctgctcttctgagcagaacttctccaacacagattccatgacaaactccaccaacagctttccaacgttcccctcttctatgcctaaacttgtcgcccgtgcggctacagactgcacaattggtattatcccacctcaaagttttgccaaattaaccgcaaaatacccaagatctgcttcccatatcatacagatggttctcaccaagttgtaccatgttacgttccaaactgctcacgactacttaggtttaacaaaggagatcatggatatcgaagttttattgaataaatccatcgtttatgaattgccttattatttgaaagaggccgttattcgtaagtttaaaactgtagataagagcagcggatctgctgatttagaaccgaaacccaaaaatagtaatgcttcctctaaattgaagaaaccgcccaaagcgaagccatctgatggtatcattcaatctcttaagattgctaacgccaacgctaacacaagtagtaattccctttctttgaaaccagaattcacccaccatccaagtagtagacatgtcgtattgggttccagagaccaatttaatcctggtgatttattatccaatgtcccattatctagaactatggatattttatctcccaacccaatccataataacaaccgcaataaaagtaacggtattaacacttctacctctaaccaacataagagatcttctaggagtagcagtaacaatgcttccgtacactctaagaagttttcttctttgtccccagaattgcgcaacgcacaacttagtacatctcccttgtccttggataatacttctgttcatgaccatatccacccaagtcccgttcatttgaagggaagagtctctccaagacctaatttattgcccacaacatccttttctgctgcccaggaagaaaccgaggactctgctttaagaatggctttagttgaggcaatgttaacatacttgggtgtaaacaaaagcaatatgtccgtttcttcttcttctatagcaaatatgtcttctttaaactctcctcaacttaatgaaatgtatagccgccgtccaagtaacgcaagttttttgatgtcccctcactgtacaccatctgacatttccgtagcttcttcttttgcctctcctcaaactcaaccgacaatgttaagaatcttgcccaaagaatacactatcagcaataaaaggcataataaaagtaaaagccaggacaaaaaaaaacctagagcttacaaagaggagttgacacccaatttggatttcgaagatgtcaagaaagactttgcacaaggcattcagttgaagttctttaaaaagggcaccacaattgttgagcagaacgctcgtggtaaaggccttttctatatcatttccgggaaagttaatgtgacaacaaattcttcctcttctgtagtatcttctatgtctaaaccagagcaggtttctgcccaaagttctcacaagggtgaaaatcctcatcatactcaacatttgttatactctgtaggatctggtggtattgtgggctacttgtcctctttgattggttacaaaagttttgttaatatcgttgccaagagcgatgtctatgttggatttttatctagtgcaaccttagaaagattgtttgataaatatttcttgatctacttaagaatttctgattctttaaccaaattgttatcttccaggttattaaagctcgaccatgctttagaatgggttcacttgagggcttctgaaactttattttctcaaggtgactctgctaacggtatttatgttgtcttgaatggtagattaaggcagttacaacagcagtctttgtctaactccaatacaagttccgaagaagttgaaactcagaacattattttaggagaattggcccagggggagagttttggtgaagttgaagtgcttaccgctatgaatagatattctacgatagtggcagtgagggattctgaattagcgagaattccgagaacattattcgaattattagctcttgaacatccatctatcatgattagagtttccagattagttgctaaaaaaattgtcggagatagaactgttccagcattaacaggcgatccattatctataaaggaaaacgacttcacttctttaatacctccaacgaaagcgtcttactctagctctttaagtcataaaccccaaaatattacttctggcacaattacttttagaaccatcactatcttaccaattaccagtggattgcctgtagaagcatttgctatgaagttagtgcaagctttcaaacaggtaggaaggaccacgattggtttaaatcaaagaactaccttaacacatttaggtcgtcatgcatttgacagattgtccaaattaaaacaaagtggttactttgctgaattggaagaaatgtaccagactgttgtttatatatctgatacaccagttaaatctaattggacaagaacctgtattgcgcaaggtgattgtattctcttattggcagatgctagatctccatctgccgaaataggagaatatgaaaagttattattgaattctaagactaccgcaaggaccgagttaattcttttacaccctgaaaggtatgtggaaccaggattaacccataagtggttacgctataggccatgggttcattctcatcatcacattcaatttagtttgacaggaacaaccttgatgaacgaaggcaaaatgcacgttttgaataatggtgccttggcattaatggataagttgattcaaacagaattcagtagaaaaactcaacagaatatatccaaattacttccagattctatcaagaacaccgtagaaaacttttcttctagattcatgaaaagtaaaagacaatattacacaccagttcataggcataaaaatgattttttaagattggctagaattctttctggacaagctattggacttgtcctcggaggaggaggtgcgagaggtattagtcatttgggtgtcattcaagctattgaagaacaaggtattccggtcgacgttattggaggaacatccattggttcctttgttggcggtttgtacgcgaaggattatgatttggtgccaatttacggccgcgtgaagaagtttgctggtagaatttcctctatatggagaatgttaacagatttaacctggccggttacttcttatactactggtcacgaatttaatagaggtatttggaaaactttcggggatacaagaattgaagacttctggatccagtattattgtaattctactaatataaccgattctgttcaagaaatacattcctttggttatgcgtggaggtacatcagagcttccatgtctcttgctggtcttttacctcctttggaagagaacgggtctatgttattagatggtggttatgttgataatttaccagtaactgagatgagagcgcgtggttgccaaactatatttgcagtagatgtaggttctgcagatgatagaacgcctatggaatatggtgactccttgaatgggttttggatcattttcaatagatggaatccattttcttctcatccaaacatacccaatatggcagagattcaagttagattgggttacgtcgcatctgtaaatgctttagagaaagcgaaaaatacaccaggtgtcgtttatgtgagaccacctattgaagaatatgccacattagactttagcaagttcgaagaaatttatcatgtgggtgtagactatggtcgtatctttttgcaagggcttattgacgacgacaagatgccatatatacctggttctcaagaaaccactttgaattctcaagttcctgagtttttattacatagaagaaatagtatttga

SEQ ID NO: 8241 - DNA, 207 bp, Saccharomyces cerevisiae
atgaccatggaccaaggccttaacccaaagcaattcttccttgacgatgtcgtcctacaagacactttgtgctcaatgagcaaccgtgtcaacaagagtgtcaagaccggctacttattccccaaggatcacgttccttctgccaacatcattgccgtcgaacgtcgcggcggtctttctgacattggtaagaatacttccaactaa

SEQ ID NO: 8242 - DNA, 207 bp, Artificial Sequence
  Description of Artificial Sequence: Synthetic polynucleotide
atgaccatggaccaaggccttaacccaaagcaattcttccttgacgatgtcgtcttacaagacactttgtgctctatgagcaaccgtgtcaacaagagtgtcaagaccggctacttattccccaaggatcacgttccttctgccaacatcattgccgtcgaacgtcgcggcggtctttctgacattggtaagaatacttccaactga

SEQ ID NO: 8243 - DNA, 315 bp, Saccharomyces cerevisiae
atgcaaaattcccaagactacttttacgctcaaaatcgctgccaacaacaacaagccccttccacattgcgtaccgtgaccatggcggaatttagaagggtgcctttgccacctatggctgaggttcctatgttgtctactcaaaactccatgggcagctccgcttctgcctccgcttcttcattagaaatgtgggaaaaggatttggaggagagactcaactctatcgatcatgacatgaacaacaacaaatttggttctggcgaactaaaatctatgttcaaccagggtaaggtcgaggaaatggacttctaa

SEQ ID NO: 8244 - DNA, 315 bp, Artificial Sequence
  Description of Artificial Sequence: Synthetic polynucleotide
atgcaaaattcccaagactacttttacgctcaaaatcgctgccaacaacaacaagccccttccacattgcgtaccgtgaccatggcggaatttagaagggtgcctttgccacctatggctgaggttcctatgttgtctactcaaaactccatgggcagctccgcttctgcctccgcttcttctttagaaatgtgggaaaaggatttggaggagagactcaactctatcgatcatgacatgaacaacaacaaatttggttctggcgaattgaaatctatgttcaaccagggtaaggtcgaggaaatggacttctga

SEQ ID NO: 8245 - DNA, 1815 bp, Saccharomyces cerevisiae
atgtcttcagacgctataagaaatactgagcagataaacgccgctattaaaattatagaaaacaaaacagagcgtccgcaatcgtccacaacccctatagattcgaaggctagtacagttgctgctgctaattccacggccacagaaacttccagagaccttacacaatataccctagatgacggaagagtcgtatcgacaaaccgcagaataatgaataaagtgcccgccatcacgtcacatgttcctacagatgaagagctgttccagcccaatgggatacctcgtcacgaattcctaagagatcatttcaagcgcgagggcaaattgtcggctgcgcaggcggccaggatcgttacacttgcaacggaactcttcagcaaagaacccaaccttatatctgttcccgccccaatcacagtttgcggtgatatccatggccagtactttgaccttttgaagctattcgaagttggcggagatccggccactacatcgtatttgttcttgggagactatgtcgacagagggtccttttcgtttgagtgtcttatttatttatattctttgaagctgaattttaacgaccatttctggctactgaggggtaaccacgaatgtaagcatctaacgtcatatttcactttcaaaaatgaaatgctgcacaagtacaatctagatatttacgagaaatgctgcgaatcgtttaacaacttgcccctggctgcgttaatgaacggacagtatctttgtgttcatggtggtatatctcccgagttaaactctttacaggacattaacaacctaaatagattcagggagattccctctcatggcctgatgtgtgatctgttgtgggctgacccgattgaagagtacgacgaagtcttggataaagacttgactgaggaagacatagtgaactccaaaaccatggttcctcatcatggcaagatggcaccttcaagggatatgtttgtcccaaactcagtaaggggctgttcatatgccttcacgtatcgtgctgcgtgccattttctgcaagagactggcctgttgtccatcatcagggcacacgaggctcaagacgctggttatagaatgtacaaaaataccaagactttgggctttccctctcttttgacccttttcagtgcgcctaactacttggacacctacaataataaggctgccatattgaaatacgaaaataatgttatgaatatcagacaattcaacatgactccacacccctattggttaccagatttcatggacgttttcacgtggtccttgccatttgttggtgaaaaagttacagagatgcttgtcgcaattctaaacatctgtactgaagatgagctggaaaacgacacccccgtcattgaagaattagttggtaccgataaaaaattgccacaagctggtaagtcggaagcaactccacaaccagccacttcggcgtcgcctaaacatgcttccattttagatgacgaacatcgaaggaaagccttacgaaataagattctggccgtcgccaaagtttccagaatgtattctgttctcagagaagaaaccaataaagttcagtttttaaaagatcacaattcaggcgtgttgccacgtggcgctttatctaatggtgtaaagggtttagatgaagccctgtctacctttgaaagggcaagaaagcacgatttaattaatgaaaaattaccgccttcactagacgaactgaaaaacgaaaataagaagtactacgaaaaagtttggcagaaagtacatgaacatgatgcaaagaatgatagcaaatag

SEQ ID NO: 8246 - DNA, 1815 bp, Artificial Sequence
  Description of Artificial Sequence: Synthetic polynucleotide
atgtcttctgacgctataagaaatactgagcagataaacgccgctattaaaattatagaaaacaaaacagagcgtccgcaatcttccacaacccctatagattctaaggctagtacagttgctgctgctaattccacggccacagaaacttccagagaccttacacaatataccttggatgacggaagagtcgtatctacaaaccgcagaataatgaataaagtgcccgccatcacgagtcatgttcctacagatgaagagcttttccagcccaatgggatacctcgtcacgaattcttaagagatcatttcaagcgcgagggcaaattgtctgctgcgcaggcggccaggatcgttacacttgcaacggaactcttcagcaaagaacccaaccttatatctgttcccgccccaatcacagtttgcggtgatatccatggccagtactttgaccttttgaagcttttcgaagttggcggagatccggccactacatcttatttgttcttgggagactatgtcgacagagggtccttttcttttgagtgtcttatttatttatattctttgaagttgaattttaacgaccatttctggttgttgaggggtaaccacgaatgtaagcatttaacgtcctatttcactttcaaaaatgaaatgttgcacaagtacaatttggatatttacgagaaatgctgcgaaagttttaacaacttgcccttggctgcgttaatgaacggacagtatctttgtgttcatggtggtatatctcccgagttaaactctttacaggacattaacaacttgaatagattcagggagattccctctcatggcttaatgtgtgatttattgtgggctgacccgattgaagagtacgacgaagtcttggataaagacttgactgaggaagacatagtgaactccaaaaccatggttcctcatcatggcaagatggcaccttctagggatatgtttgtcccaaactctgtaaggggctgttcttatgccttcacgtatcgtgctgcgtgccattttttgcaagagactggccttttgtccatcatcagggcacacgaggctcaagacgctggttatagaatgtacaaaaataccaagactttgggctttccctctcttttgacccttttcagtgcgcctaactacttggacacctacaataataaggctgccatattgaaatacgaaaataatgttatgaatatcagacaattcaacatgactccacacccctattggttaccagatttcatggacgttttcacgtggtccttgccatttgttggtgaaaaagttacagagatgcttgtcgcaattttgaacatctgtactgaagatgagttagaaaacgacacccccgtcattgaagaattagttggtaccgataaaaaattgccacaagctggtaagtctgaagcaactccacaaccagccactagtgcgtcccctaaacatgcttccattttagatgacgaacatagaaggaaagccttaagaaataagattttagccgtcgccaaagtttccagaatgtattctgttctcagagaagaaaccaataaagttcagtttttaaaagatcacaatagtggcgtgttgccacgtggcgctttatctaatggtgtaaagggtttagatgaagccttatctacctttgaaagggcaagaaagcacgatttaattaatgaaaaattaccgccttctttggacgaattgaaaaacgaaaataagaagtactacgaaaaagtttggcagaaagtacatgaacatgatgcaaagaatgatagcaaatga

SEQ ID NO: 8247 - DNA, 1575 bp, Saccharomyces cerevisiae
atgagtgctgctccattggattacaaaaaggctttagaacatttgaagacatacagttccaaggacggtctttctgtccaggaattgatggactccacaactagaggtgggttgacctacaatgattttttggtcttaccaggcttggtcaatttcccatcttctgctgtcagtttgcaaaccaaattgaccaagaaaatcactttgaacactccttttgtctcttctcctatggacacagtcactgaagctgatatggctatttatatggctttattgggtggtattggtttcatccatcacaactgtactccaaaggaacaggcttccatggtcaagaaagttaaaatgtttgaaaacggtttcatcaattctccaatagtaatttctccaaccaccactgttggtgaagttaaggttatgaagagaaagtttggtttctctggcttcccagttactgaagacggtaagtgtccaggtaagttagttgggttagtcacctctcgtgatatacaattcttagaagatgattctttggttgtttctgaagtcatgactaaaaatccagttactggcatcaagggtattactttgaaagaaggtaatgaaatcctaaaacaaaccaagaaaggtaaattgcttatcgttgatgataacggtaacctcgtttccatgttgtcaagagcggatttgatgaagaatcaaaactacccgttagcttctaaatccgccaccaccaagcaattgctatgtggtgctgcaattggtactatcgaagctgataaggaaagattaagactattagtcgaagcaggtttggatgttgttatcttagattcctctcaaggtaactctgttttccaattgaacatgatcaaatggattaaagaaactttcccagatttggaaatcattgctggtaacgttgccaccagagaacaagctgctaacttgattgctgccggtgccgatggtttaagaattggtatgggttctgggtctatttgtatcactcaagaagttatggcttgtggtagaccacaaggtacagctgtctacaacgtttgtcaatttgctaaccaatttggcgttccatgtatggctgatggtggtgtccaaaacattggccacatcaccaaggctttggcccttggttcctccaccgtcatgatgggtggtatgttagctggtactaccgagtcaccaggtgaatacttctacaaggatggtaagagattgaaggcttatcgtggtatggggtccattgacgccatgcaaaagaccggtaacaagggtaatgcctctacttctcgttatttctctgagtcagacagtgtcttggttgcacaaggtgtttctggggctgtcgtagacaaaggttccatcaagaagtttattccatatttgtacaacggtttacaacattcttgtcaagacattggttgcgaatctctaacttcattgaaagagaatgttcaaaatggtgaagttagatttgaattcagaaccgcttctgctcaattagaaggtggtgtccataatttgcactcctatgaaaaacgtctatacaattga

SEQ ID NO: 8248 - DNA, 1575 bp, Artificial Sequence
  Description of Artificial Sequence: Synthetic polynucleotide
atgagtgctgctccattggattacaaaaaggctttagaacatttgaagacatacagttccaaggacggtctttctgtccaggaattgatggactccacaactagaggtgggttgacctacaatgattttttggtcttaccaggcttggtcaatttcccatcttctgctgtcagtttgcaaaccaaattgaccaagaaaatcactttgaacactccttttgtctcttctcctatggacacagtcactgaagctgatatggctatttatatggctttattgggtggtattggtttcatccatcacaactgtactccaaaggaacaggcttccatggtcaagaaagttaaaatgtttgaaaacggtttcatcaattctccaatagtaatttctccaaccaccactgttggtgaagttaaggttatgaagagaaagtttggtttctctggcttcccagttactgaagacggtaagtgtccaggtaagttagttgggttagtcacctctcgtgatatacaattcttagaagatgattctttggttgtttctgaagtcatgactaaaaatccagttactggcatcaagggtattactttgaaagaaggtaatgaaatcttgaaacaaaccaagaaaggtaaattgcttatcgttgatgataacggtaacctcgtttccatgttgtccagagcggatttgatgaagaatcaaaactacccgttagcttctaaatccgccaccaccaagcaattgttatgtggtgctgcaattggtactatcgaagctgataaggaaagattaagattattagtcgaagcaggtttggatgttgttatcttagattcctctcaaggtaactctgttttccaattgaacatgatcaaatggattaaagaaactttcccagatttggaaatcattgctggtaacgttgccaccagagaacaagctgctaacttgattgctgccggtgccgatggtttaagaattggtatgggttctgggtctatttgtatcactcaagaagttatggcttgtggtagaccacaaggtacagctgtctacaacgtttgtcaatttgctaaccaatttggcgttccatgtatggctgatggtggtgtccaaaacattggccacatcaccaaggctttggcccttggttcctccaccgtcatgatgggtggtatgttagctggtactaccgagtctccaggtgaatacttctacaaggatggtaagagattgaaggcttatcgtggtatggggtccattgacgccatgcaaaagaccggtaacaagggtaatgcctctacttctcgttatttctctgagagtgacagtgtcttggttgcacaaggtgtttctggggctgtcgtagacaaaggttccatcaagaagtttattccatatttgtacaacggtttacaacattcttgtcaagacattggttgcgaatctttgacttctttgaaagagaatgttcaaaatggtgaagttagatttgaattcagaaccgcttctgctcaattagaaggtggtgtccataatttgcactcctatgaaaaacgtctttacaattga

SEQ ID NO: 8249 - DNA, 537 bp, Saccharomyces cerevisiae
atgagttctgctaaacctattaatgtatattcaatcccggagttgaaccaagctttagatgaagccctaccttctgttttcgcgagattaaattacgagagatcatacgctttactcgatgctaaattgtacataggttattccatagctgttgtagctggtttgagtttcttcttggataaaaaatttgagagagatcagattgttacgtatcaaaagcttttggtaggcgcatattttgtgctctcgctacttttctggtatttctctcgttttattgaaaaggggactgtttatgtgggaaagagaagaggtacaaaggaggaaatatatgtaaagacaaagttcgaaaagaacgaaccattatatctggttgagcttgttcagaaaaaaaagggagaaaactccaagaaggagttgaaggcaaaattagaagtgaataaggtttttaatgaaagtggatatttacagaacgatgcgtattttaagtggttctctgaacagcacaatgtcctcgacaccaaaaaaaatgaataa

SEQ ID NO: 8250 - DNA, 537 bp, Artificial Sequence
  Description of Artificial Sequence: Synthetic polynucleotide
atgagttctgctaaacctattaatgtatattctatcccggagttgaaccaagctttagatgaagccttgccttctgttttcgcgagattaaattacgagagatcttacgctttactcgatgctaaattgtacataggttattccatagctgttgtagctggtttgagtttcttcttggataaaaaatttgagagagatcagattgttacgtatcaaaagcttttggtaggcgcatattttgtgctctccttacttttctggtatttctctcgttttattgaaaaggggactgtttatgtgggaaagagaagaggtacaaaggaggaaatatatgtaaagacaaagttcgaaaagaacgaaccattatatttggttgagcttgttcagaaaaaaaagggagaaaactccaagaaggagttgaaggcaaaattagaagtgaataaggtttttaatgaaagtggatatttacagaacgatgcgtattttaagtggttctctgaacagcacaatgtcctcgacaccaaaaaaaatgaatga

SEQ ID NO: 8251 - DNA, 1776 bp, Saccharomyces cerevisiae
atgctaaaatacaaacctttactaaaaatctcgaagaactgtgaggctgctatcctcagagcgtctaagactagattgaacacaatccgcgcgtacggttctaccgttccaaaatccaagtcgttcgaacaagactcaagaaaacgcacacagtcatggactgccttgagagtcggtgcaattctagccgctactagttccgtggcgtatctaaactggcataatggccaaatagacaacgagccgaaactggatatgaataaacaaaagatttcgcccgctgaagttgccaagcataacaagcccgatgattgttgggttgtgatcaatggttacgtatacgacttaacgcgattcctaccaaatcatccaggtgggcaggatgttatcaagtttaacgccgggaaagatgtcactgctatttttgaaccactacatgctcctaatgtcatcgataagtatatagctcccgagaaaaaattgggtccccttcaaggatccatgcctcctgaacttgtctgtcctccttatgctcctggtgaaactaaggaagatatcgctagaaaagaacaactaaaatcgctgctacctcctctagataatattattaacctttacgactttgaatacttggcctctcaaactttgactaaacaagcgtgggcctactattcctccggtgctaacgacgaagttactcacagagaaaaccataatgcttatcataggatttttttcaaaccaaagatccttgtagatgtacgcaaagtagacatttcaactgacatgttgggttctcatgtggatgttcccttctacgtgtctgctacagctttgtgtaaactgggaaaccccttagaaggtgaaaaagatgtcgccagaggttgtggccaaggtgtgacaaaagtcccacaaatgatatctactttggcttcatgttcccctgaggaaattattgaagcagcaccctctgataaacaaattcaatggtaccaactatatgttaactctgatagaaagatcactgatgatttggttaaaaatgtagaaaagctgggtgtaaaggcattatttgtcactgtggatgctccaagtttaggtcaaagagaaaaagatatgaagctgaaattttccaatacaaaggctggtccaaaagcgatgaagaaaactaatgtagaagaatctcaaggtgcttcgagagcgttatcaaagtttattgacccctctttgacttggaaagatatagaagagttgaagaaaaagacaaaactacctattgttatcaaaggtgttcaacgtaccgaagatgttatcaaagcagcagaaatcggtgtaagtggggtggttctatccaatcatggtggtagacaattagatttttcaagggctcccattgaagtcctggctgaaaccatgccaatcctggaacaacgtaacttgaaggataagttggaagttttcgtggacggtggtgttcgtcgtggtacagatgtcttgaaagcgttatgtctaggtgctaaaggtgttggtttgggtagaccattcttgtatgcgaactcatgctatggtcgtaatggtgttgaaaaagccattgaaattttaagagatgaaattgaaatgtctatgagactattaggtgttactagcattgcggaattgaagcctgatcttttagatctatcaacactaaaggcaagaacagttggagtaccaaacgacgtgctgtataatgaagtttatgagggacctactttaacagaatttgaggatgcatga

SEQ ID NO: 8252 - DNA, 1776 bp, Artificial Sequence
  Description of Artificial Sequence: Synthetic polynucleotide
atgttgaaatacaaacctttattgaaaatctccaagaactgtgaggctgctatcctcagagcgtctaagactagattgaacacaatccgcgcgtacggttctaccgttccaaaatccaagagtttcgaacaagacagtagaaaacgcacacagagttggactgccttgagagtcggtgcaattttagccgctactagttccgtggcgtatttgaactggcataatggccaaatagacaacgagccgaaattggatatgaataaacaaaagatttctcccgctgaagttgccaagcataacaagcccgatgattgttgggttgtgatcaatggttacgtatacgacttaacgagattcttaccaaatcatccaggtgggcaggatgttatcaagtttaacgccgggaaagatgtcactgctatttttgaaccattgcatgctcctaatgtcatcgataagtatatagctcccgagaaaaaattgggtccccttcaaggatccatgcctcctgaacttgtctgtcctccttatgctcctggtgaaactaaggaagatatcgctagaaaagaacaattgaaatctttattgcctcctttggataatattattaacctttacgactttgaatacttggcctctcaaactttgactaaacaagcgtgggcctactattcctccggtgctaacgacgaagttactcacagagaaaaccataatgcttatcataggatttttttcaaaccaaagatccttgtagatgtacgcaaagtagacatttctactgacatgttgggttctcatgtggatgttcccttctacgtgtctgctacagctttgtgtaaattaggaaaccccttagaaggtgaaaaagatgtcgccagaggttgtggccaaggtgtgacaaaagtcccacaaatgatatctactttggcttcttgttcccctgaggaaattattgaagcagcaccctctgataaacaaattcaatggtaccaattatatgttaactctgatagaaagatcactgatgatttggttaaaaatgtagaaaagttgggtgtaaaggcattatttgtcactgtggatgctccaagtttaggtcaaagagaaaaagatatgaagttgaaattttccaatacaaaggctggtccaaaagcgatgaagaaaactaatgtagaagaatctcaaggtgcttccagagcgttatccaagtttattgacccctctttgacttggaaagatatagaagagttgaagaaaaagacaaaattacctattgttatcaaaggtgttcaacgtaccgaagatgttatcaaagcagcagaaatcggtgtaagtggggtggttttatccaatcatggtggtagacaattagattttagcagggctcccattgaagtcttggctgaaaccatgccaatcttggaacaacgtaacttgaaggataagttggaagttttcgtggacggtggtgttcgtcgtggtacagatgtcttgaaagcgttatgtttaggtgctaaaggtgttggtttgggtagaccattcttgtatgcgaactcttgctatggtcgtaatggtgttgaaaaagccattgaaattttaagagatgaaattgaaatgtctatgagattattaggtgttactagcattgcggaattgaagcctgatcttttagatttatctacattgaaggcaagaacagttggagtaccaaacgacgtgctttataatgaagtttatgagggacctactttaacagaatttgaggatgcatga

SEQ ID NO: 8253 - DNA, 159 bp, Saccharomyces cerevisiae
atgattccctttcctgcacaacacgagatctttcacgcatacatcggaaggatcaccccccactcaagtcgttgcattgctaacatgtggcattctgcccatttttttcacgaaaattctctctctataatgaagacccttgtgccctggactctgtaa

SEQ ID NO: 8254 - DNA, 159 bp, Artificial Sequence
  Description of Artificial Sequence: Synthetic polynucleotide
atgattccctttcctgcacaacacgagatctttcacgcatacatcggaaggatcaccccccacagcagtcgttgcattgctaacatgtggcattctgcccatttttttcacgaaaattctctctctataatgaagacccttgtgccctggactttatga

SEQ ID NO: 8255 - DNA, 639 bp, Saccharomyces cerevisiae
atgctctcatactatgaacacaatactgcgttccaaacaaacaattgcaattccggtagcaatgccgccactacatacaacagcgacgccaataatgatacgatcatgaataaaagaaaaaatgaccatttcgagtttgatacacacactttctaccaaagatcgaagagaacaaaacgagattctgtaagtacaaagttttcggtcggttccgggtgtgctaatcttaataacaacaacaacaacatcatcatcaacaacaacaacaacaacaataataataataataaccataatcataataacagcaataatactgcaacctacaataatattcattataaaaaaaatatcgaaatatgtcccctgaaaccggttagtatgcaccacactatgaacagccgcttactgaacgaatctgaattttattctgaaacagaagagtacatgattcatggttatttcggtaacactaatcgcgacataacaggcacgagtcctactggaagtgctagtattatacaacaccagtatcatcttctaccatcccaaagtataattgcatcacaagcacccggtactgccatggccgcgttgactaacaacaatatcgctaacgattacatggatatagattaa

SEQ ID NO: 8256 - DNA, 639 bp, Artificial Sequence
  Description of Artificial Sequence: Synthetic polynucleotide
atgctctcttactatgaacacaatactgcgttccaaacaaacaattgcaattccggtagcaatgccgccactacatacaacagcgacgccaataatgatacgatcatgaataaaagaaaaaatgaccatttcgagtttgatacacacactttctaccaaagatccaagagaacaaaaagagattctgtaagtacaaagttttctgtcggttccgggtgtgctaatcttaataacaacaacaacaacatcatcatcaacaacaacaacaacaacaataataataataataaccataatcataataacagcaataatactgcaacctacaataatattcattataaaaaaaatatcgaaatatgtcccttgaaaccggttagtatgcaccacactatgaacagccgcttattaaacgaatctgaattttattctgaaacagaagagtacatgattcatggttatttcggtaacactaatcgcgacataacaggcacgagtcctactggaagtgctagtattatacaacaccagtatcatcttttaccatcccaaagtataattgcatctcaagcacccggtactgccatggccgcgttgactaacaacaatatcgctaacgattacatggatatagattga

SEQ ID NO: 8257 - DNA, 909 bp, Saccharomyces cerevisiae
atggttaaggtctggaatatagtactacgtctggtagtgttgctgtttttagcaggtaataccttgctgttaattttgatgattatatctggtgccacggaccattaccccgtgaacagattctattgggtgcagggcaatacaacaggcatacctaatgctggggatgaaacacgttggacgttttggggcgcctgtctacaggataaagacgggtcggatacctgcacaagcaatttggcacctgcataccccatttccccagtagataacttcaacacacacatcaatgtccctcaccagtttatttccaaaagagacgctttttactacctgactagattttcattttgtttcttttggattgcgcttgcctttgtaggtgtgtcgtttatcctttacgttttgacttggtgctcgaagatgctttcagagatggtgcttatcctcatgtcttttgggtttgtcttcaatacggcagccgttgtcttgcaaacggccgcctctgccatggcaaagaatgctttccatgacgatcatcgtagtgcccaattgggtgcctctatgatgggtatggcttgggcaagtgtctttttatgtatcgtggaatttatcctgctggtcttctggtctgttagggcaaggttggcctctacttactccatcgacaattcaagatacagaacctcctccagatggaatcccttccatagagagaaggagcaagcaactgacccaatattgactgccactggacctgaagacatgcaacaaagtgcaagcatagtggggccttcttccaatgctaatccggtcactgccactgctgctacggaaaaccaacctaaaggtattaacttcttcactataagaaaatcacacgagcgcccggacgatgtctctgtttaa

SEQ ID NO: 8258 - DNA, 909 bp, Artificial Sequence
  Description of Artificial Sequence: Synthetic polynucleotide
atggttaaggtctggaatatagtattacgtttagtagtgttgttatttttagcaggtaataccttgttattaattttgatgattatatctggtgccacggaccattaccccgtgaacagattctattgggtgcagggcaatacaacaggcatacctaatgctggggatgaaacacgttggacgttttggggcgcctgtttacaggataaagacgggtctgatacctgcacaagcaatttggcacctgcataccccatttccccagtagataacttcaacacacacatcaatgtccctcaccagtttatttccaaaagagacgctttttactacttgactagattttctttttgtttcttttggattgcgcttgcctttgtaggtgtgtcctttatcctttacgttttgacttggtgctctaagatgctttctgagatggtgcttatcctcatgtcttttgggtttgtcttcaatacggcagccgttgtcttgcaaacggccgcctctgccatggcaaagaatgctttccatgacgatcatcgtagtgcccaattgggtgcctctatgatgggtatggcttgggcaagtgtctttttatgtatcgtggaatttatcttattggtcttctggtctgttagggcaaggttggcctctacttactccatcgacaattctagatacagaacctcctccagatggaatcccttccatagagagaaggagcaagcaactgacccaatattgactgccactggacctgaagacatgcaacaaagtgcaagcatagtggggccttcttccaatgctaatccggtcactgccactgctgctacggaaaaccaacctaaaggtattaacttcttcactataagaaaatctcacgagcgcccggacgatgtctctgtttga

SEQ ID NO: 8259 - DNA, 1308 bp, Saccharomyces cerevisiae
atggactacaacaagagatcttcggtctcaaccgtgcctaatgcagctcccataagagtcggattcgtcggtctcaacgcagccaaaggatgggcaatcaagacacattaccccgccatactgcaactatcgtcacaatttcaaatcactgccttatacagtccaaaaattgagacttctattgccaccattcagcgtctaaaattgagtaatgccactgcttttcccactttagagtcatttgcatcatcttccactatagatatgatagtgatagctatccaagtggccagccattatgaagttgttatgcctctcttggaattctccaaaaataatccgaacctcaagtatcttttcgtagaatgggcccttgcatgttcactagatcaagccgaatccatttataaggctgctgctgaacgtggggttcaaaccatcatctctttacaaggtcgtaaatcaccatatattttgagagcaaaagaattaatatctcaaggctatatcggcgacattaattcgatcgagattgctggaaatggcggttggtacggctacgaaaggcctgttaaatcaccaaaatacatctatgaaatcgggaacggtgtagatctggtaaccacaacatttggtcacacaatcgatattttacaatacatgacaagttcgtacttttccaggataaatgcaatggttttcaataatattccagagcaagagctgatagatgagcgtggtaaccgattgggccagcgagtcccaaagacagtaccggatcatcttttattccaaggcacattgttaaatggcaatgttccagtgtcatgcagtttcaaaggtggcaaacctaccaaaaaatttaccaaaaatttggtcattgacattcacggtaccaagggagatttgaaacttgaaggcgatgccggcttcgcagaaatttcaaatctggtcctttactacagtggaactagagcaaacgacttcccgctagccaatggacaacaagctcctttagacccggggtatgatgcaggtaaagaaatcatggaagtatatcatttacgaaattataatgccattgtgggtaatattcatcgactgtatcaatctatctctgacttccacttcaatacaaagaaaattcctgaattaccctcacaatttgtaatgcaaggtttcgatttcgaaggctttcccaccttgatggatgctctgatattacacaggttaatcgagagcgtttataaaagtaacatgatgggctccacattaaacgttagcaatatctcgcattatagtttataa

SEQ ID NO: 8260 - DNA, 1308 bp, Artificial Sequence
  Description of Artificial Sequence: Synthetic polynucleotide
atggactacaacaagagatcttctgtctccaccgtgcctaatgcagctcccataagagtcggattcgtcggtctcaacgcagccaaaggatgggcaatcaagacacattaccccgccatattgcaattatcttctcaatttcaaatcactgccttatacagtccaaaaattgagacttctattgccaccattcagcgtttgaaattgagtaatgccactgcttttcccactttagagtcttttgcatcttcttccactatagatatgatagtgatagctatccaagtggccagccattatgaagttgttatgcctctcttggaattctccaaaaataatccgaacctcaagtatcttttcgtagaatgggcccttgcatgttctttagatcaagccgaatccatttataaggctgctgctgaacgtggggttcaaaccatcatctctttacaaggtcgtaaatctccatatattttgagagcaaaagaattaatatctcaaggctatatcggcgacattaattccatcgagattgctggaaatggcggttggtacggctacgaaaggcctgttaaatctccaaaatacatctatgaaatcgggaacggtgtagatttagtaaccacaacatttggtcacacaatcgatattttacaatacatgacaagtagttacttttccaggataaatgcaatggttttcaataatattccagagcaagagttgatagatgagcgtggtaacagattgggccagagagtcccaaagacagtaccggatcatcttttattccaaggcacattgttaaatggcaatgttccagtgtcttgcagtttcaaaggtggcaaacctaccaaaaaatttaccaaaaatttggtcattgacattcacggtaccaagggagatttgaaacttgaaggcgatgccggcttcgcagaaatttctaatttggtcctttactacagtggaactagagcaaacgacttcccgttagccaatggacaacaagctcctttagacccggggtatgatgcaggtaaagaaatcatggaagtatatcatttaagaaattataatgccattgtgggtaatattcatcgtttatatcaatctatctctgacttccacttcaatacaaagaaaattcctgaattaccctctcaatttgtaatgcaaggtttcgatttcgaaggctttcccaccttgatggatgctttaatattacacaggttaatcgagagcgtttataaaagtaacatgatgggctccacattaaacgttagcaatatctctcattatagtttatga

SEQ ID NO: 8261 - DNA, 936 bp, Saccharomyces cerevisiae
atgctacgtataactgtcaaaactttgcagcagcgggcatccttccatcatagcttcaaacatattagcgttcctgatcttcatacccgtgctcaaaatgatcaaacaaactgttattgccaagaaataaacgcaaggctgccttcaaaaactgatccattagatcctcatatcaagcttcctcatagaacgcccaattacaataagcatgttttgctgttatcaccgggtgataggtttgctcaaccatggaaggtagcatggaatcataatttggatactaatacaaatcggccatataatgccattagtaaattgcgctcccatttaggtggttctccaggaatactaataaatgcggtgcatttgcaaaatgaatttattccaaggccaaaacaacacgatgaatggctttatttttttgttattcctgacatgaagctttatgtaattaaggaaacggacatcgaggaatttgcatcttttttagatgaaggagctattcaagcaccaaagctatccttccaggattatttaagcggtaaggccaaggcttcccaacaggttcatgaagtgcatcatagaaagcttacaaggtttcagggtgaaacttttctaagagattggaacttagtctgtgggcattataagagagatgctaagtgtggagaaatgggacccgacataattgcagcatttcaagatgaaaagctttttcctgagaataatctagccttaatttctcatattgggggtcatatttttgctggtaatgtcattttctataaactattcggcagagaaaagatgcaaaacaagctggattcattatggtttggtaaagtttacccacacaacttgaagctgttatgtgaaaacttggaaaacggtaaaatcatcgacgaaatgtacagaggtggcatatcgatgaattaa

SEQ ID NO: 8262 - DNA, 936 bp, Artificial Sequence
  Description of Artificial Sequence: Synthetic polynucleotide
atgcttcgtataactgtcaaaactttgcagcagagagcatccttccatcatagcttcaaacatattagcgttcctgatcttcatacccgtgctcaaaatgatcaaacaaactgttattgccaagaaataaacgcaaggttgccttccaaaactgatccattagatcctcatatcaagcttcctcatagaacgcccaattacaataagcatgttttgttattatctccgggtgataggtttgctcaaccatggaaggtagcatggaatcataatttggatactaatacaaatagaccatataatgccattagtaaattgcgctcccatttaggtggttctccaggaatattaataaatgcggtgcatttgcaaaatgaatttattccaaggccaaaacaacacgatgaatggctttatttttttgttattcctgacatgaagctttatgtaattaaggaaacggacatcgaggaatttgcatcttttttagatgaaggagctattcaagcaccaaagttatccttccaggattatttaagcggtaaggccaaggcttcccaacaggttcatgaagtgcatcatagaaagcttacaaggtttcagggtgaaacttttttaagagattggaacttagtctgtgggcattataagagagatgctaagtgtggagaaatgggacccgacataattgcagcatttcaagatgaaaagctttttcctgagaataatttggccttaatttctcatattgggggtcatatttttgctggtaatgtcattttctataaattattcggcagagaaaagatgcaaaacaagttggattctttatggtttggtaaagtttacccacacaacttgaagcttttatgtgaaaacttggaaaacggtaaaatcatcgacgaaatgtacagaggtggcatatccatgaattga

SEQ ID NO: 8263 - DNA, 4086 bp, Saccharomyces cerevisiae
atgtggggaggtggcaaaatggcagtagtaagcttgtcgccccacacggcgaagatgcgtaaactatttgggcaagctagcacaacgatggcttatgacggtttaaaacgagaggctgaaagaagaacaaggagtgaccataacataacaatggttgctaaagatgatgagctatacttgtaccatcttactttaaagaaacagacgaatttcgtgcactcctgcatcggacacttcgtcgatctggaagcagggtccaagcgtgagcagtcgcaattgtgcgtagctactgagacgcatttagaactttatgatactgcagatggggaactaaagcttattgccaagtttcaaaacctgtttgcgacgataacctcgatgaagtcgctggatctgccgcattcagggtcaagggcaaaagcttccaactggcccacttttctagcgctaacttccgattctggtaacctaagtatcgtgcaaatcattatgcatgcaggtgctcttagacttaagactttagtgaaccagccattgacgaggaccacccttcgaagagtctctcccatatcatacatggaaattgaccctaatgggcgttgtatcattctctcatctgtcgaacaaaataaattgtgtttcctcgttgattatgctcaaaaattgaggatttcgtctccattggaaatcatcagaccccatatggtaacgctggatatggcagttgttgatgtaaatttcaataatccatgttttgttaccttagaaatcgacaatgccgctactcaactatcagtacacttgatattttatgtcctcgagttgggtttgaatcacatcgtcaagaaggcagattatttagttaacccatctgccaatttcgtactgagtttgccagatctatcgcgatataatataacaacttcgctaagcgacaacaactatgatgctgactatgatacccttttcaacccttttgttgtcataggcttcgaaaatcatattctggtaaaggatatgaacggatttttcagcctgaaagtggaaatacccaaaagatctatcacaaatagccgtcataaaaatgtaacaatcatatcaggcatagtgcagaaattgaaaaatgattttttcgtacttttacaatctaaccatggcgatctttttaagttaactgtaagtccagacactaatgatagaaatagacctttagttcaattgtcctactttgatacaatccaaaattcacaccaattacacattttcaaaaacggttatctttttgcactatctgaaatgaataacaactttcttttccagtttgagaaacttggtgtagagaaaaatgatttttctaatgttttaacctcaaaagatccaaataagtcgctagttttcgaaccatccataaagttgcagaatttgagcatattatcgcaacaattgaatttgaacccttcaataaaatctcaaattgtcagtgattcgccactgtctatcgccactaaacattttacaaacaacaagataataactttaacaaatgctgtgaattactctaatttgatatctactagtttacccccgaacgcaaccaagttatggctaatacccgatcctgcaacaaccggcgataacaatactcttttgttcataacttttcccaagaaaactatgatactacaaattgacaacgagtccatggaggaactaacaccggatgaagcaacgcgttcagctttcaagctctctcaggacacaacaattcatacatgcctaatgggctcacactctattatccaagtatgcaccgcagaactaagacatatcgtaccgactggtaaatctaggtattctaataagctgacttgggtgccaccagcgggaattcgtattgtatgtgccacgtcctcgaaaacacaactaattatatcattatcaaattacgaattggtttatttcaagatagatgtatcttcggattcgttaatcgaattaaccacccacccagaattggacacaatgccctctaaagttgcgattgtgcaagatacgcagcatgctgatttattagccattgctgacaatgagggtatgatcaaaataatgtctcttaaagaccaaaaggaagattttttaactgtaataagtttgcaattagttagtgaaaagatttctgacatgataatggttagagattcctcaataggacagcttaatttgcatgtaggtttagaaaatggcgtttacatgaaatttcatataggggatgttgacggatcgttcactgacataaaaaggcgattccttggcttgaagcctgtttccctttcgtatttgcgtgagatatctgtatcactaaataatgaggaagaagaagaagaagaagaagacgatgatgatgaaaaagaagaagaagaaataaatagtagtggagctaaatggatgtcatgcgtggtttgccattcctcttctacatgggtaagctacacgtggaaaaatgtgtggaccatacggcagttaaaggatcaaaacatgctaagttgttccaaatttgttaacgcagatgttgcaatcaacggtgtttgttcaatatcgagctcaggacgcttaaatattggcagagtttccaactttccaactttggataactggtttcacgttcatgaatcaagtgttaacaagcaagagaacggtggaggagatgaaagcaatgaagaggaagaagatgaaatggaagaagaaatggaaatgttacaaatatctacattccgacctcgtactattttatcatttcccaataatccgaaaagcattttgtttattgataatcacagtggtaagaaacaatgccgtatatcactgcaaattgatggtgaatgcttaaagtttggcagttcggatcatttatacaagatactggacgatatcgattgcgtttccgctgctataatagatttcacaagacaagctgatcatttgatcatttgtgctggcgacaaaaggctgttaacatacaagatattagttaacaaagataaactatcttttgatattgaattacttcaccaaacagaaatcatttcaccaatacatgctatgttgaagtttaaaaacttcttgctgacagccatgggctccactattgtcctttatggtttggggaaaaagcaattattaagaaggtccgtaacacagaccccggtatccataacaaaaattgtgtctatgcaccagtggaattatgaaagactggccgttggtgatatacatgaatctgtcactttatttatctgggatcctgcggggaatgtatttattccgtacgtagatgactctgtaaaacgccatgtgacggtattgaaatttctagatgaggcaactgttataggcgctgatagatatggaaatgcgtggactttaaggtctccaccagagtgcgaaaaaatcatgtcaaatcatgatcccagcgaattatctaatggggccatcaagtacccactagacgtcatcactttacagcagaaattacccaatacttatgattgcaagttcaagtttcaactactgaaccacttctttgttaatgatatcatcactgatttccatatcctggacagcctttcaaattctgatagacctggttgtatctatatgggcttacaaggaaccgtgggatgctttatccccttattatccaaggggaatgtttttatgatgggaaacattgagaatataatggctgaggcggatgatacgttttatttagattatgaatcaagaaagaagaataacaatatgcgtaaggaagacgatgaagaggaatctggaagtgttgtgttacaaggacggcatggtatagaggatgaaataatatgtgagggttcctgttccattttaggtagagaccaccaagaatacagaagctattatgcccctgtacgtaaagttattgatggtgatttatgtgaaaatttcctgagactttccttgaatgagcaggaatttttggccaaaaatttaaagagtgtacaagtggaggatataattcaaacaatcaacgaagtcagaacaaattacatgtaa

SEQ ID NO: 8264 - DNA, 4086 bp, Artificial Sequence
  Description of Artificial Sequence: Synthetic polynucleotide
atgtggggaggtggcaaaatggcagtagtaagcttgagcccccacacggcgaagatgcgtaaattatttgggcaagctagcacaacgatggcttatgacggtttaaaaagagaggctgaaagaagaacaaggagtgaccataacataacaatggttgctaaagatgatgagttatacttgtaccatcttactttaaagaaacagacgaatttcgtgcactcctgcatcggacacttcgtcgatttggaagcagggtccaagcgtgagcagtctcaattgtgcgtagctactgagacgcatttagaactttatgatactgcagatggggaattgaagcttattgccaagtttcaaaacttgtttgcgacgataacctccatgaagtctttagatttaccgcattctgggtctagggcaaaagcttccaactggcccacttttttggcgttgacttccgattctggtaacttgagtatcgtgcaaatcattatgcatgcaggtgctcttagacttaagactttagtgaaccagccattgacgaggaccacccttagaagagtctctcccatatcttacatggaaattgaccctaatgggcgttgtatcattctctcttctgtcgaacaaaataaattgtgtttcctcgttgattatgctcaaaaattgaggatttcttctccattggaaatcatcagaccccatatggtaacgttagatatggcagttgttgatgtaaatttcaataatccatgttttgttaccttagaaatcgacaatgccgctactcaattaagtgtacacttgatattttatgtcctcgagttgggtttgaatcacatcgtcaagaaggcagattatttagttaacccatctgccaatttcgtattgagtttgccagatttaagtagatataatataacaacttctttaagcgacaacaactatgatgctgactatgatacccttttcaacccttttgttgtcataggcttcgaaaatcatattttagtaaaggatatgaacggatttttcagcttgaaagtggaaatacccaaaagatctatcacaaatagccgtcataaaaatgtaacaatcatatctggcatagtgcagaaattgaaaaatgattttttcgtacttttacaatctaaccatggcgatctttttaagttaactgtaagtccagacactaatgatagaaatagacctttagttcaattgtcctactttgatacaatccaaaattctcaccaattacacattttcaaaaacggttatctttttgcattatctgaaatgaataacaactttcttttccagtttgagaaacttggtgtagagaaaaatgatttttctaatgttttaacctccaaagatccaaataagtctttggttttcgaaccatccataaagttgcagaatttgagcatattatctcaacaattgaatttgaacccttccataaaatctcaaattgtcagtgattctccattatctatcgccactaaacattttacaaacaacaagataataactttaacaaatgctgtgaattactctaatttgatatctactagtttacccccgaacgcaaccaagttatggttgatacccgatcctgcaacaaccggcgataacaatactcttttgttcataacttttcccaagaaaactatgatattgcaaattgacaacgagtccatggaggaattaacaccggatgaagcaacgcgttctgctttcaagctctctcaggacacaacaattcatacatgcttgatgggctctcactctattatccaagtatgcaccgcagaattgagacatatcgtaccgactggtaaatctaggtattctaataagttgacttgggtgccaccagcgggaattcgtattgtatgtgccacgtcctctaaaacacaattgattatatctttatccaattacgaattggtttatttcaagatagatgtatcttctgattctttaatcgaattaaccacccacccagaattggacacaatgccctctaaagttgcgattgtgcaagatacgcagcatgctgatttattagccattgctgacaatgagggtatgatcaaaataatgtctcttaaagaccaaaaggaagattttttaactgtaataagtttgcaattagttagtgaaaagatttctgacatgataatggttagagattcctccataggacagcttaatttgcatgtaggtttagaaaatggcgtttacatgaaatttcatataggggatgttgacggaagtttcactgacataaaaaggagattccttggcttgaagcctgtttccctttcctatttgcgtgagatatctgtatctttgaataatgaggaagaagaagaagaagaagaagacgatgatgatgaaaaagaagaagaagaaataaatagtagtggagctaaatggatgagttgcgtggtttgccattcctcttctacatgggtaagctacacgtggaaaaatgtgtggaccataagacagttaaaggatcaaaacatgttaagttgttccaaatttgttaacgcagatgttgcaatcaacggtgtttgttctatatctagcagtggacgcttaaatattggcagagtttccaactttccaactttggataactggtttcacgttcatgaaagtagtgttaacaagcaagagaacggtggaggagatgaaagcaatgaagaggaagaagatgaaatggaagaagaaatggaaatgttacaaatatctacattcaggcctcgtactattttatcttttcccaataatccgaaaagcattttgtttattgataatcacagtggtaagaaacaatgccgtatatctttacaaattgatggtgaatgcttaaagtttggcagttctgatcatttatacaagatattggacgatatcgattgcgtttccgctgctataatagatttcacaagacaagctgatcatttgatcatttgtgctggcgacaaaaggttattaacatacaagatattagttaacaaagataaattatcttttgatattgaattacttcaccaaacagaaatcatttctccaatacatgctatgttgaagtttaaaaacttcttgttgacagccatgggctccactattgtcctttatggtttggggaaaaagcaattattaagaaggtccgtaacacagaccccggtatccataacaaaaattgtgtctatgcaccagtggaattatgaaagattggccgttggtgatatacatgaatctgtcactttatttatctgggatcctgcggggaatgtatttattccgtacgtagatgactctgtaaaacgccatgtgacggtattgaaatttttggatgaggcaactgttataggcgctgatagatatggaaatgcgtggactttaaggtctccaccagagtgcgaaaaaatcatgagtaatcatgatcccagcgaattatctaatggggccatcaagtacccattggacgtcatcactttacagcagaaattacccaatacttatgattgcaagttcaagtttcaattattaaaccacttctttgttaatgatatcatcactgatttccatatcttggacagcctttctaattctgatagacctggttgtatctatatgggcttacaaggaaccgtgggatgctttatccccttattatccaaggggaatgtttttatgatgggaaacattgagaatataatggctgaggcggatgatacgttttatttagattatgaatctagaaagaagaataacaatatgcgtaaggaagacgatgaagaggaatctggaagtgttgtgttacaaggaagacatggtatagaggatgaaataatatgtgagggttcctgttccattttaggtagagaccaccaagaatacagaagctattatgcccctgtacgtaaagttattgatggtgatttatgtgaaaatttcttaagactttccttgaatgagcaggaatttttggccaaaaatttaaagagtgtacaagtggaggatataattcaaacaatcaacgaagtcagaacaaattacatgtga

SEQ ID NO: 8265 - DNA, 1212 bp, Saccharomyces cerevisiae
atggagatttacattagacttaacgcagatgtcgagcacgactatgcgtttcaggtgtcaaatgaagacaccataaataacaaaattaagaagattttcccttccaagacgggtttggcggacttaatggtgctgagaccatcaattttccatgagaaggagcccgtaaagttctataagtctatccatccagggtacctgtccgaaggtggttgtttgatgttccattatgaagctgataacgaagaaaatctcgaggagttgaatgactccaagccgcttattgaccagttgtggcctggtcagctagttgttccggagtggaagctatccaagaaaaacatatgggtatacaccattattatgttggcctggctatataccgatttgcccgacgccatttctccaaccccaggtatttgtttgactaatcaattgtctagactattgattcctgtagccaagcacatggatttacctgaaattgccgctaaactcgaacaagaagttcaggcaaactattctagtctcgtagctcaatggcttttctttgtcatgcacattttcaaagtgggcataattactttattcctcaaattaggcattgccaaccccatcagcttcaatccttacaagttatggagtttgagagatttaacttctccttctgctaacggcgctaagaattctggcggcaataacaacactactgacttaaagacacgtttgcgctctctgggctggattggtgctaagagagctacttacgacgattaccagactaactattacaactatgtcatagataagatgggtggtgcagttgctgcttatagagcgggcgcgattaggaaagctgcagcaccaggtatccaacttgtggctggagagggtttccaaagtcctctagaagataggttcactgcttccactttcacggctattaaaaccgaacggaaattcattttaagtgaagaatactttgtggagctggaaaacaatctaaagaagatcttggaagagtatgacggggatattggtaagatgaatgctgaaattaggaggtttagaaggtttggtatttatgaaccagatgaaaaactggcctcgctagttaagctcagaagagaaattgctgatgagaaagagaaagcatcaaacaatgatgctacttttggtataaaaaagaatgatttgaaaaaatctaattaa

SEQ ID NO: 8266 - DNA, 1212 bp, Artificial Sequence
  Description of Artificial Sequence: Synthetic polynucleotide
atggagatttacattagacttaacgcagatgtcgagcacgactatgcgtttcaggtgagtaatgaagacaccataaataacaaaattaagaagattttcccttccaagacgggtttggcggacttaatggtgttgagaccatctattttccatgagaaggagcccgtaaagttctataagtctatccatccagggtacttgtccgaaggtggttgtttgatgttccattatgaagctgataacgaagaaaatctcgaggagttgaatgactccaagccgcttattgaccagttgtggcctggtcagttggttgttccggagtggaagttatccaagaaaaacatatgggtatacaccattattatgttggcctggttatataccgatttgcccgacgccatttctccaaccccaggtatttgtttgactaatcaattgtctagattattgattcctgtagccaagcacatggatttacctgaaattgccgctaaactcgaacaagaagttcaggcaaactattctagtctcgtagctcaatggcttttctttgtcatgcacattttcaaagtgggcataattactttattcctcaaattaggcattgccaaccccatcagcttcaatccttacaagttatggagtttgagagatttaacttctccttctgctaacggcgctaagaattctggcggcaataacaacactactgacttaaagacacgtttgcgctctttaggctggattggtgctaagagagctacttacgacgattaccagactaactattacaactatgtcatagataagatgggtggtgcagttgctgcttatagagcgggcgcgattaggaaagctgcagcaccaggtatccaacttgtggctggagagggtttccaaagtcctttggaagataggttcactgcttccactttcacggctattaaaaccgaaagaaaattcattttaagtgaagaatactttgtggagttagaaaacaatttgaagaagatcttggaagagtatgacggggatattggtaagatgaatgctgaaattaggaggtttagaaggtttggtatttatgaaccagatgaaaaattggcctctttggttaagctcagaagagaaattgctgatgagaaagagaaagcatctaacaatgatgctacttttggtataaaaaagaatgatttgaaaaaatctaattga

SEQ ID NO: 8267 - DNA, 1059 bp, Saccharomyces cerevisiae
atggaatcaagtttacaaaaattgaaattccaggatattgacataaatcttattcctactgcgaagtggaccacaaaattacagtatattctatacacctggtgtcagtcgatactacatgtggccatgtttttttctgatatatacacgtgtattaaattactggcatttaacacatggtcgaacaatatcatccaaccattcttggaattccgtatttcaaaatggttgtttagcggatgcatattatgctcctcattaatattaatttgggagttggtaattggattgagagtgtataggaagaaagagattacatcgaactacatgaatggcattagcagattaataaattgcttgttcaatttcaaaaagtatcaaattttcgaactaatagtgctgactgatgagaaaaaattcagtaagtggttattcttttcatattttgaaatcagtggatgtttgaggctattgttcggtgactctccaaggcaaataatcaacggattaactttgtggtcagttttactgacagtttcgaatgagaccagtagcggaacccatagtactcaaagcctaggtaatttagatgacctaaatggaataataaacaagataaaacatattgctaagacaaattacgaagaaagtgtgatcttgtccttcatgttgttctcgtttatcatatgggtaattttaataagcaaattaattctaagcataataatattcatcatttttatacgtccgagatttttgtctagtaaaaggaaggttaaggggtatgaattgaaactacgaaagtatgtgtctaaagtcattgacgagaatttaagtagaactgtctacgaattgggaatattgatagatgatgaggaagaagggaccatatgtggtgacaacaaaacgcaaaaaaaattcgattatgatagtcctgattatggcgacgaaagcacaataccgagttactactgctactcggatgtagaaacgtacgaaagagtatatacgcccataaaggcatatttcccccagaaatacaaacataaatacatataa

SEQ ID NO: 8268 - DNA, 1059 bp, Artificial Sequence
  Description of Artificial Sequence: Synthetic polynucleotide
atggaaagtagtttacaaaaattgaaattccaggatattgacataaatcttattcctactgcgaagtggaccacaaaattacagtatattttatacacctggtgtcagagtatattacatgtggccatgtttttttctgatatatacacgtgtattaaattattggcatttaacacatggagcaacaatatcatccaaccattcttggaattccgtatttccaaatggttgtttagcggatgcatattatgctcctctttaatattaatttgggagttggtaattggattgagagtgtataggaagaaagagattacaagtaactacatgaatggcattagcagattaataaattgcttgttcaatttcaaaaagtatcaaattttcgaattgatagtgttgactgatgagaaaaaattcagtaagtggttattcttttcttattttgaaatcagtggatgtttgaggttattgttcggtgactctccaaggcaaataatcaacggattaactttgtggtctgttttattaacagtttctaatgagaccagtagcggaacccatagtactcaaagccttggtaatttagatgacttgaatggaataataaacaagataaaacatattgctaagacaaattacgaagaaagtgtgatcttgtccttcatgttgttctcctttatcatatgggtaattttaataagcaaattaattttgagcataataatattcatcatttttatacgtccgagatttttgtctagtaaaaggaaggttaaggggtatgaattgaaacttagaaagtatgtgtctaaagtcattgacgagaatttaagtagaactgtctacgaattgggaatattgatagatgatgaggaagaagggaccatatgtggtgacaacaaaacgcaaaaaaaattcgattatgatagtcctgattatggcgacgaaagcacaataccgagttactactgctactctgatgtagaaacgtacgaaagagtatatacgcccataaaggcatatttcccccagaaatacaaacataaatacatatga

SEQ ID NO: 8269 - DNA, 1890 bp, Saccharomyces cerevisiae
atgccagatgaaacaaattttacaatagaagatattgagcctaggcctgatgcccttcgaggtttggacacccagttccttcaagacaacacagcattagtacaagcatatcgtggtttagactggtcagatatttcttcgttgacccaaatggtagatgttatagagcaaacagtggttaaatatggcaatccaaatgattcaatcaaattggccttggaaactattttatggcaaatattgcgtaagtaccctttattgtttggattttggaagaggtttgctactattgagtaccagttatttggtctcaagaaatcgattgctgttctggccacctcggtcaaatggttcccaacttctctggagttatggtgtgattatttgaatgtgttgtgtgttaataacccgaacgaaacggattttattaggaataattttgaaattgcaaaggatcttattggcaagcagtttctatcacaccctttttgggacaagtttatagaatttgaagttgggcagaagaattggcataacgttcaaagaatatacgagtacattattgaagttcctctacatcagtatgcgcggtttttcacatcttacaagaagtttttaaatgaaaaaaatttgaagacaacaaggaatattgatatagttttacgaaaaacacaaacaacagtaaatgaaatttggcagttcgaatcgaaaatcaaacagcccttcttcaacctgggccaagtgttaaatgatgatttggaaaattggtcgcgatatttaaaatttgtgacggatccttcaaaatccttggataaagaattcgtaatgtccgtttttgacagatgtttgattccttgtctttaccatgaaaatacgtggatgatgtatattaagtggctaacaaagaaaaatatatccgatgaagtggtagtggatatataccaaaaagccaatacgttcttaccactggatttcaaaactttgaggtatgattttcttaggtttttgaaaagaaaatatcggtcaaataataccttattcaataacatattcaatgagacagtatcgcgttatttaaagatttggcccaacgacatattacttatgacggagtacctttgtatgttgaaaagacattcttttaagaattccttagatcaatcgccaaaggaaattctagagaaacaaacatcgtttactaaaatcctagagacatcaatcaccaactacatcaataatcaaattgatgccaaggtgcatttacagaccttaataaatgataaaaacttaagcatagtcgtggtagaattgataaaaactacatggcttgtacttaaaaataatatgcaaacaaggaaatatttcaacctttatcaaaaaaacatcctcattaaaaattctgtaccgttctggttaacttactacaaatttgaaaagagtaatgtaaattttaccaagctgaataaattcattagggagcttggggtagaaatatacttgccgactacagtaatgaatgatattttgacggattataagactttctatttaactcattcaaatatcgtcacgtatgaatcctccattatagattcaaatacatttgaccctatcttgtaccctgagctgaaaatgtcgaatccaaaatacgatccagtattaaatactacagcaaatgtagattggcataaaaagacggaatggaaggaggctggtcacatcggcataacgacagaaagaccgcagatatccaacagtataattgagtgcaattcaggaactttgattcaaaagcccatcagtttgcctaattttagaaacttggagaaaattaatcaggtcaagattaatgatctatacactgaagaatttcttaaggaaggtaaatga

SEQ ID NO: 8270 - DNA, 1890 bp, Artificial Sequence
  Description of Artificial Sequence: Synthetic polynucleotide
atgccagatgaaacaaattttacaatagaagatattgagcctaggcctgatgcccttcgtggtttggacacccagttccttcaagacaacacagcattagtacaagcatatcgtggtttagactggtctgatatttcttctttgacccaaatggtagatgttatagagcaaacagtggttaaatatggcaatccaaatgattctatcaaattggccttggaaactattttatggcaaatattgcgtaagtaccctttattgtttggattttggaagaggtttgctactattgagtaccagttatttggtctcaagaaatccattgctgttttggccacctctgtcaaatggttcccaacttctttggagttatggtgtgattatttgaatgtgttgtgtgttaataacccgaacgaaacggattttattaggaataattttgaaattgcaaaggatcttattggcaagcagtttttatcccaccctttttgggacaagtttatagaatttgaagttgggcagaagaattggcataacgttcaaagaatatacgagtacattattgaagttcctttgcatcagtatgcgaggtttttcacatcttacaagaagtttttaaatgaaaaaaatttgaagacaacaaggaatattgatatagttttaagaaaaacacaaacaacagtaaatgaaatttggcagttcgaaagtaaaatcaaacagcccttcttcaacttgggccaagtgttaaatgatgatttggaaaattggagcagatatttaaaatttgtgacggatccttccaaatccttggataaagaattcgtaatgtccgtttttgacagatgtttgattccttgtctttaccatgaaaatacgtggatgatgtatattaagtggttgacaaagaaaaatatatccgatgaagtggtagtggatatataccaaaaagccaatacgttcttaccattagatttcaaaactttgaggtatgattttcttaggtttttgaaaagaaaatatagatctaataataccttattcaataacatattcaatgagacagtatcccgttatttaaagatttggcccaacgacatattacttatgacggagtacctttgtatgttgaaaagacattcttttaagaattccttagatcaatctccaaaggaaattttagagaaacaaacatcttttactaaaatcttggagacatctatcaccaactacatcaataatcaaattgatgccaaggtgcatttacagaccttaataaatgataaaaacttaagcatagtcgtggtagaattgataaaaactacatggcttgtacttaaaaataatatgcaaacaaggaaatatttcaacctttatcaaaaaaacatcctcattaaaaattctgtaccgttctggttaacttactacaaatttgaaaagagtaatgtaaattttaccaagttgaataaattcattagggagcttggggtagaaatatacttgccgactacagtaatgaatgatattttgacggattataagactttctatttaactcattctaatatcgtcacgtatgaatcctccattatagattctaatacatttgaccctatcttgtaccctgagttgaaaatgagtaatccaaaatacgatccagtattaaatactacagcaaatgtagattggcataaaaagacggaatggaaggaggctggtcacatcggcataacgacagaaagaccgcagatatccaacagtataattgagtgcaattctggaactttgattcaaaagcccatcagtttgcctaattttagaaacttggagaaaattaatcaggtcaagattaatgatttatacactgaagaatttcttaaggaaggtaaatga

SEQ ID NO: 8271 - DNA, 1524 bp, Saccharomyces cerevisiae
atgtttgaagtccctataactttaactaataggaagtttgctcaaagaagaaagttaaagtatcaatacataaattacatttctagaagatttgacagaatttccaagaaatctactaccacagatagtttgccaacgcccgaaaattctgcagctgaaaataatgacgaagaagaaggtcaaaacagtgaagccggcacatataggaggtcagtactacagcagaagaaaagaagaagagaaaggcattggaggagtgtggtcggtgaaatttactctactacggaaagcgaaacagactctcaagaggaggaaactgaggaaggtggcgaacatgacaccgggatagacaaggaagatagtgatgaggagagaaaattttggaaaaaatacgaaaaacctgagaagagtttcgaaatttggcgaacagtgtcctcacaaaataaacagcccattaacaaacaaaaaatgacgtatcataattttaaaaaaattgaaaagattcctttaaggaaaatggaaattccacttttgcattgtacaaaggaaaataaactttacttccaatctatatctagagggttagagccattaaaaacatcaacatcagaagtcagaaactaccgcacaagacatatagtaacattaaccgaccttttgcatttgaatgtgtcaagacataactggtcgcttgcatataaaatattcgccacattaataaggatcccaggggttcaaatcaagtctctttggggcattggcgttgaaatactggataatttatcaaattcatcaagtggtcttgacttcttacaatggatgtgtcaaatctattcgtcaaagtcaagatttgttcagaacatcaattaccgttccattgtccctccttttcaaaccggttctagaacacatactgcgaaatttgctatcacgtacctttggtcttctttaattaattgccaaaaatctatggaaccatcatcaaacatcattgacaaaccttttgatacggaaaacgatttactacaagaattgattgataagatatcagaatgggtattgacccctccgtttatggaagacgctgaagtttggttcatttatgcatcttgtcatttattgaaggccgatacattgtcgaggcaatttgtcaatgacaacaaaaataatgacctaattggtttggatagagacataaagatcaaccaggttataaaacatattcactacgtgagaacgtttttaaaaatttgcttagataaaggtgggtttgccgtccctagcaggttaattgaaaatcaactgaaaagcttcgagtcaagactgtacggcgaagcacaagacattcaagagagggatgtagccaacgtatatgatagcattgataacagttcagtggaaaactcttttggagacgtgtatgaaacaaatgcagaatttctagatacgcagctgatggatttatcgccggaggacaacgggttggacgaaatgcattacagtgatgaagactcaagtgagtga

SEQ ID NO: 8272 - DNA, 1524 bp, Artificial Sequence
  Description of Artificial Sequence: Synthetic polynucleotide
atgtttgaagtccctataactttaactaataggaagtttgctcaaagaagaaagttaaagtatcaatacataaattacatttctagaagatttgacagaatttccaagaaatctactaccacagatagtttgccaacgcccgaaaattctgcagctgaaaataatgacgaagaagaaggtcaaaacagtgaagccggcacatataggaggtctgtattacagcagaagaaaagaagaagagaaaggcattggaggagtgtggtcggtgaaatttactctactacggaaagcgaaacagactctcaagaggaggaaactgaggaaggtggcgaacatgacaccgggatagacaaggaagatagtgatgaggagagaaaattttggaaaaaatacgaaaaacctgagaagagtttcgaaatttggagaacagtgtcctctcaaaataaacagcccattaacaaacaaaaaatgacgtatcataattttaaaaaaattgaaaagattcctttaaggaaaatggaaattccacttttgcattgtacaaaggaaaataaactttacttccaatctatatctagagggttagagccattaaaaacatctacaagtgaagtcagaaactaccgcacaagacatatagtaacattaaccgaccttttgcatttgaatgtgtccagacataactggagtcttgcatataaaatattcgccacattaataaggatcccaggggttcaaatcaagtctctttggggcattggcgttgaaatattggataatttatccaattcttccagtggtcttgacttcttacaatggatgtgtcaaatctattcttccaagtctagatttgttcagaacatcaattaccgttccattgtccctccttttcaaaccggttctagaacacatactgcgaaatttgctatcacgtacctttggtcttctttaattaattgccaaaaatctatggaaccatcttccaacatcattgacaaaccttttgatacggaaaacgatttattacaagaattgattgataagatatctgaatgggtattgacccctccgtttatggaagacgctgaagtttggttcatttatgcatcttgtcatttattgaaggccgatacattgagtaggcaatttgtcaatgacaacaaaaataatgacttgattggtttggatagagacataaagatcaaccaggttataaaacatattcactacgtgagaacgtttttaaaaatttgcttagataaaggtgggtttgccgtccctagcaggttaattgaaaatcaattgaaaagcttcgagagcagattatacggcgaagcacaagacattcaagagagggatgtagccaacgtatatgatagcattgataacagttctgtggaaaactcttttggagacgtgtatgaaacaaatgcagaatttttggatacgcagttgatggatttatctccggaggacaacgggttggacgaaatgcattacagtgatgaagacagcagtgagtga

SEQ ID NO: 8273 - DNA, 2013 bp, Saccharomyces cerevisiae
atgaggatctgtcattcgagaactctctcaaacttaaaggatcttccgataacgtcaaggagagcaatgcattcggccattgtcaattactccacccaaaaggcccaatttcccgtagagacaaataatggggaacactattgggcggaaaagccgaacaaattctaccagaacaaaaggcccaattttcaaggcattacctttgctaaacaacaagacttaccatcattacccgtgcccgaattgaagtctacacttgacaagtatttgcaaaccatccgcccattttgcaatgatgtagaaacttttgaaagacagcagctgttatgtaaggacttctcggagcacatggggcctatcttacaagaccgattgaaagagtatgccaacgataaaagaaactggatggccaagttttgggatgaacaatcctatttacaatacaacgatcctattgttccatacgtctcttatttttattctcatatgccattaccgaatcatttatcgaagatcgataatgatcctttgattaaggctactgcgattatctcaaccgtggttaaattcatcgaagctattaaagatgaatctttacccgtagaaattatcaaaggtatgccattttgtatgaatagtttttcattgatgtttaacacttcgagattgcctggtaagccagaggataaccaagatacaaatattttttattcagtttatgagaacaactttgtaactatcgcttataaagggaagttttacaaactgatgacccatgacgggaatgacaaaccgctttccgaaaacgaaatctggaggcaactgtactctgtggtattccaaggatcgcagtccgatcccaaactaggtggcattggttctctcacctctttacctcgtgatcaatggcgtgaagtacatctggagcttatgaaggatcctatttctcaggattcactagaaacaatccataagtcttcctttatgctatgtttggatcttgaccaatcccctgtcactttggaagaaaagtcaagaaattgctggcacggtgatggtattaacagattctacgataagtctttacagttcctggtcaccggtaatggttcatcaggtttcttagctgaacactcgaagatggatggtacgccaacattgtttttaaataactacgtttgtcagcagttgaataaactagatgtggatgacttcatgagaaaagtaattacgccatcatctacggtggcaatgaaacctatggaactgcccttcattatcacaccgaagattcataaagcaatcgaatctgcccaactacaatttaaggaaacaattggtgagcatgacctacgtgtttggcactacaacaaatacggaaaaacgtttataaaacgccatggcatgtcacctgatgcatttattcaacaagttatccaactggcggttttcaaatatctgaaacgacaactaccaacttacgaggctgcttccacgagaaaatacttcaaaggccgtactgaaactggtagatctgtgtccaccgcctccttagaatttgtttctaaatggcaaaatggcgatgttcctattgcagaaaagattcaggctttgaaacattctgcaaaagagcattctacgtacctgaaaaatgctgcaaatggtaatggtgtcgatcgtcatttcttcggtctaaagaatatgctaaaatctaatgatgaccaaattccgccccttttcaaagatcccttatttaattattcttcaacttggttgatctccacatctcaactatcttcggaatattttgacggttatggttggtctcaagtaaatgacaacgggtttggactggcatacatgttgaataacgagtggctgcatatcaatattgtcaacaaaccagccaagagtggagccagtgttaacagattacactattatttatctcaagctgctgatgaaatttttgacgccttggaaaatgagaataaacgaaaagcaaagttatga

SEQ ID NO: 8274 - DNA, 2013 bp, Artificial Sequence
  Description of Artificial Sequence: Synthetic polynucleotide
atgaggatctgtcattccagaactctctccaacttaaaggatcttccgataacgtctaggagagcaatgcattctgccattgtcaattactccacccaaaaggcccaatttcccgtagagacaaataatggggaacactattgggcggaaaagccgaacaaattctaccagaacaaaaggcccaattttcaaggcattacctttgctaaacaacaagacttaccatctttacccgtgcccgaattgaagtctacacttgacaagtatttgcaaaccatccgcccattttgcaatgatgtagaaacttttgaaagacagcagcttttatgtaaggacttcagtgagcacatggggcctatcttacaagacagattgaaagagtatgccaacgataaaagaaactggatggccaagttttgggatgaacaatcctatttacaatacaacgatcctattgttccatacgtctcttatttttattctcatatgccattaccgaatcatttatccaagatcgataatgatcctttgattaaggctactgcgattatctccaccgtggttaaattcatcgaagctattaaagatgaatctttacccgtagaaattatcaaaggtatgccattttgtatgaatagtttttctttgatgtttaacacttccagattgcctggtaagccagaggataaccaagatacaaatattttttattctgtttatgagaacaactttgtaactatcgcttataaagggaagttttacaaattaatgacccatgacgggaatgacaaaccgctttccgaaaacgaaatctggaggcaattgtactctgtggtattccaaggatctcagtccgatcccaaattgggtggcattggttctctcacctctttacctcgtgatcaatggcgtgaagtacatttagagcttatgaaggatcctatttctcaggattctttggaaacaatccataagtcttcctttatgctttgtttggatcttgaccaatcccctgtcactttggaagaaaagtctagaaattgctggcacggtgatggtattaacagattctacgataagtctttacagttcttggtcaccggtaatggttcttctggtttcttagctgaacactccaagatggatggtacgccaacattgtttttaaataactacgtttgtcagcagttgaataaattggatgtggatgacttcatgagaaaagtaattacgccatcttctacggtggcaatgaaacctatggaattgcccttcattatcacaccgaagattcataaagcaatcgaatctgcccaattacaatttaaggaaacaattggtgagcatgacttgcgtgtttggcactacaacaaatacggaaaaacgtttataaaacgccatggcatgtctcctgatgcatttattcaacaagttatccaattggcggttttcaaatatttgaaaagacaattaccaacttacgaggctgcttccacgagaaaatacttcaaaggccgtactgaaactggtagatctgtgtccaccgcctccttagaatttgtttctaaatggcaaaatggcgatgttcctattgcagaaaagattcaggctttgaaacattctgcaaaagagcattctacgtacttgaaaaatgctgcaaatggtaatggtgtcgatcgtcatttcttcggtttgaagaatatgttgaaatctaatgatgaccaaattccgccccttttcaaagatcccttatttaattattcttctacttggttgatctccacatctcaattatcttctgaatattttgacggttatggttggtctcaagtaaatgacaacgggtttggattagcatacatgttgaataacgagtggttacatatcaatattgtcaacaaaccagccaagagtggagccagtgttaacagattacactattatttatctcaagctgctgatgaaatttttgacgccttggaaaatgagaataaaagaaaagcaaagttatga

SEQ ID NO: 8275 - DNA, 843 bp, Saccharomyces cerevisiae
atgaaggcgctagttgaagagattgataagaaaacttacaatcctgacatatatttcacgtcattggatcctcaagcacgtcgatatacttcaaagaagattaataagcaaggcacaatatccacctctaggcccgtaaagcgcataaactactcactggcagatttagaggccaggttatatacttcgagatctgagggagatggcaatagtataagcagacaggatgaccgaaatagtaagaattcccattcatttgaagaaaggtacacacaacaagagattctccagtcggacaggaggtttatggaacttaacacagaaaatttctcggatttaccaaatgtaccgactttattaagtgatctcacaggcgtaccacgagatagaattgaatcaacaaccaaaccgatctcacagacctcggatggtctctctgcattaatgggtggttcttcttttgtaaaagagcattccaagtatggtcatggttgggtgcttaaaccagaaaccttacgggaaatacaattatcgtataaatctacaaaactacctaaaccaaagaggaagaataccaatcgtattgtggcgttaaagaaggttttaagttcaaaaagaaatttacattcgtttttagattctgcgctgctaaacttgatggataagaatgtcatttaccacaatgtttacaataaacgatacttcaaagtgttacccctaattacgacatgctctatttgcggtggctacgatagtatttcaagttgcgttaattgtggaaataagatttgttctgtaagttgttttaaattgcataatgaaactaggtgcagaaatagatag

SEQ ID NO: 8276 - DNA, 843 bp, Artificial Sequence
  Description of Artificial Sequence: Synthetic polynucleotide
atgaaggcgttggttgaagagattgataagaaaacttacaatcctgacatatatttcacgtctttggatcctcaagcacgtcgttatacttctaagaagattaataagcaaggcacaatatccacctctaggcccgtaaagcgcataaactactctttggcagatttagaggccaggttatatacttccagatctgagggagatggcaatagtataagcagacaggatgacagaaatagtaagaattcccattcttttgaagaaaggtacacacaacaagagattctccagagtgacaggaggtttatggaacttaacacagaaaatttcagtgatttaccaaatgtaccgactttattaagtgatctcacaggcgtaccaagagatagaattgaatctacaaccaaaccgatctctcagacctctgatggtctctctgcattaatgggtggttcttcttttgtaaaagagcattccaagtatggtcatggttgggtgcttaaaccagaaaccttaagagaaatacaattatcttataaatctacaaaattacctaaaccaaagaggaagaataccaatcgtattgtggcgttaaagaaggttttaagttctaaaagaaatttacattcttttttagattctgcgttattaaacttgatggataagaatgtcatttaccacaatgtttacaataaaagatacttcaaagtgttacccttaattacgacatgctctatttgcggtggctacgatagtatttccagttgcgttaattgtggaaataagatttgttctgtaagttgttttaaattgcataatgaaactaggtgcagaaatagatga

SEQ ID NO: 8277 - DNA, 1329 bp, Saccharomyces cerevisiae
atgaataggactgtctttttggcatttgtatttggatggtatttctgttcaatagctctctccatatacaatagatggatgttcgatccgaaggacggattgggtattgggtatcccgtgttggtgacaacattccatcaggctactttatggttactatccggcatatacattaagctcaggcataagccagtgaaaaacgttttaagaaagaataatggttttaactggagtttttttctaaaatttttactccctacggcagtcgcttctgcaggtgatatcgggctcagtaacgtttccttccagtatgttcccttgacaatttatacaattatcaaatcttcgagcatagcttttgtccttttattcggctgtatcttcaagctagaaaagtttcattggaagttggcactttcagtaataattatgtttgttggtgtagcattaatggttttcaaaccaagcgattccaccagtaccaaaaacgaccaagccttggtcatttttggcagctttcttgtcctagcaagtagctgtctttctgggttaaggtgggtttatacgcagttgatgcttaggaacaacccaattcaaactaacaccgctgcagcagtagaggaatctgatggtgcccttttcacggaaaatgaagataatgtcgataatgaacctgttgttaacctcgccaataacaaaatgctggagaattttggagaatccaagcctcacccaattcatacaatccaccagttagctcctataatgggcattactctgttgcttacctcgctacttgtggaaaaaccatttcctggtatattcagctctagcatatttaggcttgatacgagcaatggcggtgtcggcacggaaactaccgtcctatccattgtgaggggtattgttttgttaattttacctggttttgcagtctttttgttgacaatttgtgagtttagtattttggagcaaacgcccgtgctgaccgtatctattgtgggtatagtgaaggaacttttgacggtaatatttggtataattattctttctgaaagattaagtggtttttacaattggttaggaatgcttattattatggcagatgtatgctattataattacttcagatataagcaagatctattacaaaaatatcattcagtttcgacacaagataatcgtaacgagttaaagggatttcaagacttcgaacagttaggaagcaagaaaatcgcaccatattctattagtgtcgacctaacaaatcaagagtatgagcttgatatgattgctcaaaacgttagtcgttcatcccagcaggtctga

SEQ ID NO: 8278 - DNA, 1329 bp, Artificial Sequence
  Description of Artificial Sequence: Synthetic polynucleotide
atgaataggactgtctttttggcatttgtatttggatggtatttctgttctatagctctctccatatacaatagatggatgttcgatccgaaggacggattgggtattgggtatcccgtgttggtgacaacattccatcaggctactttatggttattatccggcatatacattaagctcaggcataagccagtgaaaaacgttttaagaaagaataatggttttaactggagtttttttttgaaatttttactccctacggcagtcgcttctgcaggtgatatcgggctcagtaacgtttccttccagtatgttcccttgacaatttatacaattatcaaatcttctagcatagcttttgtccttttattcggctgtatcttcaagttggaaaagtttcattggaagttggcactttctgtaataattatgtttgttggtgtagcattaatggttttcaaaccaagcgattccaccagtaccaaaaacgaccaagccttggtcatttttggcagctttcttgtcttggcaagtagctgtctttctgggttaaggtgggtttatacgcagttgatgcttaggaacaacccaattcaaactaacaccgctgcagcagtagaggaatctgatggtgcccttttcacggaaaatgaagataatgtcgataatgaacctgttgttaacctcgccaataacaaaatgttagagaattttggagaatccaagcctcacccaattcatacaatccaccagttagctcctataatgggcattactttattgcttacctctttacttgtggaaaaaccatttcctggtatattcagctctagcatatttaggcttgatacgagcaatggcggtgtcggcacggaaactaccgtcttgtccattgtgaggggtattgttttgttaattttacctggttttgcagtctttttgttgacaatttgtgagtttagtattttggagcaaacgcccgtgttgaccgtatctattgtgggtatagtgaaggaacttttgacggtaatatttggtataattattctttctgaaagattaagtggtttttacaattggttaggaatgcttattattatggcagatgtatgctattataattacttcagatataagcaagatttattacaaaaatatcattctgtttctacacaagataatcgtaacgagttaaagggatttcaagacttcgaacagttaggaagcaagaaaatcgcaccatattctattagtgtcgacttgacaaatcaagagtatgagcttgatatgattgctcaaaacgttagtcgttcttcccagcaggtctga

SEQ ID NO: 8279 - DNA, 1023 bp, Saccharomyces cerevisiae
atggacgaaaacaaaataatcgaccagttgttcagtaaggaatacacaccgcaagatgactccgagcaagccaaaaatggagatgtgtcgttatatgggttattagatgaagtagcgaacggtaggcggttgatgaactgtttgtttcattcacctatgcaaatggggaataaattgagtaccgacaaacttgatgggaaatgtcggcaaatacaaagagattggattgatgaggaaaaaaccataactatgaattctggcgctttacagctggatgggccagttctattttcctggagtcataatgtagcacctacttctcatcaagaaactataaatacaaccttcaagcagggctctccgagcagaggaagcaacaagcccaaaattactactaccagtcagttatttgatagagcttctgctgagattgataagtgtataaagcccaatagcaaaagttggatggtggaagaaagatttgagagaaatgaggcacatacagctgatggcaagaaaccttctacgtgggctaattccgatttcaaagtggacccgctacagaaattcgttgttaaggaattgcccaaagaaaagaagaaatcagacggtgataagacaaagaaaaataagtcgaaaaggaagagtttttttggattttggggccattctggttctaaatcaggttcaaaaaagaaatccgaaaagcctatagaggccaaaaatgaaattcaggatgaggtaagccaaaaatctggcctatcacctgacgatgatacaactttcagtgataaaaataccatccaatcaaagcaagagagtatgagtgatcaacaagctgaacccaaagtacacgagcccgcagttactaacactggatgcagtgaacatgatgatggtgatggatttgaacaggtacctgcacaatctagttatcatccatccagcgagcccagcattgccagcactccttcattaactctagattcattcatcccattacaaccaaagaagaaaatataa

SEQ ID NO: 8280 - DNA, 1023 bp, Artificial Sequence
  Description of Artificial Sequence: Synthetic polynucleotide
atggacgaaaacaaaataatcgaccagttgttcagtaaggaatacacaccgcaagatgactccgagcaagccaaaaatggagatgtgtctttatatgggttattagatgaagtagcgaacggtaggagattgatgaactgtttgtttcattctcctatgcaaatggggaataaattgagtaccgacaaacttgatgggaaatgtagacaaatacaaagagattggattgatgaggaaaaaaccataactatgaattctggcgctttacagttagatgggccagttttattttcctggagtcataatgtagcacctacttctcatcaagaaactataaatacaaccttcaagcagggctctccgagcagaggaagcaacaagcccaaaattactactaccagtcagttatttgatagagcttctgctgagattgataagtgtataaagcccaatagcaaaagttggatggtggaagaaagatttgagagaaatgaggcacatacagctgatggcaagaaaccttctacgtgggctaattccgatttcaaagtggacccgttgcagaaattcgttgttaaggaattgcccaaagaaaagaagaaaagtgacggtgataagacaaagaaaaataagagtaaaaggaagagtttttttggattttggggccattctggttctaaatctggttccaaaaagaaatccgaaaagcctatagaggccaaaaatgaaattcaggatgaggtaagccaaaaatctggcttatctcctgacgatgatacaactttcagtgataaaaataccatccaatccaagcaagagagtatgagtgatcaacaagctgaacccaaagtacacgagcccgcagttactaacactggatgcagtgaacatgatgatggtgatggatttgaacaggtacctgcacaatctagttatcatccatccagcgagcccagcattgccagcactccttctttaactttagattctttcatcccattacaaccaaagaagaaaatatga

SEQ ID NO: 8281 - DNA, 546 bp, Saccharomyces cerevisiae
atggtagtatccatcataccgcaatttcctgatatcaaggtttcactagcattgtttgaacaggttaaaaatgctaaagaaatacgctctaaaatgagtgaattgtcgacatcctttgcctttattgacccccggttagtctgttcgggggagcagatgtattctgcaatttacaagaccttaatagaagtgaaatataacaagatgagaacaagaaatttgaattccgagtgcgtactatgtctttcacccacttccaatattagtgatgctttcctcaaattcggaatcaaagacgattcgtcacagttaatatgccttaagttccatactaatactgacgatgtagacaaagagcaattgaggacgattatgacttctatagtaaaaggacaagagatcgagtttaatgatgacaatttatcgagattttatgacgaagcgctcataagaaaaatctataaattaagtgatgatttcaagccccaagacgtaaatggtctctcaagagctttggtagacgctattcaattgaggggtgtgtag

SEQ ID NO: 8282 - DNA, 546 bp, Artificial Sequence
  Description of Artificial Sequence: Synthetic polynucleotide
atggtagtatccatcataccgcaatttcctgatatcaaggtttctttggcattgtttgaacaggttaaaaatgctaaagaaatacgctctaaaatgagtgaattgagtacatcctttgcctttattgaccccagattagtctgttctggggagcagatgtattctgcaatttacaagaccttaatagaagtgaaatataacaagatgagaacaagaaatttgaattccgagtgcgtattatgtctttctcccacttccaatattagtgatgctttcctcaaattcggaatcaaagacgattcttctcagttaatatgccttaagttccatactaatactgacgatgtagacaaagagcaattgaggacgattatgacttctatagtaaaaggacaagagatcgagtttaatgatgacaatttatctagattttatgacgaagcgctcataagaaaaatctataaattaagtgatgatttcaagccccaagacgtaaatggtctcagcagagctttggtagacgctattcaattgaggggtgtgtga

SEQ ID NO: 8283 - DNA, 2433 bp, Saccharomyces cerevisiae
atggacaatcaggctacacagaggcttaacgacctttctctagaaccagctccttcacacgatgaacaagatggttcaggactagtcattgacatagatcaaagaaagattggtgatgaacaagctggtgtcgtagtggatgatgagacaccccccttagagcagcaagattcacacgaaagtttagctgctgattctcggaatgctaatttctcgtatcacgagaatcagcagttgttggaaaatggcaccaaacagttggccctagatgagcatgattctcactctgccatcttggagcaaccatcgcattctaccaattgtagctcttccaacatagcagcgatgaataagggccatgactcggcagaccatgcatctcaaaattccgggggtaaaccgaggaccttgtctgctagtgctcagcatatcttgccagagacgctcaagtcatttgccggcgctccggtagtgaataagcaggtacgtacctctgcctcctataaaatgggaatgttggctgatgatgcttcacagcagtttcttgatgatccctcttccgagttgattgacttgtattccaaagtggcagagtgtagaaatttgagagccaaatatcagaccatatctgtgcaaaacgatgatcaaaacccaaaaaataagccaggctgggtagtctatccaccaccacctaaaccttcatacaactcagacactaagactgttgtgccagtaacaaacaagccggatgcggaagttttcgattttacgaaatgtgaaattcctggtgaggatccagattgggaatttaccctcaacgatgacgactcgtacgtggtacacagatcaggtaagacggatgagttaattgctcaaatccctacccttcgtgactactatctggatctagaaaaaatgatttccatctcatcagacggtcccgctaaatcatttgcttatagaaggctgcaatacctagaagcacgctggaatctttactatctcttgaacgaatatcaagaaactagcgtttccaaaagaaacccacacagggatttttataatgttaggaaagtggacactcacgttcaccattctgcttgtatgaaccaaaagcacttattacgtttcattaaacacaaattgagacattccaaagatgaaaaggttattttcagggacgggaaactactaactttagacgaagtattccgttctttgcatttgactggatatgatttatccatcgatactttagatatgcatgcacataaggatacattccacagattcgataaattcaacttaaaatataaccctatcggtgaatctcgtctcagagaaatttttttgaagacaaacaactacatcaagggtacctacttggctgacattaccaaacaagtcatattcgatttagagaattcaaaataccaaaactgtgagtatagaatttctgtttatggcaggtctctcgatgaatgggataaactagctagctgggtgattgacaacaaagttatttcccataatgttcgttggttagtccaaattccgaggttatatgatatttacaagaaaactggcattgttcaaagcttccaggacatctgtaagaatctgtttcagccactatttgaagtgaccaaaaatcctcagtctcatccaaaattgcatgtatttttacagagagtaattgggtttgattctgtcgatgatgaatccaaggttgatcgccgctttcataggaaatatcccaagccatcactctgggaggctcctcaaaaccctccttattcctattacctgtactatttgtattcaaatgtcgcgtctttgaatcaatggagggctaagagagggtttaacactttggttttgagaccacattgtggtgaagccggtgaccccgagcatctcgtttcagcatatctattggcacatggtatatcacatggtattttattgaggaaagttccatttgttcaatacttatactatttagatcaggttggtatcgcaatgtcacccctttctaataacgcattatttttgacctatgataaaaacccatttccgagatactttaaaagaggtttgaatgtctcactatccacagatgatcctttacaattctcatataccagagaaccattaatcgaagaatactcagttgcagcacaaatttataaattgtctaatgtagatatgtgtgaattggcaagaaattccgtgttgcaaagtgggtgggaagcacaaatcaaaaaacattggatagggaaagattttgacaagagtggtgttgaaggtaacgatgtggttagaacaaatgttcctgatattagaattaactacagatacgatacattatcaactgaactggaattagttaatcattttgccaatttcaagagaaccattgaagaaaagtga

SEQ ID NO: 8284 - DNA, 2433 bp, Artificial Sequence
  Description of Artificial Sequence: Synthetic polynucleotide
atggacaatcaggctacacagaggcttaacgacctttctttggaaccagctccttctcacgatgaacaagatggttctggattagtcattgacatagatcaaagaaagattggtgatgaacaagctggtgtcgtagtggatgatgagacaccccccttagagcagcaagattctcacgaaagtttagctgctgattctagaaatgctaatttctcttatcacgagaatcagcagttgttggaaaatggcaccaaacagttggccttggatgagcatgattctcactctgccatcttggagcaaccatctcattctaccaattgtagctcttccaacatagcagcgatgaataagggccatgactctgcagaccatgcatctcaaaattccgggggtaaaccgaggaccttgtctgctagtgctcagcatatcttgccagagacgctcaagagctttgccggcgctccggtagtgaataagcaggtacgtacctctgcctcctataaaatgggaatgttggctgatgatgcttctcagcagtttcttgatgatccctcttccgagttgattgacttgtattccaaagtggcagagtgtagaaatttgagagccaaatatcagaccatatctgtgcaaaacgatgatcaaaacccaaaaaataagccaggctgggtagtctatccaccaccacctaaaccttcttacaacagcgacactaagactgttgtgccagtaacaaacaagccggatgcggaagttttcgattttacgaaatgtgaaattcctggtgaggatccagattgggaatttaccctcaacgatgacgactcttacgtggtacacagatctggtaagacggatgagttaattgctcaaatccctacccttcgtgactactatttggatttggaaaaaatgatttccatctcttctgacggtcccgctaaaagttttgcttatagaaggttacaatacttggaagcacgctggaatctttactatctcttgaacgaatatcaagaaactagcgtttccaaaagaaacccacacagggatttttataatgttaggaaagtggacactcacgttcaccattctgcttgtatgaaccaaaagcacttattacgtttcattaaacacaaattgagacattccaaagatgaaaaggttattttcagggacgggaaattattaactttagacgaagtattccgttctttgcatttgactggatatgatttatccatcgatactttagatatgcatgcacataaggatacattccacagattcgataaattcaacttaaaatataaccctatcggtgaatctcgtctcagagaaatttttttgaagacaaacaactacatcaagggtacctacttggctgacattaccaaacaagtcatattcgatttagagaattctaaataccaaaactgtgagtatagaatttctgtttatggcaggtctctcgatgaatgggataaattggctagctgggtgattgacaacaaagttatttcccataatgttcgttggttagtccaaattccgaggttatatgatatttacaagaaaactggcattgttcaaagcttccaggacatctgtaagaatttatttcagccattatttgaagtgaccaaaaatcctcagtctcatccaaaattgcatgtatttttacagagagtaattgggtttgattctgtcgatgatgaatccaaggttgatcgccgctttcataggaaatatcccaagccatctctctgggaggctcctcaaaaccctccttattcctattacttgtactatttgtattctaatgtcgcgtctttgaatcaatggagggctaagagagggtttaacactttggttttgagaccacattgtggtgaagccggtgaccccgagcatctcgtttctgcatatcttttggcacatggtatatctcatggtattttattgaggaaagttccatttgttcaatacttatactatttagatcaggttggtatcgcaatgtctcccctttctaataacgcattatttttgacctatgataaaaacccatttccgagatactttaaaagaggtttgaatgtctctttatccacagatgatcctttacaattctcttataccagagaaccattaatcgaagaatactctgttgcagcacaaatttataaattgtctaatgtagatatgtgtgaattggcaagaaattccgtgttgcaaagtgggtgggaagcacaaatcaaaaaacattggatagggaaagattttgacaagagtggtgttgaaggtaacgatgtggttagaacaaatgttcctgatattagaattaactacagatacgatacattatctactgaattggaattagttaatcattttgccaatttcaagagaaccattgaagaaaagtga

SEQ ID NO: 8285 - DNA, 2505 bp, Saccharomyces cerevisiae
atgaatagtgacttggagtatttagaggacggttttgatccgaattcaatgaaagttgcgactttgaggaggatattggtagaaaataatgtcgatttcccatctaatgctaggaaaaatgcgctggtggggctgttcgatgaaaaggttaaaccgcagatcccgcagttacggaaaatgtatctgaacgttcggcccagcgatgaaggtattgtgaaaatggaccgtccctcatcttccccatctatagcttcccctcgtagaagtagacgagctcgcagggagaaatctgcttcccccatggccaaacagtttaagaagaatagaatactggatgatgtaagtaatgatgatgatgatgatgatgatgatgatgatgacaatgataaaaaagacgatcctttaattgtacctagtggaacggataccgatgaagtggacgatgaagaggatgatgtgataacatcaagctccaacaaatcagacaccaatgatttccagcaaaattccgatactcgtaagaaaaggaaagaccctgattctgacgactggtctgaatctaattcaaaggaaaataaaatcgataataagcatttgaacctcctatcatcagattcagaaattgaacaggattaccagaaggcaaaaaagcgtaagacgagtgatttgaaccaagagcatggaaatggctctgccattttaggaaaactttccgtcaaaacaccaataaagaacacaaatagaaagccagtaagcatggataattttaacgattcgttgacttcaagcggtacggaaaatgatccatttgtaccgaacatacgacacaatccaaaagagctcggaactgccaatggaacaggccatagcacacccttgagtaagttaaaagtttctgcctcatttgcggataaattgcctcaaaaggaggtaccatctacaatactggttccagaagtggaacagcaagaaccttctcagagtgaaagaacaccgtctttgttttcgtccgaaggctctggctcagagtcggaagcacccttgcttccagagatcaccacgccaggtcctcatcagcctatgggtaataccagcaataatgtggtcgaaatgatagatacagatagtagtaacttggtatcggatgaagatgaagttttagtgcctacaaggatcgagactccccaattacccacagagaaagacgtcgaaaagtgtgaagcaagagtgcaagaacttcaagaggaagtaaatgagcaattagagcatgaaaatgggagtgaatttgatgttaagcaaggatctgggaaggtcgggaacaggcataagttcaaaagagcactcaaatttttgagcaaatcattactggcgctatttttattttgcatattcattgttattcctctcttatttggcctctggtatagagagcaaagactgctcataggttactgtgggcatgaagtaccatcccatcgagttagtggcaattccttcgagtttattcaaaaactggataatttgttgcaggactacagaccgaaatgtatcccttgtccacccaatggtatttgttatccttatttgaaacttaaatgtaagccagattacaagttagcaccatctagacttgactttttggaaattattcctgcacaaggcaaatgtgttaaagacgacaaaaaacagcagttagtttccgaagtggttgaaaaatctttagagtttctgagagccaaaaatgcacaaatttcatgcggtgacggaaaagacgacatcgagagtggtatgacggaagatgccctctatcaaatatttaatgaggctagagctccttggattcgcgacgatgaatttgaggacctgtggatccaagttatcaaagatttaactgaagaaccagaaatattatggaggcaattatcacccactgacaacaacattggcggaaattccaacaacatcattaaaaccaatgacgttccgagacagaagagacatcttccagaaaaattcatctccaagacgaggaattttcggtcgacgtccaagaaatacattggaatgaagtgtcgatttgaaagagaaatctaccaaacgtataaaaaatttcaaaggccaatatggctaatgtttttactgatagtcattagtaaagtaatcgagatcaagctgaagaattattatagaaagaaggcaagaattgaagaactcgttactcaaaccatggaaaaattgaaattccaaaagattaaatcaatgtccgatccgaaagaaaacgcgtatttgagcatagttcaattgcgtgacatctttctttctgatattgtcgatctgaaatacaaaaatcaattatggtcagaagtggtaaaatatttagagcataataacagtaatattaaatcgaacttaactgaaattcgaggtgaaataatgaaatgttgggaatggataggtccgatggaactcaatgaacctaaggattccgctgaaaacaaaatataa

SEQ ID NO: 8286 - DNA, 2505 bp, Artificial Sequence
  Description of Artificial Sequence: Synthetic polynucleotide
atgaatagtgacttggagtatttagaggacggttttgatccgaattctatgaaagttgcgactttgaggaggatattggtagaaaataatgtcgatttcccatctaatgctaggaaaaatgcgttagtggggcttttcgatgaaaaggttaaaccgcagatcccgcagttaagaaaaatgtatttgaacgttagacccagcgatgaaggtattgtgaaaatggaccgtccctcttcttccccatctatagcttcccctcgtagaagtagaagagctcgcagggagaaatctgcttcccccatggccaaacagtttaagaagaatagaatattggatgatgtaagtaatgatgatgatgatgatgatgatgatgatgatgacaatgataaaaaagacgatcctttaattgtacctagtggaacggataccgatgaagtggacgatgaagaggatgatgtgataacatctagctccaacaaaagtgacaccaatgatttccagcaaaattccgatactcgtaagaaaaggaaagaccctgattctgacgactggtctgaatctaattctaaggaaaataaaatcgataataagcatttgaacctcttgagttctgattctgaaattgaacaggattaccagaaggcaaaaaagcgtaagacgagtgatttgaaccaagagcatggaaatggctctgccattttaggaaaactttccgtcaaaacaccaataaagaacacaaatagaaagccagtaagcatggataattttaacgattctttgacttccagcggtacggaaaatgatccatttgtaccgaacatacgtcacaatccaaaagagctcggaactgccaatggaacaggccatagcacacccttgagtaagttaaaagtttctgcctcttttgcggataaattgcctcaaaaggaggtaccatctacaatattagttccagaagtggaacagcaagaaccttctcagagtgaaagaacaccgtctttgttttcttccgaaggctctggcagtgagagtgaagcacccttgcttccagagatcaccacgccaggtcctcatcagcctatgggtaataccagcaataatgtggtcgaaatgatagatacagatagtagtaacttggtatctgatgaagatgaagttttagtgcctacaaggatcgagactccccaattacccacagagaaagacgtcgaaaagtgtgaagcaagagtgcaagaacttcaagaggaagtaaatgagcaattagagcatgaaaatgggagtgaatttgatgttaagcaaggatctgggaaggtcgggaacaggcataagttcaaaagagcactcaaatttttgagcaaatctttattggcgttatttttattttgcatattcattgttattcctctcttatttggcctctggtatagagagcaaagattactcataggttactgtgggcatgaagtaccatcccatagagttagtggcaattccttcgagtttattcaaaaattggataatttgttgcaggactacagaccgaaatgtatcccttgtccacccaatggtatttgttatccttatttgaaacttaaatgtaagccagattacaagttagcaccatctagacttgactttttggaaattattcctgcacaaggcaaatgtgttaaagacgacaaaaaacagcagttagtttccgaagtggttgaaaaatctttagagtttttaagagccaaaaatgcacaaatttcttgcggtgacggaaaagacgacatcgagagtggtatgacggaagatgccctctatcaaatatttaatgaggctagagctccttggattcgcgacgatgaatttgaggacttatggatccaagttatcaaagatttaactgaagaaccagaaatattatggaggcaattatctcccactgacaacaacattggcggaaattccaacaacatcattaaaaccaatgacgttccgagacagaagagacatcttccagaaaaattcatctccaagacgaggaattttagatctacgtccaagaaatacattggaatgaagtgtagatttgaaagagaaatctaccaaacgtataaaaaatttcaaaggccaatatggttaatgtttttattgatagtcattagtaaagtaatcgagatcaagttgaagaattattatagaaagaaggcaagaattgaagaactcgttactcaaaccatggaaaaattgaaattccaaaagattaaatctatgtccgatccgaaagaaaacgcgtatttgagcatagttcaattgcgtgacatctttctttctgatattgtcgatttgaaatacaaaaatcaattatggtctgaagtggtaaaatatttagagcataataacagtaatattaaaagtaacttaactgaaattagaggtgaaataatgaaatgttgggaatggataggtccgatggaactcaatgaacctaaggattccgctgaaaacaaaatatga

SEQ ID NO: 8287 - DNA, 1416 bp, Saccharomyces cerevisiae
atgaatgaaattatggatatggatgagaagaagcccgttttcggtaaccattccgaggacatacagaccaaattggacaagaaattaggacctgagtatatctccaagagagttgggtttggaacaagcaggattgcatacatcgaaggttggagagtaattaatcttgctaatcaaatctttggatataatggctggtctacggaggtaaaaagtgtagttatcgattttttggatgagcgacagggaaagtttagcatagggtgtactgcaattgttcgtgttacgttgactagcgggacttatagggaagatattgggtatggtaccgtggagaacgaaagacggaaacctgccgctttcgaaagggccaagaaatctgccgttacggatgccttgaaaagatctttgagagggtttggtaatgctctaggaaattgtctttacgataaagattttctggcaaagatcgataaggtgaagttcgatccgccagattttgacgaaaacaatttgtttaggccaacggatgaaatcagcgaaagctcaagaacgaatactttgcatgaaaatcaagaacaacaacaatacccgaataaaagaaggcaattgactaaagttacaaataccaatcccgactcgacgaagaacctggtgaaaatagaaaatacagtaagtcgaggtaccccaatgatggccgcacctgctgaggctaacagtaaaaacagcagtaataaagatactgatctcaaatctctcgatgcttccaaacaggatcaagatgaccttctcgatgattctcttatgtttagcgatgattttcaagacgacgacttgataaatatgggcaacacaaacagtaatgttttaacgacagagaaggatcccgttgtagctaagcaaagcccaactgctagctcaaacccagaggcagaacaaatcacctttgttacagctaaggctgcaacttccgtacaaaatgaacgttatattggtgaagagagcatttttgatcccaaataccaggcacaatccattaggcacaccgttgatcagactacgtccaagcatattccagcgagtgtgctaaaagacaaaacgatgaccaccgcgagggattctgtctatgaaaaatttgcaccaaagggaaaacaattgagcatgaagaacaatgataaagaactggggcctcatatgctagaaggggctgggaatcaagtaccgcgtgaaaccacaccaattaaaacgaacgctacagcttttccgcctgcagctgctccacggtttgcgccgccttctaaggtagtacatcctaatggaaatggtgcagtgccagccgttccgcaacaaagatcgacacgaagagaagttggaagaccaaagatcaatcccctgcatgcacgcaagcctacttga

SEQ ID NO: 8288 - DNA, 1416 bp, Artificial Sequence
  Description of Artificial Sequence: Synthetic polynucleotide
atgaatgaaattatggatatggatgagaagaagcccgttttcggtaaccattccgaggacatacagaccaaattggacaagaaattaggacctgagtatatctccaagagagttgggtttggaacaagcaggattgcatacatcgaaggttggagagtaattaatcttgctaatcaaatctttggatataatggctggtctacggaggtaaaaagtgtagttatcgattttttggatgagagacagggaaagtttagcatagggtgtactgcaattgttcgtgttacgttgactagcgggacttatagggaagatattgggtatggtaccgtggagaacgaaagaagaaaacctgccgctttcgaaagggccaagaaatctgccgttacggatgccttgaaaagatctttgagagggtttggtaatgctttaggaaattgtctttacgataaagattttttggcaaagatcgataaggtgaagttcgatccgccagattttgacgaaaacaatttgtttaggccaacggatgaaatcagcgaaagcagcagaacgaatactttgcatgaaaatcaagaacaacaacaatacccgaataaaagaaggcaattgactaaagttacaaataccaatcccgacagtacgaagaacttggtgaaaatagaaaatacagtaagtagaggtaccccaatgatggccgcacctgctgaggctaacagtaaaaacagcagtaataaagatactgatctcaaatctctcgatgcttccaaacaggatcaagatgaccttctcgatgattctcttatgtttagcgatgattttcaagacgacgacttgataaatatgggcaacacaaacagtaatgttttaacgacagagaaggatcccgttgtagctaagcaaagcccaactgctagcagtaacccagaggcagaacaaatcacctttgttacagctaaggctgcaacttccgtacaaaatgaacgttatattggtgaagagagcatttttgatcccaaataccaggcacaatccattaggcacaccgttgatcagactacgtccaagcatattccagcgagtgtgttgaaagacaaaacgatgaccaccgcgagggattctgtctatgaaaaatttgcaccaaagggaaaacaattgagcatgaagaacaatgataaagaattggggcctcatatgttggaaggggctgggaatcaagtaccgcgtgaaaccacaccaattaaaacgaacgctacagcttttccgcctgcagctgctccaagatttgcgccgccttctaaggtagtacatcctaatggaaatggtgcagtgccagccgttccgcaacaaagatctacaagaagagaagttggaagaccaaagatcaatccccttcatgcacgcaagcctacttga

SEQ ID NO: 8289 - DNA, 1968 bp, Saccharomyces cerevisiae
atgatacagacgccaagggagttgttgaatccacggtacacgtaccataccatctttagcgacgtgtgcaagacccgattcaaccatttagttacgaggttgtttttcatatgttctattatccaaactgtggtgatttcactgctggcgttgccacactcaccgttatgggaactggcattggcatttattcccaatattttagctcttaacctagtttcccttttgatcattgtgacaagaaaaaattacatgcatgtaaagaattttgggttcgctaattcacttactttcattctaggccaattgttatcagtaaagtttcttgtataccagggagtctatagcatgggcagcatccttttatcattcgtactgggtgtggttttcggacgtggcggatctggatggaagccatactataagctgtttatttggctagtcgttcccacgatttacaacctacaacatcatgtcactgacgctgacaaattgtcgttcaactgcgaaaactttttccaggccccacaagactacgtattagagcgtgtcaagaggattatggagaagtcagtcattctaagtgtaatcagcatgttcgtattaccaatctttaccacagtatttttttccaggcaaaaatcgggattatttgattcatttacgaatggcgtgctagctgtcacaaatttactaataatctcctgcattatcttcatcactttcgaattcataaatatagcatttgacgcacatatgtccataggttgtctgcacaagggcaagctaatttcgaatttgtcgtcgacgccgatggaaaccctgcttagtgggctttctgcagacaagccatttactaggttgactgcctaccaggaactagcgtatagggccacttcactggatccatcattgcgagcaccaatatatcactccaagttcagaagcagtagtggtaatacttggtcattaatcctcaatgaatgcttgaagaccattcagataaacaatgaaaaggttgtgcagtacctaagatcagtacaagatcttgggggctctgcaactgctagacataaaaaaaaagtagaaaatctagattatatgtatgagaacgggaaactaacaagcgccaacgaaagactctttgggaaccgaccctctatgatggcgccattacgggataacggcttattagatgaatcaccaaacaggctgagggtaagaactgacgatagtgtattgcttaaccgcggaaacaagaaaaggcataggtcctcgtattacgacaacgatttagatgaaacgacacaaacttttaacggctctattttcacccacgaaacaacatttatgaccgctatgcgtctgatgttaaaaaaactgaaaaattctataatgtcgtttattttcccttcctacgcagaaagacaatcatctgatgaaagcgacaattacagactattaccaaatggctccaacaaagcccaaatctcgataattgacatatggtccatttccaagaaaaggcaagctgagaagctggttccattgcccatatgccacgcaaatagtgtggtagcactgacaggactgctgatccgatcaaagacagaagatccaaaaggcggtatcattgcatccgttggggatattcttaagactttggagaggtccatctgtgcactgggtgaatttgccgattgggatccggaatcgatggcatacactgccttccaaacacaaaggacagcccaagatagagtacaacaagacagtgaagacgaagatagcatgaaagacactactgacatgatcagtgttctttatcagctgtccaccagtgcttttatggagattgtacttgaatacaatgttgctctgaacgacgtatatttggatgcagacgtggccaagttggcgaactggtttctagaagtgtacgcctcaggcaaccctaatgctacgtaa

SEQ ID NO: 8290 - DNA, 1968 bp, Artificial Sequence
  Description of Artificial Sequence: Synthetic polynucleotide
atgatacagacgccaagggagttgttgaatccaagatacacgtaccataccatctttagcgacgtgtgcaagaccagattcaaccatttagttacgaggttgtttttcatatgttctattatccaaactgtggtgatttctttattggcgttgccacactctccgttatgggaattggcattggcatttattcccaatattttagctcttaacttggtttcccttttgatcattgtgacaagaaaaaattacatgcatgtaaagaattttgggttcgctaattctcttactttcattttgggccaattgttaagtgtaaagtttcttgtataccagggagtctatagcatgggcagcatccttttatctttcgtattgggtgtggttttcggacgtggcggatctggatggaagccatactataagttatttatttggttagtcgttcccacgatttacaacttacaacatcatgtcactgacgctgacaaattgagtttcaactgcgaaaactttttccaggccccacaagactacgtattagagcgtgtcaagaggattatggagaagtctgtcattttaagtgtaatcagcatgttcgtattaccaatctttaccacagtatttttttccaggcaaaaaagtggattatttgattcttttacgaatggcgtgttggctgtcacaaatttattgataatctcctgcattatcttcatcactttcgaattcataaatatagcatttgacgcacatatgtccataggttgtttgcacaagggcaagttgatttctaatttgtcttctacgccgatggaaaccttacttagtgggctttctgcagacaagccatttactaggttgactgcctaccaggaattggcgtatagggccacttctttagatccatctttgagagcaccaatatatcactccaagttcagaagcagtagtggtaatacttggtctttaatcctcaatgaatgcttgaagaccattcagataaacaatgaaaaggttgtgcagtacttgagatctgtacaagatcttgggggctctgcaactgctagacataaaaaaaaagtagaaaatttggattatatgtatgagaacgggaaattaacaagcgccaacgaaagactctttgggaacaggccctctatgatggcgccattaagagataacggcttattagatgaatctccaaacaggttgagggtaagaactgacgatagtgtattgcttaaccgcggaaacaagaaaaggcataggtccagctattacgacaacgatttagatgaaacgacacaaacttttaacggctctattttcacccacgaaacaacatttatgaccgctatgcgtttaatgttaaaaaaattgaaaaattctataatgagttttattttcccttcctacgcagaaagacaatcttctgatgaaagcgacaattacagattattaccaaatggctccaacaaagcccaaatctccataattgacatatggtccatttccaagaaaaggcaagctgagaagttggttccattgcccatatgccacgcaaatagtgtggtagcattaacaggacttttgatcagatccaagacagaagatccaaaaggcggtatcattgcatccgttggggatattcttaagactttggagaggtccatctgtgcattgggtgaatttgccgattgggatccggaaagtatggcatacactgccttccaaacacaaaggacagcccaagatagagtacaacaagacagtgaagacgaagatagcatgaaagacactactgacatgatcagtgttctttatcagttgtccaccagtgcttttatggagattgtacttgaatacaatgttgctttgaacgacgtatatttggatgcagacgtggccaagttggcgaactggtttttggaagtgtacgcctctggcaaccctaatgctacgtga

SEQ ID NO: 8291 - DNA, 480 bp, Saccharomyces cerevisiae
atgtcacgcatgccatctagtttcgatgttacggagagggatttggatgatatgacctttggcgaaaggattatataccattgtaagaaacagccattggtacccattgggtgcttgctgactacaggagctgtcattctggctgctcaaaatgttcgtcttggtaataaatggaaagctcagtactacttccgttggcgtgtgggtctacaagcggccacactagtcgcactagtcgcaggttcatttatctatgggacttctggtaaggaactgaaggcgaaggaggaacaattgaaggagaaagccaagatgagagaaaagttatggatccaagagctggagagaagggaggaagaaacggaggcaaggagaaaaagagccgaattggcaagaatgaagacccttgagaacgaagaggaaatcaagaacttagaaaaggaactaagcgacctggaaaataagcttggaaagaagtaa

SEQ ID NO: 8292 - DNA, 480 bp, Artificial Sequence
  Description of Artificial Sequence: Synthetic polynucleotide
atgtctcgcatgccatctagtttcgatgttacggagagggatttggatgatatgacctttggcgaaaggattatataccattgtaagaaacagccattggtacccattgggtgcttgttgactacaggagctgtcattttggctgctcaaaatgttcgtcttggtaataaatggaaagctcagtactacttccgttggcgtgtgggtttacaagcggccacattggtcgcattggtcgcaggttcttttatctatgggacttctggtaaggaattgaaggcgaaggaggaacaattgaaggagaaagccaagatgagagaaaagttatggatccaagagttagagagaagggaggaagaaacggaggcaaggagaaaaagagccgaattggcaagaatgaagacccttgagaacgaagaggaaatcaagaacttagaaaaggaattgagcgacttggaaaataagcttggaaagaagtga

SEQ ID NO: 8293 - DNA, 2517 bp, Saccharomyces cerevisiae
atgtctgaatatctagctcagacgccctgcaaatttactatatggtcaagcgagattgatcttatcagaacaaacctgttggtgaacgctcaccctttaagcacggttgggcgactacttcaatatatccattatcaaatatacaagcaattaagagctatctatcaaccagaggaacagtgcacgaactcggaaatacctcacacacccttaaatagtatcaacacttacttcctaagttacgaaggcagagagttatctgcaacgtgtttattaaaggacatcacgtcatctagccacccagattcgaaccatttcataagactacaactggaaaagcgtacttctccttccggttcagcatttgacttggaatatgatatggagggcgaatttaactcgatgaatattcaatttgagataaatacactatcttctcaacgtatattcaattccatggaaccaaatttgcctattggcactacattggctagattagagaaactggcattggaacgtataaaggattttgaaaaatcagcagggaatctctgtggtattaaagaggaccattcagtgtctgatttgcagggatttataataaaggggaaacagacacccatgtttttaaattatggaagtgattctgattactataaagacttgaacctggtagatttgataggcattgattttgccccggcacacaattcttttttcacatttttgttcaagatgaatcacgaacagaattcacatatcgccaacgatgaagagagatttgtgttggaattcatatccgatgccacattatctataactcaaatgaatgttaagcccgataccacggtaaaacaagtgaaagatttcatatgttctgtttacactcactcattaaacttgaggagaaatgatatcaagttgatttataagggacagttgcttcatgaaaataattttgcaggcaactcttcaaagatcagcgagtacattaaagagccacatgaagtgaaggtccatgtacaaatcaaccaagagtatacagaatctgggcctggattttggaatgaagtgttcaacaatccgaatattttccaattcatgcctccagatacaaggtcacagtcacctgttagtttcgctccgacgcaaggacgatctcctgctgcaatacgtggcgaagaacggggtataccatacgtaaccgaatctggaaatgacatcgtgcccacagatgagctttataggaaatgcattatcaacggggatgaagtagtattcattcctgttagcgaactaaatccacaatcgagctatttgtccgtgatcaaaggcgattacggtgaaattaaaatccccatatctagtaatgactacagaattaatggcgataatattttgctatcaccatctgcgatagagcagttagaatctgctttgaacttcaaaatcgagagaccacgggattcgacactcttgcatccgtctggtgagcatgttcgagctgcagataatacctcttcggcaaatgataataatacagttgagaatgacgagtcagcgtggaatagaagggtagtgcgtcccttgagaaacagcttcccgctgctattggtattgataagaacattttacttaattggctataattcattggttcccttttttattattttggagtttggaagcttccttccctggaaatatatcattttactaagcttgcttttcatttttaggactgtttggaatacccaagaggtgtggaatttatggcgagactatctccacttgaatgaaattgacgaagtcaagtttagccagatcaaggagttcatcaattccaattcattgaccttaaatttctacaagaaatgtaaggacactcaatccgctattgatttactgatgatacctaatctacatgagcaaaggctatcggtctattctaagtatgatattgagtacgacaccaacacccctgacgttggacaattgaatttgctatttatcaaggtgctatcgggtgagattcctaaggacgcgctagatgagttgttcaaagagtttttcgaattgtatgaaacgacaagaaacatgaacacactatatcctcaagactctttgaacgaattgctgctgatgatttggaaggagtcccaaaagaaagacatcaatacgctacccaagtacagaagatggttccaaaccttgtgctcgcaaatagcggagcataacgtccttgatgtcgtactcagatacataattccagacccggtaaacgatagggtgataaccgctgtgataaagaacttcgtgctcttttgggttacactactcccctatgtgaaggagaagctggatgatattgttgcacagagagcaagggaccgtgagcaaccggctccatctgcccaacagcaggaaaacgaagatgaggccctcataatccctgacgaggaagaacccaccgccacaggtgcgcaacctcatctctacattcctgatgaagactaa

SEQ ID NO: 8294 - DNA, 2517 bp, Artificial Sequence
  Description of Artificial Sequence: Synthetic polynucleotide
atgtctgaatatttggctcagacgccctgcaaatttactatatggtctagcgagattgatcttatcagaacaaaccttttggtgaacgctcaccctttaagcacggttgggagattacttcaatatatccattatcaaatatacaagcaattaagagctatctatcaaccagaggaacagtgcacgaactctgaaatacctcacacacccttaaatagtatcaacacttacttcttaagttacgaaggcagagagttatctgcaacgtgtttattaaaggacatcacgtcttctagccacccagattccaaccatttcataagattacaattggaaaagcgtacttctccttccggttctgcatttgacttggaatatgatatggagggcgaatttaactccatgaatattcaatttgagataaatacattatcttctcaacgtatattcaattccatggaaccaaatttgcctattggcactacattggctagattagagaaattggcattggaacgtataaaggattttgaaaaatctgcagggaatctctgtggtattaaagaggaccattctgtgtctgatttgcagggatttataataaaggggaaacagacacccatgtttttaaattatggaagtgattctgattactataaagacttgaacttggtagatttgataggcattgattttgccccggcacacaattcttttttcacatttttgttcaagatgaatcacgaacagaattctcatatcgccaacgatgaagagagatttgtgttggaattcatatccgatgccacattatctataactcaaatgaatgttaagcccgataccacggtaaaacaagtgaaagatttcatatgttctgtttacactcactctttaaacttgaggagaaatgatatcaagttgatttataagggacagttgcttcatgaaaataattttgcaggcaactcttccaagatcagcgagtacattaaagagccacatgaagtgaaggtccatgtacaaatcaaccaagagtatacagaatctgggcctggattttggaatgaagtgttcaacaatccgaatattttccaattcatgcctccagatacaaggagccagtctcctgttagtttcgctccgacgcaaggaagatctcctgctgcaatacgtggcgaagaaagaggtataccatacgtaaccgaatctggaaatgacatcgtgcccacagatgagctttataggaaatgcattatcaacggggatgaagtagtattcattcctgttagcgaattgaatccacaaagcagctatttgtccgtgatcaaaggcgattacggtgaaattaaaatccccatatctagtaatgactacagaattaatggcgataatattttgttatctccatctgcgatagagcagttagaatctgctttgaacttcaaaatcgagagaccaagagattctacactcttgcatccgtctggtgagcatgttagagctgcagataatacctcttctgcaaatgataataatacagttgagaatgacgagtctgcgtggaatagaagggtagtgcgtcccttgagaaacagcttcccgttgttgttggtattgataagaacattttacttaattggctataattctttggttcccttttttattattttggagtttggaagcttccttccctggaaatatatcattttattaagcttgcttttcatttttaggactgtttggaatacccaagaggtgtggaatttatggagagactatctccacttgaatgaaattgacgaagtcaagtttagccagatcaaggagttcatcaattccaattctttgaccttaaatttctacaagaaatgtaaggacactcaatccgctattgatttattgatgatacctaatttacatgagcaaaggctttctgtctattctaagtatgatattgagtacgacaccaacacccctgacgttggacaattgaatttgttatttatcaaggtgttatctggtgagattcctaaggacgcgttggatgagttgttcaaagagtttttcgaattgtatgaaacgacaagaaacatgaacacattatatcctcaagactctttgaacgaattgttgttgatgatttggaaggagtcccaaaagaaagacatcaatacgttacccaagtacagaagatggttccaaaccttgtgctctcaaatagcggagcataacgtccttgatgtcgtactcagatacataattccagacccggtaaacgatagggtgataaccgctgtgataaagaacttcgtgctcttttgggttacattactcccctatgtgaaggagaagttggatgatattgttgcacagagagcaagggaccgtgagcaaccggctccatctgcccaacagcaggaaaacgaagatgaggccctcataatccctgacgaggaagaacccaccgccacaggtgcgcaacctcatctctacattcctgatgaagactga

SEQ ID NO: 8295 - DNA, 591 bp, Saccharomyces cerevisiae
atggtcgctcaagttcaaaagcaagctccaacttttaagaaaactgccgtcgtcgacggtgtctttgacgaagtctccttggacaaatacaagggtaagtacgttgtcctagcctttattccattggccttcactttcgtctgtccaaccgaaatcattgctttctcagaagctgctaagaaattcgaagaacaaggcgctcaagttcttttcgcctccactgactccgaatactcccttttggcatggaccaatatcccaagaaaggaaggtggtttgggcccaatcaacattccattgttggctgacaccaaccactctttgtccagagactatggtgtcttgatcgaagaagaaggtgtcgccttgagaggtttgttcatcatcgacccaaagggtgtcattagacacatcaccattaacgatttgccagtcggtagaaacgttgacgaagccttgagattggttgaagccttccaatggaccgacaagaacggtactgtcttgccatgtaactggactccaggtgctgctaccatcaagccaaccgttgaagactccaaggaatacttcgaagctgccaacaaataa

SEQ ID NO: 8296 - DNA, 591 bp, Artificial Sequence
  Description of Artificial Sequence: Synthetic polynucleotide
atggtcgctcaagttcaaaagcaagctccaacttttaagaaaactgccgtcgtcgacggtgtctttgacgaagtctccttggacaaatacaagggtaagtacgttgtccttgcctttattccattggccttcactttcgtctgtccaaccgaaatcattgctttctctgaagctgctaagaaattcgaagaacaaggcgctcaagttcttttcgcctccactgactccgaatactcccttttggcatggaccaatatcccaagaaaggaaggtggtttgggcccaatcaacattccattgttggctgacaccaaccactctttgtccagagactatggtgtcttgatcgaagaagaaggtgtcgccttgagaggtttgttcatcatcgacccaaagggtgtcattagacacatcaccattaacgatttgccagtcggtagaaacgttgacgaagccttgagattggttgaagccttccaatggaccgacaagaacggtactgtcttgccatgtaactggactccaggtgctgctaccatcaagccaaccgttgaagactccaaggaatacttcgaagctgccaacaaatga

SEQ ID NO: 8297 - DNA, 1158 bp, Saccharomyces cerevisiae
atgtcacaagaaacaaaaatgctaccttctctatctagtcttctatcgggaaccgaaatctcgtccagccccgtatcaccaagcttcactaatccaagaacgagttttcacctcgatgatcgcggaaccataaaattaccaccgctaaacaccagtatcaatcgtccaagatctgtggaaagcgccttgagacacactgttacatccttgcatgaaaatagcagcgcttatggtgatgacatgctcaagcacacgcaatcagactcagccctctcatctcagttgaatagttctcaagaaacagttgatgaatcacacgaaaaccttctactgactcccctaaatagcaaaaagagagattattcggtttcttcaaagaaaaacgacatattaacaccactctctgcagcgaagtcgattattatcccctctgcctctaaggaaaaaagacgtgcatttgctttcatcacacactcgcaggagaccttccctaagaaggagcctaagatcgacaacgctccactagcacgccgaaagagaagaagaacctcgtcccaggaactatctattcttcaggctgaatttgaaaaatgtcctgctccatcgaaggagaaacgaattgagttagctgaatcttgccatatgactgaaaaagccgttcaaatatggttccagaataaaagacaagcggttaaaaggcagagaatcgccacttcgaagtcaaccactataatacaaacggtatctccaccatctccgcctctggacgttcatgctacgccactagcatccagagtcaaggcggacatacttcgtgatggaagctcatgttctcgttcttcctcttcttcaccgctggaaaatacgccgccaaggcctcatcattccctaaataggcgctcatccacaccaagcataaagagaagccaggctttaacattccatctaaacccacaaaagaagacgttgactcccgtgaaaacgtctcccaacagcagagtaaataaattgatcaatagcatagatcattctccatccaaagccaagcgtccggtaagcaatccctccggctcccctaaaaggaagagaaaattcggattcaagatcgtcgatcaacaaccgttgaaggatcttgatccgaacgctttccgtggttga

SEQ ID NO: 8298 - DNA, 1158 bp, Artificial Sequence
  Description of Artificial Sequence: Synthetic polynucleotide
atgtctcaagaaacaaaaatgttgccttctttatctagtcttttatctggaaccgaaatctcttccagccccgtatctccaagcttcactaatccaagaacgagttttcacctcgatgatcgcggaaccataaaattaccaccgttgaacaccagtatcaatcgtccaagatctgtggaaagcgccttgagacacactgttacatccttgcatgaaaatagcagcgcttatggtgatgacatgctcaagcacacgcaatctgactctgccctctcttctcagttgaatagttctcaagaaacagttgatgaatctcacgaaaaccttttgttgactcccttgaatagcaaaaagagagattattctgtttcttccaagaaaaacgacatattaacaccactctctgcagcgaagtctattattatcccctctgcctctaaggaaaaaagacgtgcatttgctttcatcacacactctcaggagaccttccctaagaaggagcctaagatcgacaacgctccattggcacgcagaaagagaagaagaacctcttcccaggaattatctattcttcaggctgaatttgaaaaatgtcctgctccatctaaggagaaaagaattgagttagctgaatcttgccatatgactgaaaaagccgttcaaatatggttccagaataaaagacaagcggttaaaaggcagagaatcgccacttctaagtctaccactataatacaaacggtatctccaccatctccgcctttggacgttcatgctacgccattggcatccagagtcaaggcggacatacttcgtgatggaagcagttgttctcgttcttcctcttcttctccgttggaaaatacgccgccaaggcctcatcattccttgaataggcgctcttccacaccaagcataaagagaagccaggctttaacattccatttgaacccacaaaagaagacgttgactcccgtgaaaacgtctcccaacagcagagtaaataaattgatcaatagcatagatcattctccatccaaagccaagcgtccggtaagcaatccctccggctcccctaaaaggaagagaaaattcggattcaagatcgtcgatcaacaaccgttgaaggatcttgatccgaacgctttccgtggttga

SEQ ID NO: 8299 - DNA, 441 bp, Saccharomyces cerevisiae
atgtctttagttgtacaagaacaaggttccttccaacacattttacgtttgttgaacaccaatgtcgatggtaacattaaaattgtttacgctttgaccactattaagggtgttggtcgtcgttactccaacttggtctgtaagaaggctgatgttgatttgcacaagagagctggtgaattgacccaagaagaattggaaagaattgtccaaatcatgcaaaacccaactcattacaagatcccagcctggttcttaaaccgtcaaaacgacattactgatggtaaggactaccacactttggctaacaacgtcgaatccaagttgagagatgacttggaaagattaaagaagatcagagcccaccgtggtattagacacttctggggtttacgtgttagaggtcaacacaccaagaccactggtagaagaagagcttaa

SEQ ID NO: 8300 - DNA, 441 bp, Artificial Sequence
  Description of Artificial Sequence: Synthetic polynucleotide
atgtctttagttgtacaagaacaaggttccttccaacacattttacgtttgttgaacaccaatgtcgatggtaacattaaaattgtttacgctttgaccactattaagggtgttggtcgtcgttactccaacttggtctgtaagaaggctgatgttgatttgcacaagagagctggtgaattgacccaagaagaattggaaagaattgtccaaatcatgcaaaacccaactcattacaagatcccagcctggttcttaaaccgtcaaaacgacattactgatggtaaggactaccacactttggctaacaacgtcgaatccaagttgagagatgacttggaaagattaaagaagatcagagcccaccgtggtattagacacttctggggtttacgtgttagaggtcaacacaccaagaccactggtagaagaagagcttga

SEQ ID NO: 8301 - DNA, 861 bp, Saccharomyces cerevisiae
atgacgataaaaagaaatttggtgaaaactttacaatctatacgctaccaagctaccactgccaccgcacatgcagaatccacgttaaaccctctgccaaacgcagccattcctcccaaatacgccttagttaccgttcgctcctttccatcattagaaccattgacatttgtgccggtccccacatcaactgtagctgctccattaaggcgtgatatactatggagagccgtagtttatgaaaacgataatagaagagtaggcgcctcaaatcctcccgggagaagtgaaaacgggttttccagacgtaaattgatgccccaaaagggttctggtagggcaagagtcggggatgctaactctccaacaagacataatggtggtagggcattggcaagaactgcaccaaacgactatactacagagctaccatccaaggtttattccatggctttcaacaacgctttgagccaccaatataaaagtggaaagttgtttgttattggtggtgaaaaggtcgacttaatatctcccacaccagaactcgacttgaacaggctggatcttgtgaatacaaacacagttgagggcaaagagatttttgagggcgaagtcatcttcagaaaattcttggaggaatttcaacttaaaggtaagagattacttttcattacagacaagactagggaagggctgataaagagttctgatccatacaaacaaaaagtagatgttatacagaaagaacttgttgaggtaaatgacatactaagagcccaagctgtttttatcgaattggaagctcttgaatatctagcaatggcccatcagaaagaaatccttcactccgtgtctaactga

SEQ ID NO: 8302 - DNA, 861 bp, Artificial Sequence
  Description of Artificial Sequence: Synthetic polynucleotide
atgacgataaaaagaaatttggtgaaaactttacaatctatacgctaccaagctaccactgccaccgcacatgcagaatccacgttaaaccctttaccaaacgcagccattcctcccaaatacgccttagttaccgttcgctcctttccatctttagaaccattgacatttgtgccggtccccacatctactgtagctgctccattaaggcgtgatatattatggagagccgtagtttatgaaaacgataatagaagagtaggcgcctctaatcctcccgggagaagtgaaaacgggttttccagacgtaaattgatgccccaaaagggttctggtagggcaagagtcggggatgctaactctccaacaagacataatggtggtagggcattggcaagaactgcaccaaacgactatactacagagttaccatccaaggtttattccatggctttcaacaacgctttgagccaccaatataaaagtggaaagttgtttgttattggtggtgaaaaggtcgacttaatatctcccacaccagaactcgacttgaacaggttagatcttgtgaatacaaacacagttgagggcaaagagatttttgagggcgaagtcatcttcagaaaattcttggaggaatttcaacttaaaggtaagagattacttttcattacagacaagactagggaagggttgataaagagttctgatccatacaaacaaaaagtagatgttatacagaaagaacttgttgaggtaaatgacatattaagagcccaagctgtttttatcgaattggaagctcttgaatatttggcaatggcccatcagaaagaaatccttcactccgtgtctaactga

SEQ ID NO: 8303 - DNA, 411 bp, Saccharomyces cerevisiae
atgggtagagttagaaccaagaccgtcaagcgtgcttctaaggctttgattgaacgttactatccaaagttgactttggatttccaaaccaacaagagactttgtgatgaaatcgccactatccaatccaagagattgagaaacaagattgctggttacaccacccatttgatgaagagaatccaaaagggtccagttagaggtatctctttcaaattgcaagaagaagaaagagaaagaaaggaccaatacgtcccagaagtctctgctttggacttgtctcgttctaacggtgttttgaacgttgacaaccaaacttctgacttggttaaatctttgggtttgaagttgccattatctgttatcaacgtttctgcccaaagagacagacgttacagaaagagagtttaa

SEQ ID NO: 8304 - DNA, 411 bp, Artificial Sequence
  Description of Artificial Sequence: Synthetic polynucleotide
atgggtagagttagaaccaagaccgtcaagcgtgcttctaaggctttgattgaacgttactatccaaagttgactttggatttccaaaccaacaagagactttgtgatgaaatcgccactatccaatccaagagattgagaaacaagattgctggttacaccacccatttgatgaagagaatccaaaagggtccagttagaggtatctctttcaaattgcaagaagaagaaagagaaagaaaggaccaatacgtcccagaagtctctgctttggacttgtctcgttctaacggtgttttgaacgttgacaaccaaacttctgacttggttaaatctttgggtttgaagttgccattatctgttatcaacgtttctgcccaaagagacagacgttacagaaagagagtttga

SEQ ID NO: 8305 - DNA, 1671 bp, Saccharomyces cerevisiae
atggatggtgcgttgataaattccgttttatacgtgagtccacgcaatggtgcacattattttgttgaactcactgagaaacatctattggcgtttgagatgctcaattccatgtgtctcttagaaaattatgatcatgtgctgttgtttctggagtgccagttcggcaaatctcacaatttggctgttatcccgttcgatatcatattagttcttttcacgttatcgactttatctgaatattataaggagccgatattgagggcaaatgatccatataacacgtccagggaaactttaagtaggagagctttgaaactattgcagaaatatctggcgattctgaaagagtttgattctgagcaatacaatttgtatgacttggagttgttgcgatgccagtttttcttggcaatcgatacgttgacaccaaaaaagcaaaagtggggtttcgatagatttaggagaacgaaatctgaaagtggtgtaacatataggcaaaatgctagtgtagatcccgagttggatcaggctaaaacttttaaaaatccttacaggtcgtatattagttgtcttgagcaaagaaataccatattgggcaatcgcttattgaatttgaaactgaatgaacctggagaatttattaacatgattttatggacattgtctaactcgctgcaagaaagcacacctctgttcctatcaagccatgagatttggatgcccttacttgaaatactcattgatctgtttagttgtagacaagattatttcatacagcatgaagtcgcccaaaatgtaagcaaatccttgttcgttcaacgcttatctgagagtccgttagcagttttttttgaatctttaaatacaaggaattttgcgaataggttttccgaatatgtatttctcaattgtgattacaaactgccatccgacaattatgcaacgccggttcatcccgtatataatggtgaaaacacaattgttgatacgtatattcccacaattaaatgtagtcctttgtacaaatcacaaaaatcattagctttgcggaggaaactgattgggtcatgtttcaaactattactaagagttccagatggacatagattgattactccgagaatagttgcagatgatgttatccaggggatctcacggacgttggcttcttttaatgatatcctgcagttcaaaaagttttttatgactgaaaatctgtcgcaagagtcttattttatacccctattagctgaaggtaccctttctgagatactcaaagacacacaggaatgtgtcgttattttaacgctagtcgaaaatttatcagatggcgtttcattttgcaacgaagttatcggtttggttaaatcaaaatgttttgcttttaccgagcaatgtagccaagcttcgtatgaagaagccgttttgaatattgaaaagtgtgacgtctgcctactggtcctactacgatatcttctgcatttgatcgggaccgaagcgatattagacgctaaggaacagttagaaatgttacatgcgattgagaaaaatgattcagggaggcgacagtgggccaaggcgcttaacttaggaaatgatccgcctttattgtatcccatagtctcccaaatgtttggcgttcatgataaaagtgtaattatagaataa

SEQ ID NO: 8306 - DNA, 1671 bp, Artificial Sequence
  Description of Artificial Sequence: Synthetic polynucleotide
atggatggtgcgttgataaattccgttttatacgtgagtccacgcaatggtgcacattattttgttgaactcactgagaaacatcttttggcgtttgagatgctcaattccatgtgtctcttagaaaattatgatcatgtgttattgtttttggagtgccagttcggcaaatctcacaatttggctgttatcccgttcgatatcatattagttcttttcacgttatctactttatctgaatattataaggagccgatattgagggcaaatgatccatataacacgtccagggaaactttaagtaggagagctttgaaacttttgcagaaatatttggcgattttgaaagagtttgattctgagcaatacaatttgtatgacttggagttgttgagatgccagtttttcttggcaatcgatacgttgacaccaaaaaagcaaaagtggggtttcgatagatttaggagaacgaaatctgaaagtggtgtaacatataggcaaaatgctagtgtagatcccgagttggatcaggctaaaacttttaaaaatccttacaggagttatattagttgtcttgagcaaagaaataccatattgggcaatcgcttattgaatttgaaattgaatgaacctggagaatttattaacatgattttatggacattgtctaactctttacaagaaagcacacctcttttcttatccagccatgagatttggatgcccttacttgaaatactcattgatttatttagttgtagacaagattatttcatacagcatgaagtcgcccaaaatgtaagcaaatccttgttcgttcaacgcttatctgagagtccgttagcagttttttttgaatctttaaatacaaggaattttgcgaataggttttccgaatatgtatttctcaattgtgattacaaattaccatccgacaattatgcaacgccggttcatcccgtatataatggtgaaaacacaattgttgatacgtatattcccacaattaaatgtagtcctttgtacaaatctcaaaaatctttagctttgagaaggaaattgattgggtcctgtttcaaattattattaagagttccagatggacatagattgattactccgagaatagttgcagatgatgttatccaggggatcagtaggacgttggcttcttttaatgatatcttacagttcaaaaagttttttatgactgaaaatttatctcaagagtcttattttatacccttattagctgaaggtaccctttctgagatactcaaagacacacaggaatgtgtcgttattttaacgttagtcgaaaatttaagtgatggcgtttctttttgcaacgaagttatcggtttggttaaatctaaatgttttgcttttaccgagcaatgtagccaagcttcttatgaagaagccgttttgaatattgaaaagtgtgacgtctgcttattggtcttgttaagatatcttttacatttgatcgggaccgaagcgatattagacgctaaggaacagttagaaatgttacatgcgattgagaaaaatgattctgggaggaggcagtgggccaaggcgcttaacttaggaaatgatccgcctttattgtatcccatagtctcccaaatgtttggcgttcatgataaaagtgtaattatagaatga

SEQ ID NO: 8307 - DNA, 564 bp, Saccharomyces cerevisiae
atgtctatagcaagttatgcccaagagttgaagttggctttacatcaatatccaaacttccctagtgaaggcattctcttcgaagatttcttacccattttcaggaacccaggtcttttccagaagttgatcgatgctttcaaactgcatttagaagaagcttttccagaagttaaaattgattatatcgtcgggttggaatcccgtgggttcttgttcggaccaactttagctttggccctaggtgttggtttcgttccagtcaggaaggcaggtaagctacctggcgaatgttttaaggctacgtacgaaaaggagtacggttctgatctttttgagatacagaaaaacgctattccagcaggttccaacgttatcattgttgatgacattattgccactggtggttctgctgctgcagccggcgaattagttgaacaactcgaagccaaccttttggaatataactttgttatggagttggatttcttgaaaggcaggagtaagttgaatgctccagtgttcactttactgaacgctcaaaaggaagcgttgaaaaaatga

SEQ ID NO: 8308 - DNA, 564 bp, Artificial Sequence
  Description of Artificial Sequence: Synthetic polynucleotide
atgtctatagcaagttatgcccaagagttgaagttggctttacatcaatatccaaacttccctagtgaaggcattctcttcgaagatttcttacccattttcaggaacccaggtcttttccagaagttgatcgatgctttcaaattgcatttagaagaagcttttccagaagttaaaattgattatatcgtcgggttggaatcccgtgggttcttgttcggaccaactttagctttggcccttggtgttggtttcgttccagtcaggaaggcaggtaagttacctggcgaatgttttaaggctacgtacgaaaaggagtacggttctgatctttttgagatacagaaaaacgctattccagcaggttccaacgttatcattgttgatgacattattgccactggtggttctgctgctgcagccggcgaattagttgaacaactcgaagccaaccttttggaatataactttgttatggagttggatttcttgaaaggcaggagtaagttgaatgctccagtgttcactttattaaacgctcaaaaggaagcgttgaaaaaatga

SEQ ID NO: 8309 - DNA, 1080 bp, Saccharomyces cerevisiae
atgtggtgcatgagaagattgccaacaaattcagttatgacggtggctcgaaagagaaagcaaactacgatcgaagacttctttggtacaaagaaaagcactaatgaggcgcccaataagaaaggtaaatcgggcgctactttcatgaccataacaaatggcgcagctatcaagacagagacaaaggcggtcgcaaaggaggcaaacacggacaaatatcctgctaattcaaatgcaaaagatgtatattcgaagaacttgagcagcaatttacgtacactactgtcgctggagctagaaacgattgatgattcgtggtttccacatttaatggatgaatttaaaaagccatattttgtaaagttgaaacagtttgtcactaaagagcaagctgatcatacagtatttccgcctgcaaaggatatttactcatggaccaggctaacgccttttaataaagttaaagtcgtgattatcggtcaagatccctaccacaactttaatcaggcgcatggcttggcttttagcgtcaaaccccctacaccagcaccaccgtcattaaagaacatatataaggaactgaagcaagagtatcctgattttgttgaagataataaagtgggagatttaactcactgggcttcacaaggggttttattgcttaatacctcgttaactgtaagagcacataatgcaaactcgcattctaagcatggttgggaaacttttacaaaaagggtagttcagttgttgatccaggacagagaggccgacggtaagagtttagtattcctcttatgggggaacaatgctatcaaattagtagagtctctgttgggatctacttccgttggaagcggtagtaagtaccctaatatcatggtgatgaagtcagtgcatccgtctccattaagtgcaagtagaggattttttggtaccaaccatttcaaaatgataaacgattggctatacaatacccgcggagagaaaatgatagactggagtgttgttcctggaacgtcattaagagaagttcaggaggcaaatgctcgcttagagtcagaatcaaaggacccttga

SEQ ID NO: 8310 - DNA, 1080 bp, Artificial Sequence
  Description of Artificial Sequence: Synthetic polynucleotide
atgtggtgcatgagaagattgccaacaaattctgttatgacggtggctagaaagagaaagcaaactacgatcgaagacttctttggtacaaagaaaagcactaatgaggcgcccaataagaaaggtaaatctggcgctactttcatgaccataacaaatggcgcagctatcaagacagagacaaaggcggtcgcaaaggaggcaaacacggacaaatatcctgctaatagtaatgcaaaagatgtatattccaagaacttgagcagcaatttacgtacattattatctttggagttagaaacgattgatgattcttggtttccacatttaatggatgaatttaaaaagccatattttgtaaagttgaaacagtttgtcactaaagagcaagctgatcatacagtatttccgcctgcaaaggatatttactcttggaccaggttgacgccttttaataaagttaaagtcgtgattatcggtcaagatccctaccacaactttaatcaggcgcatggcttggcttttagcgtcaaaccccctacaccagcaccaccgtctttaaagaacatatataaggaattgaagcaagagtatcctgattttgttgaagataataaagtgggagatttaactcactgggcttctcaaggggttttattgcttaataccagtttaactgtaagagcacataatgcaaactctcattctaagcatggttgggaaacttttacaaaaagggtagttcagttgttgatccaggacagagaggccgacggtaagagtttagtattcctcttatgggggaacaatgctatcaaattagtagagtctttgttgggatctacttccgttggaagcggtagtaagtaccctaatatcatggtgatgaagtctgtgcatccgtctccattaagtgcaagtagaggattttttggtaccaaccatttcaaaatgataaacgattggttatacaatacccgcggagagaaaatgatagactggagtgttgttcctggaacgtctttaagagaagttcaggaggcaaatgctcgcttagagagtgaatccaaggacccttga

SEQ ID NO: 8311 - DNA, 1995 bp, Saccharomyces cerevisiae
atggtcacgactccattgcattcctcgccgaaaagcagtctgaaatcttcaacgacctcactgcgctcagtacatactcagtctggtcgtatggggcctagtgagcctaagcacagaacaaccaaatcctggtctatatggggaggtaatgacgaggaagaaccggagttatctaataaaaataaaggaaaggaaaccgcccaagacaacagtcaagaaaatgacaatgtttcaaatgagggaacacgcttgcacgataatcaacaaacaacgattttaaaggaaaccaccaggatcgagaagggtgagaaggacaaaaaagacagaaatgcagctatagtagaaaaaaacacaagaccacgagcatggccattcttttggggccgtaacaaaaaagatccggagccgacgcataacattcccactgatgcggataataacactttatcacgtttagcaaatagtctaaatccggctcctctaaccaacacttacataccttataaacctgatgctatattgatcagagataaaggtgtcaaaactgctaagaaattaacagatgacataggcaatcagtttcctaacattgttgtaccaagtttcgatattttaccgaaacaaaccatatggaatacagtcacatccacaatttggaagtggaagactgaatactgggatagaagaccttcatcaagggtacgagagggggaagaacaggtgcagcactcacaaaatcagttaaaagaggaaacaaacacagttgcaaacgaggcaaaagatgaggagcggttggaacacaacagaggatctctatttagggttgatccatggaaaaaaataaaccttctatcagattaccaatctaggcccatcagagttctcattgtcggcgttcatgggttctttccaacaaaaattattagaccgtttattggtgagccaacgggtacatctaccaagtttgtcacagaagctgaggaaatagtgaaggaatattttgatcaacataaagtacccattgaaataagcaagatcgctcttgaaagagaaggagagatatttgatagagtagatttcttctacgaagttatgaagcattggagcaaagaaataaacaattctgattttatttattttgttagccattcgcaggggtgtccggtaaccattatgcttttagcgaagctgatcaaaaacggcataataaaccttgataattctcaatttttcaacgatgaaattcagttttgttcgtccaaaaaaattatctcggtcttggccatggcaggtatcaataatggtccattctacggtgcagatcaaactttgtttgttcgtgcttaccagacgattgaaaaagactcattgagggagttattcgagtttcaaaagtttgattccaaacaatcgcaaagcttcatagaaggcctaagaacaatcatatcaaataacgttaagattacatttgtgggatccatcaatgatcaactggtccctctgtattcatccacatgtctttttgccaaccatcccaatatatttcgggccatttttattgatagaggatcacaaactccagcatttatcactcgcatagttaaaattgctggttcactcttaaacctgggttataacgatcacggaatcataaaggaaataagcggatctctggcgggcaccctgacaggaggtggtcactctaccatttataatgagaaacaggtctaccatctgggcatcaaatttgcattagaaacaaccgatttgtccgaaatgtatccaattgagtactcaccatataaattgtctgagttaggagccaacccctatcgtctgccatggtgtatgaggggattgatgtacgagtccaacaagcatttcagtaatgaagaaatcaagatgttgtttaaggaatttgaggaatgggagcctgagacaaagcaattgaaggacataaaaaacaggcttaatggtttgaaatatcgactctga

SEQ ID NO: 8312 - DNA, 1995 bp, Artificial Sequence
  Description of Artificial Sequence: Synthetic polynucleotide
atggtcacgactccattgcattcctctccgaaaagcagtttgaaatcttctacgacctccttacgcagcgtacatactcagtctggtcgtatggggcctagtgagcctaagcacagaacaaccaaatcctggtctatatggggaggtaatgacgaggaagaaccggagttatctaataaaaataaaggaaaggaaaccgcccaagacaacagtcaagaaaatgacaatgtttctaatgagggaacacgcttgcacgataatcaacaaacaacgattttaaaggaaaccaccaggatcgagaagggtgagaaggacaaaaaagacagaaatgcagctatagtagaaaaaaacacaagaccaagagcatggccattcttttggggccgtaacaaaaaagatccggagccgacgcataacattcccactgatgcggataataacactttatctcgtttagcaaatagtttgaatccggctcctttgaccaacacttacataccttataaacctgatgctatattgatcagagataaaggtgtcaaaactgctaagaaattaacagatgacataggcaatcagtttcctaacattgttgtaccaagtttcgatattttaccgaaacaaaccatatggaatacagtcacatccacaatttggaagtggaagactgaatactgggatagaagaccttcttccagggtaagagagggggaagaacaggtgcagcactctcaaaatcagttaaaagaggaaacaaacacagttgcaaacgaggcaaaagatgaggagagattggaacacaacagaggatctttatttagggttgatccatggaaaaaaataaaccttttaagtgattaccaatctaggcccatcagagttctcattgtcggcgttcatgggttctttccaacaaaaattattagaccgtttattggtgagccaacgggtacatctaccaagtttgtcacagaagctgaggaaatagtgaaggaatattttgatcaacataaagtacccattgaaataagcaagatcgctcttgaaagagaaggagagatatttgatagagtagatttcttctacgaagttatgaagcattggagcaaagaaataaacaattctgattttatttattttgttagccattctcaggggtgtccggtaaccattatgcttttagcgaagttaatcaaaaacggcataataaaccttgataattctcaatttttcaacgatgaaattcagttttgttcttccaaaaaaattatctctgtcttggccatggcaggtatcaataatggtccattctacggtgcagatcaaactttgtttgttcgtgcttaccagacgattgaaaaagactctttgagggagttattcgagtttcaaaagtttgattccaaacaatctcaaagcttcatagaaggcttaagaacaatcatatccaataacgttaagattacatttgtgggatccatcaatgatcaattggtccctttatattcttccacatgtctttttgccaaccatcccaatatatttagagccatttttattgatagaggatctcaaactccagcatttatcactcgcatagttaaaattgctggttctctcttaaacttgggttataacgatcacggaatcataaaggaaataagcggatctttagcgggcaccttaacaggaggtggtcactctaccatttataatgagaaacaggtctaccatttaggcatcaaatttgcattagaaacaaccgatttgtccgaaatgtatccaattgagtactctccatataaattgtctgagttaggagccaacccctatcgtttgccatggtgtatgaggggattgatgtacgagtccaacaagcatttcagtaatgaagaaatcaagatgttgtttaaggaatttgaggaatgggagcctgagacaaagcaattgaaggacataaaaaacaggcttaatggtttgaaatataggctctga

SEQ ID NO: 8313 - DNA, 999 bp, Saccharomyces cerevisiae
atgaagtggtgtagcacatacattattatatggctcgccattatattccataagtttcagaagtccacagccactgcatcccataatatagatgatattctacagttgaaagatgacaccggtgtgataacagtgaccgctgacaactacccactgttaagccgtggtgtcccaggttacttcaatatcttgtacatcacaatgaggggtacaaacagtaacggcatgagttgccaactatgccatgattttgaaaaaacctatcacgcagtggccgatgtaattcgctcgcaggccccacaatcactaaatttgttttttacagtggatgtcaacgaagtaccacaattggtcaaggatttaaagttgcaaaacgtacctcatcttgtggtatatccgccagcagaaagtaacaagcaatctcagttcgaatggaaaacatcacctttttatcagtactctttggtacctgaaaatgcggaaaacactttacaatttggcgattttctggctaaaatactcaatatttcgataacggttcctcaagccttcaacgttcaggaatttgtttattattttgttgcgtgtatggtagttttcatctttattaagaaagtaattctaccgaaggtaactaataaatggaagcttttctccatgatattgtcattaggcatacttctaccaagtattactggttacaagtttgtggaaatgaatgctatccctttcattgcacgtgatgctaagaatcgtataatgtattttagcggtggttcaggatggcagttcggtatagagattttttctgtatcattgatgtacattgtgatgtccgcactgtctgtgcttttaatttatgtgcccaaaatctcgtgtgtaagtgaaaaaatgagaggactattgtcgtcatttttggcatgtgttctattctacttcttttcttatttcattagttgttatttgataaagaatccagggtacccaattgttttttaa

SEQ ID NO: 8314 - DNA, 999 bp, Artificial Sequence
  Description of Artificial Sequence: Synthetic polynucleotide
atgaagtggtgtagcacatacattattatatggctcgccattatattccataagtttcagaagtccacagccactgcatcccataatatagatgatattttacagttgaaagatgacaccggtgtgataacagtgaccgctgacaactacccattattaagccgtggtgtcccaggttacttcaatatcttgtacatcacaatgaggggtacaaacagtaacggcatgagttgccaattatgccatgattttgaaaaaacctatcacgcagtggccgatgtaattcgctctcaggccccacaatctttgaatttgttttttacagtggatgtcaacgaagtaccacaattggtcaaggatttaaagttgcaaaacgtacctcatcttgtggtatatccgccagcagaaagtaacaagcaatctcagttcgaatggaaaacatctcctttttatcagtactctttggtacctgaaaatgcggaaaacactttacaatttggcgattttttggctaaaatactcaatatttctataacggttcctcaagccttcaacgttcaggaatttgtttattattttgttgcgtgtatggtagttttcatctttattaagaaagtaattttaccgaaggtaactaataaatggaagcttttctccatgatattgtctttaggcatacttttaccaagtattactggttacaagtttgtggaaatgaatgctatccctttcattgcacgtgatgctaagaatcgtataatgtattttagcggtggttctggatggcagttcggtatagagattttttctgtatctttgatgtacattgtgatgtccgcattatctgtgcttttaatttatgtgcccaaaatcagttgtgtaagtgaaaaaatgagaggattattgagttcttttttggcatgtgttttgttctacttcttttcttatttcattagttgttatttgataaagaatccagggtacccaattgttttttga

SEQ ID NO: 8315 - DNA, 1182 bp, Saccharomyces cerevisiae
atggtgtcgaaggatcaaacgtcctttaataagaggtggaccttgggtcttctgatgttgggtctagtcattattttgtgggttttatcgtccttcctgataaatttgatcttcgaggatgactcgtatagaaaaccattctttatcacgtacaccaatactgccgcctttatcttttatctttttccaactgcaaaggccgttgtggtgaattacaaggacacaggccgtgcaaacgttcaccgcgaactaattatggaggaagaaggtactggtagtgatagcaatcgctcggttgatatgactagcccactgcttacaaaccttgaagcaggcacgcatgccaaccaaaagaagaggctaacgttatatgaaacaatcaagttaagtgctgagttctgcatactttggttcacagctaaccttgtgaccaatgcctcgctggcattcacatcggtggcatcgcagacaatcctctccactacttcttcctttttcaccttgttcataggtgctatttgtcatgttgaatcgttgagcaagtccaaagtactcgggtcgttcatttcctttgtaggcataatcatggtcaccaaatcagattctcatcagcgctaccaacgccatatcgcggacgttagtggtgatgataacgatgccgtgcaagttctgataggcaacttgttggcacttgcaggtgctgtactttacggtgtctacagtactttattgaagagagaagtcggagatgagactcgtgttaacatgaagattttttttggctttgttggtctctttaatttactttttctatggccatcactgattgtattggacttttttggctgggaaccattctctctgcccaaagatcctaaagttgtggtaataatcttcgtcaattgtctcatcacatttgttagcgacttttgttgggcaaaggctatgttactaacgagtcctttaaccgtcaccgtaggattgagcataacgatacccctagcaatgtttggtgatgtaatctttaagcacaaaaccatgtctgcgctctatttatttggtgctaccctcatcttaggctcatttttcatcattaacaaaagctctgaggaggaacattttgagaactcaataacggctagcaattacgaatcagtggaggtgccagcagcaaacaactga

SEQ ID NO: 8316 - DNA, 1182 bp, Artificial Sequence
  Description of Artificial Sequence: Synthetic polynucleotide
atggtgagcaaggatcaaacgtcctttaataagaggtggaccttgggtcttttgatgttgggtttggtcattattttgtgggttttatcttccttcttgataaatttgatcttcgaggatgactcttatagaaaaccattctttatcacgtacaccaatactgccgcctttatcttttatctttttccaactgcaaaggccgttgtggtgaattacaaggacacaggccgtgcaaacgttcaccgcgaattgattatggaggaagaaggtactggtagtgatagcaatcgctctgttgatatgactagcccattacttacaaaccttgaagcaggcacgcatgccaaccaaaagaagaggttgacgttatatgaaacaatcaagttaagtgctgagttctgcatactttggttcacagctaaccttgtgaccaatgccagtttagcattcacatctgtggcatcccagacaatcctctccactacttcttcctttttcaccttgttcataggtgctatttgtcatgttgaatctttgagcaagtccaaagtactcgggtctttcatttcctttgtaggcataatcatggtcaccaaatctgattctcatcagcgctaccaacgccatatcgcggacgttagtggtgatgataacgatgccgtgcaagttttgataggcaacttgttggcacttgcaggtgctgtactttacggtgtctacagtactttattgaagagagaagtcggagatgagactcgtgttaacatgaagattttttttggctttgttggtctctttaatttactttttttatggccatctttgattgtattggacttttttggctgggaaccattctctttacccaaagatcctaaagttgtggtaataatcttcgtcaattgtctcatcacatttgttagcgacttttgttgggcaaaggctatgttattgacgagtcctttaaccgtcaccgtaggattgagcataacgatacccttggcaatgtttggtgatgtaatctttaagcacaaaaccatgtctgcgctctatttatttggtgctaccctcatcttaggctcttttttcatcattaacaaaagctctgaggaggaacattttgagaacagcataacggctagcaattacgaatctgtggaggtgccagcagcaaacaactga

SEQ ID NO: 8317 - DNA, 1782 bp, Saccharomyces cerevisiae
atgggaacaaataatacatctaataataatggcactacgaagaaaatgtccctagaagaatttctagggaacgacactttaggcgagtcagtatgggatgaggaagatattaatttggatgctataagcaatactacgaatattgacatcttgaaacaaaccaaggcaggcgaacatcaacgtgatggtcaccaacagcacccacacggtggtcatggacccatgaacagatcacgtttttctaatgcagggccttttggtggtggtagcatgggggactttgcaaatcatcaccacccgctgcagcatcagcaaggtcctccttatattgtgaagttttctgatttaccaccgagattttccaactttgacattgaagatctttttcaagcaaagtttaccaagtttattaagttcaaactgttttgggagataaataaaaatccaagtatttctactttgaaatcggggtcaatctttgatcaaaatttcaaacgtgactcgaaggtagcatttgtcgagttatatacatcccgtgatatggacaaaattttgaactattggaccactcctttgaaggaaatttaccacattacaacagcgcccgcagaattcgaagattttaaggattacagcacgaaggtgaaattattaacagaccctaaagacgatgctggcaaaccattcattactaagactcagcggtcaaaatccaatccttttggaagtgctaaaccggttgatacgcaatcgaagattttggacattgaagaaaaaatggaaaatttacacgtggaagatacaacaaccctgagggcatcattaatccctagtagtgattctatggcaaccactgcaacaggcagcaagatcacaatcttgaaaaagcagacacctacagaggaggaatcacattctgcaaccccaactcccaaacctttaagttactctgaagtagttgagagatctgtggtcaatgaaacttccaagaaaggaactccattaagcaagcttgactcaccagctcttgaactacaatctaagcccgataaatcggacgagttcaaaggtggcgatgaacaaggctttgagaaaggtggcgacgataaagctcaattagatgtctcaaatgataaagataaaggttcagaaaccgatgttgataaacagttcactttcaagaatgtggaaagggaacatagtatgagcagaaccaaatataacggaaaccataataacaataatggcaattttagagggagtaatagatatcgtggaggccccaatggcagcagttataaaggtgggcataacaatcgtggtaatcgcggcggatatcgtggtggcagctcatacaacaacaacaacaacaacactaatgataataataataataataataatagtagtagtaataataataacggttcaagatatcatgatcgacaaaacaatgaagaagggttaacctcggattcatctttagatgcctcaggaaataaaaagaatgatttcacgaactcaacatccaatacacaacaatattccattttcaaaccagcaagtgggttccttggccaaggtaataatgattctataaggaacaatggacgcggtaactataacagcagcggtatgaatggaggttcgagaggaagaggatttggcagaggaaggggatttggcagaggcgcatataacaatcgaggtagtcgtggtggacgtggaagcagcggtaactactccaactacaataacagaacaacagacatgcctttatga

SEQ ID NO: 8318 - DNA, 1782 bp, Artificial Sequence
  Description of Artificial Sequence: Synthetic polynucleotide
atgggaacaaataatacatctaataataatggcactacgaagaaaatgtccttagaagaatttttggggaacgacactttaggcgagagtgtatgggatgaggaagatattaatttggatgctataagcaatactacgaatattgacatcttgaaacaaaccaaggcaggcgaacatcaacgtgatggtcaccaacagcacccacacggtggtcatggacccatgaacagatctcgtttttctaatgcagggccttttggtggtggtagcatgggggactttgcaaatcatcaccacccgttgcagcatcagcaaggtcctccttatattgtgaagttttctgatttaccaccgagattttccaactttgacattgaagatctttttcaagcaaagtttaccaagtttattaagttcaaattattttgggagataaataaaaatccaagtatttctactttgaaaagtgggtctatctttgatcaaaatttcaaacgtgactccaaggtagcatttgtcgagttatatacatcccgtgatatggacaaaattttgaactattggaccactcctttgaaggaaatttaccacattacaacagcgcccgcagaattcgaagattttaaggattacagcacgaaggtgaaattattaacagaccctaaagacgatgctggcaaaccattcattactaagactcagagaagtaaatccaatccttttggaagtgctaaaccggttgatacgcaatccaagattttggacattgaagaaaaaatggaaaatttacacgtggaagatacaacaaccttaagggcatctttaatccctagtagtgattctatggcaaccactgcaacaggcagcaagatcacaatcttgaaaaagcagacacctacagaggaggaaagtcattctgcaaccccaactcccaaacctttaagttactctgaagtagttgagagatctgtggtcaatgaaacttccaagaaaggaactccattaagcaagcttgactctccagctcttgaattacaatctaagcccgataaaagtgacgagttcaaaggtggcgatgaacaaggctttgagaaaggtggcgacgataaagctcaattagatgtctccaatgataaagataaaggttctgaaaccgatgttgataaacagttcactttcaagaatgtggaaagggaacatagtatgagcagaaccaaatataacggaaaccataataacaataatggcaattttagagggagtaatagatatcgtggaggccccaatggcagcagttataaaggtgggcataacaatcgtggtaatcgcggcggatatcgtggtggcagctcttacaacaacaacaacaacaacactaatgataataataataataataataatagtagtagtaataataataacggttccagatatcatgatagacaaaacaatgaagaagggttaacctctgattcttctttagatgccagtggaaataaaaagaatgatttcacgaactccacatccaatacacaacaatattccattttcaaaccagcaagtgggttccttggccaaggtaataatgattctataaggaacaatggacgcggtaactataacagcagcggtatgaatggaggttccagaggaagaggatttggcagaggaaggggatttggcagaggcgcatataacaatagaggtagtcgtggtggacgtggaagcagcggtaactactccaactacaataacagaacaacagacatgcctttatga

SEQ ID NO: 8319 - DNA, 2079 bp, Saccharomyces cerevisiae
atgggtaattcaagttcaaaatcttcgaaaaaggattcacattcgaattcctcctcgagaaatcctcgtcctcaagtgtcgagaaccgagacttcccattctgtgaagtctgcaaaatcaaataaatcttcaagatcaaggcgatctcttccttcttcgtccactacgaatactaattcaaacgtccctgatccctccactccatcaaagcccaatcttgaggttaatcaccaacgacatagctctcacacgaatcgttaccatttcccatctagctcacactcgcattcaaattctcaaaacgaattgttaactactccttcatcatcctctactaagaggccttctacttctagaagatcaagttataatactaaggctgctgctgatttaccaccttcaatgatccaaatggaacccaagtcacccattttaaaaacaaacaatagtagcacacacgtatccaagcataaatcttcatactcatctacctattatgagaacgccttaaccgatgatgacaatgatgataaagacaacgacatctcgcacactaaaaggttttctagatcttcgaattctcgtccgtccagtataagaagcggatcagtgtcaagaaggaaatcagatgtgacccatgaagagcctaacaatggatcatactcctctaacaatcaggagaattatctcgttcaggcattaacccggtcaaattctcatgcatcttcgctacacagtaggaaatcttcgtttggatcagatggtaataccgcatacagcaccccattaaactctccaggcttgtccaagctaacagatcactctggtgaatactttacctctaattcaacctcctcattgaatcaccattcaagtcgcgatatttacccgagcaaacacatcagcaatgatgatgacattgaaaattcatctcaattgagtaatatccatgcatcaatggaaaatgttaatgataaaaataataatataacagatagcaaaaaagatccgaatgaggaatttaatgatataatgcaatcttccggaaacaaaaacgctccaaaaaaattcaaaaagcctatcgatattgatgaaactatccaaaaattactggatgcgggctacgctgctaagagaacaaaaaatgtttgtttgaagaacaatgaaattttacagatttgcatcaaggctcgtgaaatctttctttctcaaccttccttattagaattatcacctcctgtaaaaattgtaggcgacgttcatggccaatatggggatctcttaaggctttttaccaaatgtgggttcccaccatcctcgaactatttattcctaggtgattatgtggaccgtggtaaacagtcactggagactattttactattgttttgttacaaaataaaataccctgaaaatttctttttattgagaggcaaccatgaatgtgctaacgtcacaagggtttatggattttatgatgaatgtaaacgtcgttgtaacatcaagatctggaagacattcatcgatacttttaatacattaccattagctgctatcgtagccggaaagattttttgtgttcatggtggattgtcgccagttttaaattctatggatgaaatcagacatgtagttaggcctactgatgtaccagattttggcttaattaatgatcttttgtggtccgatcccacagattcacccaacgaatgggaggataacgaacgtggtgtaagttactgttataataaggtggcaattaacaaattcttgaacaagtttgggtttgatttggtttgtagagctcacatggttgtggaagacggttatgaatttttcaatgatagaagtctcgttacggtgttttccgcgccaaattattgtggtgaatttgataattggggggctgtaatgagcgtcagcgaaggtttattgtgctcttttgaattgttagatccactagatagtgcagctttgaagcaagttatgaagaaaggtagacaggaaagaaaactggctaatcaacaacagcaaatgatggaaacaagcatcacaaatgataacgaatctcaacagtaa

SEQ ID NO: 8320 - DNA, 2079 bp, Artificial Sequence
  Description of Artificial Sequence: Synthetic polynucleotide
atgggtaatagtagttctaaatcttctaaaaaggattctcattctaattcctccagcagaaatcctcgtcctcaagtgtccagaaccgagacttcccattctgtgaagtctgcaaaatctaataaatcttctagaagtaggcgttctcttccttcttcttccactacgaatactaatagcaacgtccctgatccctccactccatctaagcccaatcttgaggttaatcaccaaagacatagctctcacacgaatcgttaccatttcccatctagctctcactctcattctaattctcaaaacgaattgttaactactccttcttcttcctctactaagaggccttctacttctagaagaagtagttataatactaaggctgctgctgatttaccaccttctatgatccaaatggaacccaagtctcccattttaaaaacaaacaatagtagcacacacgtatccaagcataaatcttcctactcttctacctattatgagaacgccttaaccgatgatgacaatgatgataaagacaacgacatcagccacactaaaaggttttctagatcttccaattctcgtccgtccagtataagaagcggatctgtgtccagaaggaaatctgatgtgacccatgaagagcctaacaatggatcttactcctctaacaatcaggagaattatctcgttcaggcattaaccagatctaattctcatgcatcttctttacacagtaggaaatcttcttttggaagtgatggtaataccgcatacagcaccccattaaactctccaggcttgtccaagttaacagatcactctggtgaatactttacctctaattctacctcctctttgaatcaccattctagtcgcgatatttacccgagcaaacacatcagcaatgatgatgacattgaaaattcttctcaattgagtaatatccatgcatctatggaaaatgttaatgataaaaataataatataacagatagcaaaaaagatccgaatgaggaatttaatgatataatgcaatcttccggaaacaaaaacgctccaaaaaaattcaaaaagcctatcgatattgatgaaactatccaaaaattattagatgcgggctacgctgctaagagaacaaaaaatgtttgtttgaagaacaatgaaattttacagatttgcatcaaggctcgtgaaatctttctttctcaaccttccttattagaattatctcctcctgtaaaaattgtaggcgacgttcatggccaatatggggatctcttaaggctttttaccaaatgtgggttcccaccatccagtaactatttattcttgggtgattatgtggaccgtggtaaacagtctttggagactattttattattgttttgttacaaaataaaataccctgaaaatttctttttattgagaggcaaccatgaatgtgctaacgtcacaagggtttatggattttatgatgaatgtaaacgtcgttgtaacatcaagatctggaagacattcatcgatacttttaatacattaccattagctgctatcgtagccggaaagattttttgtgttcatggtggattgtctccagttttaaattctatggatgaaatcagacatgtagttaggcctactgatgtaccagattttggcttaattaatgatcttttgtggtccgatcccacagattctcccaacgaatgggaggataacgaacgtggtgtaagttactgttataataaggtggcaattaacaaattcttgaacaagtttgggtttgatttggtttgtagagctcacatggttgtggaagacggttatgaatttttcaatgatagaagtctcgttacggtgttttccgcgccaaattattgtggtgaatttgataattggggggctgtaatgagcgtcagcgaaggtttattgtgctcttttgaattgttagatccattagatagtgcagctttgaagcaagttatgaagaaaggtagacaggaaagaaaattggctaatcaacaacagcaaatgatggaaacaagcatcacaaatgataacgaatctcaacagtga

SEQ ID NO: 8321 - DNA, 1041 bp, Saccharomyces cerevisiae
atgaccgaacctcaaggtcctttggacaccatcccgaaagtgaactatccgccaatactgacaatagcaaactatttttccacaaaacaaatgattgaccaagtcatcagtgaggaccaggactacgttacgtggaaattgcaaaacctgcgaacgggtggtacatcaatcaacaaccaattaaataaatatccaaaatacaaataccagaaaaccaggataaatcagcaagacccggactctatcaacaaagtcccagaaaacctgatctttccacaagacattttacaacagcaaacacaaaatagcaattacgaagacaccaataccaacgaagatgaaaatgaaaaacttgcgcaggacgaacaattcaagctcttggtaaccaacttggataaagatcaaactaatcggtttgaagttttccatagaacatccctaaacaaaacccaggtcaaaaaactggctagcacagtagctaatcaaactataagtgaaaatattcgtgtttttctgcaagcggtgggaaaaatatacgctggtgagataatcgaattggccatgattgtgaagaataagtggttgacaagtcaaatgtgcatagagtttgataagaggaccaaaataggctataaattgaaaaaatatctaaaaaaattgactttctccatcatagaaaaccagcaatacaagcaagattatcaatccgatagcgttcccgaagacgaacctgatttctacttcgacgatgaagaagtagacaagcgcgaaactacgctgggcaactcgttgctacagtccaaatccttacagcaatcagaccataattcacaggacttgaagctacaactcatcgagcagtacaataagctcgtcctccaattcaacaaactagatgtaagcatcgagaaatataacaacagtcccttattgcccgaacacatccgtgaggcgtggagactctaccgtctgcagtcggacactttgcctaacgcttactggagaactcaaggagaagggcagggatccatgttcagatag

SEQ ID NO: 8322 - DNA, 1041 bp, Artificial Sequence
  Description of Artificial Sequence: Synthetic polynucleotide
atgaccgaacctcaaggtcctttggacaccatcccgaaagtgaactatccgccaatattaacaatagcaaactatttttccacaaaacaaatgattgaccaagtcatcagtgaggaccaggactacgttacgtggaaattgcaaaacttaagaacgggtggtacatctatcaacaaccaattaaataaatatccaaaatacaaataccagaaaaccaggataaatcagcaagacccggactctatcaacaaagtcccagaaaacttgatctttccacaagacattttacaacagcaaacacaaaatagcaattacgaagacaccaataccaacgaagatgaaaatgaaaaacttgcgcaggacgaacaattcaagctcttggtaaccaacttggataaagatcaaactaatagatttgaagttttccatagaacatccttgaacaaaacccaggtcaaaaaattggctagcacagtagctaatcaaactataagtgaaaatattcgtgtttttttgcaagcggtgggaaaaatatacgctggtgagataatcgaattggccatgattgtgaagaataagtggttgacaagtcaaatgtgcatagagtttgataagaggaccaaaataggctataaattgaaaaaatatttgaaaaaattgactttctccatcatagaaaaccagcaatacaagcaagattatcaatccgatagcgttcccgaagacgaacctgatttctacttcgacgatgaagaagtagacaagcgcgaaactacgttgggcaactctttgttacagtccaaatccttacagcaatctgaccataattctcaggacttgaagttacaactcatcgagcagtacaataagctcgtcctccaattcaacaaattggatgtaagcatcgagaaatataacaacagtcccttattgcccgaacacatccgtgaggcgtggagactctaccgtttgcagagtgacactttgcctaacgcttactggagaactcaaggagaagggcagggatccatgttcagatga

SEQ ID NO: 8323 - DNA, 840 bp, Saccharomyces cerevisiae
atggagataaaccaagcggctgaaaaagaacaggagtatgttcacaaagtgtataatgagatagctccgcatttctcgcaaactagatataagccatggcccatagtgactcagttcttgaagactcgcccaatgggttccatcggtatcgacgtcgggtgtggcaatggaaagtacctcggagtgaaccctgatatatatattatcggttcagatcgctcagatggtcttattgagtgcgccagaggaataaacccatcgtacaacttactggtggcagacgggctgaacttaccacacaaaaacgaaacatttgacttcgccatctcaattgctgtagtgcatcactggtctacaagggagagacgtgttgaggtgatcaggcacgttctatcgaagctacgtcagggcggacaagcattaatatattgttgggctctagaacagggcagctcccgtagaggttaccatgaaggtatggagcaagatgtctttgtcccctgggttcttcccaagagtaaatccaaaccaaaaactaaatcaacgccgcctgctaaagtcaagacaaggccaaagccaaacttaatgaatattcccccaaaggagcgttccgaatacttgcagcgctggaaggaggaacagcaacgcagtaagtctcttgatgataacgacgagaagcaacaacaagatcaagaacaggaaagagaagaggtaaaataccgatactatcacttataccgagagggcgaattggctgaggattgccgccaagctggggctgccgttcatagtgagggcttcgagcgcgacaattggtgggtggtggcccagaagagatga

SEQ ID NO: 8324 - DNA, 840 bp, Artificial Sequence
  Description of Artificial Sequence: Synthetic polynucleotide
atggagataaaccaagcggctgaaaaagaacaggagtatgttcacaaagtgtataatgagatagctccgcatttctctcaaactagatataagccatggcccatagtgactcagttcttgaagactcgcccaatgggttccatcggtatcgacgtcgggtgtggcaatggaaagtacctcggagtgaaccctgatatatatattatcggttctgatcgctctgatggtcttattgagtgcgccagaggaataaacccatcttacaacttattggtggcagacgggttgaacttaccacacaaaaacgaaacatttgacttcgccatctctattgctgtagtgcatcactggtctacaagggagagacgtgttgaggtgatcaggcacgttttatccaagttgcgtcagggcggacaagcattaatatattgttgggctttggaacagggcagctcccgtagaggttaccatgaaggtatggagcaagatgtctttgtcccctgggttcttcccaagagtaaatccaaaccaaaaactaaatctacgccgcctgctaaagtcaagacaaggccaaagccaaacttaatgaatattcccccaaaggagcgttccgaatacttgcagcgctggaaggaggaacagcaacgcagtaagtctcttgatgataacgacgagaagcaacaacaagatcaagaacaggaaagagaagaggtaaaatacagatactatcacttatacagagagggcgaattggctgaggattgccgccaagctggggctgccgttcatagtgagggcttcgagcgcgacaattggtgggtggtggcccagaagagatga

SEQ ID NO: 8325 - DNA, 1755 bp, Saccharomyces cerevisiae
atgccagtagtcaatcatgaggatagtgaatttcacctttcgcacacagaagaggacaagttaaatgagttccaggtcatcacgaatttccccccagaagacttgccagatgtggtgagactgttgaggaaccatggttggcagttagaaccagcattgagccgatatttcgatggagagtggaaaggcgaaccagaccagatgggagagcccactcaaacgtctacacccatggctgagaccttggttcctcccgcgttgggacctagaccgttgttatttacagcctcactgcccgtggtcagaccattgccagcgaacttccgcaatgatttcagaacaattgggctaaatggacgctctaacactgtgtggtccatgtttgaatcttttagttatgatggtaacccctttctttttattttactgttgatccctcggataatcaataggttatctgccacaatattcacgttcttttgcactctattgtccctgcattcgataagtggtggcggtaattcaggaaaacccaagatctccaaggttccaaaggcaccaaccagagaaacccatatcccacttgcagaaatactgggtgacacgaaggacaaggatgcattttgcgaactaaaaagctttaaaccagacatttccttcaatgaggccttgcgtattgcaaaagaagagtttaagtttatgttgctcatcctagtgggcgacacctacgataccgatactgataccgtagatgttaattctaaactactattggaaaagattttgttaaacaagaagactttacagtacttgcgcaagattgataacgacctgattatctatttgaaatgcgtacacgagttggaaccttggctggttgctcgccaactaggtgtcagaaacaccccggagatattcctcattgccaacgtggctaataaggcttcccattcagaaactttgccctcacaaagactctccattctcggcaagctaaaggtcaattcactgaacagattcttgcagtcgttaacaaacgtggtggaaaagtacactccagaattagttgttaataaaactgaaatgcacgagctacgcatgtcaagagaaataaaaaaactgcaggaggatgcgtacaaaaagtcgctagaaatggacagaatcaaagctatagaaaaggaaaagagcttgaaacacgctcaggatttgaaattaaactcaactgctcggcaattaaaatggttaaaggcttgcatcgatgagatacagccgttcgagacaacggggaagcaagctactctgcaatttaggacttctagtggcaaaagattcgtcaagaagttcccctccatgactacactttaccaaatctaccaatccattgggtgtcacatatacctcgcggtatattctagtgaccccgcagaatggtctaacgccctccaggacaaaatcaggcaattatctgcagacgacgatatgctctgctttaaagaaggacaactcgaaactgctactgctaccactatcgaagagctcggccacatcatcaacaacgagcttacctcatttgatctcgaacgtggtaaacttgaattcgactttgaattggtatcgcccttccctaagtatactgtgcatcctaacgagcacatgtcggtggaccaagtgccccagctatggccaaatggcagtcttctagtggaagcactggatgaagaagatgaagaagatgaggaaaatgaagaacaatga

SEQ ID NO: 8326 - DNA, 1755 bp, Artificial Sequence
  Description of Artificial Sequence: Synthetic polynucleotide
atgccagtagtcaatcatgaggatagtgaatttcacctttctcacacagaagaggacaagttaaatgagttccaggtcatcacgaatttccccccagaagacttgccagatgtggtgagattattgaggaaccatggttggcagttagaaccagcattgagcagatatttcgatggagagtggaaaggcgaaccagaccagatgggagagcccactcaaacgtctacacccatggctgagaccttggttcctcccgcgttgggacctagaccgttgttatttacagccagtttacccgtggtcagaccattgccagcgaacttccgcaatgatttcagaacaattgggttaaatggacgctctaacactgtgtggtccatgtttgaatcttttagttatgatggtaacccctttctttttattttattattgatccctagaataatcaataggttatctgccacaatattcacgttcttttgcactttattgtccttgcattccataagtggtggcggtaattctggaaaacccaagatctccaaggttccaaaggcaccaaccagagaaacccatatcccacttgcagaaatattaggtgacacgaaggacaaggatgcattttgcgaattgaaaagctttaaaccagacatttccttcaatgaggccttgcgtattgcaaaagaagagtttaagtttatgttgctcatcttagtgggcgacacctacgataccgatactgataccgtagatgttaattctaaattattattggaaaagattttgttaaacaagaagactttacagtacttgcgcaagattgataacgacttgattatctatttgaaatgcgtacacgagttggaaccttggttagttgctcgccaattgggtgtcagaaacaccccggagatattcctcattgccaacgtggctaataaggcttcccattctgaaactttgccctctcaaagactctccattctcggcaagttgaaggtcaattctttgaacagattcttgcagtctttaacaaacgtggtggaaaagtacactccagaattagttgttaataaaactgaaatgcacgagttacgcatgagtagagaaataaaaaaattacaggaggatgcgtacaaaaagtctttggaaatggacagaatcaaagctatagaaaaggaaaagagcttgaaacacgctcaggatttgaaattaaactctactgctagacaattaaaatggttaaaggcttgcatcgatgagatacagccgttcgagacaacggggaagcaagctactttacaatttaggacttctagtggcaaaagattcgtcaagaagttcccctccatgactacactttaccaaatctaccaatccattgggtgtcacatatacctcgcggtatattctagtgaccccgcagaatggtctaacgccctccaggacaaaatcaggcaattatctgcagacgacgatatgctctgctttaaagaaggacaactcgaaactgctactgctaccactatcgaagagctcggccacatcatcaacaacgagcttacctcttttgatctcgaacgtggtaaacttgaattcgactttgaattggtatctcccttccctaagtatactgtgcatcctaacgagcacatgtctgtggaccaagtgccccagttatggccaaatggcagtcttttagtggaagcattggatgaagaagatgaagaagatgaggaaaatgaagaacaatga

SEQ ID NO: 8327 - DNA, 636 bp, Saccharomyces cerevisiae
atgcaggtgttacagttatggttgacaactttgatctctttggtggtggcagtgcagggattacatttcgacattgcagcatctacagatccagaacaggtttgtattcgtgattttgtcactgaaggtcaattggttgtcgcggatattcactcagatggttctgttggtgatggacagaaactaaacctcttcgtgcgtgattcagttggaaacgagtatcgtagaaagagggactttgcaggcgacgttcgtgttgcgtttactgctccatcctccacggcattcgacgtttgttttgaaaatcaggctcagtatcgtggccgttctttaagcagggccattgaattggacattgagagtggtgctgaagctcgtgactggaacaagatcagtgccaacgaaaaattgaaacctatagaagtggagttgcgtagagtggaggaaattaccgacgaaattgtcgacgaattgacttacttgaaaaacagagaggagagattaagagacaccaatgaatctaccaacagaagggtaagaaatttctcaattttggttattattgtcttgtcctcgctgggtgtttggcaagtcaactatttgaagaactacttcaaaacgaaacatatcatttaa

SEQ ID NO: 8328 - DNA, 636 bp, Artificial Sequence
  Description of Artificial Sequence: Synthetic polynucleotide
atgcaggtgttacagttatggttgacaactttgatctctttggtggtggcagtgcagggattacatttcgacattgcagcatctacagatccagaacaggtttgtattcgtgattttgtcactgaaggtcaattggttgtcgcggatattcacagtgatggttctgttggtgatggacagaaattgaacctcttcgtgcgtgattctgttggaaacgagtatcgtagaaagagggactttgcaggcgacgttcgtgttgcgtttactgctccatcctccacggcattcgacgtttgttttgaaaatcaggctcagtatcgtggccgttctttaagcagggccattgaattggacattgagagtggtgctgaagctcgtgactggaacaagatcagtgccaacgaaaaattgaaacctatagaagtggagttgcgtagagtggaggaaattaccgacgaaattgtcgacgaattgacttacttgaaaaacagagaggagagattaagagacaccaatgaatctaccaacagaagggtaagaaatttctccattttggttattattgtcttgtcctctttgggtgtttggcaagtcaactatttgaagaactacttcaaaacgaaacatatcatttga

SEQ ID NO: 8329 - DNA, 534 bp, Saccharomyces cerevisiae
atgagcaaatccactaacgttagttatgaaagagtagagctattcgagaacccgaaagtacctatcgaagttgaagatgaaattctggaaaaatatgcggaatccagtctggaccatgatatgaccgttaatgaactaccaaggttcttcaaggatttgcaactagagcccacaatttggaaactggtgagaaatgaagacgtcattatagaaggaactgacgtaatagatttcacgaaactggtacgatgcacatgccagttactgatactgatgaataatttaacagtaatagatgatttatggtcgatgcttattagaaactgtggcagagacgtggatttcccgcaagtggccttaagagatcatgtattaagcgtaaaagaccttcaaaaaatctccaatctcatcggggctgaccaaagttctgggaccattgaaatgattagttgtgctactgatggcaagaggcttttcatgacatacttggactttggttgcgtattgggaaaactaggttacttaaagatgtga

SEQ ID NO: 8330 - DNA, 534 bp, Artificial Sequence
  Description of Artificial Sequence: Synthetic polynucleotide
atgagcaaatccactaacgttagttatgaaagagtagagcttttcgagaacccgaaagtacctatcgaagttgaagatgaaattttggaaaaatatgcggaatccagtttggaccatgatatgaccgttaatgaattaccaaggttcttcaaggatttgcaattggagcccacaatttggaaattagtgagaaatgaagacgtcattatagaaggaactgacgtaatagatttcacgaaattagtaagatgcacatgccagttattgatattaatgaataatttaacagtaatagatgatttatggtctatgcttattagaaactgtggcagagacgtggatttcccgcaagtggccttaagagatcatgtattaagcgtaaaagaccttcaaaaaatctccaatctcatcggggctgaccaaagttctgggaccattgaaatgattagttgtgctactgatggcaagaggcttttcatgacatacttggactttggttgcgtattgggaaaattgggttacttaaagatgtga

SEQ ID NO: 8331 - DNA, 3192 bp, Saccharomyces cerevisiae
atgagtgacaactcggacacaaacgtgagcatgcaggaccatgatcaacaatttgctgatcccgtagtggttccgcagtcaactgacactaaagatgaaaatactagtgacaaagatactgttgatagtggcaatgtgaccacaacggaaagtacagaacgtgcagaaagtacaagcaatattccccctttagatggggaagaaaaagaagcaaaatctgagccacagcaacctgaggataatgcagaaacggcggccacagagcaggtttcatctagtaacgggcctgctacagatgatgcccaagcaactttgaatacggattcatccgaagcaaatgaaattgtcaagaaggaagagggctctgatgaaaggaagagacctcgcgaagaggacaccaaaaacagtgatggtgataccaaagatgagggcgataacaaagatgaagacgatgatgaagacgacgatgacgatgatgatgatgaggacgatgacgatgaagccccaactaaaaggcgtcgtcaggagaggaacagattcttggatattgaagctgaggttagtgatgatgaagatgaagatgaagatgaagaggattcagagttggttcgtgaaggtttcattacccatggtgatgatgaagatgacgaagcaagtgctccaggcgcaagaagagacgatagattacatagacaactggaccaagatttgaacaagacttcagaagaagacgctcaaaggttagcgaaagaattaagggagcgttacggtagaagcagctccaagcaataccgtgctgctgctcaagatggttacgtgccccagaggtttctcctaccaagtgttgatacagctaccatttggggtgtgcgctgcagaccaggtaaagaaaaggaattgattcgtaagttattaaaaaaaaaattcaatttggatagggcgatgggtaagaaaaaactgaaaattttatccattttccaaagggataattacacaggaagaatctatatcgaagcccctaagcaatccgttattgaaaaattttgtaatggtgttccagatatttatatttctcaaaaattgctaattcctgtccaagaattacctctattactaaaaccaaacaaatctgatgatgttgctttggaagaaggtagctacgttcgtattaagagagggatctataagggtgacttagctatggtcgaccaaattagtgagaataatttagaagttatgctgaaaattgttcctcgtctggattatggtaaattcgacgaaattgatccaacaacacagcaacgtaaatccagaagaccaacttttgctcatagagcaccaccgcaattatttaatccaacaatggctctaagattagaccaagctaacctgtacaaaagggatgatcgccactttacttataagaatgaagattatatcgatggttatctgtataagtccttcagaattcaacatgtggaaaccaaaaatattcagccaactgtggaggaattggcaagattcggttccaaagagggcgcggtagatctaacatcagtttcacaatcaatcaagaaggctcaagctgcaaaggtcactttccagccaggtgatcgtatcgaagttctaaatggtgaacaacgtggttccaagggtattgtaacaagaaccacgaaagatattgctactatcaaactaaatggctttacaacgcctctagaatttcctatctctactctgaggaaaattttcgaacctggtgatcacgttactgtcatcaatggtgaacatcaaggtgatgctggtttagttcttatggtagagcaaggtcaagtgacatttatgtcaactcaaacaagcagagaagttaccattacagcaaataatctgtccaaatccatcgacactacagctacatcaagtgaatatgcgctacatgacatagtcgaattgagtgctaaaaatgttgcttgtattattcaagctggccacgatatcttcaaggttattgatgaaactggtaaagtgtcgacaattacgaaggggtctatcttgagtaaaataaatactgctcgtgcacgcgtttctagtgtcgatgcaaatggtaatgaaatcaaaattggtgataccatagtagagaaagtaggttcacgcagagaaggtcaggtcctgtacatacaaacacaacaaatttttgttgtttcaaagaagattgttgaaaatgcaggggtttttgttgttaaccctagtaacgttgaggccgtggcatccaaggacaatatgttaagtaacaaaatggatctaagtaaaatgaatccagaaatcatttctaaaatgggacctccatcatctaagacattccaacaacccatccagtccagaggaggtcgtgaagttgcactcggcaaaacagtaagaattcgttctgctggttacaagggtcaattaggtattgtgaaagatgtgaatggtgataaagctactgtcgaattacactcgaagaacaaacacattacaattgacaagcataagttaacatattacaaccgtgagggaggtgaaggtatcacgtatgatgaattggttaatagacgtggtagagttccacaggccagaatgggcccaagttacgtcagtgccccaagaaacatggccactggcggtattgcagcaggtgctgcggctacctcttctggtcttagcggtggtatgacaccaggatggagctccttcgatggtggcaaaacaccagctgtaaatgcgcatggaggctcaggtggtggcggtgtctcctcatggggtggtgcttccacttggggtggccaaggtaatggaggtgcatccgcttggggcggtgctggcggcggtgcctcagcttggggcggccaaggtactggtgctacttctacttggggtggtgcttcagcctggggtaacaaatcaagttggggcggtgcatccacttgggcgtcgggtggtgaatctaatggtgccatgtctacttggggtggtaccggtgataggtcagcctacggcggggcttccacctggggaggaaataacaataataaaagtacaagagatggcggagcttctgcatggggtaaccaagacgatggaaataggtctgcttggaacaaccaaggaaataagtcaaactatggtggtaacagtacatggggaggtcattaa

SEQ ID NO: 8332 - DNA, 3192 bp, Artificial Sequence
  Description of Artificial Sequence: Synthetic polynucleotide
atgagtgacaacagcgacacaaacgtgagcatgcaggaccatgatcaacaatttgctgatcccgtagtggttccgcagtctactgacactaaagatgaaaatactagtgacaaagatactgttgatagtggcaatgtgaccacaacggaaagtacagaacgtgcagaaagtacaagcaatattccccctttagatggggaagaaaaagaagcaaaatctgagccacagcaacctgaggataatgcagaaacggcggccacagagcaggtttcttctagtaacgggcctgctacagatgatgcccaagcaactttgaatacggattcttccgaagcaaatgaaattgtcaagaaggaagagggctctgatgaaaggaagagacctcgcgaagaggacaccaaaaacagtgatggtgataccaaagatgagggcgataacaaagatgaagacgatgatgaagacgacgatgacgatgatgatgatgaggacgatgacgatgaagccccaactaaaaggcgtcgtcaggagaggaacagattcttggatattgaagctgaggttagtgatgatgaagatgaagatgaagatgaagaggattctgagttggttcgtgaaggtttcattacccatggtgatgatgaagatgacgaagcaagtgctccaggcgcaagaagagacgatagattacatagacaattggaccaagatttgaacaagacttctgaagaagacgctcaaaggttagcgaaagaattaagggagcgttacggtagaagcagctccaagcaataccgtgctgctgctcaagatggttacgtgccccagaggtttctcttaccaagtgttgatacagctaccatttggggtgtgcgctgcagaccaggtaaagaaaaggaattgattcgtaagttattaaaaaaaaaattcaatttggatagggcgatgggtaagaaaaaattgaaaattttatccattttccaaagggataattacacaggaagaatctatatcgaagcccctaagcaatccgttattgaaaaattttgtaatggtgttccagatatttatatttctcaaaaattgttaattcctgtccaagaattacctttattattgaaaccaaacaaatctgatgatgttgctttggaagaaggtagctacgttcgtattaagagagggatctataagggtgacttagctatggtcgaccaaattagtgagaataatttagaagttatgttgaaaattgttcctcgtttggattatggtaaattcgacgaaattgatccaacaacacagcaacgtaaatccagaagaccaacttttgctcatagagcaccaccgcaattatttaatccaacaatggctttgagattagaccaagctaacctttacaaaagggatgatcgccactttacttataagaatgaagattatatcgatggttatttgtataagtccttcagaattcaacatgtggaaaccaaaaatattcagccaactgtggaggaattggcaagattcggttccaaagagggcgcggtagatttaacatctgtttctcaatccatcaagaaggctcaagctgcaaaggtcactttccagccaggtgatcgtatcgaagttttgaatggtgaacaacgtggttccaagggtattgtaacaagaaccacgaaagatattgctactatcaaattgaatggctttacaacgcctttggaatttcctatctctactttgaggaaaattttcgaacctggtgatcacgttactgtcatcaatggtgaacatcaaggtgatgctggtttagttcttatggtagagcaaggtcaagtgacatttatgtctactcaaacaagcagagaagttaccattacagcaaataatttatccaaatccatcgacactacagctacatctagtgaatatgcgttgcatgacatagtcgaattgagtgctaaaaatgttgcttgtattattcaagctggccacgatatcttcaaggttattgatgaaactggtaaagtgtctacaattacgaaggggtctatcttgagtaaaataaatactgctcgtgcacgcgtttctagtgtcgatgcaaatggtaatgaaatcaaaattggtgataccatagtagagaaagtaggtagtcgcagagaaggtcaggtcttgtacatacaaacacaacaaatttttgttgtttccaagaagattgttgaaaatgcaggggtttttgttgttaaccctagtaacgttgaggccgtggcatccaaggacaatatgttaagtaacaaaatggatttgagtaaaatgaatccagaaatcatttctaaaatgggacctccatcttctaagacattccaacaacccatccagtccagaggaggtcgtgaagttgcactcggcaaaacagtaagaattcgttctgctggttacaagggtcaattaggtattgtgaaagatgtgaatggtgataaagctactgtcgaattacactccaagaacaaacacattacaattgacaagcataagttaacatattacaaccgtgagggaggtgaaggtatcacgtatgatgaattggttaatagacgtggtagagttccacaggccagaatgggcccaagttacgtcagtgccccaagaaacatggccactggcggtattgcagcaggtgctgcggctacctcttctggtcttagcggtggtatgacaccaggatggagctccttcgatggtggcaaaacaccagctgtaaatgcgcatggaggcagtggtggtggcggtgtctcctcttggggtggtgcttccacttggggtggccaaggtaatggaggtgcatccgcttggggcggtgctggcggcggtgcctctgcttggggcggccaaggtactggtgctacttctacttggggtggtgcttctgcctggggtaacaaatctagttggggcggtgcatccacttgggcgtctggtggtgaatctaatggtgccatgtctacttggggtggtaccggtgataggtctgcctacggcggggcttccacctggggaggaaataacaataataaaagtacaagagatggcggagcttctgcatggggtaaccaagacgatggaaataggtctgcttggaacaaccaaggaaataagtctaactatggtggtaacagtacatggggaggtcattga

SEQ ID NO: 8333 - DNA, 213 bp, Saccharomyces cerevisiae
atggtaaaagtgaaatctaagaatagtgttataaagctattgtctacagcggcaagtggatactctcgttacatctcgattaagaaaggtgcacctttggttactcaggtcagatacgatcctgtggtgaaacggcatgtgcttttcaaagaagcaaagaaaaggaaagtggcagaaagaaagccattggatttcttgcgtacagccaagtga

SEQ ID NO: 8334 - DNA, 213 bp, Artificial Sequence
  Description of Artificial Sequence: Synthetic polynucleotide
atggtaaaagtgaaatctaagaatagtgttataaagttgttgtctacagcggcaagtggatactctcgttacatctctattaagaaaggtgcacctttggttactcaggtcagatacgatcctgtggtgaaaagacatgtgcttttcaaagaagcaaagaaaaggaaagtggcagaaagaaagccattggatttcttgcgtacagccaagtga

SEQ ID NO: 8335 - DNA, 1152 bp, Saccharomyces cerevisiae
atgagtgaaacagaattgagaaaaagacaggcccaattcactagggagttacatggtgatgatattggtaaaaagacaggtttgagtgcattgatgtcgaagaacaactctgcccaaaaggaagccgttcagaagtacttgagaaattgggatggtagaaccgataaagatgccgaagaacgtcgtcttgaggattataatgaagccacacattcctactataacgtcgttacagatttctatgaatatggttggggttcctctttccatttcagcagattttataaaggtgagagtttcgctgcctcgatagcaagacatgaacattatttagcttacaaggctggtattcaaagaggcgatttagttctcgacgttggttgtggtgttgggggcccagcaagagagattgcaagatttaccggttgtaacgtcatcggtctaaacaataacgattaccaaattgccaaggcaaaatattacgctaaaaaatacaatttgagtgaccaaatggactttgtaaagggtgatttcatgaaaatggatttcgaagaaaacactttcgacaaagtttatgcaattgaggccacatgtcacgctccaaaattagaaggtgtatacagcgaaatctacaaggttttgaaaccgggtggtacctttgctgtttacgaatgggtaatgactgataaatatgacgaaaacaatcctgaacatagaaagatcgcttatgaaattgaactaggtgatggtatcccaaagatgttccatgtcgacgtggctaggaaagcattgaagaactgtggtttcgaagtcctcgttagcgaagacctggcggacaatgatgatgaaatcccttggtattacccattaactggtgagtggaagtacgttcaaaacttagctaatttggccacatttttcagaacttcttacttgggtagacaatttactacagcaatggttactgtaatggaaaaattaggtctagccccagaaggttccaaggaagttactgctgctctagaaaatgctgcggttggtttagttgccggtggtaagtccaagttattcactccaatgatgcttttcgtcgctaggaagccagaaaacgccgaaaccccctcccaaacttcccaagaagcaactcaataa

SEQ ID NO: 8336 - DNA, 1152 bp, Artificial Sequence
  Description of Artificial Sequence: Synthetic polynucleotide
atgagtgaaacagaattgagaaaaagacaggcccaattcactagggagttacatggtgatgatattggtaaaaagacaggtttgagtgcattgatgtccaagaacaactctgcccaaaaggaagccgttcagaagtacttgagaaattgggatggtagaaccgataaagatgccgaagaacgtcgtcttgaggattataatgaagccacacattcctactataacgtcgttacagatttctatgaatatggttggggttcctctttccatttcagcagattttataaaggtgagagtttcgctgcctctatagcaagacatgaacattatttagcttacaaggctggtattcaaagaggcgatttagttctcgacgttggttgtggtgttgggggcccagcaagagagattgcaagatttaccggttgtaacgtcatcggtttgaacaataacgattaccaaattgccaaggcaaaatattacgctaaaaaatacaatttgagtgaccaaatggactttgtaaagggtgatttcatgaaaatggatttcgaagaaaacactttcgacaaagtttatgcaattgaggccacatgtcacgctccaaaattagaaggtgtatacagcgaaatctacaaggttttgaaaccgggtggtacctttgctgtttacgaatgggtaatgactgataaatatgacgaaaacaatcctgaacatagaaagatcgcttatgaaattgaattgggtgatggtatcccaaagatgttccatgtcgacgtggctaggaaagcattgaagaactgtggtttcgaagtcctcgttagcgaagacttggcggacaatgatgatgaaatcccttggtattacccattaactggtgagtggaagtacgttcaaaacttagctaatttggccacatttttcagaacttcttacttgggtagacaatttactacagcaatggttactgtaatggaaaaattaggtttagccccagaaggttccaaggaagttactgctgctttggaaaatgctgcggttggtttagttgccggtggtaagtccaagttattcactccaatgatgcttttcgtcgctaggaagccagaaaacgccgaaaccccctcccaaacttcccaagaagcaactcaatga

SEQ ID NO: 8337 - DNA, 111 bp, Saccharomyces cerevisiae
atggtacacttcatttttatcgccttacgaagcatgcgttttatgcgaagattggtgagaaacctccaatacttgctgttgccgataacttcttcattgctttttatatag

SEQ ID NO: 8338 - DNA, 111 bp, Artificial Sequence
  Description of Artificial Sequence: Synthetic polynucleotide
atggtacacttcatttttatcgccttaagaagcatgcgttttatgagaagattggtgagaaacctccaatacttgttgttgccgataacttcttctttgctttttatatga

SEQ ID NO: 8339 - DNA, 1953 bp, Saccharomyces cerevisiae
atgagtgtgtctaccgccaagaggtcgctggatgtcgtttctccgggttcattagcggagtttgagggttcaaaatctcgtcacgatgaaatagaaaatgaacatagacgtactggtacacgtgatggcgaggatagcgagcaaccgaagaagaagggtagcaaaactagcaaaaagcaagatttggatcctgaaactaagcagaagaggactgcccaaaatcgggccgctcaaagagcttttagggaacgtaaggagaggaagatgaaggaattggagaagaaggtacaaagtttagagagtattcagcagcaaaatgaagtggaagctacttttttgagggaccagttaatcactctggtgaatgagttaaaaaaatatagaccagagacaagaaatgactcaaaagtgctggaatatttagcaaggcgagatcctaatttgcatttttcaaaaaataacgttaaccacagcaatagcgagccaattgacacacccaatgatgacatacaagaaaatgttaaacaaaagatgaatttcacgtttcaatatccgcttgataacgacaacgacaacgacaacagtaaaaatgtggggaaacaattaccttcaccaaatgatccaagtcattcggctcctatgcctataaatcagacacaaaagaaattaagtgacgctacagattcctccagcgctactttggattccctttcaaatagtaacgatgttcttaataacacaccaaactcctccacttcgatggattggttagataatgtaatatatactaacaggtttgtgtcaggtgatgatggcagcaatagtaaaactaagaatttagacagtaatatgttttctaatgactttaattttgaaaaccaatttgatgaacaagtttcggagttttgttcgaaaatgaaccaggtatgtggaacaaggcaatgtcccattcccaagaaacccatctcggctcttgataaagaagttttcgcgtcatcttctatactaagttcaaattctcctgctttaacaaatacttgggaatcacattctaatattacagataatactcctgctaatgtcattgctactgatgctactaaatatgaaaattccttctccggttttggccgacttggtttcgatatgagtgccaatcattacgtcgtgaatgataatagcactggtagcactgatagcactggtagcactggcaataagaacaaaaagaacaataataatagcgatgatgtactcccattcatatccgagtcaccgtttgatatgaaccaagttactaatttttttagtccgggatctaccggcatcggcaataatgctgcctctaacaccaatcccagcctactgcaaagcagcaaagaggatataccttttatcaacgcaaatctggctttcccagacgacaattcaactaatattcaattacaacctttctctgaatctcaatctcaaaataagtttgactacgacatgttttttagagattcatcgaaggaaggtaacaatttatttggagagtttttagaggatgacgatgatgacaaaaaagccgctaatatgtcagacgatgagtcaagtttaatcaagaaccagttaattaacgaagaaccagagcttccgaaacaatatctacaatcggtaccaggaaatgaaagcgaaatctcacaaaaaaatggcagtagtttacagaatgctgacaaaatcaataatggcaatgataacgataatgataatgatgtcgttccatctaaggaaggctctttactaaggtgttcggaaatttgggatagaataacaacacatccgaaatactcagatattgatgtcgatggtttatgttccgagctaatggcaaaggcaaaatgttcagaaagaggggttgtcatcaatgcagaagacgttcaattagctttgaataagcatatgaactaa

SEQ ID NO: 8340 - DNA, 1953 bp, Artificial Sequence
  Description of Artificial Sequence: Synthetic polynucleotide
atgagtgtgtctaccgccaagaggtccttggatgtcgtttctccgggttctttagcggagtttgagggttccaaatctcgtcacgatgaaatagaaaatgaacatagacgtactggtacacgtgatggcgaggatagcgagcaaccgaagaagaagggtagcaaaactagcaaaaagcaagatttggatcctgaaactaagcagaagaggactgcccaaaatagagccgctcaaagagcttttagggaacgtaaggagaggaagatgaaggaattggagaagaaggtacaaagtttagagagtattcagcagcaaaatgaagtggaagctacttttttgagggaccagttaatcactttggtgaatgagttaaaaaaatatagaccagagacaagaaatgactctaaagtgttggaatatttagcaaggagagatcctaatttgcatttttccaaaaataacgttaaccacagcaatagcgagccaattgacacacccaatgatgacatacaagaaaatgttaaacaaaagatgaatttcacgtttcaatatccgcttgataacgacaacgacaacgacaacagtaaaaatgtggggaaacaattaccttctccaaatgatccaagtcattctgctcctatgcctataaatcagacacaaaagaaattaagtgacgctacagattcctccagcgctactttggattccctttctaatagtaacgatgttcttaataacacaccaaactcctccacttctatggattggttagataatgtaatatatactaacaggtttgtgagtggtgatgatggcagcaatagtaaaactaagaatttagacagtaatatgttttctaatgactttaattttgaaaaccaatttgatgaacaagtttctgagttttgttctaaaatgaaccaggtatgtggaacaaggcaatgtcccattcccaagaaacccatctctgctcttgataaagaagttttcgcgtcttcttctatattgagtagtaattctcctgctttaacaaatacttgggaaagtcattctaatattacagataatactcctgctaatgtcattgctactgatgctactaaatatgaaaattccttctccggttttggcaggcttggtttcgatatgagtgccaatcattacgtcgtgaatgataatagcactggtagcactgatagcactggtagcactggcaataagaacaaaaagaacaataataatagcgatgatgtactcccattcatatccgagtctccgtttgatatgaaccaagttactaatttttttagtccgggatctaccggcatcggcaataatgctgcctctaacaccaatcccagcttattacaaagcagcaaagaggatataccttttatcaacgcaaatttggctttcccagacgacaattctactaatattcaattacaacctttctctgaatctcaatctcaaaataagtttgactacgacatgttttttagagattcttccaaggaaggtaacaatttatttggagagtttttagaggatgacgatgatgacaaaaaagccgctaatatgtctgacgatgagagcagtttaatcaagaaccagttaattaacgaagaaccagagcttccgaaacaatatttacaaagtgtaccaggaaatgaaagcgaaatctctcaaaaaaatggcagtagtttacagaatgctgacaaaatcaataatggcaatgataacgataatgataatgatgtcgttccatctaaggaaggctctttattgaggtgttctgaaatttgggatagaataacaacacatccgaaatactctgatattgatgtcgatggtttatgttccgagttgatggcaaaggcaaaatgttctgaaagaggggttgtcatcaatgcagaagacgttcaattagctttgaataagcatatgaactga

SEQ ID NO: 8341 - DNA, 2325 bp, Saccharomyces cerevisiae
atgcaaaaatccgttagagtgggcgactattttgacaatgatgacaatggtttgtggtcgtggtacttaacaaacctcagattaggcgattttgaagaacttataggcaatcaattaaaatacactctgttaaaaagatttctgaatagtcatttttatggtgataacaatatttcggccaggccaaacaagaagattttgttagtttccatcccagagaatgttcatgaagatatctccatattggaaatcttcctcaaagattactttcatctggaaaaattagaacacattcaaatctcaaaattaactcactcccactgctacaatcatgaaaatcattacctattgacggacaacctcaacaatttccaagaccctacctttttagaatttgcgagtacaagttggcaagttcaaaaaaattccaaggctttaaacaataacaatagaaattcaataccaccacccacaatatcttcatcaaaagcttcaaacgggaagctagaatcaaacgtttcggatgatcagtggtcaaatataaatacccagacttcaacagctacccgaactaatacgaatacgaggactttgacatctccggacacagttgatataaacgttacatccgtgaatagtcaaagcaataataatgatacgcctcaagataatgaaaacgaagttgatgaagaggatgccacaagttctatagtcctaaatttttctcattcgcgaacagtagattcaaagcctaatagactacccaaaatttttccatcatacactaatgaagactatacaccgtcacattccgagataatgtcaatagatagttttgctggcgaagacgtatcatccacatatcccggacaagacctgagtttaactactgccaggcgcgaggatgaaagtggtcaggatgaagttgaggatcattatagcagagtctcacatgatctaggtgacgagagtatcgatcaagcaagttatagcatggaaagttcggtcagctacactagctatagtagtagcagtaatagtagtagtgcccactacagtttaagcagtagcagccgaggtaatccaaaacgtgaaaacatcgatcacacgaatgccacctatgtctctgaattgtcaagtataacgagttctatagacaatttaactacttcgacaaccccagaggaggaggataatttaattcatcataactatgacgcccaagggtatggatcaggagaggacgatggagaagaggtttatgatgatgaagatctttcttcttccgattactcagtactatccattctaccgtcaatctcaatttgtgattctctagggtattttaggctagttttgcaatctatattaattcaggatccagacaccaaagaaatttttactgcgattagacagtcaaacaataaacctacaatggcaagcgttaccgatgattggttgctgtatgattccaatttttcaatgaataatttacaaattctaacacttcaagatttgctagatatcaagagatcatttccaaaaattttattttacacaatggttattgtgacaaactccggcaaacaggttgaagaagaattcaaaaatcccaattatgataatagggaaggaatatcaaaagagcaacctctagattctgagttatcattaactaacgacccgcaacaatatttcccgactgcatataataacggttacaacgactatattgacgatgaagacgatgaagacgatggtgacgatgcttctttatcagaacagtcaggcccacaaatgtacataccaactagaatggaatctaacgttactacagcacatcgttctattagaaccgtaaacagtatcggggaatgggcattcaatagacataattctgttacaaaaatcgataaaagtaatagtaacgagttggataactctaaaacaggtgaaagtacagttttatcaagtgaacctcatccaatgacacaactgtcgaactctaatacgacttcctcgaattttagccattctttgaagacaaaaaattctcacaaacctaattccaagggtaacaatgaaagtaattccaaaaatgagttgaaaaagataaagagttccatcaatgctatgagtgccgtggaaaggtccaaaagtttgcctttacctacattactaaagtctttaagcggcatagataaccctactcatgccactaacaaggatagaaagcgttggaaattccagatgaataggtttaagaatcataaaaacagtggttctgcaggtacggataaatctcagcgttgtgccatcatgtaa

SEQ ID NO: 8342 - DNA, 2325 bp, Artificial Sequence
  Description of Artificial Sequence: Synthetic polynucleotide
atgcaaaaatccgttagagtgggcgactattttgacaatgatgacaatggtttgtggtcctggtacttaacaaacctcagattaggcgattttgaagaacttataggcaatcaattaaaatacactttattaaaaagatttttgaatagtcatttttatggtgataacaatatttctgccaggccaaacaagaagattttgttagtttccatcccagagaatgttcatgaagatatctccatattggaaatcttcctcaaagattactttcatttggaaaaattagaacacattcaaatctccaaattaactcactcccactgctacaatcatgaaaatcattacttgttgacggacaacctcaacaatttccaagaccctacctttttagaatttgcgagtacaagttggcaagttcaaaaaaattccaaggctttaaacaataacaatagaaattctataccaccacccacaatatcttcttctaaagcttctaacgggaagttggaatctaacgtttctgatgatcagtggtctaatataaatacccagacttctacagctaccagaactaatacgaatacgaggactttgacatctccggacacagttgatataaacgttacatccgtgaatagtcaaagcaataataatgatacgcctcaagataatgaaaacgaagttgatgaagaggatgccacaagttctatagtcttgaatttttctcattctcgcacagtagattctaagcctaatagattacccaaaatttttccatcttacactaatgaagactatacaccgtctcattccgagataatgagtatagatagttttgctggcgaagacgtatcttccacatatcccggacaagacttgagtttaactactgccaggcgcgaggatgaaagtggtcaggatgaagttgaggatcattatagcagagtctctcatgatttaggtgacgagagtatcgatcaagcaagttatagcatggaaagttctgtcagctacactagctatagtagtagcagtaatagtagtagtgcccactacagtttaagcagtagcagcagaggtaatccaaaacgtgaaaacatcgatcacacgaatgccacctatgtctctgaattgagcagtataacgagttctatagacaatttaactacttctacaaccccagaggaggaggataatttaattcatcataactatgacgcccaagggtatggatctggagaggacgatggagaagaggtttatgatgatgaagatctttcttcttccgattacagtgtattgtccattttaccgtctatctctatttgtgattctttagggtattttaggttggttttgcaatctatattaattcaggatccagacaccaaagaaatttttactgcgattagacagtccaacaataaacctacaatggcaagcgttaccgatgattggttgttatatgattccaatttttccatgaataatttacaaattttaacacttcaagatttgttggatatcaagagatcttttccaaaaattttattttacacaatggttattgtgacaaactccggcaaacaggttgaagaagaattcaaaaatcccaattatgataatagggaaggaatatccaaagagcaacctttggattctgagttatctttaactaacgacccgcaacaatatttcccgactgcatataataacggttacaacgactatattgacgatgaagacgatgaagacgatggtgacgatgcttctttatctgaacagtctggcccacaaatgtacataccaactagaatggaatctaacgttactacagcacatcgttctattagaaccgtaaacagtatcggggaatgggcattcaatagacataattctgttacaaaaatcgataaaagtaatagtaacgagttggataactctaaaacaggtgaaagtacagttttatccagtgaacctcatccaatgacacaattatctaactctaatacgacttcctctaattttagccattctttgaagacaaaaaattctcacaaacctaattccaagggtaacaatgaaagtaattccaaaaatgagttgaaaaagataaagagttccatcaatgctatgagtgccgtggaaaggtccaaaagtttgcctttacctacattattgaagtctttaagcggcatagataaccctactcatgccactaacaaggatagaaagcgttggaaattccagatgaataggtttaagaatcataaaaacagtggttctgcaggtacggataaatctcagcgttgtgccatcatgtga

SEQ ID NO: 8343 - DNA, 1389 bp, Saccharomyces cerevisiae
atgagtgacgaaaccatgcctgtagaatttttagttagtgataaaagactgttgaaaaccataaaagttaaactggaaaccaacggcctttttgttactcctatctattccgataatgataacaaagttataaaatcttctattgaggatctcaatcatccattggctgtcgaaattaacaatatagccggtgtgaaggcacgattccatgaaagtggtaacttggaacgtagtgaaggacatttgaaacaccaaagtaacagcattacggaatttacgaagagctttttaaaagatcatgggcttgctaatgacaagatatttttatctcatttattagatcatttacctctaaaatatacaatatatccaccagttgtattgttcaataattctacagtgagatcgtttaatcacccaatctggcaaaaagcattccaactgaaactcttcgatccaaatgagtattatcgtgagctgctatgtttcctttcgcccggcaaaccaagtaaaggcacgagtcttcatcctaacaatcgactactgactcatctggccataaataaccctatcacagaggcagatgtattgcgaagaccgttcaatatccaaccgctttatggcaaattgattgatgacagtattttggatgataacgataatacgttatgggaaaatcccagtcaagaacaactaaactcaagcatatggtgtaaggtcatacaaaatggtgtaacacaaatctggtcacccgtttttaccatgtttagtagagggaatatcaaggagaagaaaagagttttgactactttcccagatatttgcaataatgatgtggtcgatttatacgcaggaataggttacttcacttttagctacttaacaaagggcgctaggacactttttgcatttgaactaaacccttggagtgtagaagggttaaagcgcggcttaaaggcaaacggattcaataaatctgggaactgccacgttttccaagaatcaaatgaaatgtgcgttcaaaggcttactgaattcttatctcagaatcccggatttcggttacgtattaggcatattaatttaggtctcctgccttcaagcaaacaagggtggccattggccatcaaattaatttacttacaaggagcttctttggaaaaagtgacaatgcatatacatgaaaatgtacacatagatgcaattgaggatggaagtttcgaaaagaatgtcattgtagaactcgacgctattaatgagtcaattgcattaattagaaaccgtggcatcaaacttcagtttgtgagatctaagcttgaacgcataaaaacttttgcaccagatatttggcatgtatgcgttgatgtcgacgttatagtaagtacttaa

SEQ ID NO: 8344 - DNA, 1389 bp, Artificial Sequence
  Description of Artificial Sequence: Synthetic polynucleotide
atgagtgacgaaaccatgcctgtagaatttttagttagtgataaaagattattgaaaaccataaaagttaaattagaaaccaacggcctttttgttactcctatctattccgataatgataacaaagttataaaatcttctattgaggatctcaatcatccattggctgtcgaaattaacaatatagccggtgtgaaggcaagattccatgaaagtggtaacttggaacgtagtgaaggacatttgaaacaccaaagtaacagcattacggaatttacgaagagctttttaaaagatcatgggcttgctaatgacaagatatttttatctcatttattagatcatttacctttgaaatatacaatatatccaccagttgtattgttcaataattctacagtgagatcttttaatcacccaatctggcaaaaagcattccaattgaaactcttcgatccaaatgagtattatcgtgagttattatgtttcctttctcccggcaaaccaagtaaaggcacgagtcttcatcctaacaatagattattaactcatttggccataaataaccctatcacagaggcagatgtattgagaagaccgttcaatatccaaccgctttatggcaaattgattgatgacagtattttggatgataacgataatacgttatgggaaaatcccagtcaagaacaattgaactccagcatatggtgtaaggtcatacaaaatggtgtaacacaaatctggtcccccgtttttaccatgtttagtagagggaatatcaaggagaagaaaagagttttgactactttcccagatatttgcaataatgatgtggtcgatttatacgcaggaataggttacttcacttttagctacttaacaaagggcgctaggacactttttgcatttgaattgaacccttggagtgtagaagggttaaagcgcggcttaaaggcaaacggattcaataaatctgggaactgccacgttttccaagaaagtaatgaaatgtgcgttcaaaggcttactgaattcttatctcagaatcccggatttagattacgtattaggcatattaatttaggtctcttaccttccagcaaacaagggtggccattggccatcaaattaatttacttacaaggagcttctttggaaaaagtgacaatgcatatacatgaaaatgtacacatagatgcaattgaggatggaagtttcgaaaagaatgtcattgtagaactcgacgctattaatgagtctattgcattaattagaaaccgtggcatcaaacttcagtttgtgagatctaagcttgaacgcataaaaacttttgcaccagatatttggcatgtatgcgttgatgtcgacgttatagtaagtacttga

SEQ ID NO: 8345 - DNA, 981 bp, Saccharomyces cerevisiae
atgtccactgatagtacacgctatccaattcagattgagaaagcctcgaatgatccaacccttctgcttaatcacacatgtttaagagtcaaggatccagcaaggaccgttaagttctacaccgaacacttcggtatgaagctattaagcagaaaggattttgaagaagcaaaatttagcttgtactttttaagctttccaaaagacgacatacccaaaaataagaatggagagcctgatgtttttagcgcacacggtgtcttagaactaactcacaattggggtactgaaaaaaacccagactacaagatcaacaacgggaatgaggaacctcatcgtggatttgggcacatctgtttttctgtatccgatatcaataaaacctgcgaagagctagaatctcagggtgtcaaattcaagaagagactctctgaaggaagacagaaggacattgcgtttgctttaggccctgatggatactggattgagttgatcacatattctagagagggtcaggaatacccaaagggctcagtaggtaacaagttcaatcataccatgattcgtattaaaaacccaacccggtctttagaattctaccagaatgtgttgggcatgaaattattaagaactagtgagcacgaaagtgcaaaatttacgttatactttcttggttatggcgttccaaagaccgacagcgttttttcatgtgaaagtgtgttggagttaactcataattggggaactgagaatgatccaaacttccactatcataacggtaactcagagccccagggttatggtcacatctgcataagttgtgatgacgctggcgccctttgtaaagaaattgaagtgaaatacggcgataagatccaatggtctcctaaatttaaccaaggcagaatgaagaatattgcctttttgaaggatcctgatggttattccattgaagtcgttcctcatggtttgattgcctaa

SEQ ID NO: 8346 - DNA, 981 bp, Artificial Sequence
  Description of Artificial Sequence: Synthetic polynucleotide
atgtccactgatagtacacgctatccaattcagattgagaaagcctctaatgatccaacccttttacttaatcacacatgtttaagagtcaaggatccagcaaggaccgttaagttctacaccgaacacttcggtatgaagcttttaagcagaaaggattttgaagaagcaaaatttagcttgtactttttaagctttccaaaagacgacatacccaaaaataagaatggagagcctgatgtttttagcgcacacggtgtcttagaattgactcacaattggggtactgaaaaaaacccagactacaagatcaacaacgggaatgaggaacctcatcgtggatttgggcacatctgtttttctgtatccgatatcaataaaacctgcgaagagttagaatctcagggtgtcaaattcaagaagagactctctgaaggaagacagaaggacattgcgtttgctttaggccctgatggatactggattgagttgatcacatattctagagagggtcaggaatacccaaagggctctgtaggtaacaagttcaatcataccatgattcgtattaaaaacccaaccaggtctttagaattctaccagaatgtgttgggcatgaaattattaagaactagtgagcacgaaagtgcaaaatttacgttatactttcttggttatggcgttccaaagaccgacagcgttttttcttgtgaaagtgtgttggagttaactcataattggggaactgagaatgatccaaacttccactatcataacggtaacagtgagccccagggttatggtcacatctgcataagttgtgatgacgctggcgccctttgtaaagaaattgaagtgaaatacggcgataagatccaatggtctcctaaatttaaccaaggcagaatgaagaatattgcctttttgaaggatcctgatggttattccattgaagtcgttcctcatggtttgattgcctga

SEQ ID NO: 8347 - DNA, 873 bp, Saccharomyces cerevisiae
atgtcagtttaccatttaccaacgctgttgaacccgctggttaatgctatatttaactgtcccgaaccagaaagatccccattgaaaaagcttttcgctaatttaaaaacccgtaggtttatcctcctagcacctccttcagaataccttttgaattaccacgatgtcaagagcaaactgccgttacatgacctctgttataatgcagagtttattaactcttacatattgttaatgactgaaaactcttacataaatacgaattcaagggacagtcattatgaaacgttagatggtaagaccgttgttattcaatggaagaataatgtgatccatgccttaaatggatttcatataaggcgaagactaaagattctagagacaaaaatattacccaattttaatgactactttgaaggggcggctgattttatcatactattcatagatcaacctttaaattgcgaatttgtacctaacgactacttacagtgttttcacaattatgagaaaataccaaaaaatgcacatgctatgccaaatctgtcgatagattcttttcagcaagaaagatcgtcattcgagaatatattgcacattcatcctgctcgattaacacagcttggccaattgttttcgagttacagaacgctcgctcctggtgatgatccatctagaagtatttttgaaagcatcgtgcaacaagcatttgatggaatgaaatcggattcacttttcaagaacttttctaatctttacgatcttatacacgactattttgaactaaatctttacgatgatatatggtctaggcttactacacatttcaaaggccacgaagtagacactgaaaaaataaatatttttcagtga

SEQ ID NO: 8348 - DNA, 873 bp, Artificial Sequence
  Description of Artificial Sequence: Synthetic polynucleotide
atgtctgtttaccatttaccaacgttattgaacccgttggttaatgctatatttaactgtcccgaaccagaaagatccccattgaaaaagcttttcgctaatttaaaaacccgtaggtttatcctcttagcacctccttctgaataccttttgaattaccacgatgtcaagagcaaattaccgttacatgacctctgttataatgcagagtttattaactcttacatattgttaatgactgaaaactcttacataaatacgaattctagggacagtcattatgaaacgttagatggtaagaccgttgttattcaatggaagaataatgtgatccatgccttaaatggatttcatataaggagaagattaaagattttagagacaaaaatattacccaattttaatgactactttgaaggggcggctgattttatcatattattcatagatcaacctttaaattgcgaatttgtacctaacgactacttacagtgttttcacaattatgagaaaataccaaaaaatgcacatgctatgccaaatttatctatagattcttttcagcaagaaagaagttctttcgagaatatattgcacattcatcctgctagattaacacagcttggccaattgttttctagttacagaacgctcgctcctggtgatgatccatctagaagtatttttgaaagcatcgtgcaacaagcatttgatggaatgaaatctgattctcttttcaagaacttttctaatctttacgatcttatacacgactattttgaattgaatctttacgatgatatatggtctaggcttactacacatttcaaaggccacgaagtagacactgaaaaaataaatatttttcagtga

SEQ ID NO: 8349 - DNA, 2214 bp, Saccharomyces cerevisiae
atggattcacatcaactagaactaccagacggattgaataacatgacgatggatgcagacactttaattagcctttttgtgctcgttgtttgcagaagtgaacaaaagcaccttaaaagtcatctttactatttgcaaaatttttcgaataactcttcttctacaaaattcggcattctagggtatgctgtatccacactggaagcagtggtttgttatttcgaagacttcaacaaaaatacaggcaacgtggcgaaagctaacacattatgtgaaaaaactaagaatttattagataagttgtcatgtgaaaaccccacaaatgaagtagaagatctggcaacatacaaggatattttgacctacagaaatgagcaaggacaatccattctatccatatgtataacaaatcataaaaactacatcttattagatattctttctgaatatgaaaacgactttccagtagaagaccttttagaggacgaaacgattgatggttctacgctgcttatagaatcgataaaagcaggaaatttagaagccgcgaaagttctcataaagatcatgctgttcaattgtactgaagaggagctggtttcttatatcaataaaacagataaatatgcacgtaccgtggctcattatctaacccatgaaatggatatacttaaaagcatcggaaattatattgattggaaacgaaaaaattccagtggacaaacgcctttattttccatctttagaagttatgatcaaccaaattatgaagaaatggtgaagaccgcatttgatatcgcaaatacttggtatagaaagcacaacagtttgtttgactatctagaccacaccgataataagggcaatagcttgttgcatgttttgaaaacaaacattccaatccttttacaactgactaagctagatattaatgaggaaaattataagggattgacgccattaatggtatatgtgaagtacaaaagactaagtaatattgacgccatcacgaaagaccgtcgacttatattagagaaggttcaaaactcgaccttcttcacttgttttgattatgcaaaagatcactcggtactaagcaagataggagaaaggggtgtcaaagattcactttttggattaatatattttcattctttgcgatatcataatttaaatgcgacaacaaatataacatccgtttcaaatgcagagaaacctttcgccactactgttattaacatgaaaacaattcaaggcttactacgctcaattctgaaagacaatccgttcacctttttgccattaaatacctatatcgatgaaatatcgcacttaaaccgttctgatttaacaataatcgggaaaacagatgtcacatcgttacttcaccaattaactaactgcttcaacgttcttttattcctgaaaaaaattccagaaaatttgttcactgatgaggcttctatcttatattggatgcgcataaacacttctaaaagaaaccagaaaccctcaggaaaagaaaatccaaaaacaatggaacccgaggagattaatatgatacaaagctttttacgttttaattttgatgagatttcatcatttaaggcaagcttgaatattttgaggaaagtcttaatatttattaatttgaaatccgatgatttcgaggatgcttataagggtcttaacgaaatgggtagaaaattaattaatagtgaagcatccagcgcatttaaggggattataacaaatcataatatgttcagtgaattatcgctagcagcactactagaaaacgtgcgtttcttggaacaatgtactatccaactatctagtttcgttcagataattttatttgaaaaaattccgaactggtggaaacattatggtgagtttttagctttacataaaagctatcggaaggcttttcctaacatggttaagccaaaaagtgcatcagatacctctagtcgtgctccacttggtggttttattgaaacgaagcgtgaacaatcggagcaaagactagcggttcagataaaggcctcttcaaaaatgctcaaagaacttggaagcgaaatttttgtagctcacgaaaggttggccgaggaactaagcaattatatggagttcaggaaggcgtgcttagatcagcgtagtcttgtggcatttgccacaaccaacattagcgttcttcaagaatgtgtttaa

SEQ ID NO: 8350 - DNA, 2214 bp, Artificial Sequence
  Description of Artificial Sequence: Synthetic polynucleotide
atggattctcatcaattggaattaccagacggattgaataacatgacgatggatgcagacactttaattagcctttttgtgctcgttgtttgcagaagtgaacaaaagcaccttaaaagtcatctttactatttgcaaaatttttctaataactcttcttctacaaaattcggcattttggggtatgctgtatccacattagaagcagtggtttgttatttcgaagacttcaacaaaaatacaggcaacgtggcgaaagctaacacattatgtgaaaaaactaagaatttattagataagttgagttgtgaaaaccccacaaatgaagtagaagatttggcaacatacaaggatattttgacctacagaaatgagcaaggacaatccattttatccatatgtataacaaatcataaaaactacatcttattagatattctttctgaatatgaaaacgactttccagtagaagaccttttagaggacgaaacgattgatggttctacgttacttatagaaagtataaaagcaggaaatttagaagccgcgaaagttctcataaagatcatgcttttcaattgtactgaagaggagttagtttcttatatcaataaaacagataaatatgcacgtaccgtggctcattatttgacccatgaaatggatatacttaaaagcatcggaaattatattgattggaaaagaaaaaattccagtggacaaacgcctttattttccatctttagaagttatgatcaaccaaattatgaagaaatggtgaagaccgcatttgatatcgcaaatacttggtatagaaagcacaacagtttgtttgactatttggaccacaccgataataagggcaatagcttgttgcatgttttgaaaacaaacattccaatccttttacaattgactaagttggatattaatgaggaaaattataagggattgacgccattaatggtatatgtgaagtacaaaagattaagtaatattgacgccatcacgaaagaccgtcgtcttatattagagaaggttcaaaactctaccttcttcacttgttttgattatgcaaaagatcactctgtattgagcaagataggagaaaggggtgtcaaagattctctttttggattaatatattttcattctttgagatatcataatttaaatgcgacaacaaatataacatccgtttctaatgcagagaaacctttcgccactactgttattaacatgaaaacaattcaaggcttacttcgctccattttgaaagacaatccgttcacctttttgccattaaatacctatatcgatgaaatatctcacttaaaccgttctgatttaacaataatcgggaaaacagatgtcacaagtttacttcaccaattaactaactgcttcaacgttcttttattcttgaaaaaaattccagaaaatttgttcactgatgaggcttctatcttatattggatgcgcataaacacttctaaaagaaaccagaaacccagtggaaaagaaaatccaaaaacaatggaacccgaggagattaatatgatacaaagctttttacgttttaattttgatgagatttcttcttttaaggcaagcttgaatattttgaggaaagtcttaatatttattaatttgaaatccgatgatttcgaggatgcttataagggtcttaacgaaatgggtagaaaattaattaatagtgaagcatccagcgcatttaaggggattataacaaatcataatatgttcagtgaattaagtttagcagcattattggaaaacgtgcgtttcttggaacaatgtactatccaattatctagtttcgttcagataattttatttgaaaaaattccgaactggtggaaacattatggtgagtttttagctttacataaaagctatagaaaggcttttcctaacatggttaagccaaaaagtgcatctgatacctctagtcgtgctccacttggtggttttattgaaacgaagcgtgaacaaagtgagcaaagattagcggttcagataaaggcctcttctaaaatgctcaaagaacttggaagcgaaatttttgtagctcacgaaaggttggccgaggaattgagcaattatatggagttcaggaaggcgtgcttagatcagcgtagtcttgtggcatttgccacaaccaacattagcgttcttcaagaatgtgtttga

SEQ ID NO: 8351 - DNA, 627 bp, Saccharomyces cerevisiae
atgtcttctagaaaaaaaaatattttgaaagtaatcatcctaggtgactctggtgttgggaagacctccttgatgcaccgttatgtcaatgataagtattctcaacagtataaagcaacaattggggctgactttttaacaaaagaggtgacagttgacggtgataaagttgccaccatgcaagtttgggatactgctggacaggaacgtttccaatcactgggtgttgctttctatagaggtgcagattgttgcgttttggtctacgatgtgaccaatgccagttcctttgagaatattaagtcttggcgagatgaatttctagtgcatgcgaacgtaaactcaccagaaacatttccatttgttatactgggaaataaaattgatgccgaagaatctaaaaaaattgtatcagaaaagtccgctcaggagcttgctaaatcattaggcgatattcctttgtttttaacaagtgccaaaaacgccataaacgttgataccgcatttgaagaaattgcaaggagtgctttacaacagaatcaagctgatacagaagcctttgaagatgactataatgatgccatcaatattcgcctagatggagaaaataattcttgtagctgttga

SEQ ID NO: 8352 - DNA, 627 bp, Artificial Sequence
  Description of Artificial Sequence: Synthetic polynucleotide
atgtcttctagaaaaaaaaatattttgaaagtaatcatcttgggtgactctggtgttgggaagacctccttgatgcaccgttatgtcaatgataagtattctcaacagtataaagcaacaattggggctgactttttaacaaaagaggtgacagttgacggtgataaagttgccaccatgcaagtttgggatactgctggacaggaacgtttccaaagtttgggtgttgctttctatagaggtgcagattgttgcgttttggtctacgatgtgaccaatgccagttcctttgagaatattaagtcttggagagatgaatttttagtgcatgcgaacgtaaactctccagaaacatttccatttgttatattaggaaataaaattgatgccgaagaatctaaaaaaattgtatctgaaaagtccgctcaggagcttgctaaatctttaggcgatattcctttgtttttaacaagtgccaaaaacgccataaacgttgataccgcatttgaagaaattgcaaggagtgctttacaacagaatcaagctgatacagaagcctttgaagatgactataatgatgccatcaatattcgcttagatggagaaaataattcttgtagctgttga

SEQ ID NO: 8353 - DNA, 2118 bp, Saccharomyces cerevisiae
atgtcgttgggtcctcttaaagctatcaatgataagcaattgaatacccgttccaagttagttcacaccccaataaagggaaataccgcagacctcgtaggaaaagaaaatcactttaaacaaacaaagagactagatccgaataatgatcatcaccaccagccagctcaaaaaaagaaaagggaaaagttatcagctttgtgtaaaacaccaccttcattaatcaaaacaagaggaaaagactatcaccgaggtcattttttaggtgaaggtggatttgctcgctgtttccaaattaaggacgattcaggcgaaatttttgctgccaaaacagttgctaaagcctcaattaaatcagagaagacaagaaaaaagttgttgtcggagattcaaattcataaaagtatgtcccatccaaatatcgttcagtttattgattgttttgaggatgatagcaatgtctatatcttattggagatatgccccaacggttcattaatggaattactaaaaagaagaaaagttttaacagaaccagaagttagatttttcaccactcaaatatgtggtgcaattaagtatatgcattcaagaagagttatacatagagatttaaaacttggtaacatcttcttcgattcaaactataacttaaagattggtgacttcggtctggcagctgtgttggcgaatgaaagtgaacgtaaatacaccatatgcggaacacctaattacatcgcacctgaagtgttgatgggtaagcattctggacattcatttgaagtagatatttggtcattaggtgttatgctttatgctttgttgattggtaagccacccttccaagcaagagatgtaaacactatttatgaaagaatcaaatgtcgtgatttttcgtttccaagagataaaccaatctcagatgaaggtaagattttaataagagacattctatccttagatccaatagaaaggccctctttgactgaaattatggattatgtatggtttaggggaactttcccaccatctattccttcgacggtcatgtcagaagcaccaaattttgaggatattcctgaagagcagtcactggttaacttcaaagattgcatggaaaaatctctactattagaaagcatgagcagcgataaaattcagcgtcaaaagagggattatatttcttcaattaaatctagtatcgataaactagaagagtaccaccaaaacagaccatttttaccacattctttatcccctggcgggacgaaacagaaatataaggaggttgttgatatagaggcacaaagaagattaaacgatttggctcgtgaagcaaggatacgtagagcacaacaggccgttttgagaaaagaattaatagctacatcgaccaatgtcattaaatcagaaatctccttgagaatattagccagtgagtgtcatcttactttgaatggcattgtagaagcagaagctcagtataaaatgggaggtcttccgaaatcaagattgcctaaaattaaacacccaatgatagttaccaagtgggtcgactactccaacaaacacggattctcctatcagttatcaacagaggatattggtgtcttatttaataatggcaccacagttctccgattggcagatgcagaagagttttggtatattagttatgacgatcgggaaggttgggtagcaagtcattatttattgagcgaaaaaccacgagagctaagtagacatttagaagtagttgatttttttgccaagtacatgaaggcaaatttgagccgagtatctacgtttggcagagaagaatatcataaagatgatgtatttttgagaagatacacaaggtataaaccatttgttatgtttgaactaagtgatggtactttccagttcaatttcaaagatcatcataaaatggcaatatccgacggaggtaaattggtgacctacatttctccctcccatgaaagcaccacatatcccttagttgaagtactaaaatatggcgagatcccaggatatccagaaagtaactttagagagaaactaactttgataaaggaaggtttgaagcagaagtccacaattgttaccgtagattaa

SEQ ID NO: 8354 - DNA, 2118 bp, Artificial Sequence
  Description of Artificial Sequence: Synthetic polynucleotide
atgtctttgggtcctcttaaagctatcaatgataagcaattgaatacccgttccaagttagttcacaccccaataaagggaaataccgcagacctcgtaggaaaagaaaatcactttaaacaaacaaagagattagatccgaataatgatcatcaccaccagccagctcaaaaaaagaaaagggaaaagttatctgctttgtgtaaaacaccaccttctttaatcaaaacaagaggaaaagactatcacagaggtcattttttaggtgaaggtggatttgctcgctgtttccaaattaaggacgattctggcgaaatttttgctgccaaaacagttgctaaagcctctattaaaagtgagaagacaagaaaaaagttgttgagtgagattcaaattcataaaagtatgtcccatccaaatatcgttcagtttattgattgttttgaggatgatagcaatgtctatatcttattggagatatgccccaacggttctttaatggaattattgaaaagaagaaaagttttaacagaaccagaagttagatttttcaccactcaaatatgtggtgcaattaagtatatgcattccagaagagttatacatagagatttaaaacttggtaacatcttcttcgattccaactataacttaaagattggtgacttcggtttggcagctgtgttggcgaatgaaagtgaacgtaaatacaccatatgcggaacacctaattacatcgcacctgaagtgttgatgggtaagcattctggacattcttttgaagtagatatttggtctttaggtgttatgctttatgctttgttgattggtaagccacccttccaagcaagagatgtaaacactatttatgaaagaatcaaatgtcgtgatttttcttttccaagagataaaccaatcagtgatgaaggtaagattttaataagagacattttatccttagatccaatagaaaggccctctttgactgaaattatggattatgtatggtttaggggaactttcccaccatctattccttctacggtcatgtctgaagcaccaaattttgaggatattcctgaagagcagtctttggttaacttcaaagattgcatggaaaaatctttattattagaaagcatgagcagcgataaaattcagcgtcaaaagagggattatatttcttccattaaatctagtatcgataaattagaagagtaccaccaaaacagaccatttttaccacattctttatcccctggcgggacgaaacagaaatataaggaggttgttgatatagaggcacaaagaagattaaacgatttggctcgtgaagcaaggatacgtagagcacaacaggccgttttgagaaaagaattaatagctacatctaccaatgtcattaaaagtgaaatctccttgagaatattagccagtgagtgtcatcttactttgaatggcattgtagaagcagaagctcagtataaaatgggaggtcttccgaaatctagattgcctaaaattaaacacccaatgatagttaccaagtgggtcgactactccaacaaacacggattctcctatcagttatctacagaggatattggtgtcttatttaataatggcaccacagttctccgtttggcagatgcagaagagttttggtatattagttatgacgatagagaaggttgggtagcaagtcattatttattgagcgaaaaaccaagagagttgagtagacatttagaagtagttgatttttttgccaagtacatgaaggcaaatttgagcagagtatctacgtttggcagagaagaatatcataaagatgatgtatttttgagaagatacacaaggtataaaccatttgttatgtttgaattaagtgatggtactttccagttcaatttcaaagatcatcataaaatggcaatatccgacggaggtaaattggtgacctacatttctccctcccatgaaagcaccacatatcccttagttgaagtattgaaatatggcgagatcccaggatatccagaaagtaactttagagagaaattaactttgataaaggaaggtttgaagcagaagtccacaattgttaccgtagattga

SEQ ID NO: 8355 - DNA, 231 bp, Saccharomyces cerevisiae
atgatctttgaatgtacatcctttgaaacaaggcatatcttgaacagttactcttgtgctactcaactttcgtacaatacatatagaatcactgagaaagtaaatccaattcaagcggcagtttcaaagaacaataagccttttgtgtcaaattctgattctgctttttttcctattttttcatccttcaattttgtggcatatactacattaactttcaagaaaacttaa

SEQ ID NO: 8356 - DNA, 231 bp, Artificial Sequence
  Description of Artificial Sequence: Synthetic polynucleotide
atgatctttgaatgtacatcctttgaaacaaggcatatcttgaacagttactcttgtgctactcaactttcttacaatacatatagaatcactgagaaagtaaatccaattcaagcggcagtttccaagaacaataagccttttgtgagtaattctgattctgctttttttcctattttttcttccttcaattttgtggcatatactacattaactttcaagaaaacttga

SEQ ID NO: 8357 - DNA, 471 bp, Saccharomyces cerevisiae
atggcacgttcaagaggatcatcaagacctatatcgagatcgagacctactcagacaaggtccgcttctaccatggcggctccagttcatccacaacaacaacaacaaccaaatgcctattcacaccctcctgctgcaggtgcccaaacgagacagccaggtatgtttgcgcagatggcctccactgctgcaggtgttgccgttggtagcaccattggacacaccctaggtgcaggtattaccggtatgttttccggatccgggtctgattccgctcctgttgagcaacaacagcaaaatatggccaacacctccggccaaacccaaacggaccagcagttgggaagaacttgtgaaatagacgcgagaaactttacacgttgtttggatgaaaacaacggcaacttccagatatgtgattattacttgcagcaactaaaagcctgccaggaagctgcacgtcaatactaa

SEQ ID NO: 8358 - DNA, 471 bp, Artificial Sequence
  Description of Artificial Sequence: Synthetic polynucleotide
atggcacgttccagaggaagtagtagacctatatctagatctagacctactcagacaaggtccgcttctaccatggcggctccagttcatccacaacaacaacaacaaccaaatgcctattctcaccctcctgctgcaggtgcccaaacgagacagccaggtatgtttgcgcagatggcctccactgctgcaggtgttgccgttggtagcaccattggacacaccttgggtgcaggtattaccggtatgttttccggatccgggtctgattccgctcctgttgagcaacaacagcaaaatatggccaacacctccggccaaacccaaacggaccagcagttgggaagaacttgtgaaatagacgcgagaaactttacacgttgtttggatgaaaacaacggcaacttccagatatgtgattattacttgcagcaattgaaagcctgccaggaagctgcacgtcaatactga

SEQ ID NO: 8359 - DNA, 597 bp, Saccharomyces cerevisiae
atgtcaatttctctattaggtagaattgtttcacaacaattctccggcatacgggcggctgagccagggagatctctatatttaccgtttaccttactattgaaacagcccggtgcttacaaggtgagcctacacagatatgtacatagcacccaaacgaagagccacttgagctttttaatgaataataacgatataacaccttttcaaaaatttacagttaaagttctcaaagagcagtgcaaatcaagagggttaaaattatcaggtcgcaaatcagatttgctacaaagacttatcacgcacgattcatgttcaaataaaaaaagtagtgtgaagataaatgaacccaaaaaaaagaggatattaataaatgatccaatcaaaatcacgaagaaattggttagtgataaaacttttagaactattgaaaaaaatatttcttcactgcagaacacacctgttatcgaaactccctgcgacgttcattcacacttgcaaccaagggatagaatattcttattaggatttttcatgttatcgtgtctttggtggaacctcgaacctcaggaatctaaacctaccattgaccattag

SEQ ID NO: 8360 - DNA, 597 bp, Artificial Sequence
  Description of Artificial Sequence: Synthetic polynucleotide
atgtctatttctttattaggtagaattgtttctcaacaattctccggcataagagcggctgagccagggagatctttgtatttaccgtttaccttattattgaaacagcccggtgcttacaaggtgagcttgcacagatatgtacatagcacccaaacgaagagccacttgagctttttaatgaataataacgatataacaccttttcaaaaatttacagttaaagttctcaaagagcagtgcaaatctagagggttaaaattatctggtcgcaaatctgatttgttgcaaagacttatcacgcacgattcttgttctaataaaaaaagtagtgtgaagataaatgaacccaaaaaaaagaggatattaataaatgatccaatcaaaatcacgaagaaattggttagtgataaaacttttagaactattgaaaaaaatatttcttctttgcagaacacacctgttatcgaaactccctgcgacgttcattctcacttgcaaccaagggatagaatattcttattaggatttttcatgttaagttgtctttggtggaacctcgaacctcaggaatctaaacctaccattgaccattga

SEQ ID NO: 8361 - DNA, 1536 bp, Saccharomyces cerevisiae
atggacaattacgaaggcagtgatccttggaataccagttctaatgcatggactaaggatgatgatcacgtcgtttctaccaccaatagtgaacccagcctcaacggaatctctggtgagtttaacaccttgaacttttcaacacctctggacacaaatgaggaggatactggttttttaccgaccaacgatgtgcttgaagaaagtatctgggatgatagtagaaatcctcttggtgcaactggcatgagccaaactcccaatatagcggccaatgagacagttatagataagaatgatgctagagatcagaatatagaagaatctgaagccgacttacttgattggactaacaacgttagaaaaacatacagacctctagatgccgacatcatcatcattgaagagatacctgaaagagagggtttacttttcaagcacgcaaactatttagtgaaacatctcattgctcttccaagtacctcgccttctgaagaacgtactgtcgtaagaagatactctgatttcttatggttaagagaaattctgctgaaaagatacccttttagaatgatccctgagctacctcccaaaagaattggatcccaaaacgcagaccagctttttttgaagaaaagaagaatagggttatctagattcattaatttggtaatgaaacaccctaaattaagtaatgatgatttagtgttaacatttttaaccgtacgcactgacttaacaagttggagaaagcaagcaacctatgacacttcaaacgaattcgctgataaaaagatatcacaagaatttatgaaaatgtggaaaaaagagtttgcagaacaatggaaccaggctgcatcttgtatcgatacctcgatggaattatggtatagaatcacgcttctcttggaaaggcatgaaaaaagaattatgcaaatggtacacgaaagaaatttttttgagacactagtggataactttagcgaagtgactccaaaactatatccggtacaacaaaatgataccatattggacattaataacaatttgagtataattaaaaaacacctagaaactacgagtagtatctgcaaacaagaaacagaagaaatatcgggaacgttatcgccaaaattcaaaattttcacggacatcttactttctttgagaagtttatttgagagatacaaaattatggctgcaaataacgtagttgaattgcaaagacatgtcgaattgaacaaagagaaattggaatcgatgaaaggaaaaccagatgtcagtggagcagagtacgacaggataaaaaaaatcatacagaaggatagaagaagcataatagagcaatcaaacagagcttggttgataagacaatgtattttggaagagtttacaatctttcaggaaacccaatttttaataacacgtgccttccaggattgggcaaaattgaactccaaccatgccggtctcaaactgaatgagtgggaaaagctcgtcacaagcatcatggatatgccgatttctcgtgaataa

SEQ ID NO: 8362 - DNA, 1536 bp, Artificial Sequence
  Description of Artificial Sequence: Synthetic polynucleotide
atggacaattacgaaggcagtgatccttggaataccagttctaatgcatggactaaggatgatgatcacgtcgtttctaccaccaatagtgaacccagcctcaacggaatctctggtgagtttaacaccttgaacttttctacacctttggacacaaatgaggaggatactggttttttaccgaccaacgatgtgcttgaagaaagtatctgggatgatagtagaaatcctcttggtgcaactggcatgagccaaactcccaatatagcggccaatgagacagttatagataagaatgatgctagagatcagaatatagaagaatctgaagccgacttacttgattggactaacaacgttagaaaaacatacagacctttggatgccgacatcatcatcattgaagagatacctgaaagagagggtttacttttcaagcacgcaaactatttagtgaaacatctcattgctcttccaagtacctctccttctgaagaacgtactgtcgtaagaagatactctgatttcttatggttaagagaaattttattgaaaagatacccttttagaatgatccctgagcttcctcccaaaagaattggatcccaaaacgcagaccagctttttttgaagaaaagaagaatagggttatctagattcattaatttggtaatgaaacaccctaaattaagtaatgatgatttagtgttaacatttttaaccgtacgcactgacttaacaagttggagaaagcaagcaacctatgacacttctaacgaattcgctgataaaaagatatctcaagaatttatgaaaatgtggaaaaaagagtttgcagaacaatggaaccaggctgcatcttgtatcgatacctccatggaattatggtatagaatcacgcttctcttggaaaggcatgaaaaaagaattatgcaaatggtacacgaaagaaatttttttgagacattagtggataactttagcgaagtgactccaaaactttatccggtacaacaaaatgataccatattggacattaataacaatttgagtataattaaaaaacacttggaaactacgagtagtatctgcaaacaagaaacagaagaaatatctggaacgttatctccaaaattcaaaattttcacggacatcttactttctttgagaagtttatttgagagatacaaaattatggctgcaaataacgtagttgaattgcaaagacatgtcgaattgaacaaagagaaattggaaagtatgaaaggaaaaccagatgtcagtggagcagagtacgacaggataaaaaaaatcatacagaaggatagaagaagcataatagagcaaagtaacagagcttggttgataagacaatgtattttggaagagtttacaatctttcaggaaacccaatttttaataacacgtgccttccaggattgggcaaaattgaactccaaccatgccggtctcaaattgaatgagtgggaaaagctcgtcacaagcatcatggatatgccgatttctcgtgaatga

SEQ ID NO: 8363 - DNA, 1167 bp, Saccharomyces cerevisiae
atggcaaattcgccgaaaaagccatctgatggcactggagtatcagcgtcagacacgcctaaatatcaacataccgtcccagaaacgaaaccagcatttaatttgtcaccaggtaaagctagtgagctatcacatagccttccgtcgcctagccagataaaatcaaccgcacatgtatcttcaactcacaatgatgcggcaggtaatacggatgattctgttcttcctaaaaatgtatcacccacaactaatttgagagttgaaagtaatggagatacaaacaatatgttctctagccctgctggactagctctaccaaaaaaggatgataaaaaaaaaaacaagggtacgagtaaagcagattctaaagatggcaaagcatccaactcctcaggacagaatgcacaacaacaatcagacccaaataaaatgcaagatgtccttttttccgcaggtatcgatgttagggaggaggaggctcttctaaattcatctattaatgcctcaaaatcccaagttcaaacaaataacgttaagatccccaaccatttaccattccttcacccggaacaagtttccaattatatgaggaaagtcggaaaagagcaaaacttcaacctgacccctacaaagaatcctgaaattttggacatgatgtcaagtgcctgcgaaaactatatgagagatatcctaacaaatgccattgtcatctcccgacatagaagaaaagcagtcaagataaattctggtagaagaagtgaagtttctgcggctttaagagccattgcactaattcaaaaaaaagaagaagaaaggcgtgtgaaaaaaagaattgcgttgggactcgagaaggaagattatgaaaataagattgattccgaagagacgttacacagagcatcgaacgttacggctggccttagagcaggtagtaaaaaacagtatggttggctaacttcatcagtaaataagccgacgtccttgggagcaaaatcttcaggcaaagtcgcctccgacatcacggctagaggagaaagtgggctaaagtttagagaagctagagaggagcctggtatagtaatgagggatttactctttgctctcgaaaataggcgcaacagcgttcagactattatttcaaagggttatgccaagatcagagattaa

SEQ ID NO: 8364 - DNA, 1167 bp, Artificial Sequence
  Description of Artificial Sequence: Synthetic polynucleotide
atggcaaattctccgaaaaagccatctgatggcactggagtatctgcgtctgacacgcctaaatatcaacataccgtcccagaaacgaaaccagcatttaatttgtctccaggtaaagctagtgagttatctcatagccttccgtctcctagccagataaaatctaccgcacatgtatcttctactcacaatgatgcggcaggtaatacggatgattctgttcttcctaaaaatgtatctcccacaactaatttgagagttgaaagtaatggagatacaaacaatatgttctctagccctgctggattggctttgccaaaaaaggatgataaaaaaaaaaacaagggtacgagtaaagcagattctaaagatggcaaagcatccaactccagtggacagaatgcacaacaacaatctgacccaaataaaatgcaagatgtccttttttccgcaggtatcgatgttagggaggaggaggctcttttgaattcttctattaatgcctccaaatcccaagttcaaacaaataacgttaagatccccaaccatttaccattccttcacccggaacaagtttccaattatatgaggaaagtcggaaaagagcaaaacttcaacttgacccctacaaagaatcctgaaattttggacatgatgagcagtgcctgcgaaaactatatgagagatatcttaacaaatgccattgtcatctccagacatagaagaaaagcagtcaagataaattctggtagaagaagtgaagtttctgcggctttaagagccattgcattgattcaaaaaaaagaagaagaaaggcgtgtgaaaaaaagaattgcgttgggactcgagaaggaagattatgaaaataagattgattccgaagagacgttacacagagcatctaacgttacggctggccttagagcaggtagtaaaaaacagtatggttggttgacttcttctgtaaataagccgacgtccttgggagcaaaatcttctggcaaagtcgcctccgacatcacggctagaggagaaagtgggttgaagtttagagaagctagagaggagcctggtatagtaatgagggatttactctttgctctcgaaaataggcgcaacagcgttcagactattatttccaagggttatgccaagatcagagattga

SEQ ID NO: 8365 - DNA, 2121 bp, Saccharomyces cerevisiae
atgcaattacggaacatattacaggctagctcgctaatttctggactttcgctcgctgcagattcgtcgtccactactggtgatggttatgctccatcaataattccttgtcccagtgatgatacctctttagttagaaacgcgtctggcttatctaccgctgaaactgattggttaaagaaaagagatgcgtacactaaagaagctttacattccttcttaagcagagctacttctaacttcagtgacacttctttgctatccactcttttcagtagtaactcttccaatgtacccaaaattggtattgcatgctctggtggtggttatcgtgccatgttgggtggtgctggtatgattgctgctatggacaatcgtactgatggtgctaacgagcatggtcttggtggtttactacaaagttccacgtatctatcgggtttgtccggtggtaactggttgactggtactttggcatggaacaattggacctctgtacaggaaattgtagaccatatgagtgagagcgattccatctggaatatcacgaaatccattgtgaaccctggtggctctaatttgacctacacaattgaaagatgggagtccattgtacaagaagtgcaggctaagtctgatgcaggcttcaatatatctttgtcggatttgtgggcccgtgcactttcttacaacttctttccaagcttgccagatgctggctccgctttgacttggtcctctttgagagatgttgatgtgttcaaaaacggtgaaatgcctttaccaattactgttgcagatggtagatacccaggtaccaccgtgataaacttgaatgccactcttttcgagttcactccatttgaaatgggttcttgggatccttctttgaacgcttttacggatgtgaaatatctaggtaccaacgttacaaatggtaaaccggtcaacaaggatcaatgcgtttctggttacgataatgctggatttgtaattgccacatccgccagtttattcaacgaattttccctggaagcttccacttcgacctattataaaatgattaatagttttgccaacaagtacgttaacaacctatcccaagatgacgatgatattgcaatttacgctgcaaatccattcaaggatacagaatttgttgaccgcaattacacttccagtattgttgatgccgatgatttgtttttagttgatggtggtgaggacggccaaaatttgccgttggttccactaatcaagaaggaacgtgacttggatgtggtgttcgcattggatatatccgacaatactgatgaatcatggccaagtggtgtgtgcatgacgaacacttatgagcgccagtattctaagcaaggtaaaggaatggctttcccatatgttccagacgttaacaccttccttaacttgggcttaactaataagccaacgttttttggttgtgatgcaaaaaatttgacggacttggagtatattccacctttagttgtatatatcccaaacacaaaacattcattcaatggtaaccaaagtactttgaagatgaactacaatgttacagaacgtcttggaatgatcagaaatggttttgaagctgctacaatgggcaactttacggatgactctaactttttaggttgcataggttgtgccatcattagacgtaagcaagaaagcctaaatgccaccttgccccctgaatgtaccaaatgttttgcggattactgctggaacggcacactaagtacctcagctaatcctgaactatcgggaaatagtacgtatcaaagcggtgctattgcctctgcaatctctgaggctactgacggtattccaataacggctctcttaggttcatcaacctccggaaatactacatcaaactcaacaacctcgacttcatcaaatgtcacttctaactcaaactcttcgtcaaatacaactttaaactcaaattcttcatcctcttcaatttcttcctctacagctcgttcttcttcctctacggcaaacaaagcgaatgctgcggctatttcctatgcgaacactaatactctaatgagtttgttaggtgccataacagcattatttggactaatttag

SEQ ID NO: 8366 - DNA, 2121 bp, Artificial Sequence
  Description of Artificial Sequence: Synthetic polynucleotide
atgcaattaagaaacatattacaggctagctctttgatttctggactttctctcgctgcagattcttcttccactactggtgatggttatgctccaagtataattccttgtcccagtgatgatacctctttagttagaaacgcgtctggcttatctaccgctgaaactgattggttaaagaaaagagatgcgtacactaaagaagctttacattccttcttaagcagagctacttctaacttcagtgacacttctttgttatccactcttttcagtagtaactcttccaatgtacccaaaattggtattgcatgctctggtggtggttatcgtgccatgttgggtggtgctggtatgattgctgctatggacaatcgtactgatggtgctaacgagcatggtcttggtggtttattacaaagttccacgtatttatctggtttgtccggtggtaactggttgactggtactttggcatggaacaattggacctctgtacaggaaattgtagaccatatgagtgagagcgattccatctggaatatcacgaaatccattgtgaaccctggtggctctaatttgacctacacaattgaaagatgggagtccattgtacaagaagtgcaggctaagtctgatgcaggcttcaatatatctttgagtgatttgtgggcccgtgcactttcttacaacttctttccaagcttgccagatgctggctccgctttgacttggtcctctttgagagatgttgatgtgttcaaaaacggtgaaatgcctttaccaattactgttgcagatggtagatacccaggtaccaccgtgataaacttgaatgccactcttttcgagttcactccatttgaaatgggttcttgggatccttctttgaacgcttttacggatgtgaaatatttgggtaccaacgttacaaatggtaaaccggtcaacaaggatcaatgcgtttctggttacgataatgctggatttgtaattgccacatccgccagtttattcaacgaattttccttagaagcttccacttctacctattataaaatgattaatagttttgccaacaagtacgttaacaacctttcccaagatgacgatgatattgcaatttacgctgcaaatccattcaaggatacagaatttgttgaccgcaattacacttccagtattgttgatgccgatgatttgtttttagttgatggtggtgaggacggccaaaatttgccgttggttccattgatcaagaaggaacgtgacttggatgtggtgttcgcattggatatatccgacaatactgatgaaagttggccaagtggtgtgtgcatgacgaacacttatgagcgccagtattctaagcaaggtaaaggaatggctttcccatatgttccagacgttaacaccttccttaacttgggcttaactaataagccaacgttttttggttgtgatgcaaaaaatttgacggacttggagtatattccacctttagttgtatatatcccaaacacaaaacattctttcaatggtaaccaaagtactttgaagatgaactacaatgttacagaacgtcttggaatgatcagaaatggttttgaagctgctacaatgggcaactttacggatgactctaactttttaggttgcataggttgtgccatcattagacgtaagcaagaaagcttgaatgccaccttgccccctgaatgtaccaaatgttttgcggattactgctggaacggcacattgagtaccagtgctaatcctgaattatctggaaatagtacgtatcaaagcggtgctattgcctctgcaatctctgaggctactgacggtattccaataacggctctcttaggttcttccacctccggaaatactacaagtaactccacaacctctacttcttccaatgtcacttctaactccaactcttcttccaatacaactttaaacagtaattcttcttcctcttccatttcttcctctacagctcgttcttcttcctctacggcaaacaaagcgaatgctgcggctatttcctatgcgaacactaatactttaatgagtttgttaggtgccataacagcattatttggattgatttga

SEQ ID NO: 8367 - DNA, 381 bp, Saccharomyces cerevisiae
atgcggaagaaatgtccgcaaggtaaaaaattgttgaaaaaggcgacgcgtccctttgtaggagcttttcgaaggcgtatacgagccaagaaaaaccttatttcccagtttggccagaccggctgcattgggtgcgacggtaaattctctataggcatcaccattgaaaagtatgtccttaatttagtcgtgagaatcatcattgtgttcgccctttgtcgtataaccgaattgagtgtctttgattcatctctaaggtgtaaaagcagaaaaaccagattatctaaagctgcaagaaagaaagaaactgatcattttcatgaacagtgcagatatgtggaagtgaaatttggcctgcagatggcatatctgcaatcctag

SEQ ID NO: 8368 - DNA, 381 bp, Artificial Sequence
  Description of Artificial Sequence: Synthetic polynucleotide
atgagaaagaaatgtccgcaaggtaaaaaattgttgaaaaaggcgacgcgtccctttgtaggagcttttagaaggcgtataagagccaagaaaaaccttatttcccagtttggccagaccggctgcattgggtgcgacggtaaattctctataggcatcaccattgaaaagtatgtccttaatttagtcgtgagaatcatcattgtgttcgccctttgtcgtataaccgaattgagtgtctttgattcttctttgaggtgtaaaagcagaaaaaccagattatctaaagctgcaagaaagaaagaaactgatcattttcatgaacagtgcagatatgtggaagtgaaatttggcttgcagatggcatatttacaatcctga

SEQ ID NO: 8369 - DNA, 1995 bp, Saccharomyces cerevisiae
atgaagttgcagagtttgttggtttctgctgcagttttgacttctctaacagagaacgttaacgcttggtcaccaaataacagttacgtccctgcgaacgtaacctgtgatgatgatattaacttagtcagagaagcatctggtttgtcagataacgaaacagaatggctgaaaaaaagagatgcatacaccaaggaggctttgcattcttttttgaatagggccacttcgaatttcagtgacacttccttgctatccactctttttggtagcaactcttccaatatgcctaagattgccgtcgcctgttctggtggtggttaccgtgccatgttgtctggtgctggtatgcttgctgctatggacaatcgtactgatggcgcaaatgagcatggtcttggtgggctgctgcaaggtgcaacttacttggcaggtctgtcgggtggtaactggttaacaagtactttggcttggaacaactggacgtctgtgcaagctatcgtggataatacaacagaatctaactcaatttgggacatctctcattcaattcttaccccagacggcattaacatctttaagactgggagtagatgggacgacatatcagatgacgttcaggataaaaaagacgccggtttcaacatctctttggcggatgtttggggccgtgctcttgcgtacaatttttggccaagcttacaccgtggtggtgtagggtacacatggtcaactttaagggaagctgatgtcttcaagaatggagaaatgcccttccctatcactgttgcagacggtagatacccaggtaccaccgtgataaacttgaatgccactcttttcgaatttaatccctttgaaatgggttcatgggaccccactttgaacgcatttacggatgtgaagtatttaggtaccaacgttacaaacggtaaaccagttaataaaggccaatgcattgccgggtttgataacactggtttcataacagccacttcatctacgttgtttaaccaatttttactaagattgaattctaccgatttaccttcatttattgctaacttagccaccgatttcctggaagatttatccgacaatagtgacgatattgcaatttacgccccaaatccattcaaggaagctaattttcttcaaaagaacgcaacctccagtattatcgaatcagaatatctatttttggttgatggtggtgaagataaccaaaatattcctttagttccattgttgcaaaaggaacgtgaactagatgttatttttgcattagacaattctgctgatactgacgactattggccagatggtgcttcattagttaacacttatcagcgtcaatttggcagccaaggtctcaatttgtctttcccatatgttccagatgtgaacacatttgtcaacttggggttgaacaaaaagccaaccttttttggttgtgatgcaagaaatttgacagacttggagtacattccaccattaattgtttacattccaaattcaagacattcatttaatggtaaccaaagtacttttaagatgtcatactccgattcagaacgtcttggtatgattaagaatgggtttgaagctgccacaatgggtaattttactgatgattctgatttcttgggctgtgttggttgcgccattatcagacgtaagcaacaaaacttgaatgctacattgccctctgaatgcagccagtgttttaccaactactgctggaacggtactattgacagcaggtcagtctcaggtgtaggaaatgatgattattcttcttctgcttccttgtctgcctccgccgctgctgcctctgcctctgcctctgcctctgcttccgcctctgcctctgcttctgggtcttccactcataagaaaaatgcgggcaatgctttggtgaattattctaacttaaacactaacacttttattggtgtcttaagtgtcattagtgccgtcttcggtctaatttag

SEQ ID NO: 8370 - DNA, 1995 bp, Artificial Sequence
  Description of Artificial Sequence: Synthetic polynucleotide
atgaagttgcagagtttgttggtttctgctgcagttttgacttctttaacagagaacgttaacgcttggtctccaaataacagttacgtccctgcgaacgtaacctgtgatgatgatattaacttagtcagagaagcatctggtttgagtgataacgaaacagaatggttgaaaaaaagagatgcatacaccaaggaggctttgcattcttttttgaatagggccacttccaatttcagtgacacttccttgttatccactctttttggtagcaactcttccaatatgcctaagattgccgtcgcctgttctggtggtggttaccgtgccatgttgtctggtgctggtatgcttgctgctatggacaatcgtactgatggcgcaaatgagcatggtcttggtgggttgttgcaaggtgcaacttacttggcaggtttatctggtggtaactggttaacaagtactttggcttggaacaactggacgtctgtgcaagctatcgtggataatacaacagaatctaactctatttgggacatctctcattctattcttaccccagacggcattaacatctttaagactgggagtagatgggacgacatatctgatgacgttcaggataaaaaagacgccggtttcaacatctctttggcggatgtttggggccgtgctcttgcgtacaatttttggccaagcttacaccgtggtggtgtagggtacacatggtctactttaagggaagctgatgtcttcaagaatggagaaatgcccttccctatcactgttgcagacggtagatacccaggtaccaccgtgataaacttgaatgccactcttttcgaatttaatccctttgaaatgggttcttgggaccccactttgaacgcatttacggatgtgaagtatttaggtaccaacgttacaaacggtaaaccagttaataaaggccaatgcattgccgggtttgataacactggtttcataacagccacttcttctacgttgtttaaccaatttttattaagattgaattctaccgatttaccttcttttattgctaacttagccaccgatttcttggaagatttatccgacaatagtgacgatattgcaatttacgccccaaatccattcaaggaagctaattttcttcaaaagaacgcaacctccagtattatcgaaagtgaatatttatttttggttgatggtggtgaagataaccaaaatattcctttagttccattgttgcaaaaggaacgtgaattagatgttatttttgcattagacaattctgctgatactgacgactattggccagatggtgcttctttagttaacacttatcagcgtcaatttggcagccaaggtctcaatttgtctttcccatatgttccagatgtgaacacatttgtcaacttggggttgaacaaaaagccaaccttttttggttgtgatgcaagaaatttgacagacttggagtacattccaccattaattgtttacattccaaattctagacattcttttaatggtaaccaaagtacttttaagatgagttactccgattctgaacgtcttggtatgattaagaatgggtttgaagctgccacaatgggtaattttactgatgattctgatttcttgggctgtgttggttgcgccattatcagacgtaagcaacaaaacttgaatgctacattgccctctgaatgcagccagtgttttaccaactactgctggaacggtactattgacagcaggtccgtctctggtgtaggaaatgatgattattcttcttctgcttccttgtctgcctccgccgctgctgcctctgcctctgcctctgcctctgcttccgcctctgcctctgcttctgggtcttccactcataagaaaaatgcgggcaatgctttggtgaattattctaacttaaacactaacacttttattggtgtcttaagtgtcattagtgccgtcttcggtttgatttga

SEQ ID NO: 8371 - DNA, 468 bp, Saccharomyces cerevisiae
atgtatgacttactcgagcaaaaattttttgtgcgggaaatcaaattcgcttcagcctattatttacgcaccggcaaagccctgaacaatagcaagactccgatatttcagcgaaagcattctttgcctgcgtggctttcgtccgcggttattattactgcgcctgttagcaacgacggaagtcactcgattctatttgctcgtaaaactctaagaatgataatgcctatgtttagtccgcttttcaacagaagtcctgacgattgcccttctcatctgaccgctacccatatctttcagcaattcagcgctatgctggattacggacagagtacaaaggaagccactaacaagcgcaggttaataaagggttctgacctacttgttgccttggatcggaattgtattccttcagccccctttgtccccgaaattgccctgcgtaaaagcggcgcagtggggtcctaa

SEQ ID NO: 8372 - DNA, 468 bp, Artificial Sequence
  Description of Artificial Sequence: Synthetic polynucleotide
atgtatgacttactcgagcaaaaattttttgtgagagaaatcaaattcgcttctgcctattatttacgcaccggcaaagccttgaacaatagcaagactccgatatttcagagaaagcattctttgcctgcgtggctttcctccgcggttattattactgcgcctgttagcaacgacggaagtcactctattttatttgctcgtaaaactttgagaatgataatgcctatgtttagtccgcttttcaacagaagtcctgacgattgcccttctcatttgaccgctacccatatctttcagcaattcagcgctatgcttgattacggacagagtacaaaggaagccactaacaagcgcaggttaataaagggttctgacttacttgttgccttggatagaaattgtattccttctgccccctttgtccccgaaattgccttgcgtaaaagcggcgcagtggggtcctga

SEQ ID NO: 8373 - DNA, 540 bp, Saccharomyces cerevisiae
atggttaaggtatatattcatgacaacaaggttgactccgattatcgcgcaccccacaattctggaacagaactttccctggatgaattagccaagttaggagtgatttataaatactgtgcaaatgaggaagaagtgaatgaaattgctaggcaaagagaatataaaaatagagatgtggtcaacatctgcgaaggttccttcaaaagtgaagcagagtttaatgaaaaactagcaacattctaccaagagcatttacatgaagacgaagaaataagatactgtctcgagggtgctggatactttgacgtcagggatgcttccacaccagagaactggattaggtgtttggtagagtcaggtgatttactgattcttccaccaggcatctatcatcgtttcaccttgacaactagcaaccacatcaaggccttgagactgtttaaggacgagcccaaatggcaagctatcaacaggtcaaatcaggctgattcattgcctgtacgcaaggactacattgccctgatcaatcagtactaa

SEQ ID NO: 8374 - DNA, 540 bp, Artificial Sequence
  Description of Artificial Sequence: Synthetic polynucleotide
atggttaaggtatatattcatgacaacaaggttgactccgattatcgcgcaccccacaattctggaacagaactttccttggatgaattagccaagttaggagtgatttataaatactgtgcaaatgaggaagaagtgaatgaaattgctaggcaaagagaatataaaaatagagatgtggtcaacatctgcgaaggttccttcaaaagtgaagcagagtttaatgaaaaattggcaacattctaccaagagcatttacatgaagacgaagaaataagatactgtctcgagggtgctggatactttgacgtcagggatgcttccacaccagagaactggattaggtgtttggtagagtctggtgatttattgattcttccaccaggcatctatcatcgtttcaccttgacaactagcaaccacatcaaggccttgagattatttaaggacgagcccaaatggcaagctatcaacaggtctaatcaggctgattctttgcctgtacgcaaggactacattgccttgatcaatcagtactga

SEQ ID NO: 8375 - DNA, 1218 bp, Saccharomyces cerevisiae
atgtcaacaacaggtccgttagatgctactttaataagggacgttgcggttgctactgccaccaaagcatcatacgatatgagcgatactctatattcatatctacccaaggtcgaccaattttatattcctgaatggcttacaatgcaattcattgccaacaatttgatcagctttacccccctattttcatatggtaccacgatcattagcattgagaaatgcaagactgctttagggttttcaatagatatttgtgccacaatgttgatcgctagtatcctaagaatatcttactatctcattacaccgtatgaaatcactttgttgaggcagtcattagtgatgatttttattcaactgatcttgctgagaacaagcttaaaatatagacctgatgagtacaaataccaaaatctcaccgatgtagagtcattgtcacatttgattcacgacatatggttcgagttttttagctgcattaatagaccgaaatttttaagtgaagattggaagaatctgatcaaatctctttcgttcacaaatttactgaaattttcattcaaaatttttttggcatttttttataaaattttgaaattctttgacccaaatttcaaaagaattggagcgttttggcagtgggatgacgacaaaaatttctggaggtttttagctctttttgcaactgtacaaatattggtcacatttttcatctctaatattttaaattgggactcactagctcaaggactgggctctatcatagggtcgttgggtttattggtggagtcgcttttgccgttaccacaaatcgccattctttataaattgaagtctgttcaaggtttcaaattgatccttttggtaagctggctttgtggtgatacactgaaaatcacttacctgatatttggtgcgaaaaatatttctgctttgtttgttatttttgcattatttcaaatgtcattagacttttacatcggtggtcaatacatttactacagatactattatccaaagttaaggcatcaacatcaccctaatgacagtaattcgccatcagatgaagatgaaagcgaaatgtacgaattagatctttttaataccttacaaaaggatgtcgaaaaggccttgaaacaggatagtaatgatacgtcagattcacctcaagatgaccaagtgggtaaatctcaggcacaggcggtaacgctatag

SEQ ID NO: 8376 - DNA, 1218 bp, Artificial Sequence
  Description of Artificial Sequence: Synthetic polynucleotide
atgtctacaacaggtccgttagatgctactttaataagggacgttgcggttgctactgccaccaaagcaagctacgatatgagcgatactttatattcttatttacccaaggtcgaccaattttatattcctgaatggcttacaatgcaattcattgccaacaatttgatcagctttacccccttattttcttatggtaccacgatcattagcattgagaaatgcaagactgctttagggttttccatagatatttgtgccacaatgttgatcgctagtatcttaagaatatcttactatctcattacaccgtatgaaatcactttgttgaggcagtctttagtgatgatttttattcaattgatcttgttaagaacaagcttaaaatatagacctgatgagtacaaataccaaaatctcaccgatgtagagtctttgtctcatttgattcacgacatatggttcgagttttttagctgcattaatagaccgaaatttttaagtgaagattggaagaatttgatcaaatctctttctttcacaaatttattgaaattttctttcaaaatttttttggcatttttttataaaattttgaaattctttgacccaaatttcaaaagaattggagcgttttggcagtgggatgacgacaaaaatttctggaggtttttagctctttttgcaactgtacaaatattggtcacatttttcatctctaatattttaaattgggactctttggctcaaggattgggctctatcatagggtctttgggtttattggtggagtctcttttgccgttaccacaaatcgccattctttataaattgaagtctgttcaaggtttcaaattgatccttttggtaagctggctttgtggtgatacattaaaaatcacttacttgatatttggtgcgaaaaatatttctgctttgtttgttatttttgcattatttcaaatgtctttagacttttacatcggtggtcaatacatttactacagatactattatccaaagttaaggcatcaacatcaccctaatgacagtaattctccaagtgatgaagatgaaagcgaaatgtacgaattagatctttttaataccttacaaaaggatgtcgaaaaggccttgaaacaggatagtaatgatacgtctgattctcctcaagatgaccaagtgggtaaatctcaggcacaggcggtaacgttgtga

SEQ ID NO: 8377 - DNA, 1626 bp, Saccharomyces cerevisiae
atgtctgaattcgctactagccgcgttgaaagtggctctcaacaaacttctatccactctactccgatagtgcagaaattagagacggatgaatctcctattcaaaccaaatctgaatacactaacgctgaactcccagcaaagccaatcgccgcatattggactgttatctgtttatgtctaatgattgcatttggtgggtttgtctttggttgggatactggtaccatctctggttttgttaatcaaaccgatttcaaaagaagatttggtcaaatgaaatctgatggtacctattatctttcggacgtccggactggtttgatcgttggtatcttcaatattggttgtgcctttggtgggttaaccttaggacgtctgggtgatatgtatggacgtagaattggtttgatgtgcgtcgttctggtatacatcgttggtattgtgattcaaattgcttctagtgacaaatggtaccaatatttcattggtagaattatctctggtatgggtgtcggtggtattgctgtcctatctccaactttgatttccgaaacagcaccaaaacacattagaggtacctgtgtttctttctatcagttaatgatcactctaggtattttcttaggttactgtaccaactatggtactaaagactactccaattcagttcaatggagagtgcctttgggtttgaactttgccttcgctattttcatgatcgctggtatgctaatggttccagaatctccaagattcttagtcgaaaaaggcagatacgaagacgctaaacgttctttggcaaaatctaacaaagtcaccattgaagatccaagtattgttgctgaaatggatacaattatggccaacgttgaaactgaaagattagccggtaacgcttcttggggtgagttattctccaacaaaggtgctattttacctcgtgtgattatgggtattatgattcaatccttacaacaattaactggtaacaattacttcttctattatggtactactattttcaacgccgtcggtatgaaagattctttccaaacttccatcgttttaggtatagtcaacttcgcatccactttcgtggccttatacactgttgataaatttggtcgtcgtaagtgtctattgggtggttctgcttccatggccatttgttttgttatcttctctactgtcggtgtcacaagcttatatccaaatggtaaagatcaaccatcttccaaggctgccggtaacgtcatgattgtctttacctgtttattcattttcttcttcgctattagttgggccccaattgcctacgttattgttgccgaatcctatcctttgcgtgtcaaaaatcgtgctatggctattgctgttggtgccaactggatttggggtttcttgattggtttcttcactcccttcattacaagtgcaattggattttcatacgggtatgtcttcatgggctgtttggtattttcattcttctacgtgtttttctttgtctgtgaaaccaagggcttaacattagaggaagttaatgaaatgtatgttgaaggtgtcaaaccatggaaatctggtagctggatctcaaaagaaaaaagagtttccgaggaataa

SEQ ID NO: 8378 - DNA, 1626 bp, Artificial Sequence
  Description of Artificial Sequence: Synthetic polynucleotide
atgtctgaattcgctactagccgcgttgaaagtggctctcaacaaacttctatccactctactccgatagtgcagaaattagagacggatgaatctcctattcaaaccaaatctgaatacactaacgctgaactcccagcaaagccaatcgccgcatattggactgttatctgtttatgtttgatgattgcatttggtgggtttgtctttggttgggatactggtaccatctctggttttgttaatcaaaccgatttcaaaagaagatttggtcaaatgaaatctgatggtacctattatctttctgacgtcaggactggtttgatcgttggtatcttcaatattggttgtgcctttggtgggttaaccttaggacgtttgggtgatatgtatggacgtagaattggtttgatgtgcgtcgttttggtatacatcgttggtattgtgattcaaattgcttctagtgacaaatggtaccaatatttcattggtagaattatctctggtatgggtgtcggtggtattgctgtcttgtctccaactttgatttccgaaacagcaccaaaacacattagaggtacctgtgtttctttctatcagttaatgatcactttaggtattttcttaggttactgtaccaactatggtactaaagactactccaattctgttcaatggagagtgcctttgggtttgaactttgccttcgctattttcatgatcgctggtatgttaatggttccagaatctccaagattcttagtcgaaaaaggcagatacgaagacgctaaacgttctttggcaaaatctaacaaagtcaccattgaagatccaagtattgttgctgaaatggatacaattatggccaacgttgaaactgaaagattagccggtaacgcttcttggggtgagttattctccaacaaaggtgctattttacctcgtgtgattatgggtattatgattcaatccttacaacaattaactggtaacaattacttcttctattatggtactactattttcaacgccgtcggtatgaaagattctttccaaacttccatcgttttaggtatagtcaacttcgcatccactttcgtggccttatacactgttgataaatttggtcgtcgtaagtgtttgttgggtggttctgcttccatggccatttgttttgttatcttctctactgtcggtgtcacaagcttatatccaaatggtaaagatcaaccatcttccaaggctgccggtaacgtcatgattgtctttacctgtttattcattttcttcttcgctattagttgggccccaattgcctacgttattgttgccgaatcctatcctttgcgtgtcaaaaatcgtgctatggctattgctgttggtgccaactggatttggggtttcttgattggtttcttcactcccttcattacaagtgcaattggattttcttacgggtatgtcttcatgggctgtttggtattttctttcttctacgtgtttttctttgtctgtgaaaccaagggcttaacattagaggaagttaatgaaatgtatgttgaaggtgtcaaaccatggaaatctggtagctggatctccaaagaaaaaagagtttccgaggaatga

SEQ ID NO: 8379 - DNA, 3834 bp, Saccharomyces cerevisiae
atgagcgagaaaaaagaagaagttaaaaacgccaccgttaaggtgactgtcaaacttccaaaagaagataaccattcgcataatacgaaacatctcaaaaagacccaaagttcaaaaaataatgatatatcttttgaaatcggcaaggaatccaaaattcaaactgttctagatgtgttggctatgattccaagttccaagtacctgacaaacgttgggctgaaaacaattgaaggtgactcccagctatctgatgaaatgtctataaaggaaattgttggtgagaaaagcgagttaaaacttcaattgatactgaagccatatagcgcaagagaggctttgaaacatgtgattactgttcgcgatttcatcggatttgcccaagaaacctcagatggattatctgaatttgctatttctactggttcaagcttttcctcgttaccgttgggtcctatcaaggaacgctcaaaacaagaagaaaaagacgagaagagcgatccagaagaaaagaaaaatactttcaaagatgtgactgacgaggaaaaactaaaatttaacgagatggttcacgaagtgttttctagctttaagaattcttcaattaacaaacttctcacctctgaatccaacatcatcacgccgtgcgtcaggtctttgagtttcgcaccttacaatcctgtacctccattttatagaagtaaaggtcatctattttacctacaaattgtcactttggaaggtgagagtttctatatcactgcaattccatctggattctatgtcaataaatcaaactcaactaagttcgatccttctccaaaagaaaacactgacgagaacgcgcactcatccctgatctattacagtctatttgacttgattgcttctcgctctaaaaaattcatttctcatgtccaagcattcgagaaaaaactatctgctttagattctacaagctatgtaagaccaagcaatactttcttgcataaaccatggtttgtttcttcattgccaccaaataacccagattatctgaggttacaaactgccgccttggataccacgccagaaagaaactttaatgatgaatttcaagccattaaagatttgactacgtcaacattacaagatcgtattgaaatggaaaggttgttttctaaagttgtacatgaattttctgttactgcagcatcaggcgctatgtcaattttttacagtgatttcgttgcaatgaacccagaatctccaactcgggatcaaattttcttaaaagacaatatcttttattcctatgtttccgacgttagtggcaattatgaagggaaaggtggggatgaagctgcaatcgctgcttccaaccaagacttgaagacaatcaatattttgaatcgcttgcatatgcacgaagttcgttatcttttaacaactgtagtcgaatttgcaggcagaagaattttggctcaaactccagtacctggactcttagctaccatgggtaacaaaattgtaaaagatgctaataccggcgaagaggttaccgaagattttgtcaatgatattaatgtaaagtacggccttgatgaaggtttgggaaagattgtttatgatgctgactttgattctgttttagaaaaaaagtttgtcaaggcattccatttgaaaaagcacaaagtcaacggtactgaattagcattttcatcgcaatccaagggaatagttggattcgataagaggcgctatattttggatttagccaacacgtatcccttggacatcaactttgctagacaaaactttgacaacatcgaagagactggaaaccgttacccacacaggcaaactttgttacgtccggagttagtagaaaagtggtggaataataaagttgagaaggaaggtgttgaatttgaaaaggcctatgaagaaaatttgtttagttataaccctgatgcttaccaggtcgaaggtattgaggacgctaatgttgacgaaatgtcgaactacttacaaaaagaagttattcccagcgttattcaagattatttatctggaaatttgagcactccttataatggtgaacatttagccgatactttacataagaatggtatcaacatgcgttacttgggtaaaattatcgagctttctcaaaaggaattggactcccaaattgtccactacgaacaaaatttgaaagctgttgaacaagacaacaaagaatatgaggattgggaaaaatcttatctgcaaaaaattgagaacatgattaaagagagacaagccaagattaataagctggtacaagaaggcaaagaggttccaaaagaactaactgaagatttgaaattaaacgatgaagaaatcaaaaagcccaccgatggaaaacctgtggtcgttgcctatgatgagctagtgccattaattaaaatttccgaattagaaattgtttcgcgttctttgaaacatgttttaaaagatttgagtaaagatgttccggtcttcttggttccatcactggtagcatacgttttcaatatgttagttggtatcaactacaatgctgatccgaagccagaaccagtcgacgaattttatccagtcaataagtgctcatttgctaaattaacacgctccgaattgctggaagctgtctctaaacaagccttcttgcgtttccgtcatcaattaccatccaattggatcgaagcttacatggaaaatcctttcaccctcattagaagtgtttcttacaaatttggtattcaattgctcaataaagaatacttctttactagagaacaattggaaagttataagcaaagtcttgacaagaaaattaggaacaagtttgtcgaaccaccaactaccttcagtttaagcgatttgaccattattccacgtgttaagttctcagaatatacttcttcagttagtgaggaattttgggctcaaggtgcttctatgatcaacgaagacaaacaaagtgctttgactttactcgctcaatcaattacagtcttagaagatgttaacaatattttacatcccgccgttgctgaaaagtacttgtcattatctgccatttataataagttagcattataccctgaagctatcgcgttctgtcgtaaagcatgtactatttatgaaagagttagcggtattgattcttttgaaatgatgagggctttaactaatttagcaattctagaattctctaatgaaagtccttataacgctactgtggtttataataggctcgcagaaatcctaaaagtttatgagttaccaaaaatccatcacccagcccccacaagcattttcaaccatttggaacaattagccctaggtgttcaagataccaaattggctattgaagtcttgggacaactaagctcctatgttgtggaattagaaggcaaagattcattagcatatggctataccgagtcacgtttaggtaatttgtttgcagcattgaaggatttccaccgtgcattagagcacatcactgtaacccaagggattttcaccaagcaattgggtatgaatcacacgcactcagcccaatcaagacagtgggttaatggtttaagctcattaataatggatttaaaacaaaagaagcaacttgcacaagatcaaatgtcgacaacgggatcaaattcagctggccataaaaaaaccaatcaccgtcaaaagaaggatgacgttaaacctgaattggctaacaaaagtgtggatgagttgttaacatttatagaaggcgattcttccaactctaagagcaaaaacaaaaccaacaataaaaagaagcatggtaagaaatag

SEQ ID NO: 8380 - DNA, 3834 bp, Artificial Sequence
  Description of Artificial Sequence: Synthetic polynucleotide
atgagcgagaaaaaagaagaagttaaaaacgccaccgttaaggtgactgtcaaacttccaaaagaagataaccattctcataatacgaaacatctcaaaaagacccaaagttctaaaaataatgatatatcttttgaaatcggcaaggaatccaaaattcaaactgttttggatgtgttggctatgattccaagttccaagtacttgacaaacgttgggttgaaaacaattgaaggtgactcccagctttctgatgaaatgtctataaaggaaattgttggtgagaaaagcgagttaaaacttcaattgatattgaagccatatagcgcaagagaggctttgaaacatgtgattactgttcgcgatttcatcggatttgcccaagaaacctctgatggattatctgaatttgctatttctactggttccagcttttcctctttaccgttgggtcctatcaaggaacgctctaaacaagaagaaaaagacgagaagagcgatccagaagaaaagaaaaatactttcaaagatgtgactgacgaggaaaaattgaaatttaacgagatggttcacgaagtgttttctagctttaagaattcttccattaacaaacttctcacctctgaatccaacatcatcacgccgtgcgtcaggtctttgagtttcgcaccttacaatcctgtacctccattttatagaagtaaaggtcatttattttacttacaaattgtcactttggaaggtgagagtttctatatcactgcaattccatctggattctatgtcaataaaagtaactctactaagttcgatccttctccaaaagaaaacactgacgagaacgcgcactcttccttaatctattacagtttatttgacttgattgcttctcgctctaaaaaattcatttctcatgtccaagcattcgagaaaaaattatctgctttagattctacaagctatgtaagaccaagcaatactttcttgcataaaccatggtttgtttcttctttgccaccaaataacccagattatttgaggttacaaactgccgccttggataccacgccagaaagaaactttaatgatgaatttcaagccattaaagatttgactacgagtacattacaagatcgtattgaaatggaaaggttgttttctaaagttgtacatgaattttctgttactgcagcatctggcgctatgtctattttttacagtgatttcgttgcaatgaacccagaatctccaactagagatcaaattttcttaaaagacaatatcttttattcctatgtttccgacgttagtggcaattatgaagggaaaggtggggatgaagctgcaatcgctgcttccaaccaagacttgaagacaatcaatattttgaatcgcttgcatatgcacgaagttcgttatcttttaacaactgtagtcgaatttgcaggcagaagaattttggctcaaactccagtacctggactcttagctaccatgggtaacaaaattgtaaaagatgctaataccggcgaagaggttaccgaagattttgtcaatgatattaatgtaaagtacggccttgatgaaggtttgggaaagattgtttatgatgctgactttgattctgttttagaaaaaaagtttgtcaaggcattccatttgaaaaagcacaaagtcaacggtactgaattagcattttcttctcaatccaagggaatagttggattcgataagaggcgctatattttggatttagccaacacgtatcccttggacatcaactttgctagacaaaactttgacaacatcgaagagactggaaaccgttacccacacaggcaaactttgttacgtccggagttagtagaaaagtggtggaataataaagttgagaaggaaggtgttgaatttgaaaaggcctatgaagaaaatttgtttagttataaccctgatgcttaccaggtcgaaggtattgaggacgctaatgttgacgaaatgtccaactacttacaaaaagaagttattcccagcgttattcaagattatttatctggaaatttgagcactccttataatggtgaacatttagccgatactttacataagaatggtatcaacatgcgttacttgggtaaaattatcgagctttctcaaaaggaattggactcccaaattgtccactacgaacaaaatttgaaagctgttgaacaagacaacaaagaatatgaggattgggaaaaatcttatttacaaaaaattgagaacatgattaaagagagacaagccaagattaataagttggtacaagaaggcaaagaggttccaaaagaattgactgaagatttgaaattaaacgatgaagaaatcaaaaagcccaccgatggaaaacctgtggtcgttgcctatgatgagttggtgccattaattaaaatttccgaattagaaattgtttctcgttctttgaaacatgttttaaaagatttgagtaaagatgttccggtcttcttggttccatctttagtagcatacgttttcaatatgttagttggtatcaactacaatgctgatccgaagccagaaccagtcgacgaattttatccagtcaataagtgctcttttgctaaattaacacgctccgaattgttggaagctgtctctaaacaagccttcttgcgtttccgtcatcaattaccatccaattggatcgaagcttacatggaaaatcctttcaccctcattagaagtgtttcttacaaatttggtattcaattgctcaataaagaatacttctttactagagaacaattggaaagttataagcaaagtcttgacaagaaaattaggaacaagtttgtcgaaccaccaactaccttcagtttaagcgatttgaccattattccacgtgttaagttctctgaatatacttcttctgttagtgaggaattttgggctcaaggtgcttctatgatcaacgaagacaaacaaagtgctttgactttactcgctcaatctattacagtcttagaagatgttaacaatattttacatcccgccgttgctgaaaagtacttgtctttatctgccatttataataagttagcattataccctgaagctatcgcgttctgtcgtaaagcatgtactatttatgaaagagttagcggtattgattcttttgaaatgatgagggctttaactaatttagcaattttggaattctctaatgaaagtccttataacgctactgtggtttataataggctcgcagaaatcttgaaagtttatgagttaccaaaaatccatcacccagcccccacaagcattttcaaccatttggaacaattagcccttggtgttcaagataccaaattggctattgaagtcttgggacaattgagctcctatgttgtggaattagaaggcaaagattctttagcatatggctataccgagtctcgtttaggtaatttgtttgcagcattgaaggatttccaccgtgcattagagcacatcactgtaacccaagggattttcaccaagcaattgggtatgaatcacacgcactccgcccaatctagacagtgggttaatggtttaagctctttaataatggatttaaaacaaaagaagcaacttgcacaagatcaaatgtctacaacgggaagtaattctgctggccataaaaaaaccaatcaccgtcaaaagaaggatgacgttaaacctgaattggctaacaaaagtgtggatgagttgttaacatttatagaaggcgattcttccaactctaagagcaaaaacaaaaccaacaataaaaagaagcatggtaagaaatga

SEQ ID NO: 8381 - DNA, 1560 bp, Saccharomyces cerevisiae
atggtcgctataatacctcatgcttcctttaccacaattaaactaacccagaaaactgagggaagccaaatgccaactgaggagatctgcaaaatcaatatgaggactcgtaaatttgatgtgggcgggaattctcgagattttgagtgcttttattcgaattttgttcaaactgttatattgttgggcacttttttttactgtgttgaaaggcttcagccgtggtccattgttaccgctgatatatcttataaacaaatctttgtaaatgtctttgtggtgtgtttgataatggttggtctgatattcacaaaatattggcaacatggttacaaaagcctacccaagttcgataccatttacagtttatatttaccgtttatggtttcgttgttgttcgatacatcatctacggtgataaatactattttgatcctttcggtattaaattcatatagatggcgaactcagttggtagtgatcattttacagctctgcctcatattttttaattttgaggctggtgacaggttaaagaatattattagcatagtaataaattctttactgtcgttaattttgaagtatattgggcaattgaaaagtttagataatatcgactctaatctttttagtatcctattaaccaatattctgtacgtttcagaggctggcacagtacattttagaattttgaagggcattatccttgctctcacaacaataatttcaattaactatgtgctcaaaaaggtaatgcactttaaaccgtttatgctgtcaatatcctttgccatcgggcttccactttttgccaataccttcattcatttagaagacggtgaaaatccgctactttggctggtaaaatatatcttagagtctactattcgtcaaaagattttgtttgcttggtcttcaattcttatactgtccataccaagtatattgatcgagaaggacagtctatcgttgaacacctcccgaaaattgtggcatttcatcattttcttactcataataccgtcattccaaatggattcaaactttgtgaaaattgcattgtccggaacaataccagtcttcttatcaattgagtacataagatttcaaaacctaccgccgttaggatctgctattgaattacaactaagaaggtttgctgatgatagggaccacagcgggccattgatcatatcatacctttatttactcttcggaatatcaacacctttattaatgaataactctccaatgggtctaataggattgggaattggtgattccttagcatctattattggtaaaaggtatggccgcattcgttggaaaggtacacaaaaaactttagagggaactcttgcgtttatagtaacgagttttatcgtttgtttggtattgttacgttttgataaagctgcaatttttaaccacctaactactttacaattgcttaccctttgtacactgagtggagtgctagaaggtaatagtgtgcttaatgacaatattttgatacctgcatttatgatgatttgtgaaaaattaattactctttga

SEQ ID NO: 8382 - DNA, 1560 bp, Artificial Sequence
  Description of Artificial Sequence: Synthetic polynucleotide
atggtcgctataatacctcatgcttcctttaccacaattaaattgacccagaaaactgagggaagccaaatgccaactgaggagatctgcaaaatcaatatgaggactcgtaaatttgatgtgggcgggaattctagagattttgagtgcttttattctaattttgttcaaactgttatattgttgggcacttttttttactgtgttgaaaggcttcagccgtggtccattgttaccgctgatatatcttataaacaaatctttgtaaatgtctttgtggtgtgtttgataatggttggtttgatattcacaaaatattggcaacatggttacaaaagcttgcccaagttcgataccatttacagtttatatttaccgtttatggtttctttgttgttcgatacatcttctacggtgataaatactattttgatcctttctgtattaaattcttatagatggagaactcagttggtagtgatcattttacagctctgcctcatattttttaattttgaggctggtgacaggttaaagaatattattagcatagtaataaattctttattatctttaattttgaagtatattgggcaattgaaaagtttagataatatcgactctaatctttttagtatcttattaaccaatattttatacgtttctgaggctggcacagtacattttagaattttgaagggcattatccttgctctcacaacaataatttccattaactatgtgctcaaaaaggtaatgcactttaaaccgtttatgctttccatatcctttgccatcgggcttccactttttgccaataccttcattcatttagaagacggtgaaaatccgttactttggttggtaaaatatatcttagagtctactattcgtcaaaagattttgtttgcttggtcttccattcttatattatccataccaagtatattgatcgagaaggacagtttatctttgaacacctccagaaaattgtggcatttcatcattttcttactcataataccgtccttccaaatggattccaactttgtgaaaattgcattgtccggaacaataccagtcttcttatccattgagtacataagatttcaaaacttaccgccgttaggatctgctattgaattacaattgagaaggtttgctgatgatagggaccacagcgggccattgatcatatcttacctttatttactcttcggaatatctacacctttattaatgaataactctccaatgggtttgataggattgggaattggtgattccttagcatctattattggtaaaaggtatggccgcattcgttggaaaggtacacaaaaaactttagagggaactcttgcgtttatagtaacgagttttatcgtttgtttggtattgttacgttttgataaagctgcaatttttaaccacttgactactttacaattgcttaccctttgtacattgagtggagtgttggaaggtaatagtgtgcttaatgacaatattttgatacctgcatttatgatgatttgtgaaaaattaattactctttga

SEQ ID NO: 8383 - DNA, 1560 bp, Saccharomyces cerevisiae
atgccttccgaatcatccgtctctatctacaagcttgatcagttggagtatcagtaccattatttgacaaaatcattacagaagtttgaaccaagatatccaaaaactgccaaattatacaattgtataggtaaaaagaacaaaaagaaaattgaaaaactgttaaactctttagagttgaaaactttggacaaagaactagatgaaagttactcaaagttactcaataataagattcactattacgagacgcatttatcaaaatgtataaaagaacaaattcagaaaatatccaaaaaaaattctagtaaagtgaaggatgctcaaaaaaataaatcaccctctatagatattgaaaagatgcttgctacgcagttgtcattagatgatttagcactcttcatgacaagatttaggctgatcaaaatcttacaccagaggatcaaacaaaaaagcaaaaagattgaaggtgatacgaataataaaacttggttgaataacaatgattatagtggttatatcaatgataagacaagtaagtggaacccaagcaatatatggaatgaagttattacgaagctgccaagttgtgaaaagttaaacgcactaattggtcaaagtaaaatcgttcaaaatctaaccgaatcattcgatttgagtatttgtctcatatttggatttgatgtaagcgctatgaaagcaaagaagtatggagcaagggagaagacggccaatgctaatcagacgcactccaacattgactatgacaccgatgacggcaatgaaaagaatgccatcgatagcaaatctaatgcgatcggcgcacaaactcaaagcaataaagaaacaacgtccgacaatgaggatctattgataaaggaatacgagggaatgctaggcagttcaggagatgaaggggaaggcggcggatacttgaaccctaatatcaattacaatgaagtaacagatgaagaacctagcgaagcgtcatccgatgaggatgacagtgacgaacgcttcagcgactctgaagagaatgaaccaaggagaaaaaaaccaaaattgcataatttacctgaactaatggctggttattacagtggaaatgacactgaagaggaaagcgatgaagacaacaaaaatgttaagggaaagaagaaaaagagagacacagcagaagaccgtacggccagagagcagatgtcaaacgagccaaagaggaaaaacagacgtgggcaaagggcaagaagaaagatttgggaaaaaaaatacggctcacaagccaagcacgttcaaagggaattggaaaaggaaatggaagatagaaagcagaggcaaatcgagtacgaagcaagagtagctaagcgtgaagctaaagcagcatcattagaggcctctaggagtagggaacgcgaagacagacgtactgaaacgaacaataagaaagaaaaagaaagtgcatccactggagaagaacatccttcttggattgcaaaaagattagctgaagaaaaattacaaaaagctaaatttgaaggtaagaagatcaaatttgattga

SEQ ID NO: 8384 - DNA, 1560 bp, Artificial Sequence
  Description of Artificial Sequence: Synthetic polynucleotide
atgccttccgaatcttccgtctctatctacaagcttgatcagttggagtatcagtaccattatttgacaaaatctttacagaagtttgaaccaagatatccaaaaactgccaaattatacaattgtataggtaaaaagaacaaaaagaaaattgaaaaattattaaactctttagagttgaaaactttggacaaagaattagatgaaagttactccaagttactcaataataagattcactattacgagacgcatttatccaaatgtataaaagaacaaattcagaaaatatccaaaaaaaattctagtaaagtgaaggatgctcaaaaaaataaaagtccctctatagatattgaaaagatgcttgctacgcagttgtctttagatgatttagcactcttcatgacaagatttaggttgatcaaaatcttacaccagaggatcaaacaaaaaagcaaaaagattgaaggtgatacgaataataaaacttggttgaataacaatgattatagtggttatatcaatgataagacaagtaagtggaacccaagcaatatatggaatgaagttattacgaagttaccaagttgtgaaaagttaaacgcattgattggtcaaagtaaaatcgttcaaaatttgaccgaatctttcgatttgagtatttgtctcatatttggatttgatgtaagcgctatgaaagcaaagaagtatggagcaagggagaagacggccaatgctaatcagacgcactccaacattgactatgacaccgatgacggcaatgaaaagaatgccatcgatagcaaatctaatgcgatcggcgcacaaactcaaagcaataaagaaacaacgtccgacaatgaggatttattgataaaggaatacgagggaatgcttggcagtagtggagatgaaggggaaggcggcggatacttgaaccctaatatcaattacaatgaagtaacagatgaagaacctagcgaagcgtcttccgatgaggatgacagtgacgaacgcttcagcgactctgaagagaatgaaccaaggagaaaaaaaccaaaattgcataatttacctgaattgatggctggttattacagtggaaatgacactgaagaggaaagcgatgaagacaacaaaaatgttaagggaaagaagaaaaagagagacacagcagaagaccgtacggccagagagcagatgtccaacgagccaaagaggaaaaacagacgtgggcaaagggcaagaagaaagatttgggaaaaaaaatacggctctcaagccaagcacgttcaaagggaattggaaaaggaaatggaagatagaaagcagaggcaaatcgagtacgaagcaagagtagctaagcgtgaagctaaagcagcatctttagaggcctctaggagtagggaacgcgaagacagacgtactgaaacgaacaataagaaagaaaaagaaagtgcatccactggagaagaacatccttcttggattgcaaaaagattagctgaagaaaaattacaaaaagctaaatttgaaggtaagaagatcaaatttgattga

SEQ ID NO: 8385 - DNA, 1617 bp, Saccharomyces cerevisiae
atgagttctgtcgcagaaaatataatacaacatgccactcataattctacgctacaccaattggctaaagaccagccctctgtaggcgtcactactgccttcagtatcctggatacacttaagtctatgtcatatttgaaaatatttgctactttaatctgtattcttttggtttgggaccaagttgcatatcaaatcaagaaaggttccatcgcaggtccaaagtttaagttctggcccatcatcggtccatttttggaatccttagatccaaagtttgaagaatataaggctaagtgggcatccggtccactttcatgtgtttctattttccataaatttgttgttatcgcatctactagagacttggcaagaaagatcttgcaatcttccaaattcgtcaaaccttgcgttgtcgatgttgctgtgaagatcttaagaccttgcaattgggtttttttggacggtaaagctcatactgattacagaaaatcattaaacggtcttttcactaaacaagctttggctcaatacttaccttcattggaacaaatcatggataagtacatggataagtttgttcgtttatctaaggagaataactacgagccccaggtctttttccatgaaatgagagaaattctttgcgccttatcattgaactctttctgtggtaactatattaccgaagatcaagtcagaaagattgctgatgattactatttggttacagcagcattggaattagtcaacttcccaattattatcccttacactaaaacatggtatggtaagaaaactgcagacatggccatgaagattttcgaaaactgtgctcaaatggctaaggatcatattgctgcaggtggtaagccagtttgtgttatggatgcttggtgtaagttgatgcacgatgcaaagaatagtaacgatgatgattctagaatctaccacagagagtttactaacaaggaaatctccgaagctgttttcactttcttatttgcttctcaagatgcctcttcttctttagcttgttggttgttccaaattgttgctgaccgtccagatgtcttagctaagatcagagaagaacaattggctgttcgtaacaatgacatgtctaccgaattgaacttggatttgattgagaaaatgaagtacaccaatatggtcataaaagaaactttgcgttacagacctcctgtcttgatggttccatatgttgttaagaagaatttcccagtttcccctaactataccgcaccaaagggcgctatgttaattccaaccttatacccagctttacatgatcctgaagtttacgaaaatcctgatgagttcatccctgaaagatgggtagaaggctctaaggctagtgaagcaaagaagaattggttggtttttggttgtggtccacacgtttgcttaggtcaaacatatgtcatgattaccttcgccgctttgttgggtaaatttgcactatatactgatttccatcatacagtgactccattaagtgaaaaaatcaaggttttcgctacaattttcccaaaagatgatttgttactgactttcaaaaagagagacccaattactggagaagtcttcgaataa

SEQ ID NO: 8386 - DNA, 1617 bp, Artificial Sequence
  Description of Artificial Sequence: Synthetic polynucleotide
atgagttctgtcgcagaaaatataatacaacatgccactcataattctacgttgcaccaattggctaaagaccagccctctgtaggcgtcactactgccttcagtatcttagatacacttaagtctatgtcttatttgaaaatatttgctactttaatctgtattcttttggtttgggaccaagttgcatatcaaatcaagaaaggttccatcgcaggtccaaagtttaagttctggcccatcatcggtccatttttggaatccttagatccaaagtttgaagaatataaggctaagtgggcatccggtccactttcctgtgtttctattttccataaatttgttgttatcgcatctactagagacttggcaagaaagatcttgcaatcttccaaattcgtcaaaccttgcgttgtcgatgttgctgtgaagatcttaagaccttgcaattgggtttttttggacggtaaagctcatactgattacagaaaatctttaaacggtcttttcactaaacaagctttggctcaatacttaccttctttggaacaaatcatggataagtacatggataagtttgttcgtttatctaaggagaataactacgagccccaggtctttttccatgaaatgagagaaattctttgcgccttatctttgaactctttctgtggtaactatattaccgaagatcaagtcagaaagattgctgatgattactatttggttacagcagcattggaattagtcaacttcccaattattatcccttacactaaaacatggtatggtaagaaaactgcagacatggccatgaagattttcgaaaactgtgctcaaatggctaaggatcatattgctgcaggtggtaagccagtttgtgttatggatgcttggtgtaagttgatgcacgatgcaaagaatagtaacgatgatgattctagaatctaccacagagagtttactaacaaggaaatctccgaagctgttttcactttcttatttgcttctcaagatgcctcttcttctttagcttgttggttgttccaaattgttgctgaccgtccagatgtcttagctaagatcagagaagaacaattggctgttcgtaacaatgacatgtctaccgaattgaacttggatttgattgagaaaatgaagtacaccaatatggtcataaaagaaactttgcgttacagacctcctgtcttgatggttccatatgttgttaagaagaatttcccagtttcccctaactataccgcaccaaagggcgctatgttaattccaaccttatacccagctttacatgatcctgaagtttacgaaaatcctgatgagttcatccctgaaagatgggtagaaggctctaaggctagtgaagcaaagaagaattggttggtttttggttgtggtccacacgtttgcttaggtcaaacatatgtcatgattaccttcgccgctttgttgggtaaatttgcattatatactgatttccatcatacagtgactccattaagtgaaaaaatcaaggttttcgctacaattttcccaaaagatgatttgttattaactttcaaaaagagagacccaattactggagaagtcttcgaatga

SEQ ID NO: 8387 - DNA, 2358 bp, Saccharomyces cerevisiae
atgcccatcggtaacccaatcaatacgaatgatatcaagtccaaccgcatgcgccaggaatcaaatatgagtgccgtgagcaatagcgaaagtactattggccagtccacccaacagcagcagcaacaacaacaatatctcggccagagcgttcaacctctgatgcccgtatcctaccaatacgtagttcctgaacagtggccgtacccgcaatattatcagcagccgcaatcccagtctcaacagcaactgcaatcccagcctcagatgtatcaagttcaagaatcctttcagagtagcggttctgactcaaatgcttccaatccaccttccacgtctgtaggtgttccttccaacgctactgcaactgcgttaccgaatggttctgcaatcaccaccaaaaaaagcaataacagtactaatatcagtaacaatgtaccatactactattattttccccaaatgcaagcccaacaatcaatggcatattcgtatccacaagcgtattattattatcctgcaaacggcgatggaaccactaacggtgcaacaccatctgtaaccagtaatcaagtccaaaaccccaatttggaaaaaacctactcaacctttgaacaacagcaacaacaccagcagcaacaacaattacaagctcaaacgtatccggcccaaccaccaaagataggtaatgcattttcaaagttcagtaaatctggaccaccttctgattcgtccagtggctctatgtctcccaattctaatcgcactagtcgcaatagtaatagtatctcgtccttagctcagcagcctccaatgtcaaactatccacaaccttccacctaccaataccccggttttcacaagacttcgtcaattccaaactcgcattctccaattcctccaagatcattaacaacgccaactcaaggtccaaccagccaaaatggacctttaagctacaatcttccgcaagtgggtttgctaccgcctcagcaacaacaacaggtgagcccgttgtatgatggaaattctataactccaccagttaaaccctctactgatcaagaaacttatttaactgcaaataggcacggagtgtcagatcaacagtatgactcaatggctaaaaccatgaattctttccaaacaactaccataaggcacccgatgcccttaatcgccactaccaatgccacaggcagtaacaccagcggcacttcggcaagtataataaggccaagagtaacaacaacaatgtgggaggatgaaaaaacgctatgttatcaggtagaagctaacggtatttcagtggtaagaagagcagataatgatatggttaatggtaccaaacttctgaatgtaactaagatgacaagaggtagaagagatggtattctaaaagcggaaaaaatcaggcatgtggtgaagattggttccatgcatttgaagggtgtctggataccgtttgagcgtgccctagcaatagcacaaagagaaaaaattgctgactatctttatcccttgttcatcagggatattcagagcgtattgaaacaaaataatccaagcaatgatagcagtagtagtagcagtagcactggtattaaatccatcagtccgcgtacctattatcaacctattaacaactatcaaaatcctaatggtccttcaaatatatctgctgctcagctgacatactcctcaatgaatttgaacaacaaaattatacccaataattctataccagctgtaagtacaatcgctgcgggtgaaaagcccttgaaaaaatgcacaatgcctaactctaaccaactagaaggacatactataactaacctacagaccctttcggcaacaatgccgatgaaacaacaactgatgggcaacatagcttcacccttatcgtatccacgcaacgccacaatgaattcggcaagtacattaggcattacacctgcagattcaaagcctttgacaccttctccaactacaacaaacacaaatcaatcatctgaatcaaatgtgggaagtatccatacaggaatcacccttccaagagtggaatctgaatcggcatcacattccaaatggtctaaggaagcagacagtgggaatactgtaccagataatcaaacattaaaggagccacgatctagtcaattaccaatctccgcattgacttcgacggatactgacaaaataaaaacaagtacaagcgatgaagcaacacaaccgaacgaacctagtgaagcagaacctgtcaaggagtcagagtcatccaaatcacaagttgatggagctggcgatgtctccaacgaagaaattgctgctgatgatacaaaaaaacaagaaaaatag

SEQ ID NO: 8388 - DNA, 2358 bp, Artificial Sequence
  Description of Artificial Sequence: Synthetic polynucleotide
atgcccatcggtaacccaatcaatacgaatgatatcaagtccaaccgcatgcgccaggaaagtaatatgagtgccgtgagcaatagcgaaagtactattggccagtccacccaacagcagcagcaacaacaacaatatctcggccagagcgttcaacctttgatgcccgtatcctaccaatacgtagttcctgaacagtggccgtacccgcaatattatcagcagccgcaatcccagtctcaacagcaattacaatcccagcctcagatgtatcaagttcaagaatcctttcagagtagcggttctgactctaatgcttccaatccaccttccacgtctgtaggtgttccttccaacgctactgcaactgcgttaccgaatggttctgcaatcaccaccaaaaaaagcaataacagtactaatatcagtaacaatgtaccatactactattattttccccaaatgcaagcccaacaatctatggcatattcttatccacaagcgtattattattatcctgcaaacggcgatggaaccactaacggtgcaacaccatctgtaaccagtaatcaagtccaaaaccccaatttggaaaaaacctactctacctttgaacaacagcaacaacaccagcagcaacaacaattacaagctcaaacgtatccggcccaaccaccaaagataggtaatgcattttccaagttcagtaaatctggaccaccttctgattcttccagtggctctatgtctcccaattctaatcgcactagtcgcaatagtaatagtatctcttccttagctcagcagcctccaatgtccaactatccacaaccttccacctaccaataccccggttttcacaagacttcttccattccaaactctcattctccaattcctccaagatctttaacaacgccaactcaaggtccaaccagccaaaatggacctttaagctacaatcttccgcaagtgggtttgttaccgcctcagcaacaacaacaggtgagcccgttgtatgatggaaattctataactccaccagttaaaccctctactgatcaagaaacttatttaactgcaaataggcacggagtgtctgatcaacagtatgactccatggctaaaaccatgaattctttccaaacaactaccataaggcacccgatgcccttaatcgccactaccaatgccacaggcagtaacaccagcggcacttctgcaagtataataaggccaagagtaacaacaacaatgtgggaggatgaaaaaacgttgtgttatcaggtagaagctaacggtatttctgtggtaagaagagcagataatgatatggttaatggtaccaaacttttgaatgtaactaagatgacaagaggtagaagagatggtattttgaaagcggaaaaaatcaggcatgtggtgaagattggttccatgcatttgaagggtgtctggataccgtttgagcgtgccttggcaatagcacaaagagaaaaaattgctgactatctttatcccttgttcatcagggatattcagagcgtattgaaacaaaataatccaagcaatgatagcagtagtagtagcagtagcactggtattaaatccatcagtccgcgtacctattatcaacctattaacaactatcaaaatcctaatggtccttccaatatatctgctgctcagttgacatactcctctatgaatttgaacaacaaaattatacccaataattctataccagctgtaagtacaatcgctgcgggtgaaaagcccttgaaaaaatgcacaatgcctaactctaaccaattggaaggacatactataactaacttacagaccctttctgcaacaatgccgatgaaacaacaattgatgggcaacatagcttctcccttatcttatccacgcaacgccacaatgaattctgcaagtacattaggcattacacctgcagattctaagcctttgacaccttctccaactacaacaaacacaaatcaatcttctgaaagtaatgtgggaagtatccatacaggaatcacccttccaagagtggaatctgaaagtgcatctcattccaaatggtctaaggaagcagacagtgggaatactgtaccagataatcaaacattaaaggagccaagatctagtcaattaccaatctccgcattgacttccacggatactgacaaaataaaaacaagtacaagcgatgaagcaacacaaccgaacgaacctagtgaagcagaacctgtcaaggagagtgagtcttccaaatctcaagttgatggagctggcgatgtctccaacgaagaaattgctgctgatgatacaaaaaaacaagaaaaatga

SEQ ID NO: 8389 - DNA, 1194 bp, Saccharomyces cerevisiae
atggggttcagaaaaatacttgctagcaaatcgcatcacagtcgccaccataatcagcaccataagaacctgaagttgcaaaatcatcgctatgtacttatttccaatattacaggatcccatgaaacaaaatatttatcacccttcaggatggacaattgttcaggaagcagaagacgtgataggctacatgtgaagcttaaatccttgaggaataaaatccacaaacaacttcacccaaactgtcggttcgatgacgccactaagactagtgatgataaatgcgtctcttatgaggtgcccgaaagggatggccttgctactatttcgttagaagaggtttttccaaagtccaacaggtgccaaatacctgaagaaaacttgggagaaacagatagcgttattcacagagatttgggaaattttgcaaatgagaatgactatccacagtggagaaaagttgaaagtcaatataacttagagaatgtccagcctgaggaggatgaaatagttgatagactcaggtccgagattagaagcactaaattaaaatctgtaaaaacgacaagcagaacacttgaaaaagctatagaggctcgatgtactggaaagagagttcttcaacaactaagttgtcagagcaaccaactcaccaagatcgagagcaattgtgacatgcttaaaattcaatctaacgtagccgaccgaaagattgacgaacttgcccatgaaaatagaagcctgcttgcattaaaatcacccaaccccttcaggaagaaaagggagagagaaaagcgagaccagatctacaatttgaagttaaagcatcgtcacttacagcaagaaactatgaaaagagcccaagattctgacaaaaatttagccataaatctaagttctgaatatggacggtatggccaaggggtggaaagacagcgtattcttagagatgcccagaagtatcagtttgaagccgatgaagaagataaccaaatggaaatcgacttgtacggaaacctagaacaaataaaagcggtgagtggtgacttgaaaattatggctcacgcttttggcagagagtttgaagcacaaaacactagaatgtttgacatcgagaacaatgtacagcaggcagataatgctttacaggccaagcgatatagattggagaaagtgatcgggaaaagatggtga

SEQ ID NO: 8390 - DNA, 1194 bp, Artificial Sequence
  Description of Artificial Sequence: Synthetic polynucleotide
atggggttcagaaaaatacttgctagcaaatctcatcacagtcgccaccataatcagcaccataagaacttgaagttgcaaaatcatcgctatgtacttatttccaatattacaggatcccatgaaacaaaatatttatctcccttcaggatggacaattgttctggaagcagaagacgtgataggttacatgtgaagcttaaatccttgaggaataaaatccacaaacaacttcacccaaactgtagattcgatgacgccactaagactagtgatgataaatgcgtctcttatgaggtgcccgaaagggatggccttgctactatttctttagaagaggtttttccaaagtccaacaggtgccaaatacctgaagaaaacttgggagaaacagatagcgttattcacagagatttgggaaattttgcaaatgagaatgactatccacagtggagaaaagttgaaagtcaatataacttagagaatgtccagcctgaggaggatgaaatagttgatagactcaggtccgagattagaagcactaaattaaaatctgtaaaaacgacaagcagaacacttgaaaaagctatagaggctcgttgtactggaaagagagttcttcaacaattgagttgtcagagcaaccaactcaccaagatcgagagcaattgtgacatgcttaaaattcaatctaacgtagccgacagaaagattgacgaacttgcccatgaaaatagaagcttgcttgcattaaaaagtcccaaccccttcaggaagaaaagggagagagaaaagagagaccagatctacaatttgaagttaaagcatcgtcacttacagcaagaaactatgaaaagagcccaagattctgacaaaaatttagccataaatttgagttctgaatatggaagatatggccaaggggtggaaagacagcgtattcttagagatgcccagaagtatcagtttgaagccgatgaagaagataaccaaatggaaatcgacttgtacggaaacttggaacaaataaaagcggtgagtggtgacttgaaaattatggctcacgcttttggcagagagtttgaagcacaaaacactagaatgtttgacatcgagaacaatgtacagcaggcagataatgctttacaggccaagagatatagattggagaaagtgatcgggaaaagatggtga

SEQ ID NO: 8391 - DNA, 1545 bp, Saccharomyces cerevisiae
atgaacgaagttacttgttccataactggtgacaacccaattcataagatcaacaatggattaggcttgaaatggaataatctgggtaaattctctgattttcagactaacgatagcgccgcgcgagatgctagaacaatagattacatctttaccaattgtcaaaccggcagcagtattggtaagatagattttcgggccgcactaccggcagataaatctcaacatagtggtgtcagcgaaaaagaattttcaagacttgagaaccagtggtcaaaggaattctcttgtttccccaagaataaaaatgctgatgtgaccaagcccagtagaaacaaacatgagaaacgctccgctaatttgcacaataggtactttgcacaatattatagtacggcatatcagcaaaatcgtatatatccttgtcgaatatcttacaatgaacactcatctgtttctaatggctgggaatttcagttcaaatcaatcgaaaatcagttactaaatgagctaaagatagaaaacaatgtagaagaaaaaactgttggttatgaatatgtggcagaatacgaagaaacaattgatttcatgcatatgctgtcatccgtaccacaaacatatcaattcctaaaatcaaacatctacataacggaacgggacccatataaaataggatgtgtactaatggacaacggttccaatttgaacgaagtagtaatggcctttgaagcagccatttcacaagatccaagccatataaatgcatggttgaagttaggtatagttaattttgaaaatgaaagcgaaagcaatggagagcttgctttgcgaaattgcttaaatttggatccaaataatacaattgcattggaaaacttagcaattcaccatataaatcaacaaaatgaatcagagtcattgaaactttttcacaaatggattctttcaaaattttcgaaggttttccaaccttctgcgggggaaaacaaagatagcattaataaaattccgaaaaaggcccatttggcgcatattctagaatccctgttgaatatgggtatagaaaaaaaagatcagtatgatatatattcagtattatcaatcttatattattcggatcagaaaataaagcaatctcagaaatgcttagagtttttactactggaaaagcccaataatggaacaatatggaatagatatggtgctattttggccaatactaagtcgtatcactctgcgataaatgcgtacaataaatgcaaacaactaagaccgaattttacaagggttcgttataatttagcgatcgcctacatgaataagggtgactatgtaaaagcaagcaaaatgctaatcgaagttatactgttacgaagtaaaggatatgaacacaacaaagcaaaaatgcaaaacaaatttatgcaaaatttaaaaaatgctctcatcgcttcaaaaaattttgattcacttgatctaataaatggttctcataatacagaatcgttaatatcaaccttaaaagctatttataacaaaatggattag

SEQ ID NO: 8392 - DNA, 1545 bp, Artificial Sequence
  Description of Artificial Sequence: Synthetic polynucleotide
atgaacgaagttacttgttccataactggtgacaacccaattcataagatcaacaatggattaggcttgaaatggaataatttgggtaaattctctgattttcagactaacgatagcgccgcgagggatgctagaacaatagattacatctttaccaattgtcaaaccggcagcagtattggtaagatagattttagagccgcattaccggcagataaatctcaacatagtggtgtcagcgaaaaagaattttccagacttgagaaccagtggtccaaggaattctcttgtttccccaagaataaaaatgctgatgtgaccaagcccagtagaaacaaacatgagaaacgctccgctaatttgcacaataggtactttgcacaatattatagtacggcatatcagcaaaatcgtatatatccttgtaggatatcttacaatgaacactcttctgtttctaatggctgggaatttcagttcaaatctatcgaaaatcagttattgaatgagttgaagatagaaaacaatgtagaagaaaaaactgttggttatgaatatgtggcagaatacgaagaaacaattgatttcatgcatatgctttcctccgtaccacaaacatatcaattcttgaaaagtaacatctacataacggaaagagacccatataaaataggatgtgtattaatggacaacggttccaatttgaacgaagtagtaatggcctttgaagcagccatttctcaagatccaagccatataaatgcatggttgaagttaggtatagttaattttgaaaatgaaagcgaaagcaatggagagcttgctttgagaaattgcttaaatttggatccaaataatacaattgcattggaaaacttagcaattcaccatataaatcaacaaaatgaaagtgagtctttgaaactttttcacaaatggattctttctaaattttccaaggttttccaaccttctgcgggggaaaacaaagatagcattaataaaattccgaaaaaggcccatttggcgcatattttggaatccttattgaatatgggtatagaaaaaaaagatcagtatgatatatattctgtattatctatcttatattattctgatcagaaaataaagcaatctcagaaatgcttagagtttttattattggaaaagcccaataatggaacaatatggaatagatatggtgctattttggccaatactaagagttatcactctgcgataaatgcgtacaataaatgcaaacaattgagaccgaattttacaagggttcgttataatttagcgatcgcctacatgaataagggtgactatgtaaaagcaagcaaaatgttgatcgaagttatattattaagaagtaaaggatatgaacacaacaaagcaaaaatgcaaaacaaatttatgcaaaatttaaaaaatgctctcatcgcttccaaaaattttgattctcttgatttgataaatggttctcataatacagaatctttaatatctaccttaaaagctatttataacaaaatggattga

SEQ ID NO: 8393 - DNA, 2850 bp, Saccharomyces cerevisiae
atgagtatcaatcatgaaatatattatatacttgtatttgagcatcgttcagtagcaatcaagctcatcatcgtagtgattgttctccttcagttttttttagcacgaagtcggcaaattgataggacatgggcccatactaatagaaaggaacggttcagagaaatgacagctatcgggaatactgatgatgcacttgatactagtacagccgcaagtaaagaaaatggaaaaggtagactcagggttcaaaaagcttgtgaactttgcaagaagagaaaggttaaatgcgacggtaacaatccttgtctgaactgctctaaacatcaaaaagaatgccgttatgatttcaaagctacaaaccgtaaaagaagaagacgacaggtcgcatcagctgttcgggacgttagtaagacatatgcagaaaccagtgagtcttttcctagggacttgttaagtaaatcaaatattatcataaatgccccctcagatggtgtatcttcgtctgctagcaactctcccaatccaaattcacattatcatcatatatcatccactttacccttcatgagcggtaggccaaaccatacattccattccggaagcaacttaaatggagaaaataacaataacagttttccggaggatcacatggctaaattacttctgcaattgagttcaaaattggggaatacgaccaaggaatcgtcaattagaacaactagaaccaatgctagtgatgtgaatgcaaacccgacagtggtcaacatgaaaaatagtcaggaagactgtgacacgaatcacaggtctgcaatatgtgactctgcagaggctcttcataataacaacatcaattctaaagagaataagataatcaactctcaaataactaacactgttaatgatcactttgaatcaccctggcagacattttctttagataagtataggtttcaccgacgctaccaaaatattctgccctattaccttggtgtatctattttaaaggatctatctccgcagacaatagagtacgcgaagttgaaaaggccaagagttcaaaactatggttggaacttgtcaggaggccattacttaaagtataagggtgactttagaagccaagaaaaaaatataaggcatgagtctaaatttttcgactttgatgaccctgttcacttatccttaatcaataagttactaaggtattattttgatgagatcaatcctgttttcagtatcattcacgaagcgacattttggcagcaatataacaataaatttctacggcaaggtaaacaaaataattcatctgcgaatctattcacttccatgctttatctaattttgtctactacactaagattcagagaagggcatctagatggtcagaaagggcaaggaacctacagtaacacatccttaaatatcacattcgaggaaaaatctattttgatcaaaaaaccctccatagaggaaaatttattcaaatacgcttatttaataatcaacacgctgacctttgagtgggaatcattcgaactaatacaatcgtggcttttgataaccttctatttcagaacctgttacagacagacggcgtgctggaacgcgttaagtcaagcggtgaacatgtgtaatgggatgagtctatatttaaacaaatttcctgagatccattccacttatgatgaatcaaaagcatggcattgtttctggtgttgttttataatggataagttgataagttttcaaatgggtcgattctaccaactatcattacccgcgagcgagatgtgcgaacagatgaatctagtgaagtcaaagaaatttttacaagaagaagatgattggtttcacgaagagacttttcaaatgcttgatttgtccataatagtgacacagtttttaaaaagagacgcacaggatttaaatttgaacgagaccgtgcaattgcgcagccaacttggtcaatggtatgacacctttatagttggaagtcaaaccaatgcgtacgacgacaattatcgttacttctatcaagttcaaccattcatgacatacctggatataaggctgactttcgaagtaagacaattattttgtctaatcgccccctcatctaccgcaaataataaatccctagaatatgtcgtcgatactgaattgttaatttctcattgtcaaatggctattgaaaatttggctgaaattacgagaagtaatcttttctttgttccgtggtggttaaacctttctcaactattcacggtaaatttaatatgtattatctacctgcacgcagggattgccgtaactcaaaataaagctatcatgcaaagctgccaagaaatatggcgaaccttagagtgctctaagccaaaaaatcggccttcaatgcttcctgagtgcttgtggtgtttgaaaatgctgaatcatatgttctgcatacgactgagagattctgctttgcaattggaagctactctcggaactgatcatggtgatgacacccctaatagaaataagtttgagcagttcaagaaagttggcgataatgatgcggatgttgaagttgatgctggtgaaagagaagaaaatgctgatgaaagacaagaaaatccacataacaatagcaaaagagtaccattagctactaggtctcataataccactaacttcgacggttcaatcgcaatttctccggaaagtgcagtagcaaatctaggtactgatactggattgccctcagatgttcttgatactgtcagtaaaatagggaactctcctaatgtgtttgatgatgatttattttccaatttattatggtttgaccaaaattttgcataa

SEQ ID NO: 8394 - DNA, 2850 bp, Artificial Sequence
  Description of Artificial Sequence: Synthetic polynucleotide
atgagtatcaatcatgaaatatattatatacttgtatttgagcatcgttctgtagcaatcaagctcatcatcgtagtgattgttctccttcagttttttttagcaagaagtagacaaattgataggacatgggcccatactaatagaaaggaaagattcagagaaatgacagctatcgggaatactgatgatgcacttgatactagtacagccgcaagtaaagaaaatggaaaaggtagactcagggttcaaaaagcttgtgaactttgcaagaagagaaaggttaaatgcgacggtaacaatccttgtttgaactgctctaaacatcaaaaagaatgccgttatgatttcaaagctacaaaccgtaaaagaagaagaagacaggtcgcatctgctgttagagacgttagtaagacatatgcagaaaccagtgagtcttttcctagggacttgttaagtaaatctaatattatcataaatgccccctctgatggtgtatcttcttctgctagcaactctcccaatccaaattctcattatcatcatatatcttccactttacccttcatgagcggtaggccaaaccatacattccattccggaagcaacttaaatggagaaaataacaataacagttttccggaggatcacatggctaaattacttttacaattgagttctaaattggggaatacgaccaaggaatcttccattagaacaactagaaccaatgctagtgatgtgaatgcaaacccgacagtggtcaacatgaaaaatagtcaggaagactgtgacacgaatcacaggtctgcaatatgtgactctgcagaggctcttcataataacaacatcaattctaaagagaataagataatcaactctcaaataactaacactgttaatgatcactttgaaagtccctggcagacattttctttagataagtataggtttcacagacgctaccaaaatattttgccctattaccttggtgtatctattttaaaggatttatctccgcagacaatagagtacgcgaagttgaaaaggccaagagttcaaaactatggttggaacttgagtggaggccattacttaaagtataagggtgactttagaagccaagaaaaaaatataaggcatgagtctaaatttttcgactttgatgaccctgttcacttatccttaatcaataagttattgaggtattattttgatgagatcaatcctgttttcagtatcattcacgaagcgacattttggcagcaatataacaataaatttttaagacaaggtaaacaaaataattcttctgcgaatttattcacttccatgctttatttgattttgtctactacattaagattcagagaagggcatttggatggtcagaaagggcaaggaacctacagtaacacatccttaaatatcacattcgaggaaaaatctattttgatcaaaaaaccctccatagaggaaaatttattcaaatacgcttatttaataatcaacacgttgacctttgagtgggaatctttcgaattgatacaaagttggcttttgataaccttctatttcagaacctgttacagacagacggcgtgctggaacgcgttaagtcaagcggtgaacatgtgtaatgggatgagtctttatttaaacaaatttcctgagatccattccacttatgatgaaagtaaagcatggcattgtttctggtgttgttttataatggataagttgataagttttcaaatgggtagattctaccaattatctttacccgcgagcgagatgtgcgaacagatgaatttggtgaagtccaagaaatttttacaagaagaagatgattggtttcacgaagagacttttcaaatgcttgatttgtccataatagtgacacagtttttaaaaagagacgcacaggatttaaatttgaacgagaccgtgcaattgcgcagccaacttggtcaatggtatgacacctttatagttggaagtcaaaccaatgcgtacgacgacaattatcgttacttctatcaagttcaaccattcatgacatacttggatataaggttaactttcgaagtaagacaattattttgtttaatcgccccctcttctaccgcaaataataaatccttagaatatgtcgtcgatactgaattgttaatttctcattgtcaaatggctattgaaaatttggctgaaattacgagaagtaatcttttctttgttccgtggtggttaaacctttctcaattattcacggtaaatttaatatgtattatctacttgcacgcagggattgccgtaactcaaaataaagctatcatgcaaagctgccaagaaatatggagaaccttagagtgctctaagccaaaaaatagaccttctatgcttcctgagtgcttgtggtgtttgaaaatgttgaatcatatgttctgcataaggttaagagattctgctttgcaattggaagctactctcggaactgatcatggtgatgacacccctaatagaaataagtttgagcagttcaagaaagttggcgataatgatgcggatgttgaagttgatgctggtgaaagagaagaaaatgctgatgaaagacaagaaaatccacataacaatagcaaaagagtaccattagctactaggtctcataataccactaacttcgacggttctatcgcaatttctccggaaagtgcagtagcaaatttgggtactgatactggattgccctctgatgttcttgatactgtcagtaaaatagggaactctcctaatgtgtttgatgatgatttattttccaatttattatggtttgaccaaaattttgcatga

SEQ ID NO: 8395 - DNA, 1527 bp, Saccharomyces cerevisiae
atgaatacagtttcaccagccaaaaaaaaggttattataattggtgccggtattgctgggcttaaagctgcatctacgctacaccaaaacggtattcaagattgtcttgttcttgaggccagagatcgggtcggtggtaggttgcaaactgtcacaggctatcaaggtcggaaatatgatataggtgctagctggcaccatgatacgttgacaaaccctttatttttggaagaggctcaactgagtttgaatgatgggagaacgaggtttgtttttgatgacgataattttatttatatcgacgaagaacgtggaagggtagaccatgacaaggaactgcttcttgaaattgtggacaatgaaatgagcaaattcgcagagttagaattccatcaacacttaggagtttcagattgctccttttttcaattagtaatgaaatacttactacaaagacgccaatttctcacaaatgaccaaataagatatttgccacaactctgtcgatatctggaattgtggcacggcttagattggaagcttttgagtgccaaggatacatacttcggtcaccaaggaaggaacgcctttgctttgaactatgattctgtggttcaaagaattgctcaaagctttcctcaaaattggttaaagctaagttgtgaagtgaaatcaattacacgagaaccttcaaaaaatgtgacagtgaactgtgaagatggtactgtgtacaatgctgattatgttattattacagtacctcaaagtgtattgaatttgtctgtacaacctgaaaaaaatttacggggaagaatagaatttcaaccacccttgaaaccagtgattcaagatgcttttgacaagatccattttggagcgctaggtaaagtaatttttgagtttgaagaatgttgttggtcgaacgaaagttcaaaaattgtaactttggctaactctaccaatgaatttgtcgaaatagtacgtaatgcggaaaatttagatgaattagactctatgctagaaagggaagattctcaaaagcatacgagtgttacttgttggagccagcctttatttttcgtaaatttgtcaaaaagcacaggagtagcaagctttatgatgttgatgcaggcaccgcttacaaatcacatagaatccattagagaagataaagagcgtctttttagttttttccaacctgtgctgaacaagattatgaagtgtctagattctgaggatgtcatcgacggaatgaggccgatagaaaacattgcaaacgctaataaaccagtcttaagaaacatcatcgttagcaactggacacgcgatccttactcacgcggtgcttattcggcctgttttccaggagatgatccagttgatatggttgttgcaatgtctaatggtcaagactcccgcataagatttgcaggcgaacatactatcatggacggcgccggctgtgcctatggtgcttgggaaagcggaagacgggaggcgactcgaatctctgacttactgaaatag

SEQ ID NO: 8396 - DNA, 1527 bp, Artificial Sequence
  Description of Artificial Sequence: Synthetic polynucleotide
atgaatacagtttctccagccaaaaaaaaggttattataattggtgccggtattgctgggcttaaagctgcatctacgttgcaccaaaacggtattcaagattgtcttgttcttgaggccagagatagggtcggtggtaggttgcaaactgtcacaggctatcaaggtagaaaatatgatataggtgctagctggcaccatgatacgttgacaaaccctttatttttggaagaggctcaattgagtttgaatgatgggagaacgaggtttgtttttgatgacgataattttatttatatcgacgaagaacgtggaagggtagaccatgacaaggaattgcttcttgaaattgtggacaatgaaatgagcaaattcgcagagttagaattccatcaacacttaggagtttctgattgctccttttttcaattagtaatgaaatacttattacaaagacgccaatttctcacaaatgaccaaataagatatttgccacaactctgtagatatttggaattgtggcacggcttagattggaagcttttgagtgccaaggatacatacttcggtcaccaaggaaggaacgcctttgctttgaactatgattctgtggttcaaagaattgctcaaagctttcctcaaaattggttaaagttgagttgtgaagtgaaatccattacaagagaaccttccaaaaatgtgacagtgaactgtgaagatggtactgtgtacaatgctgattatgttattattacagtacctcaaagtgtattgaatttgtctgtacaacctgaaaaaaatttaagaggaagaatagaatttcaaccacccttgaaaccagtgattcaagatgcttttgacaagatccattttggagcgcttggtaaagtaatttttgagtttgaagaatgttgttggagcaacgaaagttctaaaattgtaactttggctaactctaccaatgaatttgtcgaaatagtacgtaatgcggaaaatttagatgaattagactctatgttggaaagggaagattctcaaaagcatacgagtgttacttgttggagccagcctttatttttcgtaaatttgagtaaaagcacaggagtagcaagctttatgatgttgatgcaggcaccgcttacaaatcacatagaatccattagagaagataaagagcgtctttttagttttttccaacctgtgttgaacaagattatgaagtgtttggattctgaggatgtcatcgacggaatgaggccgatagaaaacattgcaaacgctaataaaccagtcttaagaaacatcatcgttagcaactggacacgcgatccttactctcgcggtgcttattctgcctgttttccaggagatgatccagttgatatggttgttgcaatgtctaatggtcaagactcccgcataagatttgcaggcgaacatactatcatggacggcgccggctgtgcctatggtgcttgggaaagcggaagaagagaggcgactagaatctctgacttattgaaatga

SEQ ID NO: 8397 - DNA, 1254 bp, Saccharomyces cerevisiae
atgataatatttaatgggaacaaatatgcgtgtgcatcgtgcatcagagggcatcgctcttcaacatgcaggcattctcaccgaatgctaattaaggtgagaactagaggaagaccttcacccatggctatcagagacgctattttagtagactctacatcgcaaagtacagaatacgaaaatggtgcacaaattgaaggtgactgctgcagcgcaatgaatcaacagccaatactgtttgtacgtgcctctgctgttagaaaggcaagaatgataaacggaaaattgcatatattaatggaggaaggtttcactgctcatgagcctaaagatattagcacatttaccgatgatggtaacaaatatatcaccgaaacggagtttcttaggaaacactctcccaaagctccggcaacaggaacaatatctccggactctaccaagtcatcttcttcaagtgagaagaaagagcgaagccggcttcaacaggagcctatacgacatttttcaaactgctgtaagaaagataaatcacagaacccagcttctaatggcaagacgaacaaggcaccgtctgatgacatatttacgccatacggctccttggaatctacgtccgcttttaacgatattttacaagaaaactacaatagttctgttcctggtgcgcatgacagttcagaaacactcaccccacaaagtacaacaacgattgctgctcctcattcaagcgacgttgcttcgaaagttgaagtcctgactcataagggcatttttttaagcacgcagtgctcttgtgaagatgaaagctgcccatgtgttaattgtctaatccatagaagcgaagaggaactgaattcttatattcaacaaagtggtgttcctttaaccaatattggtgaagctcaaattactgataagatgatggattatttggatgattgtaaatgcactgacaaggaatgcatatgtcctccggataactgcacttgtgatggatgtttttctcactctacaaatataattccatttgaaaaattctttttctatggaattctgaatgcaagattaacaaggaaaactcaaataaaattcaaaggtaaattggtgccgtcaaaatattggtgggattttttgaagttgcaagtgccattgatgacagatgctcagttagaattacttgacattcatgcgtggtttcaaaaattagtctctaattatgcaccacatctaagcgatgccaccacttcataa

SEQ ID NO: 8398 - DNA, 1254 bp, Artificial Sequence
  Description of Artificial Sequence: Synthetic polynucleotide
atgataatatttaatgggaacaaatatgcgtgtgcatcttgcatcagagggcatcgctcttctacatgcaggcattctcacagaatgttgattaaggtgagaactagaggaagaccttctcccatggctatcagagacgctattttagtagactctacatctcaaagtacagaatacgaaaatggtgcacaaattgaaggtgactgctgcagcgcaatgaatcaacagccaatattgtttgtacgtgcctctgctgttagaaaggcaagaatgataaacggaaaattgcatatattaatggaggaaggtttcactgctcatgagcctaaagatattagcacatttaccgatgatggtaacaaatatatcaccgaaacggagtttcttaggaaacactctcccaaagctccggcaacaggaacaatatctccggactctaccaagtcttcttcttccagtgagaagaaagagagaagcaggcttcaacaggagcctataagacatttttccaactgctgtaagaaagataaatctcagaacccagcttctaatggcaagacgaacaaggcaccgtctgatgacatatttacgccatacggctccttggaatctacgtccgcttttaacgatattttacaagaaaactacaatagttctgttcctggtgcgcatgacagttctgaaacactcaccccacaaagtacaacaacgattgctgctcctcattctagcgacgttgcttccaaagttgaagtcttgactcataagggcatttttttaagcacgcagtgctcttgtgaagatgaaagctgcccatgtgttaattgtttaatccatagaagcgaagaggaattgaattcttatattcaacaaagtggtgttcctttaaccaatattggtgaagctcaaattactgataagatgatggattatttggatgattgtaaatgcactgacaaggaatgcatatgtcctccggataactgcacttgtgatggatgtttttctcactctacaaatataattccatttgaaaaattctttttctatggaattttgaatgcaagattaacaaggaaaactcaaataaaattcaaaggtaaattggtgccgtccaaatattggtgggattttttgaagttgcaagtgccattgatgacagatgctcagttagaattacttgacattcatgcgtggtttcaaaaattagtctctaattatgcaccacatttgagcgatgccaccactagctga

SEQ ID NO: 8399 - DNA, 498 bp, Saccharomyces cerevisiae
atgtcgaaaaccgctcagaaacgtctcctcaaggagcttcaacagttaattaaagattctccacctggtatagtggctggtcccaaatcggagaataacatattcatttgggactgcctaattcaagggcctccagatacgccatacgctgatggtgtttttaatgctaagctagagtttcctaaagactatccgttatctccacctaaacttactttcacacccagcatactacatccaaatatttatccaaatggggaagtgtgcatatccattctacactcccctggtgatgatcctaacatgtacgaattagcggaagaaagatggtcgccagtgcaaagtgtagaaaaaattctattaagtgttatgagcatgttgagtgagcccaatatcgaaagtggtgccaacattgatgcttgcatcttgtggagagataatagacctgaatttgagagacaggtaaagttatccattttgaaatcattaggattctga

SEQ ID NO: 8400 - DNA, 498 bp, Artificial Sequence
  Description of Artificial Sequence: Synthetic polynucleotide
atgtccaaaaccgctcagaaacgtctcctcaaggagcttcaacagttaattaaagattctccacctggtatagtggctggtcccaaaagtgagaataacatattcatttgggactgcttgattcaagggcctccagatacgccatacgctgatggtgtttttaatgctaagttggagtttcctaaagactatccgttatctccacctaaacttactttcacacccagcatattacatccaaatatttatccaaatggggaagtgtgcatatccattttacactcccctggtgatgatcctaacatgtacgaattagcggaagaaagatggtctccagtgcaaagtgtagaaaaaattttattaagtgttatgagcatgttgagtgagcccaatatcgaaagtggtgccaacattgatgcttgcatcttgtggagagataatagacctgaatttgagagacaggtaaagttatccattttgaaatctttaggattctga

SEQ ID NO: 8401 - DNA, 1581 bp, Saccharomyces cerevisiae
atgaatagtgcatctttcttacaatcacggcttatttcgagatcctttctcgtaagaaggtcgttaaagaggtactccggacttgcaaagccttataccttccagcaaccaaccatatatgcattatctacaccagcaaatcaaacctctgcgatagcaatcataagaatatctggtacccatgctaagtacatttacaatcgactagttgattcaagtacagttccgccgatcaggaaggctattttgaggaacatttattcgccgtcctcttgtagtgtgaaacctcatgatcaaaaggaaagtaaaatattattagacacatcgttgttgctatatttccaagctccttattcatttactggtgaggatgtgttagagctgcacgttcacggcgggaaagccgtagttaatagtatactgaaagctatcggctcgttacacgatagaagcagtggtaaagatataagatttgccttgcctggcgacttctccaggagggcgtttcaaaatggaaagtttgaccttacccaacttgaaggtatcaaagatcttattgattcggaaacagaatctcaaaggagatctgccttgtcaagtttcaatggggataacaaaatcctatttgagaactggagggaaaccattatcgagaatatggcacagttgactgctataatagattttgccgacgataatagccaagaaattcagaatacggatgagattttccataatgtagaaaagaacatcatatgtctgcgagaccaaatcgttactttcatgcaaaaagtcgaaaagtctaccatactgcaaaatggaataaagctggtattacttggtgctcccaatgtcggtaagtcatcattagttaacagcttgactaacgatgatatatcaattgtcagtgatatacctggcactactagggattctattgatgcaatgataaacgtgaatggctataaggttattatctgtgatacggcaggtataagagaaaagagttctgacaagatagaaatgctgggtatagatagagcaaagaagaaaagtgtacagagcgacttatgtttattcattgtagatcctactgatttatcaaaacttttgcctgaggacatattagcacatctatcatcgaagacgtttggaaataagagaataattattgtagtcaataagagcgacttagtttccgatgatgagatgacgaaagttttgaacaaattacaaactagactcggatcaaagtaccccatattaagcgtgtcctgtaagaccaaggagggaatagaatcgttaattagcactttgacaagtaattttgaaagcttgtctcaatcaagtgccgatgcaagtcctgtcattgtttccaaaagagtgtcagagattctcaaaaacgacgtactgtacggcttggaagagtttttcaaatccaaagatttccataatgatatagtattggccacagaaaatttgaggtatgcatccgatggaatagctaagataacaggacaagctattggtattgaggaaatcttagattcagtgttcagcaaattttgtataggaaaataa

SEQ ID NO: 8402 - DNA, 1581 bp, Artificial Sequence
  Description of Artificial Sequence: Synthetic polynucleotide
atgaatagtgcatctttcttacaaagtagacttatttctagatcctttctcgtaagaaggtctttaaagaggtactccggacttgcaaagccttataccttccagcaaccaaccatatatgcattatctacaccagcaaatcaaacctctgcgatagcaatcataagaatatctggtacccatgctaagtacatttacaatagattggttgattctagtacagttccgccgatcaggaaggctattttgaggaacatttattctccgtcctcttgtagtgtgaaacctcatgatcaaaaggaaagtaaaatattattagacacatctttgttgttatatttccaagctccttattcttttactggtgaggatgtgttagagttgcacgttcacggcgggaaagccgtagttaatagtatattgaaagctatcggctctttacacgatagaagcagtggtaaagatataagatttgccttgcctggcgacttctccaggagggcgtttcaaaatggaaagtttgaccttacccaacttgaaggtatcaaagatcttattgattctgaaacagaatctcaaaggagatctgccttgagcagtttcaatggggataacaaaatcttatttgagaactggagggaaaccattatcgagaatatggcacagttgactgctataatagattttgccgacgataatagccaagaaattcagaatacggatgagattttccataatgtagaaaagaacatcatatgtcttcgtgaccaaatcgttactttcatgcaaaaagtcgaaaagtctaccatattgcaaaatggaataaagttggtattacttggtgctcccaatgtcggtaagagttctttagttaacagcttgactaacgatgatatatctattgtcagtgatatacctggcactactagggattctattgatgcaatgataaacgtgaatggctataaggttattatctgtgatacggcaggtataagagaaaagagttctgacaagatagaaatgttgggtatagatagagcaaagaagaaaagtgtacagagcgacttatgtttattcattgtagatcctactgatttatccaaacttttgcctgaggacatattagcacatttatcttccaagacgtttggaaataagagaataattattgtagtcaataagagcgacttagtttccgatgatgagatgacgaaagttttgaacaaattacaaactagactcggatccaagtaccccatattaagcgtgtcctgtaagaccaaggagggaatagaatctttaattagcactttgacaagtaattttgaaagcttgtctcaaagtagtgccgatgcaagtcctgtcattgtttccaaaagagtgtctgagattctcaaaaacgacgtattgtacggcttggaagagtttttcaaatccaaagatttccataatgatatagtattggccacagaaaatttgaggtatgcatccgatggaatagctaagataacaggacaagctattggtattgaggaaatcttagattctgtgttcagcaaattttgtataggaaaatga

SEQ ID NO: 8403 - DNA, 1173 bp, Saccharomyces cerevisiae
atgggcatagttttgaaaagagcaatagcagcaggtatgaaaccttttccaaacagtacgtggcattggagccgaaccataagacctttctcacagcatttgtctagcacatgctttctgcagcaatcctcgagatttacttcaaaacgatacctacacctttcaacattaacacaacaagaaaagcgcttcctacccgaatctgaacttgctaaatataaggaatactaccagggtttgaagagcactgtaaatgaaatacctgaatcagtggcctctaagtcaccttcgttaagaacgcttcataagagattacaattacctaatgagttgacctattcaacactttccagatgcttaacgtgtccctctgcaaaactacccgacaagataaataatcctacaaaaggtgcagctttcgttaatactgtacctactaataaatacttggacaaccacggtttaaacatcatgggaaagaacttgctctcttaccacgttacaaaatccattatacagaaatatccgagactacccactgtggttttgaatgctgcggttaacgcatatatatcagaggcggtactggcgcacattgctaaatactggggtattgaagtagaaactacgtctgttttatcacgctatttgaaaatggaaccattcgaattcactttgggaagactcaaattctttaataattcattgaactctaaggacggtattgagctaatcaccggaaagaacttttcagaaacaagcgctcttgcaatgagcgtgaggagtataatagctgccatctgggcagtaacggagcaaaaagattctcaagctgtttacagatttattgatgatcatataatgagcaggaaattggatatcacgaaaatgttccagtttgaacaacctacaagagaattggctatgctatgtcgtagagaggggctggagaaacctgtatcgaaactggtcgctgagtctggtagactatcgaaatcacctgtctttattgtgcatgtattttcaggcgaagagacattaggtgaaggttatggttcctcattaaaggaggcaaaagcaagagccgctactgatgctttgatgaaatggtattgctacgagcctcttgctcaacaggaaccagttattgatcctggcactgttgttgtttag

SEQ ID NO: 8404 - DNA, 1173 bp, Artificial Sequence
  Description of Artificial Sequence: Synthetic polynucleotide
atgggcatagttttgaaaagagcaatagcagcaggtatgaaaccttttccaaacagtacgtggcattggagcagaaccataagacctttctctcagcatttgtctagcacatgctttttgcagcaatccagcagatttacttctaaaagatacttgcacctttctacattaacacaacaagaaaagcgcttcttgcccgaatctgaacttgctaaatataaggaatactaccagggtttgaagagcactgtaaatgaaatacctgaatctgtggcctctaagtctccttctttaagaacgcttcataagagattacaattacctaatgagttgacctattctacactttccagatgcttaacgtgtccctctgcaaaattgcccgacaagataaataatcctacaaaaggtgcagctttcgttaatactgtacctactaataaatacttggacaaccacggtttaaacatcatgggaaagaacttgctctcttaccacgttacaaaatccattatacagaaatatccgagattacccactgtggttttgaatgctgcggttaacgcatatatatctgaggcggtattggcgcacattgctaaatactggggtattgaagtagaaactacgtctgttttatctcgctatttgaaaatggaaccattcgaattcactttgggaagactcaaattctttaataattctttgaactctaaggacggtattgagttgatcaccggaaagaacttttctgaaacaagcgctcttgcaatgagcgtgaggagtataatagctgccatctgggcagtaacggagcaaaaagattctcaagctgtttacagatttattgatgatcatataatgagcaggaaattggatatcacgaaaatgttccagtttgaacaacctacaagagaattggctatgctttgtcgtagagaggggttagagaaacctgtatccaaattggtcgctgagtctggtagattatccaaatctcctgtctttattgtgcatgtattttctggcgaagagacattaggtgaaggttatggttcctctttaaaggaggcaaaagcaagagccgctactgatgctttgatgaaatggtattgctacgagcctcttgctcaacaggaaccagttattgatcctggcactgttgttgtttga

SEQ ID NO: 8405 - DNA, 888 bp, Saccharomyces cerevisiae
atggacctcctaaaattcagttctctagctatatcagaaattaacttcctgcacgagtcatcgtttgactcgatagaccactcttggtttttattgataggttgcaaattggatcaagatgatgaaatttacatcccaataaatggtaatgaagcagagtctcaatggtatattgaaaaagttatacgaatcccgatgcaggaaaatgataaaataaatcaagaacgcctagaaaggagaattaacctaacaaaagtgactcaaaaggacatttgtatactgggtattcttgatttatgtcagttagaagaggacgaaaatatcactaataaagtgacggagaaagtgctcacccaattgaccgccttggcattgaaatatctgataaaatataacgtgtttcgccaacatacctccttccaagaagctgtcaatagtttaaagggttataaaattgaaaatagtgtacagataggcgcggaaattatccttgattttctacaagataaagtgcaaattaaggatgtaaatgacagataccaaattcccacacctaataataccgtagacccaggttttgatgagtttcaattaattgacatgaaggataaagaaatcaatattcaaaaatataataataataccataagaaaattactcgagaagattaatcgaatgataatattcttgaaaaattatgatgccactgacaagcctttctcttccacgcaagatgtaatacttcgaaaaatatcaatgcttgtaacacaactgcaaagaggtggaacaagtgacatgaattacctgctggataacaaaattaatgaaataaaattattagaaatttcgtgtaaacaatgggaaatttcaaatatgttaaaaaaataa

SEQ ID NO: 8406 - DNA, 888 bp, Artificial Sequence
  Description of Artificial Sequence: Synthetic polynucleotide
atggacctcttgaaattcagttctttggctatatctgaaattaacttcttgcacgagagttcttttgacagtatagaccactcttggtttttattgataggttgcaaattggatcaagatgatgaaatttacatcccaataaatggtaatgaagcagagtctcaatggtatattgaaaaagttataagaatcccgatgcaggaaaatgataaaataaatcaagaacgcttagaaaggagaattaacttaacaaaagtgactcaaaaggacatttgtatattaggtattcttgatttatgtcagttagaagaggacgaaaatatcactaataaagtgacggagaaagtgctcacccaattgaccgccttggcattgaaatatttgataaaatataacgtgtttcgccaacatacctccttccaagaagctgtcaatagtttaaagggttataaaattgaaaatagtgtacagataggcgcggaaattatccttgattttttgcaagataaagtgcaaattaaggatgtaaatgacagataccaaattcccacacctaataataccgtagacccaggttttgatgagtttcaattaattgacatgaaggataaagaaatcaatattcaaaaatataataataataccataagaaaattactcgagaagattaatagaatgataatattcttgaaaaattatgatgccactgacaagcctttctcttccacgcaagatgtaatacttagaaaaatatccatgcttgtaacacaattacaaagaggtggaacaagtgacatgaattacttgttggataacaaaattaatgaaataaaattattagaaattagttgtaaacaatgggaaatttctaatatgttaaaaaaatga

SEQ ID NO: 8407 - DNA, 1200 bp, Saccharomyces cerevisiae
atgagcttttattcaaacctaccgtctgcaggacaatctagtcgagggtcttcaacaagcggtcgaaatggggtgggattagaaccattgtatccgactatctttgagataatgtcatcacaagaaatcgattcgttactgcccgcatccatccgttatctactggcaaatcatttagtggcgaacttccctaacaggtatactttgcggctgaacaagtacttttttgagtggtttcaagcgataaaagggtttgttgaatggtatcatctaaagacatacaattctacgtttattgatcggttttatggattgcaactatttagttcgagggacagaaatcttgccttaacacaatgtttaaatccaaagggccagagtgaatggccccaaggtttgcagctgaatcaacagcaaaagagtgttatttttttggaaaaaattattctcccctatatcacagcgaagttggatgaaatattagagaaaatatcaatgaataatatattcagcagcgatgaaactgaaaataaatggcccaagagagcgtttctaagaatttatccatttattaagaaattattagcgttatccaatttactcgttaaattattatttttaactaaaagaacagggtcggtttccttgttgcaatacttattcaagatagagtacacaacggtaagaccactatcgtcagaactctctggtctcaaagagacgaaagggatggataataggctaaggaaaacaaatatatcgtcaattttcgcgctaatgcaaggacaattatcgattatacccagatttttaacatttatgggttcgcaattcttccccacttttatatttgtcctaagagtgtaccaatggtggaccacacaagacatgactactaaattgcagaaaagggtcaatgacttggatgaagatattccaaggccgcctttctcctcacatagtgacaaaacggaagataaagagggagtttctgaggcctgtcccgtttgcgaaaaaactgtacaaaacccctgtgtattggaaacaggatacgtggcatgctacccgtgtgccataagctatttggttaataatgaaggccattgtcccgttaccaataaaaagctgctgggttgtacatacaacaaacacacgaataaatgggaagttgtgacaggtattaggaagctactaatctga

SEQ ID NO: 8408 - DNA, 1200 bp, Artificial Sequence
  Description of Artificial Sequence: Synthetic polynucleotide
atgagcttttattccaacttaccgtctgcaggacaatctagtagagggtcttctacaagcggtagaaatggggtgggattagaaccattgtatccgactatctttgagataatgtcttctcaagaaatcgattctttattgcccgcatccatccgttatttattggcaaatcatttagtggcgaacttccctaacaggtatactttgagattgaacaagtacttttttgagtggtttcaagcgataaaagggtttgttgaatggtatcatttgaagacatacaattctacgtttattgatagattttatggattgcaattatttagttctagggacagaaatcttgccttaacacaatgtttaaatccaaagggccagagtgaatggccccaaggtttgcagttgaatcaacagcaaaagagtgttatttttttggaaaaaattattctcccctatatcacagcgaagttggatgaaatattagagaaaatatccatgaataatatattcagcagcgatgaaactgaaaataaatggcccaagagagcgtttttaagaatttatccatttattaagaaattattagcgttatccaatttactcgttaaattattatttttaactaaaagaacagggtctgtttccttgttgcaatacttattcaagatagagtacacaacggtaagaccattatcttctgaactctctggtctcaaagagacgaaagggatggataataggttgaggaaaacaaatatatcttccattttcgcgttaatgcaaggacaattatccattatacccagatttttaacatttatgggttctcaattcttccccacttttatatttgtcttgagagtgtaccaatggtggaccacacaagacatgactactaaattgcagaaaagggtcaatgacttggatgaagatattccaaggccgcctttctcctctcatagtgacaaaacggaagataaagagggagtttctgaggcctgtcccgtttgcgaaaaaactgtacaaaacccctgtgtattggaaacaggatacgtggcatgctacccgtgtgccataagctatttggttaataatgaaggccattgtcccgttaccaataaaaagttattgggttgtacatacaacaaacacacgaataaatgggaagttgtgacaggtattaggaagttattgatctga

SEQ ID NO: 8409 - DNA, 1413 bp, Saccharomyces cerevisiae
atgactatccctggaagatttatgacaattgataagggcacttttggtgaatacactgctagcacccgttggcccattatcattcagaatgctatagacgatttaagtaagcatcaagaaacggagaagagtaacggcactaagttcgaacaaggtgaagttatcaaaaaggagctcaaggaattccgtcaggagataattgatcgtgtacctttgagaccctttactgaagaagagatcaaaattgccaacgtcccgctttcgttcaatgaatatctaaagaaacaccctgaagtcaattggggggctgtagagtggctgttctcggaggtttacttgtatagaagagtaaatgttcttttccaacgccaatgcgaatgggctaaatttgacatattcaacagacttaaacagtcaacttttgagtcctcgttttatggtgtcgtggaattggcgttaaggtatgaaaatctgttaccacagctgagagaaatgaagcaaaatccaggaaatgagattgacgatatattgaaagttctttttaaagagtttattgagatttctttgtggggcaatgccactgatttatctttattgaccaacgctacgttagaagacattaaatcaatccaaggggcgaaagcaagagctgcatccgagtccaagattgttgttaatgacacggagaaagcatgggaggtattaaccaaagccagggccgatgccaatagcagagaaattcgtgttgattttgtattagacaattctggctttgaattgtatgctgacttgatgttggcagcttttctgttacaaagtggtttggctaccaaatgtattttccacgctaaagacattccatacatggttagcgatgttatgttaaaagattttgatatattagttcatgacctgagagatcgtgagttcttcccaagtggtgaaccctcgacaaaggaatccagagctcttgatttatttgctggtgaaatggaaaagttcgtctctagcggtaagatagaattccgcgaagattctttctggaccacggaattagattattggaatttggacgcaaacgaaaccaaataccatggatccattttgcacaaagatttgcaaaaatccaatttggttatttttaagggtgatctaaactatagaaaattaactggcgacagaaaatggccccgcaccactaaatgggaaacggctatcggacctcttgctacgaatggtattacatcattgagcttgagaacctgtaaagccgatgtacaagttgctttacctgaaggtctagacgcgaaattaagtcaagaatgggaaaaggaaaatcctggccgtggttcttggtggtgttgtagcggtaaatgggcagtcatttgtttctgctctggtatacataaataa

SEQ ID NO: 8410 - DNA, 1413 bp, Artificial Sequence
  Description of Artificial Sequence: Synthetic polynucleotide
atgactatccctggaagatttatgacaattgataagggcacttttggtgaatacactgctagcacccgttggcccattatcattcagaatgctatagacgatttaagtaagcatcaagaaacggagaagagtaacggcactaagttcgaacaaggtgaagttatcaaaaaggagctcaaggaattccgtcaggagataattgatcgtgtacctttgagaccctttactgaagaagagatcaaaattgccaacgtcccgctttctttcaatgaatatttgaagaaacaccctgaagtcaattggggggctgtagagtggcttttcagtgaggtttacttgtatagaagagtaaatgttcttttccaacgccaatgcgaatgggctaaatttgacatattcaacagacttaaacagtctacttttgagtcctctttttatggtgtcgtggaattggcgttaaggtatgaaaatttattaccacagttaagagaaatgaagcaaaatccaggaaatgagattgacgatatattgaaagttctttttaaagagtttattgagatttctttgtggggcaatgccactgatttatctttattgaccaacgctacgttagaagacattaaatctatccaaggggcgaaagcaagagctgcatccgagtccaagattgttgttaatgacacggagaaagcatgggaggtattaaccaaagccagggccgatgccaatagcagagaaattcgtgttgattttgtattagacaattctggctttgaattgtatgctgacttgatgttggcagcttttttattacaaagtggtttggctaccaaatgtattttccacgctaaagacattccatacatggttagcgatgttatgttaaaagattttgatatattagttcatgacttgagagatcgtgagttcttcccaagtggtgaaccctccacaaaggaatccagagctcttgatttatttgctggtgaaatggaaaagttcgtctctagcggtaagatagaattccgcgaagattctttctggaccacggaattagattattggaatttggacgcaaacgaaaccaaataccatggatccattttgcacaaagatttgcaaaaatccaatttggttatttttaagggtgatttgaactatagaaaattaactggcgacagaaaatggccccgcaccactaaatgggaaacggctatcggacctcttgctacgaatggtattacatctttgagcttgagaacctgtaaagccgatgtacaagttgctttacctgaaggtttggacgcgaaattaagtcaagaatgggaaaaggaaaatcctggccgtggttcttggtggtgttgtagcggtaaatgggcagtcatttgtttctgctctggtatacataaatga

SEQ ID NO: 8411 - DNA, 1101 bp, Saccharomyces cerevisiae
atggcgtcagtaacagaacaattcaacgatattattagcttatactcaacaaaattggaacacacatctttgaggcaagattcaccagagtaccagggattattactttccacgatcaagaaattattaaacttaaaaacagcaatttttgacaggttggcattgttcagtactaatgagaccattgatgatgtgtctactgcttccatcaaatttctagcagttgattactatttaggattattgatatcaagacgacagtcgaatgattcggatgttgctcaaaggcagtctatgaaattgatttacctgaaaaaaagcgttgaatctttcattaatttcctgacactattgcaggattataagcttctagatcctttggttggtgaaaaactaggtaacttcaaggatcgttataaccctcagcttagcgaattgtacgcgcaaccaaaaaataacaaagatttatctggagcacagttgaagagaaaagaaaagattgagctattccagcgcaataaagaaattagcacaaaactgcactgcttggagttggaattaaaaaacaacgacgaggaccacgaccatgatgaattactaagagaactatatttgatgaggttacatcactttagtcttgatacgattaacaacattgaacagaatttatttgaatgtgaaatgctctctaatttcctcaaaaattccgtacatgaagtcaaatcatcaggtactcagatacgaaaagaatcgaatgatgatgattccactggttttaccgataaattagagaatataaataagccattgatagacaaaaaaggtcaagtcttgaggaacttcacgcttgtcgacaaaaggcaacaactgcaacaaaaagtgcgaggatatggtcaatatggaccaacaatgtcggtggaggaatttttagataaagagtttgaagaaggtcgcgttcttcaaggtggcgaagaaccagagcaagcaccagatgaagaaaacatggactggcaagatagagaaacctataaagctcgtgagtgggacgagttcaaggaaagtcatgctaagggaagcggaaataccatgaatagaggatag

SEQ ID NO: 8412 - DNA, 1101 bp, Artificial Sequence
  Description of Artificial Sequence: Synthetic polynucleotide
atggcgagtgtaacagaacaattcaacgatattattagcttatactccacaaaattggaacacacatctttgaggcaagattctccagagtaccagggattattactttccacgatcaagaaattattaaacttaaaaacagcaatttttgacaggttggcattgttcagtactaatgagaccattgatgatgtgtctactgcttccatcaaatttttggcagttgattactatttaggattattgatatctagaagacagtctaatgattctgatgttgctcaaaggcagtctatgaaattgatttacttgaaaaaaagcgttgaatctttcattaatttcttaacattattgcaggattataagcttttagatcctttggttggtgaaaaattgggtaacttcaaggatcgttataaccctcagcttagcgaattgtacgcgcaaccaaaaaataacaaagatttatctggagcacagttgaagagaaaagaaaagattgagcttttccagcgcaataaagaaattagcacaaaattacactgcttggagttggaattaaaaaacaacgacgaggaccacgaccatgatgaattattaagagaattgtatttgatgaggttacatcactttagtcttgatacgattaacaacattgaacagaatttatttgaatgtgaaatgctctctaatttcctcaaaaattccgtacatgaagtcaaatcttctggtactcagataagaaaagaaagtaatgatgatgattccactggttttaccgataaattagagaatataaataagccattgatagacaaaaaaggtcaagtcttgaggaacttcacgcttgtcgacaaaaggcaacaattacaacaaaaagtgagaggatatggtcaatatggaccaacaatgtctgtggaggaatttttagataaagagtttgaagaaggtcgcgttcttcaaggtggcgaagaaccagagcaagcaccagatgaagaaaacatggactggcaagatagagaaacctataaagctcgtgagtgggacgagttcaaggaaagtcatgctaagggaagcggaaataccatgaatagaggatga

SEQ ID NO: 8413 - DNA, 1572 bp, Saccharomyces cerevisiae
atggctattaaccaggcacatgttcatccgcattacacgttacctggtgtaatgcactacttgcaaacggagttcacgaagaatgaaagagatagaatcacctgggagctagaaaggtcggaaatgaaagcaagaattgcagaactagagggcgaaaatagagatttgaagcatcaattgaatcaaatacaatcgaaagctgtttctcctgaaggtgaaaaggaagaaaaacatgtgcctgattcattactgcagtctaagctagctgttcaagaaaatgtgaaggaaataatttatttgttgaaaggccctaacacggtcaatcagttagagtcattaaatagcagagaagcgggttctgaattgcacgatttagagaaactgaacgtgaatactcccaaggaagagggcagtgcgaagacaaatgggatggatattttaaataatgccctcttggacaccaaacccaatccaaagcaaggtccttcagagtcaccatcaccaaccaaagtgaaatctttgtttagcacagccaacaagcgtgaaaataatgaaacaatatccaagatacactcggaattgtcgaaagtcgacattatcagctcctacggggactgtatggcactttatgatgcagacaccaaatcgttagaaatacaccaagtggacgcaaacttgaattccaaactcttaaagaaaatatctttagggcaagatagcgacattatgaaatttttctgggtttcgacgtccaaactccttgttattgaaaagagtttccatttgaaattgttctctatttctagcgcatctttgatctcagatgtggacctattacaagactcagaacagccgttttcgtctagtgatatcattaatatagacttcaaaaataaatggttgttgatagctagtaagaataaatctcaaattagaatctgggaattggacaatatagaggctcctgaggatgtcccaattaacataaaagaaacatatgaaataacacatgataatgatgacgatgatagtaatgattccacaaacattctggattgtatattgggtataacagaaaaatccttaatattactgtcttcaaatccataccagcttaccatatatgatttcgagggtaagcttctacaaaaaattgatttgaagattgatacaatattatcgggtaagccagaagaagaaggttaccatttatttttggatagaaaaacttctaagctactgattcagctaagcaatgagagattattggtttattcttttgataagaaaaaagttgtactgaaggaacaattgactccatcgtcaacactaccaatacaactcgatttgaacgacagcataatcaccgtatcatatagtaatggagactttgagtttaggaatttagaaaacctaaaaccatccatcgacgaatttgtcgtagcagacatcaacttctcggaaagaaaagagcctgtggtattttcttcaaatctgattgtagattctacgccggtgttaatcaccgtgaataaaaataacgaagtccttttgcacaagattaaaatataa

SEQ ID NO: 8414 - DNA, 1572 bp, Artificial Sequence
  Description of Artificial Sequence: Synthetic polynucleotide
atggctattaaccaggcacatgttcatccgcattacacgttacctggtgtaatgcactacttgcaaacggagttcacgaagaatgaaagagatagaatcacctgggagttagaaaggtctgaaatgaaagcaagaattgcagaattagagggcgaaaatagagatttgaagcatcaattgaatcaaatacaaagtaaagctgtttctcctgaaggtgaaaaggaagaaaaacatgtgcctgattctttattgcagtctaagttggctgttcaagaaaatgtgaaggaaataatttatttgttgaaaggccctaacacggtcaatcagttagagtctttaaatagcagagaagcgggttctgaattgcacgatttagagaaattgaacgtgaatactcccaaggaagagggcagtgcgaagacaaatgggatggatattttaaataatgccctcttggacaccaaacccaatccaaagcaaggtccttctgagtctccatctccaaccaaagtgaaatctttgtttagcacagccaacaagcgtgaaaataatgaaacaatatccaagatacacagtgaattgagtaaagtcgacattatcagctcctacggggactgtatggcactttatgatgcagacaccaaatctttagaaatacaccaagtggacgcaaacttgaattccaaactcttaaagaaaatatctttagggcaagatagcgacattatgaaatttttctgggtttccacgtccaaactccttgttattgaaaagagtttccatttgaaattgttctctatttctagcgcatctttgatcagtgatgtggacttattacaagactctgaacagccgttttcttctagtgatatcattaatatagacttcaaaaataaatggttgttgatagctagtaagaataaatctcaaattagaatctgggaattggacaatatagaggctcctgaggatgtcccaattaacataaaagaaacatatgaaataacacatgataatgatgacgatgatagtaatgattccacaaacattttagattgtatattgggtataacagaaaaatccttaatattattatcttccaatccataccagcttaccatatatgatttcgagggtaagcttttacaaaaaattgatttgaagattgatacaatattatctggtaagccagaagaagaaggttaccatttatttttggatagaaaaacttctaagttattgattcagttgagcaatgagagattattggtttattcttttgataagaaaaaagttgtattgaaggaacaattgactccatcttctacattaccaatacaactcgatttgaacgacagcataatcaccgtatcttatagtaatggagactttgagtttaggaatttagaaaacttgaaaccatccatcgacgaatttgtcgtagcagacatcaacttctctgaaagaaaagagcctgtggtattttcttccaatttaattgtagattctacgccggtgttaatcaccgtgaataaaaataacgaagtccttttgcacaagattaaaatatga

SEQ ID NO: 8415 - DNA, 1131 bp, Saccharomyces cerevisiae
atgaaggacctaaatccagaaatggggaaatttgctaccactaaaggccctcctcaagacaatagaggcatggttgatatagcgacactgcctaattttcctgccaaccgtagtgggactcctcgtgaggagatgtatctggcgcccaacaagatggaaactccaaggatacttaatatgaatatggtaccggattatttgcaaaaagagaacttctcgccagatttttcttctgctaccgtatctgccaagtcatctcctgtcaacgttactcatgatgagtcgcttcctctgggaactattgaatcgaatagcacaaaggattctaaatatgcagttcaacggcaacagcaacaagtggtagatttcatagagaataatatgcagctactgtcttcagaaacactaaattttagatcagacattatgaaaactttggagcttcccattcccaagagaagagatattaagggaaaccatctatctaaactattatttgctaaatcacctctaactatcaacacatattgccaattttatgaccgtagaaccaagcgaatttgcaatcaagaaatgatatggaaagataagaacagtagagagaagcatggttctagaaagtatcaaagacatttgagtaaagttcacgatgtccagctaacaccaaataattttaccgaattttttgatcataattctccacttttccaggaatgctatgactatcaatctagattgatgcgtgatttacttgttgaaccagatgccaaattcaaagagaagaaaaagaagaaaaaaggggacgtcaacggaaatcatcctgaaaccggatcgagcctcatcaaccaccaggtccaacagcaaaatgttcgagaacttcaatcgaaaatagccatgaacgacttgatagagattcttatcgatttaaacattccgttttctgttttagactaccaaccaatgagaaattggctcatcaaatattcaataatttcaacagatactttgccggatgaagtatacttcaaaactgatccaggcgtgaatgaactggaacacaacagtagtaatttaaacaatagcaatagcggtactcctcataatcataatcaaaaccaacataccaattaa

SEQ ID NO: 8416 - DNA, 1131 bp, Artificial Sequence
  Description of Artificial Sequence: Synthetic polynucleotide
atgaaggacttgaatccagaaatggggaaatttgctaccactaaaggccctcctcaagacaatagaggcatggttgatatagcgacattgcctaattttcctgccaaccgtagtgggactcctcgtgaggagatgtatttggcgcccaacaagatggaaactccaaggatacttaatatgaatatggtaccggattatttgcaaaaagagaacttctctccagatttttcttctgctaccgtatctgccaagtcttctcctgtcaacgttactcatgatgagtctcttcctttgggaactattgaaagtaatagcacaaaggattctaaatatgcagttcaaagacaacagcaacaagtggtagatttcatagagaataatatgcagttattatcttctgaaacattaaattttagaagtgacattatgaaaactttggagcttcccattcccaagagaagagatattaagggaaaccatttatctaaattattatttgctaaatctcctttaactatcaacacatattgccaattttatgaccgtagaaccaagagaatttgcaatcaagaaatgatatggaaagataagaacagtagagagaagcatggttctagaaagtatcaaagacatttgagtaaagttcacgatgtccagttgacaccaaataattttaccgaattttttgatcataattctccacttttccaggaatgctatgactatcaatctagattgatgcgtgatttacttgttgaaccagatgccaaattcaaagagaagaaaaagaagaaaaaaggggacgtcaacggaaatcatcctgaaaccggaagcagcctcatcaaccaccaggtccaacagcaaaatgttagagaacttcaaagtaaaatagccatgaacgacttgatagagattcttatcgatttaaacattccgttttctgttttagactaccaaccaatgagaaattggctcatcaaatattctataatttctacagatactttgccggatgaagtatacttcaaaactgatccaggcgtgaatgaattggaacacaacagtagtaatttaaacaatagcaatagcggtactcctcataatcataatcaaaaccaacataccaattga

SEQ ID NO: 8417 - DNA, 2532 bp, Saccharomyces cerevisiae
atgtctttaatttcagctgtagaagatagagacatacataatataggaaagacttctggtggagggagcaggacttcgtctataacttcgtcgaaaaagtcgctgaaacacggctctaaatctttgagaaaaccaaaggtataccagacaacaggcgaaccattaagcagggaggctttatataaggcgaagttgaagtacggggtttaccagtcacctgcccaaagttactcaattggcgtcagcgacgctcatgcagcttccgacaaggcagctaatttagctcatgacaatcaaaccacggtagaagcttacaaacgtatgtttattgaccctaatgccactaaagctgcatccaaaatgggacccaaagttgtacgtaacaactcaataacttctgctacttctaaaacttcaaaagaatctcagacgaagagaaagtccaaagaatctccaggggccgccgcatcgaaagcttattcgatgacaatggaaactacaagtttaagctctcaaacaaacagcaggtcatattctatcacctctgccagctctgtgttaagcggcgcgagtggcagtttcaacagtactgttaatcctaaaccaaagactttgaatttggagaaagtcttagtgggtgctgaaaaaaaggcagaatctcgtattaaggaaagatgggaaccggaaaagacgaacttccaatacggcgtcaagactgatgagcatggtaatttaaatcaattcagtttctccaatgagatgatgaataacattatggcgaaagttgatgctccaaaagcacaagatttacaaaaggtcaaaaaagtttctgctgagaaagaagccaagtcgatgaaatttgcattaggagctgctaatgctgtgaaagacatgcatcctggtgaggatatcgacaaaagtatagctcttaaggcgcagaagagggaaacctatctgagccaattaacttctcagcaagttttgactttggcaagagccaatgttgacagacaattggatatcattgaaaaaagcgatatgcatagaaagctattcactaatatggaatacaacaaagctgctgtcgctgtcgcacagtctaatcatcagaaaaagacagaattccataacaagattaacatgggtggtggcctgtttttgtcaccagaagatatcactaaaatcgcatccggattgatttctcctgtacttggtgaagtgagtgagagggcggaggcgcaacgtgctatggatgaagaaattgcagaaagaactgaggcctataataaatcatcaaatgaatgggaaacgatggaacgttctatcatttctaatgacgccaaagtattgactactacggctaataggcatcaaaccgaaaaaaagacctcccaggaaaagattaaagccagctttgatgcacttgtggccagaatggataccaaagtcgctgaaagggaaactctgcttgaagataccaagagcaaagagatcgaatttaaaaagcaaatgcagcaagagttaaaggacgaaaaagctcgtctagatcaagatttggaggaatggggtaagaaatgtgaacaagatatcactgaagcgcgcaaagagcaagaagaactattgaaaccttaccatgacgatctggcaaatgcagaagcggaacacaaaactttagtggaagagcgcgatgaaattaacgcagaaatctcaagattgcaggatgctatagttgaccataaaagaaagatctctggttacggaaatgatcttgacgcccagaagaatagaaatatcagagaggatgacaaattactggaactaggtcaaactaaagaaagcttggaatcccatttgaatgatgacgttattattcttgctaataaggctaaagagcaggctgagttatcaaccaaggaggcccgtctgaagcaattggaagtggattcgttgattaacgaacgtaagagcgagttgaacgcgaccgaaatcgagttaaagaaggaaaaactaaatttgttggaagctatgaaagatgttgcttctgcacgtggcgatgataagattgacgaagagaaggttaaaaaattgattggtatgacttctgaggagtatttaacacaaaacaaatccgtcgagaaaaatgttgaagatttaccaacccaacttgaaaaaatagaggaaggtgatgaactaaagaaggaagagatagtgggagccgaaacgaaaaattcaggtggtgatggggttccggtgagtactgccgcaaaagaagctaccgaaactagttctgctgttcaaacaaaggaacctgaagaaaaaatttcgatcggaaataaatcaagtggaaaagaagacgctaatgattgtaaatcagcggagcattcaaaagaaatctcggtttcacagaaagcaggaaacaataaatcattgggagttagccctgatagtttggaacatacatttagtggcttttcacagggttcttcgatcgaagacgatcaggatgcaattagtaatcaagagaaaaaataa

SEQ ID NO: 8418 - DNA, 2532 bp, Artificial Sequence
  Description of Artificial Sequence: Synthetic polynucleotide
atgtctttaatttctgctgtagaagatagagacatacataatataggaaagacttctggtggagggagcaggacttcttctataacttcttctaaaaagtctttgaaacacggctctaaatctttgagaaaaccaaaggtataccagacaacaggcgaaccattaagcagggaggctttatataaggcgaagttgaagtacggggtttaccagtctcctgcccaaagttactctattggcgtcagcgacgctcatgcagcttccgacaaggcagctaatttagctcatgacaatcaaaccacggtagaagcttacaaacgtatgtttattgaccctaatgccactaaagctgcatccaaaatgggacccaaagttgtacgtaacaacagcataacttctgctacttctaaaacttctaaagaatctcagacgaagagaaagtccaaagaatctccaggggccgccgcatccaaagcttattccatgacaatggaaactacaagtttaagctctcaaacaaacagcaggagttattctatcacctctgccagctctgtgttaagcggcgcgagtggcagtttcaacagtactgttaatcctaaaccaaagactttgaatttggagaaagtcttagtgggtgctgaaaaaaaggcagaatctcgtattaaggaaagatgggaaccggaaaagacgaacttccaatacggcgtcaagactgatgagcatggtaatttaaatcaattcagtttctccaatgagatgatgaataacattatggcgaaagttgatgctccaaaagcacaagatttacaaaaggtcaaaaaagtttctgctgagaaagaagccaagtctatgaaatttgcattaggagctgctaatgctgtgaaagacatgcatcctggtgaggatatcgacaaaagtatagctcttaaggcgcagaagagggaaacctatttgagccaattaacttctcagcaagttttgactttggcaagagccaatgttgacagacaattggatatcattgaaaaaagcgatatgcatagaaagcttttcactaatatggaatacaacaaagctgctgtcgctgtcgcacagtctaatcatcagaaaaagacagaattccataacaagattaacatgggtggtggcttatttttgtctccagaagatatcactaaaatcgcatccggattgatttctcctgtacttggtgaagtgagtgagagggcggaggcgcaacgtgctatggatgaagaaattgcagaaagaactgaggcctataataaatcttccaatgaatgggaaacgatggaacgttctatcatttctaatgacgccaaagtattgactactacggctaataggcatcaaaccgaaaaaaagacctcccaggaaaagattaaagccagctttgatgcacttgtggccagaatggataccaaagtcgctgaaagggaaactttacttgaagataccaagagcaaagagatcgaatttaaaaagcaaatgcagcaagagttaaaggacgaaaaagctcgtttggatcaagatttggaggaatggggtaagaaatgtgaacaagatatcactgaagcgcgcaaagagcaagaagaattattgaaaccttaccatgacgatttggcaaatgcagaagcggaacacaaaactttagtggaagagcgcgatgaaattaacgcagaaatctccagattgcaggatgctatagttgaccataaaagaaagatctctggttacggaaatgatcttgacgcccagaagaatagaaatatcagagaggatgacaaattattggaattgggtcaaactaaagaaagcttggaatcccatttgaatgatgacgttattattcttgctaataaggctaaagagcaggctgagttatctaccaaggaggcccgtttgaagcaattggaagtggattctttgattaacgaacgtaagagcgagttgaacgcgaccgaaatcgagttaaagaaggaaaaattgaatttgttggaagctatgaaagatgttgcttctgcacgtggcgatgataagattgacgaagagaaggttaaaaaattgattggtatgacttctgaggagtatttaacacaaaacaaatccgtcgagaaaaatgttgaagatttaccaacccaacttgaaaaaatagaggaaggtgatgaattgaagaaggaagagatagtgggagccgaaacgaaaaattctggtggtgatggggttccggtgagtactgccgcaaaagaagctaccgaaactagttctgctgttcaaacaaaggaacctgaagaaaaaatttccatcggaaataaatctagtggaaaagaagacgctaatgattgtaaatctgcggagcattctaaagaaatctccgtttctcagaaagcaggaaacaataaatctttgggagttagccctgatagtttggaacatacatttagtggcttttcccagggttcttctatcgaagacgatcaggatgcaattagtaatcaagagaaaaaatga

SEQ ID NO: 8419 - DNA, 2010 bp, Saccharomyces cerevisiae
atgagctacagttatgaagcttgtttttgggacccaaacgacaatggtgtgaacatccttctgggtcacatttctcagggaataagatcttgcgactcaatgatacttttctttaagcagcgtagtgagcttgagaaggactatgccaggcggcttggagccatcacgggaaaactagacaaagacattggaacaaacatggattatggaaagttgaatgaaacatttaatgtggtgctcagtgttgagaaagctcgagcacaatcgcattccaagcaaagtgagattcttttcagacagatttacacggatactaaggcatttgccgctaacttgcaagcaagatatactacattgagtggaaagattgaaaggttgcggatggacaagttcaacaagaaaaaggggtgtgaggtgttgcaaaagaaattacaggatgcccagattagattcagagacttgcaattgaacgagaataatatgattggggccaagagagtagaacacaacaagagagaactattgaaatgggaatcgaactctcaggaatataaggttcaactagacgttcttaagcaagaatataaggcatcgcagaaattctggatacacgagtgggcgcaattatcctgcgaactgcaagaaatggagaacgctagaatatcctttttacaatcgaaattacaacagttcgcaacctcatcgatggaaacatatattttagagcaaacaaaaatggacatgttaacaaatcatctgaactcattcacggcagcggatgaaatatcgacgttttcaaaagaaaatggaactggtagactgaaacataagacttccaaaggtgacatgaattctagcgccaactgggctcaaatgagcagtatctccacgacaagtaaaaaaaccgaatcgtatatggacaatataaggaaactatcttctcagctgaaggaaaccgaaaataaaaggaaactagcttcaatagacaaatatgagaaaccattgccatctccagaagtcaccatggctacacaatttagaaattccacacccgtcatacgtaatgagacaaaagtggttgctaacccaacattatctttgaggtcttcacccgtccagttacagagcaatgtggatgactccgtgttaaggcagaaacctgataaaccaaggccgattgttggggaagaacaacttaaacctgatgaagattcgaaaaatcctgatgaaaaaggtctaatggtgcataaaagaaatcaatctctcagctcaccatcagaatcaagttcttctaatccaacggattttagccacatcaaaaagagacaaagtatggaatctatgactacatccgtaagttcaatggccaatagtatagacgactcacagagatttgccaaatcatggaactcgtcaaataggaaaagaaaatctatgagccatttgcaagtaccctcatccgcttcttcgaggtcggatgatgggggaagaacgcctaactctgcgcacaacctcaatgaagatgattataacacgaggagagataccagtacaagcacaattttgttcaaacctcctgtggcagtaagaggaacgtctagggggcacacgcatagacaatccatgataatgcaagattcaagtaatccaattgaagatgccttgtacgaaatggaaagaatccaaagtagttctaaaccaggtacaaaaacaggaaacatcatggatgagagaggtgtggtcagggatagaggtattactgttaccttgcctattgtcaccagtgaaggttttccagtcattgaatatgccaaggccatgtatccattgattggaaatgaggcacctggattagcgaatttccataagggcgactatctgctaattactgagattgttaataaagattggtataaaggtgaagtttatgataatgaccgtatagatagaaatcataggataggattaattccctataatttcattcagctactgcatcaaggtctttga

SEQ ID NO: 8420 - DNA, 2010 bp, Artificial Sequence
  Description of Artificial Sequence: Synthetic polynucleotide
atgagctacagttatgaagcttgtttttgggacccaaacgacaatggtgtgaacatccttttgggtcacatttctcagggaataagatcttgcgactccatgatacttttctttaagcagcgtagtgagcttgagaaggactatgccaggagacttggagccatcacgggaaaattagacaaagacattggaacaaacatggattatggaaagttgaatgaaacatttaatgtggtgctcagtgttgagaaagctagagcacaatctcattccaagcaaagtgagattcttttcagacagatttacacggatactaaggcatttgccgctaacttgcaagcaagatatactacattgagtggaaagattgaaaggttgagaatggacaagttcaacaagaaaaaggggtgtgaggtgttgcaaaagaaattacaggatgcccagattagattcagagacttgcaattgaacgagaataatatgattggggccaagagagtagaacacaacaagagagaattattgaaatgggaatctaactctcaggaatataaggttcaattggacgttcttaagcaagaatataaggcatcccagaaattctggatacacgagtgggcgcaattatcctgcgaattacaagaaatggagaacgctagaatatcctttttacaaagtaaattacaacagttcgcaacctcttctatggaaacatatattttagagcaaacaaaaatggacatgttaacaaatcatttgaactctttcacggcagcggatgaaatatctacgttttccaaagaaaatggaactggtagattgaaacataagacttccaaaggtgacatgaattctagcgccaactgggctcaaatgagcagtatctccacgacaagtaaaaaaaccgaaagttatatggacaatataaggaaattatcttctcagttgaaggaaaccgaaaataaaaggaaattggcttctatagacaaatatgagaaaccattgccatctccagaagtcaccatggctacacaatttagaaattccacacccgtcatacgtaatgagacaaaagtggttgctaacccaacattatctttgaggtcttctcccgtccagttacagagcaatgtggatgactccgtgttaaggcagaaacctgataaaccaaggccgattgttggggaagaacaacttaaacctgatgaagattctaaaaatcctgatgaaaaaggtttgatggtgcataaaagaaatcaatctctcagctctccatctgaaagtagttcttctaatccaacggattttagccacatcaaaaagagacaaagtatggaatctatgactacatccgtaagttctatggccaatagtatagacgactctcagagatttgccaaaagttggaactcttccaataggaaaagaaaatctatgagccatttgcaagtaccctcttccgcttcttccaggtctgatgatgggggaagaacgcctaactctgcgcacaacctcaatgaagatgattataacacgaggagagataccagtacaagcacaattttgttcaaacctcctgtggcagtaagaggaacgtctagggggcacacgcatagacaatccatgataatgcaagattctagtaatccaattgaagatgccttgtacgaaatggaaagaatccaaagtagttctaaaccaggtacaaaaacaggaaacatcatggatgagagaggtgtggtcagggatagaggtattactgttaccttgcctattgtcaccagtgaaggttttccagtcattgaatatgccaaggccatgtatccattgattggaaatgaggcacctggattagcgaatttccataagggcgactatttattgattactgagattgttaataaagattggtataaaggtgaagtttatgataatgaccgtatagatagaaatcataggataggattaattccctataatttcattcagttattacatcaaggtctttga

SEQ ID NO: 8421 - DNA, 291 bp, Saccharomyces cerevisiae
atgtatatcaattttactagttttctgataaaagaaaaaaagtataatgtcagatttttgttaagtagaaatagaaagatatacgctgccgtgggagaaggacacctctccggatttgtaactaaaaatcataaaatatcacgtctttccttcatattttcaaaaaaaaaaaaagttttctttaccatttttgacacaataatcacgataattgttaggtcaggcattccctttccacttttatgttcatttggacgcaataagatatacatattatttaatgtgctctaa

SEQ ID NO: 8422 - DNA, 291 bp, Artificial Sequence
  Description of Artificial Sequence: Synthetic polynucleotide
atgtatatcaattttactagttttttaataaaagaaaaaaagtataatgtcagatttttgttaagtagaaatagaaagatatacgctgccgtgggagaaggacacctctccggatttgtaactaaaaatcataaaatatctcgtctttccttcatattttccaaaaaaaaaaaagttttctttaccatttttgacacaataatcacgataattgttaggagtggcattccctttccacttttatgttcctttggacgcaataagatatacatattatttaatgtgctctga

SEQ ID NO: 8423 - DNA, 1404 bp, Saccharomyces cerevisiae
atggctccatttaggcaggacagtattttgataatataccccagatctcaaactactctcgttcaatttggtttgaatgaagaaacattcactgtacctgagctggaaataccaacacagatttatcggaccacgagacaagatggttcctacacatatcattcaacgaacaaggataataaagccgaattaatcaaaccaatccaaaatggtgaaataatagacataagcgcctttacacaatttcttagactaatatttgtatctattttgtctgatagagctaataaaaatcaagatgcttttgaagctgaattatctaatattcctcttctactgattacgcaccactcttggtcgcaatcggatctagagattattactcaatatgtcttcgaaagtcttgagataaacaatctaatccaattgccggcttccttagcggccacttattctatgatttcgttgcagaattgttgtattattgatgttggaacacatcatacagatattattcctattgttgactatgcacaattagaccatcttgtctcttcaataccaatgggcggacagtctattaatgattctctaaaaaaactactacctcaatgggacgatgatcagatagaatcattgaaaaaatcaccaatttttgaggtgctcagtgacgacgccaaaaaactatcaagtttcgattttggaaacgaaaatgaggacgaggatgaaggaactttaaacgttgccgagattattacaagtggtcgtgatacacgtgaagttttagaggaaagagaacgtggtcaaaaagtcaaaaatgttaaaaatagcgacttggaattcaatactttttgggatgaaaaaggtaacgaaattaaagttggtaagcaaagattccaaggatgtaataacctgattaagaatatttctaatcgtgtaggattgacgttagataacatagatgatattaacaaagctaaagccgtttgggaaaatattatcatcgtcggtggcactacttcaatttcaggttttaaagaagctttactgggtcaactactgaaagaccatttaattatagagccagaggaagagaagtcaaaaagagaagaggaagcgaaatccgtattaccagctgcaacaaaaaagaaaagcaagtttatgacaaatagcaccgcatttgttccaactatagaatacgtacagtgtcctacagtaatcaaactggctaaatatccagattactttcctgagtggaagaaaagtggatattcagagattatattcttgggtgcccaaattgtttctaagcaaattttcactcatcctaaagatacattttatatcacaagagaaaagtataatatgaaaggaccggctgctctttgggacgtgcaattttaa

SEQ ID NO: 8424 - DNA, 1404 bp, Artificial Sequence
  Description of Artificial Sequence: Synthetic polynucleotide
atggctccatttaggcaggacagtattttgataatataccccagatctcaaactactctcgttcaatttggtttgaatgaagaaacattcactgtacctgagttagaaataccaacacagatttatagaaccacgagacaagatggttcctacacatatcattctacgaacaaggataataaagccgaattaatcaaaccaatccaaaatggtgaaataatagacataagcgcctttacacaatttcttagattaatatttgtatctattttgtctgatagagctaataaaaatcaagatgcttttgaagctgaattatctaatattcctcttttgttaattacgcaccactcttggtctcaatctgatttagagattattactcaatatgtcttcgaaagtcttgagataaacaatttgatccaattgccggcttccttagcggccacttattctatgatttctttgcagaattgttgtattattgatgttggaacacatcatacagatattattcctattgttgactatgcacaattagaccatcttgtctcttctataccaatgggcggacagtctattaatgattctttgaaaaaattattgcctcaatgggacgatgatcagatagaatctttgaaaaaatctccaatttttgaggtgctcagtgacgacgccaaaaaattatccagtttcgattttggaaacgaaaatgaggacgaggatgaaggaactttaaacgttgccgagattattacaagtggtcgtgatacacgtgaagttttagaggaaagagaacgtggtcaaaaagtcaaaaatgttaaaaatagcgacttggaattcaatactttttgggatgaaaaaggtaacgaaattaaagttggtaagcaaagattccaaggatgtaataacttgattaagaatatttctaatcgtgtaggattgacgttagataacatagatgatattaacaaagctaaagccgtttgggaaaatattatcatcgtcggtggcactacttctatttctggttttaaagaagctttattgggtcaattattgaaagaccatttaattatagagccagaggaagagaagagtaaaagagaagaggaagcgaaatccgtattaccagctgcaacaaaaaagaaaagcaagtttatgacaaatagcaccgcatttgttccaactatagaatacgtacagtgtcctacagtaatcaaattggctaaatatccagattactttcctgagtggaagaaaagtggatattctgagattatattcttgggtgcccaaattgtttctaagcaaattttcactcatcctaaagatacattttatatcacaagagaaaagtataatatgaaaggaccggctgctctttgggacgtgcaattttga

SEQ ID NO: 8425 - DNA, 1305 bp, Saccharomyces cerevisiae
atgaagactcagtactctctaatacgaaaaatttgggcacattcagtaacagaatttctgaaatcccagtggtttttcatctgtttggctattttaatcgttattgcaagatttgctccgaattttgcaagagacggagggttaattaaaggccaatatagtattgggtacggctgcgtcgcctggatttttctccaaagtggcctgggaatgaaatcaaggtcactaatggcaaatatgttaaattggagagctcatgccactattctggttctgagtttccttattacctcgtccatagtatatggattttgttgcgcggtaaaggctgctaatgatccgaaaatagatgactgggtacttatcggtctaattttgactgccacttgtccaacaaccgtggcttcaaacgttatcatgactacgaatgcaggtggaaatagccttttgtgcgtttgtgaagtattcattggaaatttgttgggtgcgtttattacacctgcattggttcaaatgtttactaaccgcgcaccatttgcatacggcaaccctgccactggaaatggcattggtgcgctttatggccgtgttatgaaacaggttggtctctctgtattcgtacccttgtttgtgggtcaggttattcaaaattgctttccgaagggtactgcttattacctgggctttttgaaaaaataccatattaaaattggatcttacatgcttttattgattatgtttagttcattctcaactgccttttatcaggatgcgtttactagcgtttctcatgtttgcatcatatttctctgcttttttaatttgggaatttatatattcttcacgggtctgtcatacttatgtgcaaggccatggttcatcctcaagcttttccctcatgaaccaatagagggcaaatctacaagattgtaccgctattcgtataatatctttaggcctttttattattcaaaggaagatgcgatttgcattatgttttgtggcccggctaaaactgcagcactgggtgtatcactaattacttcacaatacggcgataaaaaagaacacctgggtaagttgttggttcccttggttttatatcaagttgagcaagtcatgacggcaaatttctttgtaagcttgttcaaaagatggatacaaaaggacgctcaagcagacggaagcgagtcatcttgtgcaaatgagaatgaggaagttgatttggaaaagatcatatcaattggaactggtgaaaatcaatccgttctgtcgaacaacgtcccatatacacaaccaaggtga

SEQ ID NO: 8426 - DNA, 1305 bp, Artificial Sequence
  Description of Artificial Sequence: Synthetic polynucleotide
atgaagactcagtactctttgataagaaaaatttgggcacattctgtaacagaatttttgaaatcccagtggtttttcatctgtttggctattttaatcgttattgcaagatttgctccgaattttgcaagagacggagggttaattaaaggccaatatagtattgggtacggctgcgtcgcctggatttttctccaaagtggcttgggaatgaaatctaggtccttgatggcaaatatgttaaattggagagctcatgccactattttggttttgagtttccttattacctcttccatagtatatggattttgttgcgcggtaaaggctgctaatgatccgaaaatagatgactgggtacttatcggtttgattttgactgccacttgtccaacaaccgtggcttctaacgttatcatgactacgaatgcaggtggaaatagccttttgtgcgtttgtgaagtattcattggaaatttgttgggtgcgtttattacacctgcattggttcaaatgtttactaaccgcgcaccatttgcatacggcaaccctgccactggaaatggcattggtgcgctttatggccgtgttatgaaacaggttggtctctctgtattcgtacccttgtttgtgggtcaggttattcaaaattgctttccgaagggtactgcttattacttgggctttttgaaaaaataccatattaaaattggatcttacatgcttttattgattatgtttagttctttctctactgccttttatcaggatgcgtttactagcgtttctcatgtttgcatcatatttctctgcttttttaatttgggaatttatatattcttcacgggtttatcttacttatgtgcaaggccatggttcatcctcaagcttttccctcatgaaccaatagagggcaaatctacaagattgtaccgctattcttataatatctttaggcctttttattattccaaggaagatgcgatttgcattatgttttgtggcccggctaaaactgcagcattgggtgtatctttgattacttctcaatacggcgataaaaaagaacacttgggtaagttgttggttcccttggttttatatcaagttgagcaagtcatgacggcaaatttctttgtaagcttgttcaaaagatggatacaaaaggacgctcaagcagacggaagcgagtcttcttgtgcaaatgagaatgaggaagttgatttggaaaagatcatatctattggaactggtgaaaatcaatccgttttatctaacaacgtcccatatacacaaccaaggtga

SEQ ID NO: 8427 - DNA, 534 bp, Saccharomyces cerevisiae
atgtttcgagccggatcatcaaaaagattcttacgaaacacactaatagcaatttcatgggttccggtacttctaacaatcaataataatgtggtccatattgcgcaagttaaaggtacctctatgcagcctacgctgaacccgcaaacggaaacgctggcaacagattgggtgctgctttggaagtttggagtcaagaacccaagtaatttatctagagatgacattatccttttcaaagctcctacaaaccctcggaaagtttactgcaaaagggttaaaggtttaccgtttgataccattgacacgaagtttccataccctaaacctcaagtgaacctgcccaggggacacatatgggtcgaaggggacaattattttcattcgattgatagcaatacttttggccccatttccagtgggttggtcatagggaaagctataacaattgtttggccaccctccaggtggggaacggatctcaaactgagtaccggtagagactgcattagcaaaagagccattttagaatga

SEQ ID NO: 8428 - DNA, 534 bp, Artificial Sequence
  Description of Artificial Sequence: Synthetic polynucleotide
atgtttagagccggaagttctaaaagattcttaagaaacacattaatagcaatttcttgggttccggtacttttaacaatcaataataatgtggtccatattgcgcaagttaaaggtacctctatgcagcctacgttgaacccgcaaacggaaacgttggcaacagattgggtgttgctttggaagtttggagtcaagaacccaagtaatttatctagagatgacattatccttttcaaagctcctacaaaccctagaaaagtttactgcaaaagggttaaaggtttaccgtttgataccattgacacgaagtttccataccctaaacctcaagtgaacttgcccaggggacacatatgggtcgaaggggacaattattttcattctattgatagcaatacttttggccccatttccagtgggttggtcatagggaaagctataacaattgtttggccaccctccaggtggggaacggatctcaaattaagtaccggtagagactgcattagcaaaagagccattttagaatga

SEQ ID NO: 8429 - DNA, 1665 bp, Saccharomyces cerevisiae
atgaacaatatatttcatggaactgaagatgaatgtgccaatgaagacgttcttagtttccaaaaaatttccttgaaaagtccctttggtaagaagaagaacatatttagaaatgttcagaccttctttaagtcaaaaagcaaacattcgaatgtcgacgatgatttaatcaataaagagaatcttgcctttgataaatctccattgttaacaaatcacaggagtaaggaaattgatggtccttcaccgaatataaagcagcttggccatcgcgatgagttagatgaaaatgaaaatgaaaatgatgatatagtcttaagcatgcattttgcttctcaaaccttacaaagtccaacaagaaactcatcaagaagatctttgaccaataatagggataatgatcttttaagtagaatcaagtatcctggcagtccccagaggtcgagctctttttcaaggtcaaggtccttgtcgagaaagccaagcatgaatagcagtagcaattcaagcaggagggtgcaacggcaagatgggaaaattccgaggtcatcgagaaaaagttcacagaaattttctaacattactcagaatactttgaacttcacgtctgcgtcatccagtccactagctcctaattcggtaggggtgaaatgttttgaatcatgcctagccaaaacacagataccatattattatgacgatcgtaactcaaatgactttttccctcgaatttctccagaaacgttgaaaaatattctgcagaataatatgtgcgagtcattttataattcatgtcgtattatagattgtcggtttgaatacgaatatactggcggccacataataaactccgttaacatacactcgagagatgagttagagtacgaatttatccataaagttttgcatagcgatactagcaacaacaacactctaccaactcttttaattatccattgcgaatttagttcccaccggggaccttcattggcctctcatttgagaaattgtgatcgtataataaatcaggatcattatcccaaattattctatcccgacatattgatattggatggcggatacaaagctgtttttgacaattttcctgaactatgttatccacgtcagtacgtgggaatgaactcacaagaaaatttgctgaattgtgaacaagaaatggataagtttaggagagaatctaaaagatttgctactaaaaataattcttttagaaaactagcttccccttcaaatcctaacttcttttatagagatagccatcaatcttcaacaacaatggcatcttctgcactatcgttcaggtttgagccgcctccgaagctgtcattaaaccacagaagagtctctagtggttcatcattaaattcaagtgagagtacaggcgacgaaaatttcttccccatcttaagtaagtcgtctatgagtagtaacagtaacctaagcacttcacatatgctactaatggacggactggataccccatcatattttagtttcgaagatgagagaggcaatcatcagcaagtaagtggagatgaagagcaagacggagattttactttcgttggttccgaccgagaagatttacccaggcccgcaagaagatcgttattcccttctctagagactgaagataaaaaatga

SEQ ID NO: 8430 - DNA, 1665 bp, Artificial Sequence
  Description of Artificial Sequence: Synthetic polynucleotide
atgaacaatatatttcatggaactgaagatgaatgtgccaatgaagacgttcttagtttccaaaaaatttccttgaaaagtccctttggtaagaagaagaacatatttagaaatgttcagaccttctttaagagtaaaagcaaacattctaatgtcgacgatgatttaatcaataaagagaatcttgcctttgataaatctccattgttaacaaatcacaggagtaaggaaattgatggtccttctccgaatataaagcagcttggccatcgcgatgagttagatgaaaatgaaaatgaaaatgatgatatagtcttaagcatgcattttgcttctcaaaccttacaaagtccaacaagaaactcttctagaagatctttgaccaataatagggataatgatcttttaagtagaatcaagtatcctggcagtccccagaggagcagctcttttagcaggagtaggtccttgtccagaaagccaagcatgaatagcagtagcaatagtagcaggagggtgcaaagacaagatgggaaaattccgaggtccagcagaaaaagttctcagaaattttctaacattactcagaatactttgaacttcacgtctgcgtcttccagtccattggctcctaattctgtaggggtgaaatgttttgaaagttgcttagccaaaacacagataccatattattatgacgatcgtaacagtaatgactttttccctagaatttctccagaaacgttgaaaaatattttacagaataatatgtgcgagtctttttataattcttgtcgtattatagattgtagatttgaatacgaatatactggcggccacataataaactccgttaacatacactccagagatgagttagagtacgaatttatccataaagttttgcatagcgatactagcaacaacaacactttaccaactcttttaattatccattgcgaatttagttcccacagaggaccttctttggcctctcatttgagaaattgtgatcgtataataaatcaggatcattatcccaaattattctatcccgacatattgatattggatggcggatacaaagctgtttttgacaattttcctgaattatgttatccacgtcagtacgtgggaatgaactctcaagaaaatttgttgaattgtgaacaagaaatggataagtttaggagagaatctaaaagatttgctactaaaaataattcttttagaaaattggcttccccttccaatcctaacttcttttatagagatagccatcaatcttctacaacaatggcatcttctgcattatctttcaggtttgagccgcctccgaagttatctttaaaccacagaagagtctctagtggttcttctttaaatagtagtgagagtacaggcgacgaaaatttcttccccatcttaagtaagtcttctatgagtagtaacagtaacttgagcacttctcatatgttattgatggacggattagataccccatcttattttagtttcgaagatgagagaggcaatcatcagcaagtaagtggagatgaagagcaagacggagattttactttcgttggttccgacagagaagatttacccaggcccgcaagaagatctttattcccttctttggagactgaagataaaaaatga

SEQ ID NO: 8431 - DNA, 2115 bp, Saccharomyces cerevisiae
atgacggtcgaccatgatttcaatagcgaagatattttattccccatagaaagcatgagtagtatacaatacgtggagaataataacccaaataatattaacaacgatgttatcccgtattctctagatatcaaaaacactgtcttagatagtgcggatctcaatgacattcaaaatcaagaaacttcactgaatttggggcttcctccactatctttcgactctccactgcccgtaacggaaacgataccatccactaccgataacagcttgcatttgaaagctgatagcaacaaaaatcgcgatgcaagaactattgaaaatgatagtgaaattaagagtactaataatgctagtggctctggggcaaatcaatacacaactcttacttcaccttatcctatgaacgacattttgtacaacatgaacaatccgttacaatcaccgtcaccttcatcggtacctcaaaatccgactataaatcctcccataaatacagcaagtaacgaaactaatttatcgcctcaaacttcaaatggtaatgaaactcttatatctcctcgagcccaacaacatacgtccattaaagataatcgtctgtccttacctaatggtgctaattcgaatcttttcattgacactaacccaaacaatttgaacgaaaaactaagaaatcaattgaactcagatacaaattcatattctaactccatttctaattcaaactccaattctacgggtaatttaaattccagttattttaattcactgaacatagactccatgctagatgattacgtttctagtgatctcttattgaatgatgatgatgatgacactaatttatcacgccgaagatttagcgacgttataacaaaccaatttccgtcaatgacaaattcgaggaattctatttctcactctttggacctttggaaccatccgaaaattaatccaagcaatagaaatacaaatctcaatatcactactaattctacctcaagttccaatgcaagtccgaataccactactatgaacgcaaatgcagactcaaatattgctggcaacccgaaaaacaatgacgctaccatagacaatgagttgacacagattcttaacgaatataatatgaacttcaacgataatttgggcacatccacttctggcaagaacaaatctgcttgcccaagttcttttgatgccaatgctatgacaaagataaatccaagtcagcaattacagcaacagctaaaccgagttcaacacaagcagctcacctcgtcacataataacagtagcactaacatgaaatccttcaacagcgatctttattcaagaaggcaaagagcttctttacccataatcgatgattcactaagctacgacctggttaataagcaggatgaagaccccaagaacgatatgctgccgaattcaaatttgagttcatctcaacaatttatcaaaccgtctatgattctttcagacaatgcgtccgttattgcgaaagtggcgactacaggcttgagtaatgatatgccatttttgacagaggaaggtgaacaaaatgctaattctactccaaatttcgatctttccatcactcaaatgaatatggctccattatcgcctgcatcatcatcctccacgtctcttgcaacaaatcatttctatcaccatttcccacagcagggtcaccataccatgaactctaaaatcggttcttcccttcggaggcggaagtctgctgtgcctttgatgggtacggtgccgcttacaaatcaacaaaataatataagcagtagtagtgtcaactcaactggcaatggtgctggggttacgaaggaaagaaggccaagttacaggagaaaatcaatgacaccgtccagaagatcaagtgtcgtaatagaatcaacaaaggaactcgaggagaaaccgttccactgtcacatttgtcccaagagctttaagcgcagcgaacatttgaaaaggcatgtgagatctgttcactctaacgaacgaccatttgcttgtcacatatgcgataagaaatttagtagaagcgataatttgtcgcaacacatcaagactcataaaaaacatggagacatttaa

SEQ ID NO: 8432 - DNA, 2115 bp, Artificial Sequence
  Description of Artificial Sequence: Synthetic polynucleotide
atgacggtcgaccatgatttcaatagcgaagatattttattccccatagaaagcatgagtagtatacaatacgtggagaataataacccaaataatattaacaacgatgttatcccgtattctttagatatcaaaaacactgtcttagatagtgcggatctcaatgacattcaaaatcaagaaacttctttgaatttggggcttcctccattatctttcgactctccattgcccgtaacggaaacgataccatccactaccgataacagcttgcatttgaaagctgatagcaacaaaaatcgcgatgcaagaactattgaaaatgatagtgaaattaagagtactaataatgctagtggctctggggcaaatcaatacacaactcttacttctccttatcctatgaacgacattttgtacaacatgaacaatccgttacaatctccgtctccttcttctgtacctcaaaatccgactataaatcctcccataaatacagcaagtaacgaaactaatttatctcctcaaacttccaatggtaatgaaactcttatatctcctagagcccaacaacatacgtccattaaagataatcgtctttccttacctaatggtgctaatagtaatcttttcattgacactaacccaaacaatttgaacgaaaaattgagaaatcaattgaacagtgatacaaattcttattctaactccatttctaatagcaactccaattctacgggtaatttaaattccagttattttaattctttgaacatagactccatgcttgatgattacgtttctagtgatctcttattgaatgatgatgatgatgacactaatttatctcgcagaagatttagcgacgttataacaaaccaatttccgtctatgacaaattctaggaattctatttctcactctttggacctttggaaccatccgaaaattaatccaagcaatagaaatacaaatctcaatatcactactaattctacctctagttccaatgcaagtccgaataccactactatgaacgcaaatgcagactctaatattgctggcaacccgaaaaacaatgacgctaccatagacaatgagttgacacagattcttaacgaatataatatgaacttcaacgataatttgggcacatccacttctggcaagaacaaatctgcttgcccaagttcttttgatgccaatgctatgacaaagataaatccaagtcagcaattacagcaacagttgaacagagttcaacacaagcagctcacctcttctcataataacagtagcactaacatgaaatccttcaacagcgatctttattctagaaggcaaagagcttctttacccataatcgatgattctttaagctacgacttggttaataagcaggatgaagaccccaagaacgatatgttaccgaatagtaatttgagttcttctcaacaatttatcaaaccgtctatgattctttctgacaatgcgtccgttattgcgaaagtggcgactacaggcttgagtaatgatatgccatttttgacagaggaaggtgaacaaaatgctaattctactccaaatttcgatctttccatcactcaaatgaatatggctccattatctcctgcatcttcttcctccacgtctcttgcaacaaatcatttctatcaccatttcccacagcagggtcaccataccatgaactctaaaatcggttcttcccttagaaggcgtaagtctgctgtgcctttgatgggtacggtgccgcttacaaatcaacaaaataatataagcagtagtagtgtcaactctactggcaatggtgctggggttacgaaggaaagaaggccaagttacaggagaaaatctatgacaccgtccagaagaagtagtgtcgtaatagaatctacaaaggaactcgaggagaaaccgttccactgtcacatttgtcccaagagctttaagcgcagcgaacatttgaaaaggcatgtgagatctgttcactctaacgaaagaccatttgcttgtcacatatgcgataagaaatttagtagaagcgataatttgtctcaacacatcaagactcataaaaaacatggagacatttga

SEQ ID NO: 8433 - DNA, 750 bp, Saccharomyces cerevisiae
atgaccacgaacgatacatacgaggctacttatgccattcccatgcactgtgaaaattgcgtgaatgatataaaggcatgcctaaaaaatgtcccaggaatcaattcattgaatttcgatatagagcaacaaataatgagcgtggaaagctcagtagccccttcaaccatcatcaacaccttgcgaaactgtggtaaagacgccatcataagaggcgccgggaagccgaattcttccgcggtcgctatcttagagacctttcaaaaatatactatagaccagaaaaaggacaccgccgtgaggggcctagcaagaatcgttcaggttggagagaataagactctttttgacatcactgtaaatggcgtcccagaggcgggaaattaccacgccagcattcacgagaaaggcgacgtctccaagggcgtggaatctactggtaaagtttggcacaagttcgacgaacccattgaatgcttcaacgagagtgatttgggcaagaacttgtacagtgggaagacctttctgagcgctcccttgccaacatggcaacttatcggccgcagctttgtcatttccaagtctctgaaccacccagaaaacgagccttcctccgttaaggactactcatttctgggagtcattgcgagaagcgctggtgtgtgggaaaataataaacaagtgtgtgcgtgtaccggaaagactgtttgggaagagagaaaagatgccttggccaacaacatcaaatag

SEQ ID NO: 8434 - DNA, 750 bp, Artificial Sequence
  Description of Artificial Sequence: Synthetic polynucleotide
atgaccacgaacgatacatacgaggctacttatgccattcccatgcactgtgaaaattgcgtgaatgatataaaggcatgcttgaaaaatgtcccaggaatcaattctttgaatttcgatatagagcaacaaataatgagcgtggaaagctctgtagccccttctaccatcatcaacaccttgagaaactgtggtaaagacgccatcataagaggcgccgggaagccgaattcttccgcggtcgctatcttagagacctttcaaaaatatactatagaccagaaaaaggacaccgccgtgaggggcttggcaagaatcgttcaggttggagagaataagactctttttgacatcactgtaaatggcgtcccagaggcgggaaattaccacgccagcattcacgagaaaggcgacgtctccaagggcgtggaatctactggtaaagtttggcacaagttcgacgaacccattgaatgcttcaacgagagtgatttgggcaagaacttgtacagtgggaagacctttttgagcgctcccttgccaacatggcaacttatcggccgcagctttgtcatttccaagtctttgaaccacccagaaaacgagccttcctccgttaaggactactcttttttgggagtcattgcgagaagcgctggtgtgtgggaaaataataaacaagtgtgtgcgtgtaccggaaagactgtttgggaagagagaaaagatgccttggccaacaacatcaaatga

SEQ ID NO: 8435 - DNA, 879 bp, Saccharomyces cerevisiae
atgtcatattacaacaggtataggaacaaaagaagaagcgataatggtggaggaaacttaagtaacagtaacaataacaatggtggtatgccatctggactatccgcatcagatgcaatttttgatctgggtaaaaataagagggtcacggtaagacaatttagaaacataaatttaattgatatccgtgagtactatctggactcatctacaggcgaaatgaaacctgggaagaaaggtatttcgttgacagaagatctatacgacgaattgcttaagcacagattgaatattgatgaagccttgagaaggctaggatccaagagaccaaaaaccaaaatggttagactattgtccgacgacgaatatgaagatgataacaataatgacagtactaataacgacaaggataaaaacgggaaggacaagaacagcccaaagaagaggagagaagataagtccaaagcatctaatgagagtcatgacttggagccacgttcaaagaagaagaaacctgctccacctactctacttccacacgaggaaaacattcaaaacgctgaaagagaagccaatgctactttgatcatcccaggccaggcaggtaggaaacaacaagaggaacgcaagcaaaaggaaaaagaagaggcagaggaggcaaaggcaaaagcagttgcagaacaagagaaagaggcaaaggcaaaagaaaagatagctgaacctgaacctgaacctgtacccacacttcaagctaaaaaagaagatattgtctccaacataaacgagtcaaaagatgcaaattctagtgacgaagaatttgctcaaagcttggaagctgaaatgaacaaggctgaagacgacataagtgaagaagaataa

SEQ ID NO: 8436 - DNA, 879 bp, Artificial Sequence
  Description of Artificial Sequence: Synthetic polynucleotide
atgtcttattacaacaggtataggaacaaaagaagaagcgataatggtggaggaaacttaagtaacagtaacaataacaatggtggtatgccatctggattatccgcatctgatgcaatttttgatttaggtaaaaataagagggtcacggtaagacaatttagaaacataaatttaattgatatccgtgagtactatttggactcttctacaggcgaaatgaaacctgggaagaaaggtatttctttgacagaagatttatacgacgaattgcttaagcacagattgaatattgatgaagccttgagaaggttaggatccaagagaccaaaaaccaaaatggttagattattgtccgacgacgaatatgaagatgataacaataatgacagtactaataacgacaaggataaaaacgggaaggacaagaacagcccaaagaagaggagagaagataagtccaaagcatctaatgagagtcatgacttggagccacgttccaagaagaagaaacctgctccacctactttacttccacacgaggaaaacattcaaaacgctgaaagagaagccaatgctactttgatcatcccaggccaggcaggtaggaaacaacaagaggaacgcaagcaaaaggaaaaagaagaggcagaggaggcaaaggcaaaagcagttgcagaacaagagaaagaggcaaaggcaaaagaaaagatagctgaacctgaacctgaacctgtacccacacttcaagctaaaaaagaagatattgtctccaacataaacgagagtaaagatgcaaattctagtgacgaagaatttgctcaaagcttggaagctgaaatgaacaaggctgaagacgacataagtgaagaagaatga

SEQ ID NO: 8437 - DNA, 483 bp, Saccharomyces cerevisiae
atgggtgtttatttggcagtactcttttcgttactggtcatcgaaatggccattctgtttattttggtacttccgcttccacagcgtatgagaaggtggctgtatatacgctacagtatcataagtactaataagaaattcagaacttatatggttggaatcatgatcttcgttggtcttttgttcatcgattcatggaaaaggtcacagatcagagtgtctacgtaccgcaaccagaaaaatccctatataataaatagtgtaaccccagtggatgcactggcttcaagggcatataaccaaaggaatgtttacatttcaggcttcatcatctacttttatatatgtatactcaccgtgatgagtatattgcgaagaatagtggaatggaatgacaaaatgaaggctggagatgacattctgaaggaaaagttaagacgaaagcaaaaatatttagaggaattgcagaagaagaaattttaa

SEQ ID NO: 8438 - DNA, 483 bp, Artificial Sequence
  Description of Artificial Sequence: Synthetic polynucleotide
atgggtgtttatttggcagtactcttttctttattggtcatcgaaatggccattttatttattttggtacttccgcttccacagcgtatgagaaggtggttatatatacgctacagtatcataagtactaataagaaattcagaacttatatggttggaatcatgatcttcgttggtcttttgttcatcgattcttggaaaaggagccagatcagagtgtctacgtaccgcaaccagaaaaatccctatataataaatagtgtaaccccagtggatgcattggcttccagggcatataaccaaaggaatgtttacatttctggcttcatcatctacttttatatatgtatactcaccgtgatgagtatattgagaagaatagtggaatggaatgacaaaatgaaggctggagatgacattttgaaggaaaagttaagaagaaagcaaaaatatttagaggaattgcagaagaagaaattttga

SEQ ID NO: 8439 - DNA, 1008 bp, Saccharomyces cerevisiae
atggttaatgaaaaagtgaatccattcgacttagcttcggtttctcctttagtcttaggaggtgcaatactgaaccagcaatatacagatgagccagaatccattccactggaagacataatcaaatacgcattttcgcatggtatcaatgcaattgacacttctccctactatggccctagtgaggttctttatggtagggcactgtccaatttaaggaatgaatttcccagagacacttattttatatgcacaaaggttgggcgtattggtgcggaagagtttaactattctagagatttcgtgagatttagtgttcacagatcgtgcgaaagattacacactacatatctcgatttggtgtacttgcacgatgtcgagtttgtcaaatttccagacatcttagaggcattaaaggaattgaggaccttgaagaacaaaggagttatcaaaaattttggcatatcaggctacccaatcgactttatcacctggcttgctgagtactgctctaccgaggaaagtgatattgggtcattggatgcagtattgtcctattgtaacttgaacttacaaaacaataagctattgaactttcgagaaagactgctacgcaatgctaaactgaaaatggtttgcaacgcatcaatcttgagcatgtcgctactaaggtcacaggagacaagacagtttcacccgtgttctcatgaattgagagaatgcgcatctcaggctgccaaatactgtcaagaacaaaatgtcgacttagccgatttggccacaagatacgcgatttcggaatgggtaggaaagggacccgttgttcttggagtcagtagcatggaagaattgaaacttgctctggataattacgaaattgtgaaatcgaatggcaacagattatcttctaaggacggacaactagtagaatatatccaaaagaatatttttaaagaacattttaatgaagagtggtcttcaggtattcctcatccagaaatgatataa

SEQ ID NO: 8440 - DNA, 1008 bp, Artificial Sequence
  Description of Artificial Sequence: Synthetic polynucleotide
atggttaatgaaaaagtgaatccattcgacttagcttctgtttctcctttagtcttaggaggtgcaatattaaaccagcaatatacagatgagccagaatccattccattggaagacataatcaaatacgcattttctcatggtatcaatgcaattgacacttctccctactatggccctagtgaggttctttatggtagggcattgtccaatttaaggaatgaatttcccagagacacttattttatatgcacaaaggttgggcgtattggtgcggaagagtttaactattctagagatttcgtgagatttagtgttcacagatcttgcgaaagattacacactacatatctcgatttggtgtacttgcacgatgtcgagtttgtcaaatttccagacatcttagaggcattaaaggaattgaggaccttgaagaacaaaggagttatcaaaaattttggcatatctggctacccaatcgactttatcacctggcttgctgagtactgctctaccgaggaaagtgatattgggtctttggatgcagtattgtcctattgtaacttgaacttacaaaacaataagttgttgaactttagagaaagattacttcgcaatgctaaattgaaaatggtttgcaacgcatctatcttgagcatgtctttattgaggagccaggagacaagacagtttcacccgtgttctcatgaattgagagaatgcgcatctcaggctgccaaatactgtcaagaacaaaatgtcgacttagccgatttggccacaagatacgcgatttctgaatgggtaggaaagggacccgttgttcttggagtcagtagcatggaagaattgaaacttgctttagataattacgaaattgtgaaatctaatggcaacagattatcttctaaggacggacaattggtagaatatatccaaaagaatatttttaaagaacattttaatgaagagtggtcttctggtattcctcatccagaaatgatatga

SEQ ID NO: 8441 - DNA, 534 bp, Saccharomyces cerevisiae
atgacgtcgaatagcgacggttcaagtaccagtccagttgagaaaccaattaccggcgatgttgaaactaatgaacctaccaaaccaatacggcggctttcaacgccatcgccagaacaagatcaagaaggcgatttcgacgaagaagacgatgatgacaaattcagcgtgagcacatcaactcccaccccaaccataacgaaaactaaggacagcagcgacacaagtacggttacgaggcggaagcagccgatcaggtacatcgagaataagacccggagacatgtcaccttctcgaagaggcggcacgggatcatgaaaaaagcatatgagctctccgtcctaaccggcgccaatattctgcttctaattctggcaaactctggcctggtctacactttcacaacgcctaagctcgagccggtggtacgggaagacgagggtaagagcctcatcagggcatgcatcaatgcttcagacactcctgacgctaccgacacgtcgccggcacaggaacaatctccggcaaactga

SEQ ID NO: 8442 - DNA, 534 bp, Artificial Sequence
  Description of Artificial Sequence: Synthetic polynucleotide
atgacgtccaatagcgacggtagtagtaccagtccagttgagaaaccaattaccggcgatgttgaaactaatgaacctaccaaaccaataagaagactttctacgccatctccagaacaagatcaagaaggcgatttcgacgaagaagacgatgatgacaaattcagcgtgagcacatctactcccaccccaaccataacgaaaactaaggacagcagcgacacaagtacggttacgaggcgtaagcagccgatcaggtacatcgagaataagaccagaagacatgtcaccttctccaagaggaggcacgggatcatgaaaaaagcatatgagctctccgtcttgaccggcgccaatattttacttttgattttggcaaactctggccttgtctacactttcacaacgcctaagctcgagccggtggtaagagaagacgagggtaagagcctcatcagggcatgcatcaatgcttctgacactcctgacgctaccgacacgtctccggcacaggaacaatctccggcaaactga

SEQ ID NO: 8443 - DNA, 861 bp, Saccharomyces cerevisiae
atgtcagacatcgaagaaggtacgcctactaataatgggcaacagaaggagagaagaaagatagaaattaagttcatcgagaataaaacaaggcgccatgtgacattttccaaaaggaagcacggtatcatgaaaaaggcgtttgagctttctgttctaacggggacccaggtcctgttgctagtcgtttcagaaacaggtttggtatatactttcagcacgccgaagtttgaacctatagtcacgcagcaggaaggtagaaacctgatccaggcctgtcttaacgcccctgatgatgaggaagaagacgaggaggaagacggtgatgatgatgatgatgatgacgatgatggtaatgatatgcaacgccagcaaccacaacaacagcaaccgcaacaacagcaacaagtattgaatgcacacgcaaatagcttaggccatctaaatcaagatcaggtaccggcaggcgcgctgaaacaagaggtgaagtcacaattgctaggcggtgccaatcctaatcaaaactcaatgattcaacagcagcaacatcacacgcagaattcacaaccacaacagcaacagcaacaacaaccacagcagcaaatgtcacagcaacaaatgtcacagcatcctcgaccacagcaaggaataccacatccgcaacaatcgcagccacagcaacagcaacaacaacaacaacaactgcaacagcagcaacagcagcaacaacaacaacccctcaccggcattcatcagcctcaccaacaggcttttgccaacgctgcctccccctatctgaatgctgaacagaatgctgcctaccaacaatactttcaagaaccgcaacaaggccaatactaa

SEQ ID NO: 8444 - DNA, 861 bp, Artificial Sequence
  Description of Artificial Sequence: Synthetic polynucleotide
atgtctgacatcgaagaaggtacgcctactaataatgggcaacagaaggagagaagaaagatagaaattaagttcatcgagaataaaacaaggcgccatgtgacattttccaaaaggaagcacggtatcatgaaaaaggcgtttgagctttctgttttgacggggacccaggtcttattgttggtcgtttctgaaacaggtttggtatatactttcagcacgccgaagtttgaacctatagtcacgcagcaggaaggtagaaacttgatccaggcctgtcttaacgcccctgatgatgaggaagaagacgaggaggaagacggtgatgatgatgatgatgatgacgatgatggtaatgatatgcaacgccagcaaccacaacaacagcaaccgcaacaacagcaacaagtattgaatgcacacgcaaatagcttaggccatttgaatcaagatcaggtaccggcaggcgcgttgaaacaagaggtgaagtctcaattgttgggcggtgccaatcctaatcaaaactccatgattcaacagcagcaacatcacacgcagaattctcaaccacaacagcaacagcaacaacaaccacagcagcaaatgtctcagcaacaaatgtctcagcatcctaggccacagcaaggaataccacatccgcaacaatctcagccacagcaacagcaacaacaacaacaacaattacaacagcagcaacagcagcaacaacaacaacccctcaccggcattcatcagcctcaccaacaggcttttgccaacgctgcctccccctatttgaatgctgaacagaatgctgcctaccaacaatactttcaagaaccgcaacaaggccaatactga

SEQ ID NO: 8445 - DNA, 1428 bp, Saccharomyces cerevisiae
atgtctgaagcgatattccagccaacggacattgtccttgccaaagttaaaggcttttcagcatggccagcaatgattatccctaatgaactcatcccagataacatcctcaagaccaaacctgtgagtgtccacaaaggcaaatcaggtagtgataaaaaagcaaatgaagatatagatgcagacatggaatcagaggctagagatcgagagcaaagcgaagaagaagaagatatagaggattttggtgagagtgaggctaatcctgaaaaatttataatatacactcccgttctgaagtttcgtaaaaatgatacgttgaaatcgacttactgcgtcaagtttttttgcgatgattcttatatctgggtgaagcccatggatatgaagattctaacaagcgaagattgtcgtaagtggctaagcggcaaacagcggaagaataagaaactcataccggcatatgaaatggctatgagaggcaaaaatggaattgatatttgggaatttgtggaatatgggtcttacggcaagccagatgaagaggaatatgtagaggaagaggaagaagagaacgaacctgaaaaaaaggctataaggccaaccaggtcttccagtagacagcgtcagaagcgcgcctcagaaacggaaaagagtgagggcggtaatagcaataaaaggaaaagagttactagatcgactaggcaacaagcgatagatgcttcagaagaggaagaggaggaagaggaggaaaaagtacaagaggctgttagaaagaggccgcaaaggaccaaaactaagaaagttgtagtatccaagactaaaccaaatccaaaaacaaaggcaaagaaagagaaacctaaaccacctaagccaatcaaatatcattttgaagatgatgaagattggagcattgttgggttgggcccacaagatctatcaatcgaaaaaacgatggatccgattgcgaaaaaactgtcgcagaagaaaaatctagaaaagcatgtggagattaagctagatctggaggataaactagcaggtatcaacaagctcctgtgtgatgtcttatgttcagccattaaccaggctgtttcgataaaggatgatttcgaaataatattagatgaattgcagattgcccttgacaccagggggtccagaaacgaatttataacaattttccaatcaaataattccctactgttaaactttaggatattatttaacttaagaaaaagggaactgaacaaatgggatctgtgggatcgtttccaggatattttcaagcatatttattcctaccagttcatacctgatacggaagattggcaactagagcaaaatatggaaattgaagaaatggatcgggaaaagccgagctttagtgaagacgtaaaggaagaagaaagcaaagtaggagcatga

SEQ ID NO: 8446 - DNA, 1428 bp, Artificial Sequence
  Description of Artificial Sequence: Synthetic polynucleotide
atgtctgaagcgatattccagccaacggacattgtccttgccaaagttaaaggcttttctgcatggccagcaatgattatccctaatgaactcatcccagataacatcctcaagaccaaacctgtgagtgtccacaaaggcaaatctggtagtgataaaaaagcaaatgaagatatagatgcagacatggaaagtgaggctagagatagagagcaaagcgaagaagaagaagatatagaggattttggtgagagtgaggctaatcctgaaaaatttataatatacactcccgttttgaagtttcgtaaaaatgatacgttgaaatctacttactgcgtcaagtttttttgcgatgattcttatatctgggtgaagcccatggatatgaagattttaacaagcgaagattgtcgtaagtggttaagcggcaaacagagaaagaataagaaactcataccggcatatgaaatggctatgagaggcaaaaatggaattgatatttgggaatttgtggaatatgggtcttacggcaagccagatgaagaggaatatgtagaggaagaggaagaagagaacgaacctgaaaaaaaggctataaggccaaccaggtcttccagtagacagcgtcagaagcgcgccagtgaaacggaaaagagtgagggcggtaatagcaataaaaggaaaagagttactagatctactaggcaacaagcgatagatgcttctgaagaggaagaggaggaagaggaggaaaaagtacaagaggctgttagaaagaggccgcaaaggaccaaaactaagaaagttgtagtatccaagactaaaccaaatccaaaaacaaaggcaaagaaagagaaacctaaaccacctaagccaatcaaatatcattttgaagatgatgaagattggagcattgttgggttgggcccacaagatttatctatcgaaaaaacgatggatccgattgcgaaaaaattatctcagaagaaaaatttggaaaagcatgtggagattaagttggatttagaggataaattggcaggtatcaacaagctcttatgtgatgtcttatgttctgccattaaccaggctgtttctataaaggatgatttcgaaataatattagatgaattgcagattgcccttgacaccagggggtccagaaacgaatttataacaattttccaaagcaataattccttattattaaactttaggatattatttaacttaagaaaaagggaattgaacaaatgggatttatgggatcgtttccaggatattttcaagcatatttattcctaccagttcatacctgatacggaagattggcaattggagcaaaatatggaaattgaagaaatggatagagaaaagccgagctttagtgaagacgtaaaggaagaagaaagcaaagtaggagcatga

SEQ ID NO: 8447 - DNA, 3342 bp, Saccharomyces cerevisiae
atgtttggagttagccgtggcgcattccccagcgcaacaacacagccatttggctcaacaggatcaacctttggtggccaacagcaacaacaacaaccagtagcaaacacttctgctttcggcctcagtcagcaaacaaatacaacacaagcacctgcgtttggtaactttggtaaccaaacttctaattctcccttcggaatgtcaggctcgactacagcaaatggtactccttttggtcaaagtcaattgacgaacaacaatgcctctggctcgatcttcggtggaatgggtaataacacagcactttctgctggttccgcttctgttgtgcccaattctactgcaggtacaagcattaaaccttttactacattcgaagagaaggatccaaccacaggtgtcatcaacgtcttccaaagtatcacctgtatgcctgaatacagaaatttttcttttgaagaattgagatttcaagattaccaagctggtagaaaattcggtaccagtcaaaatggcactggtactacttttaacaatcctcaaggaactaccaatactggatttggaattatgggtaataataactccactacttctgctacaacaggaggattatttggtcaaaagccagcaacaggcatgtttggaaccggaactggaagtggtggtggctttggctctggagcgaccaactctacaggattgtttggaagctctactaacctctcaggaaattctgcatttggagcaaataaacctgccacttccgggggattgtttggtaatacaactaacaacccaacaaacggcactaataatacaggccttttcggccagcagaactcaaatacaaacggaggattatttggtcaacagcaaaattcatttggggcgaataatgtcagtaacgggggagcctttggtcaggtgaatcgtggtgcctttccccaacaacaaacacaacaaggtagtggtggtatatttggtcaatcaaacgctaacgcaaatggtggcgctttcggccaacagcaaggcactggtgctctttttggagctaaacctgcttctggtggactatttggacaatctgctggttcaaaagcattcggaatgaataccaaccccactggtaccactggtggcttatttgggcaaaccaatcagcagcaaagtggaggagggttatttggccagcaacaaaattccaacgctggaggattgttcggtcagaataaccaaagccagaaccaatccggattatttggacaacaaaactcctcaaacgcatttggccagccacagcaacaaggcggattatttggaagcaaacctgcaggaggactgtttggacaacagcagggagcatccacttttgcgtctggtaatgcccaaaataattctatatttgggcaaaataaccaacaacagcaatcaaccgggggattattcggacaacaaaacaaccagtcgcagtcccaacctggtggattgtttggccagaccaatcaaaataataatcagccatttggccaaaatgggttacaacaaccacaacagaataatagtctttttggagcgaaaccaactggttttggaaatacaagcttattctctaacagcacaacaaatcaaagtaacggtataagtggaaataatttgcagcagcaatcaggaggtttgttccaaaataaacagcaacctgcttcgggtggcctgtttggttcaaaaccatcaaacactgttggaggcggattatttggaaacaatcaagttgcaaatcaaaacaatcctgcctcaactagcggcggattatttggtagcaaacctgctacaggatcccttttcggaggtactaattccacggctccaaacgcctcttcgggtggaatatttgggtccaataatgcatctaacacggcggccaccaccaattctactggtttatttggtaataaaccagttggtgcgggagcttctacaagtgctggaggactatttggaaacaataacaactcgtctctaaacaattccaacggttcaacgggcctgtttggtagtaataacacctctcaatctactaatgctggaggcttatttcagaataacactagtacgaacacttcgggcggagggttattttcccaaccttcccagtcaatggcacaatcacaaaatgcgctccaacaacagcagcagcaacaacgattacaaattcagaataacaatccctacggtactaatgagcttttttcgaaagcaactgtcaccaacacggtttcctatccaattcaaccaagcgctacaaagatcaaagccgatgaacgcaaaaaagccagtttgacgaacgcatacaaaatgattcctaaaactttatttacagccaagctcaagactaataattccgtcatggataaggcccagatcaaggttgatccaaagttgtcgatttccattgataaaaagaataatcagattgcgatttctaaccagcaggaggaaaatttggacgaaagcatattaaaagcttctgagttattattcaatcccgataaaaggtcattcaagaatctaattaataacaggaaaatgttgatcgcatccgaggaaaagaataacggatcacagaacaacgatatgaattttaaaagtaaaagtgaagaacaagaaacgatcttgggaaagccaaagatggatgaaaaagaaactgctaatgggggggaaagaatggttttgtcctcaaagaacgatggggaagatagcgcaacgaaacatcattcccggaatatggacgaagaaaataaagaaaatgtcgccgatttacagaagcaagaatattcagaagatgataaaaaggctgtttttgcggacgttgcggaaaaagatgcctccttcattaatgagaactactatatctcaccatccctggacacattatcctcttattctctcttgcaactgcgcaaagttcctcatttagttgtgggtcataaaagttatggtaaaattgaatttcttgaacctgttgacctcgctggaattcctttgacctcattagggggcgtaatcattacttttgaaccaaaaacctgtataatatatgcgaacttaccaaacagaccgaagagaggggagggcattaatgttcgggccaggattacctgctttaactgttatcctgtagacaaatctaccagaaaacctataaaggatccaaatcatcaactggttaaaaggcatatcgaacgcttaaagaaaaatccaaattctaagttcgaaagctatgatgcagacagtggtacatacgtgtttatcgtaaaccacgctgcagagcagacctga

SEQ ID NO: 8448 - DNA, 3342 bp, Artificial Sequence
  Description of Artificial Sequence: Synthetic polynucleotide
atgtttggagttagccgtggcgcattccccagcgcaacaacacagccatttggctctacaggatctacctttggtggccaacagcaacaacaacaaccagtagcaaacacttctgctttcggcctcagtcagcaaacaaatacaacacaagcacctgcgtttggtaactttggtaaccaaacttctaattctcccttcggaatgagtggctccactacagcaaatggtactccttttggtcaaagtcaattgacgaacaacaatgcctctggctccatcttcggtggaatgggtaataacacagcactttctgctggttccgcttctgttgtgcccaattctactgcaggtacaagcattaaaccttttactacattcgaagagaaggatccaaccacaggtgtcatcaacgtcttccaaagtatcacctgtatgcctgaatacagaaatttttcttttgaagaattgagatttcaagattaccaagctggtagaaaattcggtaccagtcaaaatggcactggtactacttttaacaatcctcaaggaactaccaatactggatttggaattatgggtaataataactccactacttctgctacaacaggaggattatttggtcaaaagccagcaacaggcatgtttggaaccggaactggaagtggtggtggctttggctctggagcgaccaactctacaggattgtttggaagctctactaacctctctggaaattctgcatttggagcaaataaacctgccacttccgggggattgtttggtaatacaactaacaacccaacaaacggcactaataatacaggccttttcggccagcagaacagtaatacaaacggaggattatttggtcaacagcaaaattcttttggggcgaataatgtcagtaacgggggagcctttggtcaggtgaatcgtggtgcctttccccaacaacaaacacaacaaggtagtggtggtatatttggtcaaagtaacgctaacgcaaatggtggcgctttcggccaacagcaaggcactggtgctctttttggagctaaacctgcttctggtggattatttggacaatctgctggttccaaagcattcggaatgaataccaaccccactggtaccactggtggcttatttgggcaaaccaatcagcagcaaagtggaggagggttatttggccagcaacaaaattccaacgctggaggattgttcggtcagaataaccaaagccagaaccaatccggattatttggacaacaaaactccagtaacgcatttggccagccacagcaacaaggcggattatttggaagcaaacctgcaggaggattatttggacaacagcagggagcatccacttttgcgtctggtaatgcccaaaataattctatatttgggcaaaataaccaacaacagcaatccaccgggggattattcggacaacaaaacaaccagtctcagtcccaacctggtggattgtttggccagaccaatcaaaataataatcagccatttggccaaaatgggttacaacaaccacaacagaataatagtctttttggagcgaaaccaactggttttggaaatacaagcttattctctaacagcacaacaaatcaaagtaacggtataagtggaaataatttgcagcagcaaagtggaggtttgttccaaaataaacagcaacctgcttctggtggcttatttggttccaaaccatctaacactgttggaggcggattatttggaaacaatcaagttgcaaatcaaaacaatcctgcctctactagcggcggattatttggtagcaaacctgctacaggatcccttttcggaggtactaattccacggctccaaacgcctcttctggtggaatatttgggtccaataatgcatctaacacggcggccaccaccaattctactggtttatttggtaataaaccagttggtgcgggagcttctacaagtgctggaggattatttggaaacaataacaactcttctttgaacaattccaacggttctacgggcttatttggtagtaataacacctctcaatctactaatgctggaggcttatttcagaataacactagtacgaacacttctggcggagggttattttcccaaccttcccagtccatggcacaatctcaaaatgcgctccaacaacagcagcagcaacaaagattacaaattcagaataacaatccctacggtactaatgagcttttttccaaagcaactgtcaccaacacggtttcctatccaattcaaccaagcgctacaaagatcaaagccgatgaacgcaaaaaagccagtttgacgaacgcatacaaaatgattcctaaaactttatttacagccaagctcaagactaataattccgtcatggataaggcccagatcaaggttgatccaaagttgtctatttccattgataaaaagaataatcagattgcgatttctaaccagcaggaggaaaatttggacgaaagcatattaaaagcttctgagttattattcaatcccgataaaaggtctttcaagaatttaattaataacaggaaaatgttgatcgcatccgaggaaaagaataacggatctcagaacaacgatatgaattttaaaagtaaaagtgaagaacaagaaacgatcttgggaaagccaaagatggatgaaaaagaaactgctaatgggggggaaagaatggttttgtcctccaagaacgatggggaagatagcgcaacgaaacatcattccagaaatatggacgaagaaaataaagaaaatgtcgccgatttacagaagcaagaatattctgaagatgataaaaaggctgtttttgcggacgttgcggaaaaagatgcctccttcattaatgagaactactatatctctccatccttggacacattatcctcttattctctcttgcaattgcgcaaagttcctcatttagttgtgggtcataaaagttatggtaaaattgaatttcttgaacctgttgacctcgctggaattcctttgaccagtttagggggcgtaatcattacttttgaaccaaaaacctgtataatatatgcgaacttaccaaacagaccgaagagaggggagggcattaatgttcgtgccaggattacctgctttaactgttatcctgtagacaaatctaccagaaaacctataaaggatccaaatcatcaattggttaaaaggcatatcgaacgcttaaagaaaaatccaaattctaagttcgaaagctatgatgcagacagtggtacatacgtgtttatcgtaaaccacgctgcagagcagacctga

SEQ ID NO: 8449 - DNA, 954 bp, Saccharomyces cerevisiae
atggatcaagattttgacagtttattactaggtttcaatgactccgatagtgtccaaaaagacccaactgtaccaaatggcttggatggttcagtagttgatcctaccattgcggatccaaccgcaattacagctagaaagagaaggcctcaagtaaaattaacagccgaaaaactactcagtgataaaggtttaccatatgttttgaaaaatgcacataaaaggatacgaatttcctcaaaaaaaaactcatatgacaacttatcaaatattattcagttttaccagctttgggcacatgaattgtttcccaaggcaaaatttaaggattttatgaagatctgtcaaacagtaggtaaaacagatccagttcttagagaatatagagtcagcctttttagggacgagatgggcatgagtttcgatgttggcacacgggagactgggcaagacctggaaagacaatcacctatggttgaagaacatgtcacttccgcggaagagaggcctattgtcgcagatagttttgcgcaagacaaaaggaatgtaaacaatgtcgattacgataatgacgaagatgacgatatctatcacctttcttatcgcaacagaagaggacgagttttggacgaacgtgggaataatgaaacggtacttaacaacgttgtgccgcctaaggaagatttggatgcattattgaagacattcagggtacaagggcccgttggccttgaagaaaatgagaagaagctcttattaggatggctagatgcgcatagaaaaatggaaaaaggctctatgactgaagaagacgttcaactgattcaaagtttggaagagtgggaaatgaatgatatagagggacaacatactcattatgatttattgccagggggagatgagtttggcgtagatcaagatgagttggatgctatgaaggaaatgggcttttag

SEQ ID NO: 8450 - DNA, 954 bp, Artificial Sequence
  Description of Artificial Sequence: Synthetic polynucleotide
atggatcaagattttgacagtttattattgggtttcaatgactccgatagtgtccaaaaagacccaactgtaccaaatggcttggatggttctgtagttgatcctaccattgcggatccaaccgcaattacagctagaaagagaaggcctcaagtaaaattaacagccgaaaaattactcagtgataaaggtttaccatatgttttgaaaaatgcacataaaaggataagaatttcctctaaaaaaaacagttatgacaacttatccaatattattcagttttaccagctttgggcacatgaattgtttcccaaggcaaaatttaaggattttatgaagatctgtcaaacagtaggtaaaacagatccagttcttagagaatatagagtcagcctttttagggacgagatgggcatgagtttcgatgttggcacaagagagactgggcaagacttggaaagacaaagtcctatggttgaagaacatgtcacttccgcggaagagaggcctattgtcgcagatagttttgcgcaagacaaaaggaatgtaaacaatgtcgattacgataatgacgaagatgacgatatctatcacctttcttatcgcaacagaagaggaagagttttggacgaacgtgggaataatgaaacggtacttaacaacgttgtgccgcctaaggaagatttggatgcattattgaagacattcagggtacaagggcccgttggccttgaagaaaatgagaagaagctcttattaggatggcttgatgcgcatagaaaaatggaaaaaggctctatgactgaagaagacgttcaattgattcaaagtttggaagagtgggaaatgaatgatatagagggacaacatactcattatgatttattgccagggggagatgagtttggcgtagatcaagatgagttggatgctatgaaggaaatgggcttttga

SEQ ID NO: 8451 - DNA, 2424 bp, Saccharomyces cerevisiae
atgatggctaagaacaacaaaactaccgaggcaaagatgtcgaaaaagagagcagctagcgaagaatctgatgtcgaggaagatgaggacaagcttttatccgttgacggtttgatcgatgcggaagcaagtgagagtgacgaggatgatgacgaatacgagtctgccgttgaagaaaaggaatcatcttctgataaagaagcccaagatgattctgatgatgactccgatgctgaattaaacaaactgcttgccgaagaagaaggtgatggggaagaggactatgacagttctgagttttcagacgacacaacttccttaacagacagattatcgggtgtgaaattgcaaacgatcgttgatccgaatatttactcaaaatatgcagatggcagtgatagaattatcaaacctgaaattaatccagtttatgatagcgatgatagtgatgccgaaacgcaaaataccattggtaatattccactttctgcatacgatgaaatgccacacattggatacgatatcaacggtaaaaggattatgagacctgccaagggttctgctttagatcaactgttggattctatcgagctacctgaaggctggactggtttactggacaagaattccggttcaagtttgaacttaaccaaagaggaattagaacttatttccaaaatccaaaggaacgaacaaactgatgatagcataaatccatacgaaccgttaatcgattggttcacgagacacgaagaagtgatgccattaactgctgttccggagccaaaaagaagatttgttccatccaaaaacgaagccaagagagttatgaaaattgtaagagctatcagagagggccgtattattcctcctaaaaaattaaaggaaatgaaagaaaaggaaaaaattgaaaactatcaatacgatttatggggtgattctacggaaacaaatgatcatgtaatgcatctaagggcaccaaaattacctccaccaactaatgaagagagttataatccaccagaagagtatcttttgtctcctgaagaaaaggaggcctgggaaaatactgaatatagtgaaagagaaagaaacttcatacctcaaaagtattctgccttaagaaaggtccctggttacggtgaatctattagggaaagatttgaaagatctttggatttatatttagctcctcgtgtccgtaaaaacaaattgaatattgatcctaattctctaattccagaacttccctctcccaaggatttaagacccttccctattcgttgctcaacaatatacgctggtcacaaaggaaaagtacgcacattatccattgatccttctggattatggctagcaacaggatctgatgacggaacagtcagggtatgggaaattttaactggtagagaagtttatagaactactttaatcgatgacgaggaaaacccagattaccacattgaatgcattgaatggaatcctgatgctaataatggtattctcgccgttgctgttggtgaaaacattcatttaatagtaccaccaatattcggctacgatattgaaaataacggcaaaactaagattgaagatggttttggctacgatacttttgggactgttaaaaaatctaacctagaagtgaacgagaatggtgatggcgatgaagatggagagaatgaatctgctaagaatgctgtaaaaaaacaagtagcccaatggaacaagccttctcaaaagcaactagaaaaggatatttgtatcactatttcttgcaaaaaaacagtaaaaaagctttcatggcatagaaaaggtgattactttgtcactgttcaacctgactctggtaacacttctgttttgattcaccaagtttccaagcatttaacccaatccccattcaaaaaatcgaagggcattattatggatgcgaagttccatccttttaaacctcaattatttgtctgttcccaaagatatgtcagaatttatgatttatctcaacaaatattggtcaagaaactgttgcctggtgcccgttggttatcgaaaatcgatattcacccaaggggtgataatttaattgcgtcatcgtttgacaagagagttttatggcacgacctggatttggctagcacaccttacaagacactaagatatcatgaaaaagccgtcagaagtgtgaatttccacaaaaagttacctctattcagctctgccgctgatgacggtaccatacatgttttccatgccactgtttatgatgacatgatgaaaaatccgatgattgtgccactaaagaaactaaccggtcataaagtaatcaatagtctgggtgttcttgatgctatttggcatccgagggaagcttggctgttttctgccggtgctgataatacggctcgcttatggaccacctag

SEQ ID NO: 8452 - DNA, 2424 bp, Artificial Sequence
  Description of Artificial Sequence: Synthetic polynucleotide
atgatggctaagaacaacaaaactaccgaggcaaagatgtccaaaaagagagcagctagcgaagaatctgatgtcgaggaagatgaggacaagcttttatccgttgacggtttgatcgatgcggaagcaagtgagagtgacgaggatgatgacgaatacgagtctgccgttgaagaaaaggaaagctcttctgataaagaagcccaagatgattctgatgatgactccgatgctgaattaaacaaattacttgccgaagaagaaggtgatggggaagaggactatgacagttctgagttttctgacgacacaacttccttaacagacagattatctggtgtgaaattgcaaacgatcgttgatccgaatatttactctaaatatgcagatggcagtgatagaattatcaaacctgaaattaatccagtttatgatagcgatgatagtgatgccgaaacgcaaaataccattggtaatattccactttctgcatacgatgaaatgccacacattggatacgatatcaacggtaaaaggattatgagacctgccaagggttctgctttagatcaattattggattctatcgagcttcctgaaggctggactggtttattagacaagaattccggtagtagtttgaacttaaccaaagaggaattagaacttatttccaaaatccaaaggaacgaacaaactgatgatagcataaatccatacgaaccgttaatcgattggttcacgagacacgaagaagtgatgccattaactgctgttccggagccaaaaagaagatttgttccatccaaaaacgaagccaagagagttatgaaaattgtaagagctatcagagagggccgtattattcctcctaaaaaattaaaggaaatgaaagaaaaggaaaaaattgaaaactatcaatacgatttatggggtgattctacggaaacaaatgatcatgtaatgcatttaagggcaccaaaattacctccaccaactaatgaagagagttataatccaccagaagagtatcttttgtctcctgaagaaaaggaggcctgggaaaatactgaatatagtgaaagagaaagaaacttcatacctcaaaagtattctgccttaagaaaggtccctggttacggtgaatctattagggaaagatttgaaagatctttggatttatatttagctcctcgtgtccgtaaaaacaaattgaatattgatcctaattctttgattccagaacttccctctcccaaggatttaagacccttccctattcgttgctccacaatatacgctggtcacaaaggaaaagtacgcacattatccattgatccttctggattatggttggcaacaggatctgatgacggaacagtcagggtatgggaaattttaactggtagagaagtttatagaactactttaatcgatgacgaggaaaacccagattaccacattgaatgcattgaatggaatcctgatgctaataatggtattctcgccgttgctgttggtgaaaacattcatttaatagtaccaccaatattcggctacgatattgaaaataacggcaaaactaagattgaagatggttttggctacgatacttttgggactgttaaaaaatctaacttggaagtgaacgagaatggtgatggcgatgaagatggagagaatgaatctgctaagaatgctgtaaaaaaacaagtagcccaatggaacaagccttctcaaaagcaattggaaaaggatatttgtatcactatttcttgcaaaaaaacagtaaaaaagctttcttggcatagaaaaggtgattactttgtcactgttcaacctgactctggtaacacttctgttttgattcaccaagtttccaagcatttaacccaatccccattcaaaaaatccaagggcattattatggatgcgaagttccatccttttaaacctcaattatttgtctgttcccaaagatatgtcagaatttatgatttatctcaacaaatattggtcaagaaacttttgcctggtgcccgttggttatccaaaatcgatattcacccaaggggtgataatttaattgcgtcttcttttgacaagagagttttatggcacgacttggatttggctagcacaccttacaagacattaagatatcatgaaaaagccgtcagaagtgtgaatttccacaaaaagttacctcttttcagctctgccgctgatgacggtaccatacatgttttccatgccactgtttatgatgacatgatgaaaaatccgatgattgtgccattgaagaaattgaccggtcataaagtaatcaatagtttgggtgttcttgatgctatttggcatccgagggaagcttggttattttctgccggtgctgataatacggctcgcttatggaccacctga

SEQ ID NO: 8453 - DNA, 615 bp, Saccharomyces cerevisiae
atgaatagcggtggtagtgatagtttcgattatcttcttcaattaacaaaagctttaagtgcagagtgtcgggctaacagacaagagaccgatcgaatagaactattgttaaagcgccttgccaaacagtcaggaatatcttatgataatttgagcaaaaacataattccagattcatggaaagataatgcatctcaaaaagcatctccccccactgaggcacagaagcttatcagcgaaaattttaaactcatatacgagattgaaaaacaagagtacttcaatacaaaggctgttgcgctaattaacaacataaatgagcatttctcatatattaaaaattttatcgacgaacagaatgcaataagagaacgaaatattgccacattttcatcagagaagcttgatgaaaggaacaaaagtcttcaacaaaattacgagtcattgaagacagaaaatgaagaaacaaaaaaaaaattgcattcaattatcaaacagtttgaaaaacttttgaaggaagtggattgggatcgtatatctaaagattccagagattacagccgctttaaaaaacagttggaatacctgcaagacacgtaccaggtactgaaatag

SEQ ID NO: 8454 - DNA, 615 bp, Artificial Sequence
  Description of Artificial Sequence: Synthetic polynucleotide
atgaatagcggtggtagtgatagtttcgattatcttcttcaattaacaaaagctttaagtgcagagtgtagagctaacagacaagagaccgatagaatagaattattgttaaagcgccttgccaaacagtccggaatatcttatgataatttgagcaaaaacataattccagattcttggaaagataatgcatctcaaaaagcatctccccccactgaggcacagaagcttatcagcgaaaattttaaactcatatacgagattgaaaaacaagagtacttcaatacaaaggctgttgcgttaattaacaacataaatgagcatttctcttatattaaaaattttatcgacgaacagaatgcaataagagaaagaaatattgccacattttcttctgagaagcttgatgaaaggaacaaaagtcttcaacaaaattacgagtctttgaagacagaaaatgaagaaacaaaaaaaaaattgcattctattatcaaacagtttgaaaaacttttgaaggaagtggattgggatcgtatatctaaagattccagagattacagccgctttaaaaaacagttggaatacttacaagacacgtaccaggtattgaaatga

SEQ ID NO: 8455 - DNA, 2553 bp, Saccharomyces cerevisiae
atggttatggcggatactattgccacaggagacaaaactagccagtttgatggaaaacatatgcaggatttagaaagaatttactccactagggatacactcgatgataatttctttggagaacgtggacaaaaagatgcaaacggtgattattacgatgaattaaacaatgaggaaaccaattacagtggaagtagttactatggtcactcagatgattcggaagtggttgggttgataaagaatgatactgtgagccagctcccgcctctcgacagttttatattcccagattctagggctttgttcttgttagatttaggcaactatgctgatttaacttatgaagaaattatcgtacacgggtttgaaatatatattgtggagcaatgggtagcatgtaggaatttgtcaacattgattacgtcatatacaggaaactctcaggatacaatatcgggagtcagagtcgttttgccaaaggatacgagtatgtggccagggagatttagactgtattttgaagaattaatggaatttgcgcggccaaaatttacaccaaagggcactctatttattaccaatctttcgggtgtgtcctttggcttgaatctgttgcatgtggaatgtggtgacttgagaacaatttggaaggatttcgaggttaattttgatctgaaaaacctgcattgtggtggaagatcggcaaatctgttatgccctccaactatggcatcacttgataagttttcacaactgttcaaaatccctacaaatggttttattgcacagtatccccaaatgattcagcagcagcaaccgcgtttgcctgaggaagaatacaagacggttggaaattcaaagtgtcgaaataccgatagtaaatcaccagtcgtggagatggtaactttaattcaaatttcgttgagttatttcaatttgttatctaagaactaccagacggatggtcttttgtgtgaagacaccaagcgagctatagatgaatggtgggaaacttacgggaaactgtaccttggtacagaaaagccaaggaatgaatgcacactgggtccgacgacagtagctggcctaattagtttgatcctttgttgctatttcaagttgatgatagaaaattgcatttcctctaaggatccctttgatgaagctggtttcttccaaggtatttataatttccaaaaaaagcatggcctcaataaaagaaaatctagagtttatttagacccaagaacgttagagaaactctttgaagtgacagcgaaagtttctagcaaagacatttttaaactgaagaaaatggtgacatcaacggtacaggacatcataggaaagggaaatcccatcaacctgtcacacaaaattcttacaacagatctagatacacttattcataatattcatggaggctctgtaggactactatggaaaggtaagggacacccaaggaaatgctgtacggatatttctaatgaagaatttttgaaatttaactaccagagaggcgatcctgatgggcagataagagaaagggaaatgctactagaaaaatttcgtttggaaagaatcgcatacgctcaaaagcacgcctccaaaaaggttagttcttccagtcttgatacatctgaagacatagggaggaccaatgctatgccctcatctgcaacagtgtcatcaatgtttccaaactacgataataccaaatatgcatataattttggcatcaacaaattatatcaaggagaatactaccgaagaaattcgtttccctattgtaaagatcgcacacacgacaacatttatgaagatctttcagagctgaaggaaaagtcatctcgtttgtatagatgcaactcttcttctgctgtacagaatattgtggaaaaatgggatttaccatttgatccatctgttgttcgaatagctagagatttgttacgaatgaaatacgacatccaagcgcagcaacacatacaagaaatggatgagcattatatgggtaaattaaataaggagggaactgttggtcagtactctaaattcaacgaaagatataaaagactgcaagaactatataagaagtattcagatggtgcaaaagtgtttgaagggagatttgaagacattgacaataagcaacaacttcttctccatgagatgcaagagttaaattccttatcatctaggttgaaatatgatatgaggatattggaagttcgtgtacgagatattgaaagtagtgttgctcagtttgattccaaattaattgggttgaaaagctctcttcagggacagggtaaaactggaatatgctctgcaatagatcccaagagtgataaagacgaatatgatagatgcgtaaatgatttgatgaccactaacaaccccacctatgaagctctttgtttaaagatgctgagccgccgttattttaaagatttaaagaatgatactgtggggtggttcaggtggttatttggtaataattctttacacaataatgccagtgaagacgatagaggaatacgagtatga

SEQ ID NO: 8456 - DNA, 2553 bp, Artificial Sequence
  Description of Artificial Sequence: Synthetic polynucleotide
atggttatggcggatactattgccacaggagacaaaactagccagtttgatggaaaacatatgcaggatttagaaagaatttactccactagggatacactcgatgataatttctttggagaacgtggacaaaaagatgcaaacggtgattattacgatgaattaaacaatgaggaaaccaattacagtggaagtagttactatggtcacagtgatgattctgaagtggttgggttgataaagaatgatactgtgagccagctcccgcctctcgacagttttatattcccagattctagggctttgttcttgttagatttaggcaactatgctgatttaacttatgaagaaattatcgtacacgggtttgaaatatatattgtggagcaatgggtagcatgtaggaatttgagtacattgattacgtcctatacaggaaactctcaggatacaatatctggagtcagagtcgttttgccaaaggatacgagtatgtggccagggagatttagattatattttgaagaattaatggaatttgcgagaccaaaatttacaccaaagggcactttatttattaccaatctttctggtgtgtcctttggcttgaatttattgcatgtggaatgtggtgacttgagaacaatttggaaggatttcgaggttaattttgatttgaaaaacttacattgtggtggaagaagtgcaaatttattatgccctccaactatggcatctcttgataagttttctcaattattcaaaatccctacaaatggttttattgcacagtatccccaaatgattcagcagcagcaaccgcgtttgcctgaggaagaatacaagacggttggaaattctaagtgtaggaataccgatagtaaatctccagtcgtggagatggtaactttaattcaaatttctttgagttatttcaatttgttatctaagaactaccagacggatggtcttttgtgtgaagacaccaagagagctatagatgaatggtgggaaacttacgggaaactttaccttggtacagaaaagccaaggaatgaatgcacattaggtccgacgacagtagctggcttaattagtttgatcctttgttgctatttcaagttgatgatagaaaattgcatttcctctaaggatccctttgatgaagctggtttcttccaaggtatttataatttccaaaaaaagcatggcctcaataaaagaaaatctagagtttatttagacccaagaacgttagagaaactctttgaagtgacagcgaaagtttctagcaaagacatttttaaattgaagaaaatggtgacaagtacggtacaggacatcataggaaagggaaatcccatcaacttatcccacaaaattcttacaacagatttggatacacttattcataatattcatggaggctctgtaggattattatggaaaggtaagggacacccaaggaaatgctgtacggatatttctaatgaagaatttttgaaatttaactaccagagaggcgatcctgatgggcagataagagaaagggaaatgttattggaaaaatttcgtttggaaagaatcgcatacgctcaaaagcacgcctccaaaaaggttagttcttccagtcttgatacatctgaagacatagggaggaccaatgctatgccctcttctgcaacagtgtcttctatgtttccaaactacgataataccaaatatgcatataattttggcatcaacaaattatatcaaggagaatactacagaagaaattcttttccctattgtaaagatcgcacacacgacaacatttatgaagatctttctgagttgaaggaaaagtcttctcgtttgtatagatgcaactcttcttctgctgtacagaatattgtggaaaaatgggatttaccatttgatccatctgttgttagaatagctagagatttgttaagaatgaaatacgacatccaagcgcagcaacacatacaagaaatggatgagcattatatgggtaaattaaataaggagggaactgttggtcagtactctaaattcaacgaaagatataaaagattacaagaattgtataagaagtattctgatggtgcaaaagtgtttgaagggagatttgaagacattgacaataagcaacaacttcttctccatgagatgcaagagttaaattccttatcttctaggttgaaatatgatatgaggatattggaagttcgtgtaagagatattgaaagtagtgttgctcagtttgattccaaattaattgggttgaaaagctctcttcagggacagggtaaaactggaatatgctctgcaatagatcccaagagtgataaagacgaatatgatagatgcgtaaatgatttgatgaccactaacaaccccacctatgaagctctttgtttaaagatgttaagccgccgttattttaaagatttaaagaatgatactgtggggtggttcaggtggttatttggtaataattctttacacaataatgccagtgaagacgatagaggaataagagtatga

SEQ ID NO: 8457 - DNA, 2673 bp, Saccharomyces cerevisiae
atgaatcaagaagaggctatattccggtcagcagacatgacgtacgtccaactgtacataccgttggaagtcataagagaggtaactttcttattagggaaaatgagtgtctttatggtgatggatctcaataaagatttaactgcctttcaaagaggttatgttaaccagttgaggcgtttcgatgaagtggaaaggatggtaggcttcttgaatgaggtagttgaaaagcacgccgcagagacctggaagtatattttacatatcgatgatgaaggaaacgacattgcccaacccgatatggcggatctcatcaataccatggaaccactatcgttggaaaatgttaatgacatggtgaaggaaattactgattgcgaatcccgtgcaaggcaattagatgaatctttagatagccttagaagtaaactgaacgatcttttagagcaaaggcaggtaatattcgaatgctcaaaatttattgaagtcaatcctgggattgctggaagagctacaaaccccgagattgaacaagaagaaagggatgttgacgagtttagaatgacccctgatgatatcagtgaaacattaagcgatgctttttcttttgacgacgaaacaccacaggaccggggcgctctagggaatgacctcactagaaaccaatcagtcgaagatctaagctttttagagcagggataccagcatagatacatgataacaggctctatcagaagaacaaaagtagatatattgaacagaatcctgtggaggttattgcgtggtaatttgatctttcagaattttccaatagaggagccattgttggaaggtaaagaaaaggttgaaaaggactgctttattatttttactcatggtgaaacattgctcaagaaggttaagcgtgtcatagattccttaaatggtaaaatagtctccctgaatactcgttctagtgaattagttgacaccttaaaccgtcaaatagacgacttgcaaagaatcctggatactaccgaacaaactttacacacagaactgctcgttatacatgaccagctgccagtatggtccgccatgacgaaaagggaaaaatatgtttataccacattgaacaagttccaacaagaatcacagggtctaatagccgaaggttgggtgccttccacagaattgatccatttacaagactcattgaaggattacattgaaacgttgggttctgaatacagtaccgtctttaatgtgatcctaaccaataaattaccacctacataccatagaaccaacaagttcactcaggccttccaatcgattgtggatgcatacggtatcgcaacatataaagaaatcaatgctggtttagccacggttgtcaccttcccatttatgtttgccattatgtttggtgacatgggccatggtttcattttatttttgatggcactattcttggtgctaaatgaacgtaagtttggtgctatgcacagggacgaaatttttgacatggcatttacaggtagatatgttttattgttgatgggtgcattttctgtatatactgggctgttgtacaatgatatcttttccaaatctatgacaatattcaaatcaggctggcaatggccttccactttcagaaagggcgaatcgattgaggcgaagaaaactggggtttatccgtttggattggattttgcttggcatggtactgataacggactactattttccaactcttataagatgaagctgtccattctaatgggatacgcacatatgacttattccttcatgttttcttatatcaattacagagctaaaaactctaaagtggacataattggtaactttatccccggtttagtgtttatgcaatcaatatttggttatttgtcgtgggctatcgtgtacaagtggtcgaaggattggattaaagatgataagcctgctccagggttactgaatatgctaataaacatgtttttagcaccgggtactattgatgatcaattatattccggacaagccaagttgcaagttgtactactgcttgcggcactagtttgtgtcccgtggttattgctgtataaacctttaacactgagaaggttaaataagaacggtggtggtggcaggcctcacggataccaaagtgtgggcaatattgagcatgaggaacaaatagcacaacagagacattcagcggaaggtttccaagggatgatcatcagtgatgttgccagtgttgcagacagtatcaatgaaagcgttggtggaggtgaacaggggccatttaatttcggcgatgtcatgattcatcaggtaatccatactattgaattctgtttaaattgtatctctcatacagcatcatatctacgtctttgggcactatcgttggcgcatgcgcaattatctagtgttttatgggatatgacaatttcaaacgctttcagttctaaaaactcagggtcgcctttggctgtcatgaaggtggttttcttatttgctatgtggtttgttttaaccgtttgtatcctagttttcatggaaggtacttccgcaatgttgcatgcgctacgtttgcattgggtggaggcaatgtccaaattttttgaaggtgaaggatatgcgtacgagccattttcatttcgtgcaataatagaataa

SEQ ID NO: 8458 - DNA, 2673 bp, Artificial Sequence
  Description of Artificial Sequence: Synthetic polynucleotide
atgaatcaagaagaggctatattcagaagtgcagacatgacgtacgtccaattgtacataccgttggaagtcataagagaggtaactttcttattagggaaaatgagtgtctttatggtgatggatctcaataaagatttaactgcctttcaaagaggttatgttaaccagttgaggcgtttcgatgaagtggaaaggatggtaggcttcttgaatgaggtagttgaaaagcacgccgcagagacctggaagtatattttacatatcgatgatgaaggaaacgacattgcccaacccgatatggcggatctcatcaataccatggaaccattatctttggaaaatgttaatgacatggtgaaggaaattactgattgcgaatcccgtgcaaggcaattagatgaatctttagatagccttagaagtaaattgaacgatcttttagagcaaaggcaggtaatattcgaatgctccaaatttattgaagtcaatcctgggattgctggaagagctacaaaccccgagattgaacaagaagaaagggatgttgacgagtttagaatgacccctgatgatatcagtgaaacattaagcgatgctttttcttttgacgacgaaacaccacaggaccgtggcgctttagggaatgacctcactagaaaccaatctgtcgaagatttgagctttttagagcagggataccagcatagatacatgataacaggctctatcagaagaacaaaagtagatatattgaacagaatcttatggaggttattgcgtggtaatttgatctttcagaattttccaatagaggagccattgttggaaggtaaagaaaaggttgaaaaggactgctttattatttttactcatggtgaaacattgctcaagaaggttaagcgtgtcatagattccttaaatggtaaaatagtctccttgaatactcgttctagtgaattagttgacaccttaaaccgtcaaatagacgacttgcaaagaatcttagatactaccgaacaaactttacacacagaattactcgttatacatgaccagttaccagtatggtccgccatgacgaaaagggaaaaatatgtttataccacattgaacaagttccaacaagaatctcagggtttgatagccgaaggttgggtgccttccacagaattgatccatttacaagactctttgaaggattacattgaaacgttgggttctgaatacagtaccgtctttaatgtgatcttgaccaataaattaccacctacataccatagaaccaacaagttcactcaggccttccaatctattgtggatgcatacggtatcgcaacatataaagaaatcaatgctggtttagccacggttgtcaccttcccatttatgtttgccattatgtttggtgacatgggccatggtttcattttatttttgatggcattattcttggtgttgaatgaacgtaagtttggtgctatgcacagggacgaaatttttgacatggcatttacaggtagatatgttttattgttgatgggtgcattttctgtatatactgggttattgtacaatgatatcttttccaaatctatgacaatattcaaatctggctggcaatggccttccactttcagaaagggcgaaagtattgaggcgaagaaaactggggtttatccgtttggattggattttgcttggcatggtactgataacggattacttttttccaactcttataagatgaagttatccattttgatgggatacgcacatatgacttattccttcatgttttcttatatcaattacagagctaaaaactctaaagtggacataattggtaactttatccccggtttagtgtttatgcaaagtatatttggttatttgtcctgggctatcgtgtacaagtggtccaaggattggattaaagatgataagcctgctccagggttattgaatatgttgataaacatgtttttagcaccgggtactattgatgatcaattatattccggacaagccaagttgcaagttgtattgttacttgcggcattggtttgtgtcccgtggttattgttatataaacctttaacattaagaaggttaaataagaacggtggtggtggcaggcctcacggataccaaagtgtgggcaatattgagcatgaggaacaaatagcacaacagagacattctgcggaaggtttccaagggatgatcatcagtgatgttgccagtgttgcagacagtatcaatgaaagcgttggtggaggtgaacaggggccatttaatttcggcgatgtcatgattcatcaggtaatccatactattgaattctgtttaaattgtatctctcatacagcaagttatttacgtctttgggcattatctttggcgcatgcgcaattatctagtgttttatgggatatgacaatttccaacgctttcagttctaaaaactctgggagccctttggctgtcatgaaggtggttttcttatttgctatgtggtttgttttaaccgtttgtatcttggttttcatggaaggtacttccgcaatgttgcatgcgttgcgtttgcattgggtggaggcaatgtccaaattttttgaaggtgaaggatatgcgtacgagccattttcttttcgtgcaataatagaatga

SEQ ID NO: 8459 - DNA, 921 bp, Saccharomyces cerevisiae
atgacctcaattgaagatctgatatcaaatcctcccctgctactgcattcctcactctctcaacttcgctacctcatactcagtgaagggcttcccatatctgaagataaacagcagcagcgcacgcgatgttacgtgtggacggtgctctctcaaacttctatggaggcgtctacacaacggtaccttgcgctcttgaaactgggcccaccttccacaaccatttaccaaaaaatcaagaacgacacatccagaacttttcagacggatccaaactttagaaatagagtctcagaggatgccctcatccggtgtctgtcgtgctttgcttggcaaacacaacaaagaagacaaaagactcgttttggtcgcattcctgtgagcacatatgtgcagggcatgaacgtgttattagctcctctgctttactcatgtccttctgaacctatggcgtatcaacttttcactaagctttgttatgaaatgataccgacgtatctaactaagaacctaaacggcgcccagaacggcgccaaactactagatatttctctcagaatcattgatccaaagctgagtaaatttctatcggacaatttacttacagcagagatttatggtatgccttccatactcacgttatccagctgcaataaaccgcttgatcaggtcattaaactgtgggatttcatgtttgcatatggattccatatgaatattctctttgtggtggcattcctagttaaaatgagatccaaggttttcaaatcggattcccctgttaatttactacgacagtttccggattttgatgctgacgagatcattcggctgggcgtcgggttcatcgctaagatccctgctcaaatttatgacctattggtagaccacttgaccgacccagacatatatataccgtaa

SEQ ID NO: 8460 - DNA, 921 bp, Artificial Sequence
  Description of Artificial Sequence: Synthetic polynucleotide
atgacctctattgaagatttgatatccaatcctcccttattattacattcctctctctctcaacttcgctacctcatactcagtgaagggcttcccatatctgaagataaacagcagcagcgcacgagatgttacgtgtggacggtgctctctcaaacttctatggaggcgtctacacaaagataccttgcgctcttgaaattgggcccaccttccacaaccatttaccaaaaaatcaagaacgacacatccagaacttttcagacggatccaaactttagaaatagagtcagtgaggatgccctcatcagatgtctttcttgctttgcttggcaaacacaacaaagaagacaaaagactcgttttggtcgcattcctgtgagcacatatgtgcagggcatgaacgtgttattagctcctttactttactcttgtccttctgaacctatggcgtatcaacttttcactaagctttgttatgaaatgataccgacgtatttgactaagaacttgaacggcgcccagaacggcgccaaattattagatatttctctcagaatcattgatccaaagttgagtaaatttttaagtgacaatttacttacagcagagatttatggtatgccttccatactcacgttatccagctgcaataaaccgcttgatcaggtcattaaattatgggatttcatgtttgcatatggattccatatgaatattctctttgtggtggcattcttggttaaaatgagatccaaggttttcaaatctgattcccctgttaatttacttcgtcagtttccggattttgatgctgacgagatcattagattgggcgtcgggttcatcgctaagatccctgctcaaatttatgacttgttggtagaccacttgaccgacccagacatatatataccgtga

SEQ ID NO: 8461 - DNA, 930 bp, Saccharomyces cerevisiae
atgtctcacacagaaacacagactcagcagtcacacttcggtgtggacttccttatgggcggcgtttctgctgccattgcgaagacgggtgccgctcccattgaacgggtgaaactgttgatgcagaatcaagaagagatgcttaaacagggctcgttggatacacggtacaagggaattttagattgcttcaagaggactgcgactcatgaaggtattgtgtcgttctggaggggtaacaccgccaatgttctccggtatttccccacgcaggcgctgaattttgccttcaaagacaaaattaagtcgttgttgagttacgacagagagcgcgatgggtatgccaagtggtttgctggaaatcttttctctggtggagcggctggtggtttgtcgcttctatttgtatattccttggactacgcaaggacgcggcttgcagcggatgctaggggttctaagtcaacctcgcaaagacagtttaatggattgctagacgtgtataagaagacactgaaaacggacgggttgttgggtctgtaccgtgggtttgtgccctcagttctgggtatcattgtctacagaggtctgtactttggcttgtacgattctttcaagcctgtgctgttgacgggggctctagaggggtcctttgttgcctctttcctattaggttgggtcattaccatgggtgcttccactgcgtcgtatcccttggatacggtaagaagaaggatgatgatgacttcgggccagaccatcaagtacgacggtgctctggactgtttgagaaagattgttcagaaagagggcgcgtattccttgttcaagggctgtggtgccaacatatttagaggagtcgctgcagctggtgtcatctcattgtacgatcagttgcaactcataatgtttggcaaaaaattcaagtga

SEQ ID NO: 8462 - DNA, 930 bp, Artificial Sequence
  Description of Artificial Sequence: Synthetic polynucleotide
atgtctcacacagaaacacagactcagcagtctcacttcggtgtggacttccttatgggcggcgtttctgctgccattgcgaagacgggtgccgctcccattgaaagagtgaaacttttgatgcagaatcaagaagagatgcttaaacagggctctttggatacaagatacaagggaattttagattgcttcaagaggactgcgactcatgaaggtattgtgtctttctggaggggtaacaccgccaatgttctcagatatttccccacgcaggcgttgaattttgccttcaaagacaaaattaagtctttgttgagttacgacagagagcgcgatgggtatgccaagtggtttgctggaaatcttttctctggtggagcggctggtggtttgtctcttttatttgtatattccttggactacgcaaggacgagacttgcagcggatgctaggggttctaagtctacctctcaaagacagtttaatggattgttggacgtgtataagaagacattaaaaacggacgggttgttgggtttataccgtgggtttgtgccctctgttttaggtatcattgtctacagaggtttatactttggcttgtacgattctttcaagcctgtgttattgacgggggctttggaggggtcctttgttgcctctttcttattaggttgggtcattaccatgggtgcttccactgcgtcttatcccttggatacggtaagaagaaggatgatgatgacttctggccagaccatcaagtacgacggtgctttggactgtttgagaaagattgttcagaaagagggcgcgtattccttgttcaagggctgtggtgccaacatatttagaggagtcgctgcagctggtgtcatctctttgtacgatcagttgcaactcataatgtttggcaaaaaattcaagtga

SEQ ID NO: 8463 - DNA, 1911 bp, Saccharomyces cerevisiae
atgactaacgctttgctctctatagccgttttgcttttctcgatgctctcgctagcacaagcggagacgcacacgtttaattggaccactggctgggactacaggaacgttgatgggctaaagagccgtcccgtgatcacctgtaatggccagttcccatggccagatataacggtcaacaaaggtgaccgtgtgcagatttacttgaccaacggaatgaacaacaccaatacttctatgcatttccacggtctcttccaaaacggaaccgcctctatggacggtgtgcccttcttgacgcaatgtccaattgcgccaggcagtactatgctttacaatttcacggtggactacaatgtaggcacctactggtaccattcacacacggacggtcaatatgaagacgggatgaaaggtcttttcatcatcaaggatgatagcttcccctacgattacgatgaggaactttctttatcgcttagtgagtggtaccacgacttggtcacggacttgacgaagtcgttcatgagtgtttataatccgacaggtgctgagcccatcccacagaacttgattgttaacaacacgatgaatctgacatgggaagtccagcccgatacgacgtatcttttgagaattgtcaacgtgggtgggttcgtttcgcagtacttttggatcgaggaccacgaaatgaccgtggtcgaaatcgacggtatcactaccgagaagaacgtaacggatatgctttacatcactgtcgctcagagatatacagtcctggttcacactaaaaacgacacggacaaaaatttcgccatcatgcagaaatttgatgacaccatgttggatgtcattccaagtgatttacagctgaatgcaacctcttatatggtctacaacaaaaccgctgcgctgcccacacaaaattacgtggattcaattgataacttcttggacgatttctacttgcaaccgtacgagaaagaagccatctatggcgagccagatcatgtgattaccgttgacgttgttatggataacttgaaaaacggtgtgaattacgccttcttcaataatatcacctatactgcaccaaaagttcctactttgatgaccgttttgtcttcaggtgatcaagcaaacaactccgaaatctacggttcaaacacgcacactttcatcctagagaaggatgaaatcgtggagattgtgctaaataaccaggacacaggtacccatcctttccatttacatggtcacgctttccaaaccatccagagagatcgtacatatgatgatgccctaggtgaagttcctcacagtttcgatccggacaaccaccctgccttcccagaatacccaatgagaagagatactttatacgttagaccacaatccaatttcgtcatcaggtttaaagccgataacccaggtgtttggttcttccattgtcatatcgaatggcatttgttgcaaggtttgggtcttgttctcgtggaggatccttttggtatccaagatgctcattctcaacaactcagtgaaaaccacttagaagtttgccagagttgctctgtggccactgaaggtaacgccgctgccaatacactggatttaactgatttaactggtgaaaatgttcagcatgccttcattcctaccggttttaccaaaaaaggtattattgccatgacattctcctgctttgccggtattcttggtattatcacaattgcaatttatggtatgatggatatggaagatgcgaccgaaaaggttattcgagacttgcacgtggaccctgaagtcttgctaaatgaggttgatgaaaatgaagagcgtcaggtaaacgaagatcgtcattccactgaaaagcatcaatttttaactaaagccaaacggttcttctaa

SEQ ID NO: 8464 - DNA, 1911 bp, Artificial Sequence
  Description of Artificial Sequence: Synthetic polynucleotide
atgactaacgctttgctctctatagccgttttgcttttctccatgctctccttggcacaagcggagacgcacacgtttaattggaccactggctgggactacaggaacgttgatgggttgaagagccgtcccgtgatcacctgtaatggccagttcccatggccagatataacggtcaacaaaggtgaccgtgtgcagatttacttgaccaacggaatgaacaacaccaatacttctatgcatttccacggtctcttccaaaacggaaccgcctctatggacggtgtgcccttcttgacgcaatgtccaattgcgccaggcagtactatgctttacaatttcacggtggactacaatgtaggcacctactggtaccattctcacacggacggtcaatatgaagacgggatgaaaggtcttttcatcatcaaggatgatagcttcccctacgattacgatgaggaactttctttatctcttagtgagtggtaccacgacttggtcacggacttgacgaagagtttcatgagtgtttataatccgacaggtgctgagcccatcccacagaacttgattgttaacaacacgatgaatttgacatgggaagtccagcccgatacgacgtatcttttgagaattgtcaacgtgggtgggttcgtttctcagtacttttggatcgaggaccacgaaatgaccgtggtcgaaatcgacggtatcactaccgagaagaacgtaacggatatgctttacatcactgtcgctcagagatatacagtcttggttcacactaaaaacgacacggacaaaaatttcgccatcatgcagaaatttgatgacaccatgttggatgtcattccaagtgatttacagttgaatgcaacctcttatatggtctacaacaaaaccgctgcgttgcccacacaaaattacgtggattctattgataacttcttggacgatttctacttgcaaccgtacgagaaagaagccatctatggcgagccagatcatgtgattaccgttgacgttgttatggataacttgaaaaacggtgtgaattacgccttcttcaataatatcacctatactgcaccaaaagttcctactttgatgaccgttttgtcttctggtgatcaagcaaacaactccgaaatctacggttccaacacgcacactttcatcttggagaaggatgaaatcgtggagattgtgttgaataaccaggacacaggtacccatcctttccatttacatggtcacgctttccaaaccatccagagagatcgtacatatgatgatgcccttggtgaagttcctcacagtttcgatccggacaaccaccctgccttcccagaatacccaatgagaagagatactttatacgttagaccacaatccaatttcgtcatcaggtttaaagccgataacccaggtgtttggttcttccattgtcatatcgaatggcatttgttgcaaggtttgggtcttgttctcgtggaggatccttttggtatccaagatgctcattctcaacaactcagtgaaaaccacttagaagtttgccagagttgctctgtggccactgaaggtaacgccgctgccaatacattagatttaactgatttaactggtgaaaatgttcagcatgccttcattcctaccggttttaccaaaaaaggtattattgccatgacattctcctgctttgccggtattcttggtattatcacaattgcaatttatggtatgatggatatggaagatgcgaccgaaaaggttattagagacttgcacgtggaccctgaagtcttgttgaatgaggttgatgaaaatgaagagcgtcaggtaaacgaagatcgtcattccactgaaaagcatcaatttttaactaaagccaaaagattcttctga

SEQ ID NO: 8465 - DNA, 387 bp, Saccharomyces cerevisiae
atggcaacgacagatatcatatctctagtaaaaaataatttactctatttccaaatgtggacggaagtggaaattttacaagacgatttatcatggaagggaaatagcctgagattactgagaggtcgtccgcctcacaagctgagcaacgatgtagacacagagcatgaaaatagcttgtcatcgccacgcccgctagagttcatattacccatcaatatgtcacagtacaaagagaattttctcactttggaatgcttgagccagacatttactcacttatgtagtccatctactgaaagaatactgctggccataattaacgatgatggtacaattgtttattacttcgtttataaaggagtacgaaaaccgaaaagaaattga

SEQ ID NO: 8466 - DNA, 387 bp, Artificial Sequence
  Description of Artificial Sequence: Synthetic polynucleotide
atggcaacgacagatatcatatctttagtaaaaaataatttactctatttccaaatgtggacggaagtggaaattttacaagacgatttatcttggaagggaaatagcttaagattattaagaggtcgtccgcctcacaagttgagcaacgatgtagacacagagcatgaaaatagcttgtcttctccacgcccgttagagttcatattacccatcaatatgtctcagtacaaagagaattttctcactttggaatgcttgagccagacatttactcacttatgtagtccatctactgaaagaatattattagccataattaacgatgatggtacaattgtttattacttcgtttataaaggagtaagaaaaccgaaaagaaattga

SEQ ID NO: 8467 - DNA, 984 bp, Saccharomyces cerevisiae
atggttaaaggtagtgtgcatttatggggaaaggatggcaaagcatcgttgatttcagtggacagcattgcgcttgtatggtttatcaagttatgtacttcagaagaggcaaagagtatggttgcgggattgcagatcgtattctcaaacaatacagacctatcatcagatggaaaactaccagtgttaattttagataatggaacgaaagtatctggttacgtgaacatcgtacaattcttacataaaaatatatgtactagcaaatatgagaaaggtacggattatgaagaagatttagcaattgttagaaaaaaggatcgccttttagagtattccctattgaattatgttgacgttgaaatttccagactaacggactaccagctctttttgaacaccaaaaattacaatgaatataccaagaagttgttttcaaaattgctatattttcctatgtggtataatacgccattgcaactaagatcgcaagcacgtgaaaattgtgaggagattataggctcactgacccttgaggatgatgaagaatttgtagaaagtaaagcaatggagtcagcctcgcaactagcacaatcaaagaccttcaaaattgcgcataagaacaaaattaagggtaagcaagagctacaacaggtgaaatataatcttcaatttgataatagactacagagttgcgtcagcaattggttggctgcccgtaaaaaactggatgattctgtaatactttcctccgaccttcttttccttgcaaatctttacgttcagttaggcctacctgatggtaaccgcatccgttcaaaactggaacaaacctttggaagtgaattattgaatagtatgtcgaacaaaattgatgacttcgtccatagaccaagtaataacttggagcaaagagatcctcaatttagagagcaaggaaacgttgtgatgtcattatataatttagcctgtaaatacatataa

SEQ ID NO: 8468 - DNA, 984 bp, Artificial Sequence
  Description of Artificial Sequence: Synthetic polynucleotide
atggttaaaggtagtgtgcatttatggggaaaggatggcaaagcaagtttgatttctgtggacagcattgcgcttgtatggtttatcaagttatgtacttctgaagaggcaaagagtatggttgcgggattgcagatcgtattcagtaacaatacagacttatcttctgatggaaaattaccagtgttaattttagataatggaacgaaagtatctggttacgtgaacatcgtacaattcttacataaaaatatatgtactagcaaatatgagaaaggtacggattatgaagaagatttagcaattgttagaaaaaaggatcgccttttagagtattccttattgaattatgttgacgttgaaatttccagattgacggactaccagctctttttgaacaccaaaaattacaatgaatataccaagaagttgttttccaaattgttatattttcctatgtggtataatacgccattgcaattgagatctcaagcacgtgaaaattgtgaggagattataggctctttaacccttgaggatgatgaagaatttgtagaaagtaaagcaatggagtctgcctctcaattggcacaatccaagaccttcaaaattgcgcataagaacaaaattaagggtaagcaagagttacaacaggtgaaatataatcttcaatttgataatagattacagagttgcgtcagcaattggttggctgcccgtaaaaaattggatgattctgtaatactttcctccgaccttcttttccttgcaaatctttacgttcagttaggcttacctgatggtaaccgcatccgttctaaattagaacaaacctttggaagtgaattattgaatagtatgtccaacaaaattgatgacttcgtccatagaccaagtaataacttggagcaaagagatcctcaatttagagagcaaggaaacgttgtgatgtctttatataatttagcctgtaaatacatatga

SEQ ID NO: 8469 - DNA, 2034 bp, Saccharomyces cerevisiae
atgtccagctctacgactcctgatttactatatccctctgcggacaaagtcgcagagcctagtgacaatatacatggagatgaactacgacttagagaaaggattaaagacaatcccacgaatattttatcatacttccagcttattcaatatttggaaactcaagagtcatacgctaaggtgagagaagtatacgagcaatttcataacacattcccgttttattcacctgcgtggactttgcaactaaagggtgaattggcaagagatgaatttgagactgttgagaagattttggctcaatgtctttctggcaagttggaaaataatgacctatctctttggtcaacatatttggactacatacgcagaaaaaacaacttaattactggtggacaagaggcgagagctgttattgtcaaggcattccaactagttatgcaaaagtgtgcaatttttgaacccaaatcatcttctttttggaacgaatatctcaattttttagagcagtggaagccattcaacaaatgggaggagcaacagcgaattgacatgctcagagaattctacaagaaaatgctatgtgttccttttgataatctagaaaaaatgtggaatagatacactcaatgggaacaagaaataaattccctaacagccagaaaatttattggcgagttatcagccgaatacatgaaagcccgttccttataccaggaatggttgaacgttactaatggattgaaaagggcatctccaattaatctgcgcacagcaaacaagaaaaacataccacaaccaggtacctcagactcaaacattcagcagttacagatttggttgaattggataaaatgggaaagggagaataagttgatgcttagtgaagatatgctatcacaaagaatcagttacgtttataaacaaggtattcaatacatgatattttctgctgaaatgtggtacgattattcaatgtatatatctgaaaattcggatcgacaaaatatcttatatactgcgttattagctaatcccgactcaccttctcttacattcaagttatccgaatgctacgaactggataatgattctgaaagtgtttctaactgttttgacaagtgcactcaaactttactatcgcagtataaaaagatcgcctccgatgtaaattcgggtgaagataataacacagagtatgaacaagagctgctatacaaacagagggaaaaattaacattcgtgttttgcgtgtatatgaatacgatgaaaagaatatcaggactatccgcagcacgtactgtatttggtaaatgtcgtaaactgaagcgtatattaacacatgacgtctacgtggaaaatgcatatttagaatttcaaaatcaaaacgattataagactgcttttaaggttttagaattgggtttaaaatacttccaaaacgatggagtttatatcaacaaatacttagattttttaatatttttaaataaggattcgcagatcaaaaccttatttgaaacatcagtggaaaaagtgcaagatttaacccagctgaaggaaatatacaagaaaatgataagttatgaatcgaaattcggtaacttaaacaacgtttattctctagagaaaagatttttcgaacggttcccccaagaaaatttgattgaagttttcacaagtcgttatcaaattcaaaactccaacttaataaagaaattagagttaacttatatgtataatgaggaagaagacagttacttttcttctggaaacggggatggccatcatggctcttacaatatgagttcgtcagatagaaagagactaatggaggaaactggaaacaatggaaacttctccaataagaaattcaaaagagactcagagcttccaacagaggttcttgatttattgagcgttataccaaaacgtcaatattttaatacaaatttactcgatgcgcagaaattggtgaattttttaaatgatcaagtagagattccaacagttgagagcaccaagtcaggttaa

SEQ ID NO: 8470 - DNA, 2034 bp, Artificial Sequence
  Description of Artificial Sequence: Synthetic polynucleotide
atgtccagctctacgactcctgatttattatatccctctgcggacaaagtcgcagagcctagtgacaatatacatggagatgaattaagacttagagaaaggattaaagacaatcccacgaatattttatcttacttccagcttattcaatatttggaaactcaagagagttacgctaaggtgagagaagtatacgagcaatttcataacacattcccgttttattctcctgcgtggactttgcaattgaagggtgaattggcaagagatgaatttgagactgttgagaagattttggctcaatgtctttctggcaagttggaaaataatgacttgtctctttggtctacatatttggactacatacgcagaaaaaacaacttaattactggtggacaagaggcgagagctgttattgtcaaggcattccaattggttatgcaaaagtgtgcaatttttgaacccaaatcttcttctttttggaacgaatatctcaattttttagagcagtggaagccattcaacaaatgggaggagcaacagcgtattgacatgctcagagaattctacaagaaaatgctttgtgttccttttgataatttggaaaaaatgtggaatagatacactcaatgggaacaagaaataaattccttaacagccagaaaatttattggcgagttatctgccgaatacatgaaagcccgttccttataccaggaatggttgaacgttactaatggattgaaaagggcatctccaattaatttacgcacagcaaacaagaaaaacataccacaaccaggtaccagtgactccaacattcagcagttacagatttggttgaattggataaaatgggaaagggagaataagttgatgcttagtgaagatatgctttctcaaagaatcagttacgtttataaacaaggtattcaatacatgatattttctgctgaaatgtggtacgattattccatgtatatatctgaaaattctgatagacaaaatatcttatatactgcgttattagctaatcccgactctccttctcttacattcaagttatccgaatgctacgaattagataatgattctgaaagtgtttctaactgttttgacaagtgcactcaaactttattatctcagtataaaaagatcgcctccgatgtaaattctggtgaagataataacacagagtatgaacaagagttattgtacaaacagagggaaaaattaacattcgtgttttgcgtgtatatgaatacgatgaaaagaatatctggattatccgcagcacgtactgtatttggtaaatgtcgtaaattgaagcgtatattaacacatgacgtctacgtggaaaatgcatatttagaatttcaaaatcaaaacgattataagactgcttttaaggttttagaattgggtttaaaatacttccaaaacgatggagtttatatcaacaaatacttagattttttaatatttttaaataaggattctcagatcaaaaccttatttgaaacatctgtggaaaaagtgcaagatttaacccagttgaaggaaatatacaagaaaatgataagttatgaaagtaaattcggtaacttaaacaacgtttattctttggagaaaagatttttcgaaagattcccccaagaaaatttgattgaagttttcacaagtcgttatcaaattcaaaactccaacttaataaagaaattagagttaacttatatgtataatgaggaagaagacagttacttttcttctggaaacggggatggccatcatggctcttacaatatgagttcttctgatagaaagagattaatggaggaaactggaaacaatggaaacttctccaataagaaattcaaaagagactctgagcttccaacagaggttcttgatttattgagcgttataccaaaacgtcaatattttaatacaaatttactcgatgcgcagaaattggtgaattttttaaatgatcaagtagagattccaacagttgagagcaccaagtctggttga

SEQ ID NO: 8471 - DNA, 1326 bp, Saccharomyces cerevisiae
atgagaatatcatcaacattgcttcaacgctcgaagcagcttatagataagtatgcattatacgtgcccaagacgggctcttttcctaaaggatttgaagtaggctacactgcatctggagtcaaaaaaaacgggagcctggacctgggtgtaatcttgaataccaataaatctcgtccttcaaccgcagcagctgttttcacgaccaataaattcaaagctgcgccagttttgacatcgaaaaaagtccttgaaactgctcgtggtaaaaacatcaacgctattgtagtcaattccggttgtgctaactcggtcacaggtgatcttggtatgaaagatgcccaagtaatgattgatttggttaacgataaaattggtcaaaaaaattctaccctagtcatgtctacaggcgttattggacaacgactacagatggacaagatcagcactggtatcaataaaatttttggagaagaaaagttcggcagtgattttaactcttggttgaacgtagccaaatcaatctgtactactgatactttcccaaaattagttacatctagattcaaattacctagtggtactgagtatactttgacaggtatggcaaagggcgcgggtatgatttgtccgaatatggctaccttattaggtttcatagttacagatcttcctattgaaagcaaggcgttgcagaagatgctgactttcgctactacccgttcatttaattgtatatcggtggacggtgatatgagcaccaatgacacaatttgcatgttggccaacggtgctattgacaccaaagaaattaacgaagactctaaagattttgaacaagtaaaattgcaggtcacagaatttgctcagcgcttggcccagttagtcgttcgcgatggtgaaggttcgacaaagtttgttactgttaacgttaaaaatgctttgcattttgaagacgccaaaataattgctgaatcaatctcaaactctatgttggtcaaaaccgcactatatgggcaagatgccaattggggaagaatattgtgcgcgatcgggtatgcaaagctgaatgacttaaaatctctagatgtcaacaaaattaatgttagctttattgctaccgacaattcagaacctcgtgagctgaagcttgtcgctaatggtgtgccacaattggagatcgatgaaacaagggcttctgaaatattggctttgaatgatttggaagtgtctgtcgacttgggaaccggtgatcaggcagcacaattttggacttgtgatttatcacatgaatatgtaacaattaacggtgattaccgttcataa

SEQ ID NO: 8472 - DNA, 1326 bp, Artificial Sequence
  Description of Artificial Sequence: Synthetic polynucleotide
atgagaatatcttctacattgcttcaacgctctaagcagcttatagataagtatgcattatacgtgcccaagacgggctcttttcctaaaggatttgaagtaggctacactgcatctggagtcaaaaaaaacgggagcttggacttgggtgtaatcttgaataccaataaatctcgtccttctaccgcagcagctgttttcacgaccaataaattcaaagctgcgccagttttgacaagtaaaaaagtccttgaaactgctcgtggtaaaaacatcaacgctattgtagtcaattccggttgtgctaactctgtcacaggtgatcttggtatgaaagatgcccaagtaatgattgatttggttaacgataaaattggtcaaaaaaattctaccttggtcatgtctacaggcgttattggacaaagattacagatggacaagatcagcactggtatcaataaaatttttggagaagaaaagttcggcagtgattttaactcttggttgaacgtagccaaatctatctgtactactgatactttcccaaaattagttacatctagattcaaattacctagtggtactgagtatactttgacaggtatggcaaagggcgcgggtatgatttgtccgaatatggctaccttattaggtttcatagttacagatcttcctattgaaagcaaggcgttgcagaagatgttgactttcgctactacccgttcttttaattgtatatctgtggacggtgatatgagcaccaatgacacaatttgcatgttggccaacggtgctattgacaccaaagaaattaacgaagactctaaagattttgaacaagtaaaattgcaggtcacagaatttgctcagcgcttggcccagttagtcgttcgcgatggtgaaggttctacaaagtttgttactgttaacgttaaaaatgctttgcattttgaagacgccaaaataattgctgaaagtatctccaactctatgttggtcaaaaccgcattatatgggcaagatgccaattggggaagaatattgtgcgcgatcgggtatgcaaagttgaatgacttaaaatctttagatgtcaacaaaattaatgttagctttattgctaccgacaattctgaacctcgtgagttgaagcttgtcgctaatggtgtgccacaattggagatcgatgaaacaagggcttctgaaatattggctttgaatgatttggaagtgtctgtcgacttgggaaccggtgatcaggcagcacaattttggacttgtgatttatctcatgaatatgtaacaattaacggtgattaccgttcctga

SEQ ID NO: 8473 - DNA, 720 bp, Saccharomyces cerevisiae
atggttagcatgatccatattgtggtgtttttgctagcaatcacaaccatgttcgaaatacttccgctaataaccgtccccgtgaccaagtacctatcgttatcgtcattcagaaaccactattatggcctgtttggctggtgtgtacgtggtcaaaaccaagaattgatgtgcacgaaaatgaagataggatatgacagtacagatgtcgactcctccgggcacgttttgaccctgccatcgaactcaaaagtggtcgtctccaatttattagtggttcacccgatttcactggcattcacaggaacgctattaattttagcagtgattatcatggtaactccactaggggactcacctgagatgttattgttcacggcccttttttcgctgccaacgttcatgctatgtcttttatgttttttggtagatattcttctgttcatctccaaactggactggcccggctggctaatgctagccgctactattagcgtagcactttgttgttccatgctgtgggtcatgagaagagttgtgtcagtcaaaaaatatgaatcgcaacagtcaattgcgcatgcgtgctcaatggaacagtactcaatttccgacatttaccagagtaaacagaacggcaatagctcagaatatgaagtggctccaacacatacagatagtctgattgctccagaagtgacatatagagggttcattgaataa

SEQ ID NO: 8474 - DNA, 720 bp, Artificial Sequence
  Description of Artificial Sequence: Synthetic polynucleotide
atggttagcatgatccatattgtggtgtttttgttggcaatcacaaccatgttcgaaatacttccgttgataaccgtccccgtgaccaagtacttatctttatcttctttcagaaaccactattatggcttatttggctggtgtgtacgtggtcaaaaccaagaattgatgtgcacgaaaatgaagataggatatgacagtacagatgtcgactcctccgggcacgttttgaccttgccatctaactccaaagtggtcgtctccaatttattagtggttcacccgatttctttggcattcacaggaacgttattaattttagcagtgattatcatggtaactccattaggggactctcctgagatgttattgttcacggcccttttttctttaccaacgttcatgctttgtcttttatgttttttggtagatattcttttattcatctccaaattagactggcccggctggttaatgttggccgctactattagcgtagcactttgttgttccatgttatgggtcatgagaagagttgtgtctgtcaaaaaatatgaatctcaacagagtattgcgcatgcgtgctctatggaacagtactctatttccgacatttaccagagtaaacagaacggcaatagctctgaatatgaagtggctccaacacatacagatagtttgattgctccagaagtgacatatagagggttcattgaatga

SEQ ID NO: 8475 - DNA, 1557 bp, Saccharomyces cerevisiae
atgattactacagtgcaagaaatcagcaaatggagaaacctgtgcttcattaggatgcaatctcgcaaatggtacccagtacttaaaaagactcctttagtagcggacggtcgaaagatcattaaacatgccgataaagttcctcatccggaagaaataattcacccattttaccaaccaacagcaatagaacaattcacggcatgcgctacggaatacaatcctagcctgcttgatggcaaaaaaattgctccatcactgataaaacacccggtgagcctaaaaaccatactagttgatagcaaattaaagtttgatgatattaggggagtgaataaatggttgatggaattcgttgcaagacgacaacatcaaagaaatattgtacttacacctgcgagcaaaagcgttagatcttttcacgttctgcatttgtcttcaaccgatattgccaaattaagaggtcttgaaaatatattatcagagattgaaaacacgaatgatttgcaatccagggtcgagtccgtaaataatgaactacagaatatttttgaccgcgacagtaaacagacaagattattttgcgagaatatactggcttatttgataaagaattatggaaactcgactgaaaaacttatactactaataaatgttactgagatgcaattatattcacgtttagaccaaatgaaggccatgaacattattttatataatatcctttgtaaagtggaagcaaatgaaaacccaccgtacagtcccacattggttaccgcactagaaaacctattggcagcgatcaacaacagattttttccagggcgttgcgaaaattcattgcacccaatagtaattgaacaactattatcatatttcattaaaaccggcaatttgaatgaaagcaaaaattttttgggccatttaataaaaaagggtattttaccagaggctactatcattaatagatatttggaggcaattgatgttcatttcgataaaagcactaagatttttgatataagatccaaatttgcattcatagcagatcttgcacccataatagaaaattatggaacaatagacctgttcaaatttttgatacctatgtgccggcatttcgacgaattgtgttctctgctaaatattattcgaaaatccaataacgcaaaacgggctgtggatagcaccttacctatttttatcaaaaaagtattaacatttactaaagatccaatgatcaactccggaaatctatccactgttttcaatatagtgagcccaatatatggacaaaacgtgcccagcgaattcgtggagaaatttatactgtcttttgcacttcaaggaaattacactatgatggctcatatgatagatacatataagatcaaactaagtcataaataccaactacaaattattagggctctcaaaaatagtgagagaaatcacgcgcttaagaatacgggcgctgtaggttataataaggaatttaaaaagtacttcatcgagaaatatttgaattgcactgaacgagaagctttacgcccataa

SEQ ID NO: 8476 - DNA, 1557 bp, Artificial Sequence
  Description of Artificial Sequence: Synthetic polynucleotide
atgattactacagtgcaagaaatcagcaaatggagaaacttatgcttcattaggatgcaatctcgcaaatggtacccagtacttaaaaagactcctttagtagcggacggtagaaagatcattaaacatgccgataaagttcctcatccggaagaaataattcacccattttaccaaccaacagcaatagaacaattcacggcatgcgctacggaatacaatcctagcttgcttgatggcaaaaaaattgctccatctttgataaaacacccggtgagcttgaaaaccatattagttgatagcaaattaaagtttgatgatattaggggagtgaataaatggttgatggaattcgttgcaagaagacaacatcaaagaaatattgtacttacacctgcgagcaaaagcgttagatcttttcacgttttgcatttgtcttccaccgatattgccaaattaagaggtcttgaaaatatattatctgagattgaaaacacgaatgatttgcaatccagggtcgagtccgtaaataatgaattacagaatatttttgaccgcgacagtaaacagacaagattattttgcgagaatatattggcttatttgataaagaattatggaaactctactgaaaaacttatattattgataaatgttactgagatgcaattatattctcgtttagaccaaatgaaggccatgaacattattttatataatatcctttgtaaagtggaagcaaatgaaaacccaccgtacagtcccacattggttaccgcattggaaaaccttttggcagcgatcaacaacagattttttccagggcgttgcgaaaattctttgcacccaatagtaattgaacaattattatcttatttcattaaaaccggcaatttgaatgaaagcaaaaattttttgggccatttaataaaaaagggtattttaccagaggctactatcattaatagatatttggaggcaattgatgttcatttcgataaaagcactaagatttttgatataagatccaaatttgcattcatagcagatcttgcacccataatagaaaattatggaacaatagaccttttcaaatttttgatacctatgtgcaggcatttcgacgaattgtgttctttattgaatattattagaaaatccaataacgcaaaaagagctgtggatagcaccttacctatttttatcaaaaaagtattaacatttactaaagatccaatgatcaactccggaaatttatccactgttttcaatatagtgagcccaatatatggacaaaacgtgcccagcgaattcgtggagaaatttatattatcttttgcacttcaaggaaattacactatgatggctcatatgatagatacatataagatcaaattaagtcataaataccaattacaaattattagggctctcaaaaatagtgagagaaatcacgcgcttaagaatacgggcgctgtaggttataataaggaatttaaaaagtacttcatcgagaaatatttgaattgcactgaaagagaagctttacgcccatga

SEQ ID NO: 8477 - DNA, 1515 bp, Saccharomyces cerevisiae
atgtttgaaatgcgctacgtctatttgtttgcaatttgtattaagtttgtttcaagctccgaactaggaaaaatcaacaatctgctgcaaggaagattgatatacacagataattccgttgcgacaaatgtattagaatccaaatttccattcttgaaatcaacatgtgttaaagacgcactaaaattatttttgccacaatgtattgcaaatggacttgaatccattgacgctgaaacaagggtagaaacggccattaaactttcaatatgcgagtttcaggcatctggcttgggcgaaataccagaaaattgcatggttgacgacctaggatcaatgatggattgtatgtttgaactagaatcatcttcacagtggtggacaacttatagtggaaattatcagcgactatcgagtatttgttatgaaaatcttcttccttttgaaaaagaacagatactgaaactttttctaaatatcactgaactttatgattcatttggggatgatgtcgatactaagttaaatcatctgatgtttcaaatggagcaagattctcaaaattttttggacgatctggccaggatgttccgcaactatgacaatgaactgcgaaatgcgaccgaaagcaatcgaataatcttagaaaacgacctctcattttttagaaataaagtgaatgatgtactctatgaaacttccgaacaactagaggtccaaatcatagagaagaacagtcaactaatgaatgaagttgataccgtccatcatattatgagcgatctagccgatgagcttgctaaaaatgacataaaatctaagataaatgacttgaaggacgacagcctgaataatttacaggacctagtggaaatgtccaacgacgtaaaagaatattactctagaaataacaagttagttaataccgagttggaaaacttctcgatgggtttaaaaaaacagttaggaggcatgtcaaaggatctttctgaatcacaaatggaagctatagagctcttgcaagggttcaattccatccttcatgattcattgttaccatccatgacggatgagatagtacctgagatgacgaacttcaaaaataccttactacaagaatggacagctataacatctacactaaatggagattttgctttatggaatgaggagattttttcaacttttaatgatatttcagagaaactgaatggcacaaaaaaaaaattagacgacattgaaatcagagtctcacttgtccataaaaatgtcatgacaatgatgagggtattggattttatgtggaaaactagtaaaatgattataagatgtgggtaccttgcagtcaagaataaatactactggttactgtgctccgttgtgtggatttggtcaaaataccgtacgtctcgagtaaacgtcaaaatgattcctattaaacgctattaccaatgggcagctcttctactttcaatttatctaggagctaagactggctcattgattgatttttaa

SEQ ID NO: 8478 - DNA, 1515 bp, Artificial Sequence
  Description of Artificial Sequence: Synthetic polynucleotide
atgtttgaaatgcgctacgtctatttgtttgcaatttgtattaagtttgtttccagctccgaattaggaaaaatcaacaatttattacaaggaagattgatatacacagataattccgttgcgacaaatgtattagaatccaaatttccattcttgaaatctacatgtgttaaagacgcattgaaattatttttgccacaatgtattgcaaatggacttgaatccattgacgctgaaacaagggtagaaacggccattaaactttccatatgcgagtttcaggcatctggcttgggcgaaataccagaaaattgcatggttgacgacttgggatccatgatggattgtatgtttgaattggaaagctcttctcagtggtggacaacttatagtggaaattatcagaggctttccagtatttgttatgaaaatcttcttccttttgaaaaagaacagatattgaaactttttttgaatatcactgaactttatgattcttttggggatgatgtcgatactaagttaaatcatttaatgtttcaaatggagcaagattctcaaaattttttggacgatttggccaggatgttccgcaactatgacaatgaattaagaaatgcgaccgaaagcaatagaataatcttagaaaacgacctcagtttttttagaaataaagtgaatgatgtactctatgaaacttccgaacaattggaggtccaaatcatagagaagaacagtcaattgatgaatgaagttgataccgtccatcatattatgagcgatttggccgatgagcttgctaaaaatgacataaaatctaagataaatgacttgaaggacgacagcttgaataatttacaggacttggtggaaatgtccaacgacgtaaaagaatattactctagaaataacaagttagttaataccgagttggaaaacttctccatgggtttaaaaaaacagttaggaggcatgtccaaggatctttctgaatctcaaatggaagctatagagctcttgcaagggttcaattccatccttcatgattctttgttaccatccatgacggatgagatagtacctgagatgacgaacttcaaaaataccttattacaagaatggacagctataacatctacattaaatggagattttgctttatggaatgaggagattttttccacttttaatgatatttctgagaaattgaatggcacaaaaaaaaaattagacgacattgaaatcagagtctcccttgtccataaaaatgtcatgacaatgatgagggtattggattttatgtggaaaactagtaaaatgattataagatgtgggtaccttgcagtcaagaataaatactactggttattatgctccgttgtgtggatttggtccaaataccgtacgtctagagtaaacgtcaaaatgattcctattaaacgctattaccaatgggcagctcttttactttctatttatttgggagctaagactggctctttgattgatttttga

SEQ ID NO: 8479 - DNA, 2697 bp, Saccharomyces cerevisiae
atgttcaaatacaaccgctcactctgtagcagcgctttgatagcaaagtctcagattcgtttttatagattgaagcgggcgccattgaattatgcctcccatatacctgaagttcttaataagaccatcatagggccagacgaaccagaaaaatgtctcattttgaaaggaaaaacatcagaggaaatcgaaaataatcttctcagtaataagaaatttcaggagatcaatcctcttgatactatccaggaaacgttcattcaatatctgaaattttgtaatgaaactaactttaaaagaagtaacaagaatttaaacagattaaaaaaaaccttagaaagcaaggactctaatagcaccgtaaaaattaatgcagttttcaattatttgctcgaagagtgtgatttagaaatcaaaagattgaacacgaccggccaaacccaggtatacaatgaagagaaaggaaatgaagatgacttagagcaatccataatgaacgatattttccgatcagcacaagaacaatttgaagatcaagagggccatataccgttaaggagtacatcatttttactggagattttgaaaagttttaatgaacggtttaatggcataatcaaaccgaaagagtcaataacagaaatggtcacattcagccaacttgctcaagcttttgaagttgttaaattgataccagtgcaagaaatgaaggagaaagggatttacttggtcggaaatttactttatggcacagggaaagttcgtttagatcctataaatgagtcattctatattgaatccctactagtttttggaaactataaggctgcatacagtttatttattaccaataaagacaaagtaaacgagcgctggtggaatgaactaggattaatgatcacattaaggtctaaccacttgagaaacttcaggaaacttttagccgagacagatgcaaagtactcaacaaagtattcttatttgagcccaagagttaccaaattgagcatacgaaaatatttgtcgattggcaatgttactgaagctaatatactgactgatcgatttattaagttagtggaagaagttggaataatcagaatgaaagatgagcaggaggaacttcccacgggagttaaaaattttcagaatgagaaacatgcaactgagttcttaaatgaactagaaataccatcggatcatgattatatcagcattgttgatttccatctttataagagaaatattcccatggcggctcaacttatcagcaagtacatggaaatacctggaacgacacaagaagatgccgcatttctacttgttaaaaccaagctaaatatgttgaaagattttgaaaagctacgaaacatttttgctcaaaataaagattatgtagtgcctgagaataatgtgaaaatgttgcaagaggcatttgagagcgttattactaagtataacactaattctccaatatacaatgaattgctgtttgagaatgtttcggccttaacaaaaagtattgtattaactgattttctggaagagttcattactaaacaggcttctggacagtggatggaattaaacagtgtgtcacgttccagaaagtttaatggcttgttgaacatacttctcggtacaggtgaagaagaaaaagcatataatatcttaaaaaaactagaagaagcctcaaagaaatcaaaaacagatccagatttactctataatcagttttattcggaagttaatgcatatcattacgctaaatttgttgaattttatagtcttcaaattcaaaatatgaaggcacaaaatacgccctcatttagaaaaaaggaatttaagcagaaagtgaagtcacttttaaaaagaatgcaggagtcagaggttatcccaaatgctgtttttttgagagaaatactcaatttttatgatagcatgtatgactttaattcaagttttgagatcatcaatccgctacttgaatccaaacaacaggtgagctctgagtcttcattatccacctcaaacccttgccgattttacaaccgtcgcatcataacaaaaccgctgtaccacaagatttggtctgtgtattgccattattatcatgttttacaaaataattctaggattttatcgaaaaagtcgtccattgtaaagaaattaataaaaaggcagataaagattcacccaacttgtcacccaagagtattgttccaaatgacggcagaaaatggtgaaattttgccagacaaaactttttctaaattaattgtgtccacgttcatgaaaagcggggatttagaagcaatacctgccatattaacgtttctaacgaaaaaatttgacttgaatattgattacgatttgagtatgtatattctaaagggtttgaaaagacaatatttacgagatattagtaacatcagtaaagatgcttgtgagtacaagttacggaaggcggagctaatgaataatgagtcaatcttaaaaaacattccacagggtacaaatcaagagaatacaatatcccatttgatcagggagattttgatctttataaaatggaaggaaaaaagtgattgttctactttcttgatggtagaagatgcttttaaagaattaggaacagagtttactttactcgaagaattaatagaagatgtaaataagttaaagataaaagcctaa

SEQ ID NO: 8480 - DNA, 2697 bp, Artificial Sequence
  Description of Artificial Sequence: Synthetic polynucleotide
atgttcaaatacaaccgctctctctgtagcagcgctttgatagcaaagtctcagattcgtttttatagattgaagagagcgccattgaattatgcctcccatatacctgaagttcttaataagaccatcatagggccagacgaaccagaaaaatgtctcattttgaaaggaaaaacaagtgaggaaatcgaaaataatcttctcagtaataagaaatttcaggagatcaatcctcttgatactatccaggaaacgttcattcaatatttgaaattttgtaatgaaactaactttaaaagaagtaacaagaatttaaacagattaaaaaaaaccttagaaagcaaggactctaatagcaccgtaaaaattaatgcagttttcaattatttgctcgaagagtgtgatttagaaatcaaaagattgaacacgaccggccaaacccaggtatacaatgaagagaaaggaaatgaagatgacttagagcaatccataatgaacgatattttcagaagtgcacaagaacaatttgaagatcaagagggccatataccgttaaggagtacatcttttttattggagattttgaaaagttttaatgaaagatttaatggcataatcaaaccgaaagagagtataacagaaatggtcacattcagccaacttgctcaagcttttgaagttgttaaattgataccagtgcaagaaatgaaggagaaagggatttacttggtcggaaatttactttatggcacagggaaagttcgtttagatcctataaatgagagtttctatattgaatccttattggtttttggaaactataaggctgcatacagtttatttattaccaataaagacaaagtaaacgagcgctggtggaatgaattaggattaatgatcacattaaggtctaaccacttgagaaacttcaggaaacttttagccgagacagatgcaaagtactccacaaagtattcttatttgagcccaagagttaccaaattgagcataagaaaatatttgtctattggcaatgttactgaagctaatatattgactgatagatttattaagttagtggaagaagttggaataatcagaatgaaagatgagcaggaggaacttcccacgggagttaaaaattttcagaatgagaaacatgcaactgagttcttaaatgaattggaaataccaagtgatcatgattatatcagcattgttgatttccatctttataagagaaatattcccatggcggctcaacttatcagcaagtacatggaaatacctggaacgacacaagaagatgccgcatttttacttgttaaaaccaagttgaatatgttgaaagattttgaaaagttaagaaacatttttgctcaaaataaagattatgtagtgcctgagaataatgtgaaaatgttgcaagaggcatttgagagcgttattactaagtataacactaattctccaatatacaatgaattgttatttgagaatgtttctgccttaacaaaaagtattgtattaactgattttttggaagagttcattactaaacaggcttctggacagtggatggaattaaacagtgtgtctcgttccagaaagtttaatggcttgttgaacatacttctcggtacaggtgaagaagaaaaagcatataatatcttaaaaaaattagaagaagcctccaagaaatctaaaacagatccagatttactctataatcagttttattctgaagttaatgcatatcattacgctaaatttgttgaattttatagtcttcaaattcaaaatatgaaggcacaaaatacgcccagttttagaaaaaaggaatttaagcagaaagtgaagtctcttttaaaaagaatgcaggagagtgaggttatcccaaatgctgtttttttgagagaaatactcaatttttatgatagcatgtatgactttaatagtagttttgagatcatcaatccgttacttgaatccaaacaacaggtgagctctgagtcttctttatccaccagtaacccttgcagattttacaaccgtcgcatcataacaaaaccgttgtaccacaagatttggtctgtgtattgccattattatcatgttttacaaaataattctaggattttatccaaaaagtcttccattgtaaagaaattaataaaaaggcagataaagattcacccaacttgtcacccaagagtattgttccaaatgacggcagaaaatggtgaaattttgccagacaaaactttttctaaattaattgtgtccacgttcatgaaaagcggggatttagaagcaatacctgccatattaacgtttttaacgaaaaaatttgacttgaatattgattacgatttgagtatgtatattttgaagggtttgaaaagacaatatttaagagatattagtaacatcagtaaagatgcttgtgagtacaagttaagaaaggcggagttgatgaataatgagagtatcttaaaaaacattccacagggtacaaatcaagagaatacaatatcccatttgatcagggagattttgatctttataaaatggaaggaaaaaagtgattgttctactttcttgatggtagaagatgcttttaaagaattaggaacagagtttactttactcgaagaattaatagaagatgtaaataagttaaagataaaagcctga

SEQ ID NO: 8481 - DNA, 1251 bp, Saccharomyces cerevisiae
atgcctatggttaccgtgaagtataacttccaacttttcaaatgtaaagtttcgttgaattcaacactaaacgatgtgttacaccaatccatacaattctttcaactgcacacctcgtcaaacgactggtcattgatacatttggataaaccggtgccattagatttgccatggaggcttctaaacttaccaacgggtgtcaacttagaattatctaaaagtagtaattttccggtggcgaataagaccaaccgcgaagatattccattcaatacgatcaaaatacggtttcaaatcccaggaagagattccgtggttaaagaaatgccatctgaccaaccaattgcccctatcttgcgacagatgagcggcgctgcgggagatgattttaagatccaggtcttttccaagataatagagttcaaaacaattaaggatgagaatttgactctcgaaaatttagggattcaggagccttcgtcagttagattgatttttaataatacatctcattctgagggcattagcgctaatagcgctattcacccaaaacaaactccccctacgatgacgaacccggaaacggttgcttcactaccacctcacgaactacataaaccttctgtgtttttgccctcggatgagccattagcagttatcaaggatcaaatcgaggatgaagaagattatgaattgacagtagaacaagccaagaaataccaaaaaatgttatcatcgaaggctggtactttgggtggtcctattttgacaaagagacttagagagcaatcagccaacaacttgccaaagaaaaataaggctatatctgagtgtttgctgagagtcaagttccccgatagaagccatattcaaatagcattcaaacccaatgaagacatgcgtacagtttataacgtcgtgtcgcagttcctgatcgatgagaacatgccttttacgttaaaccaatctcatcctttcaaacccttggctaaagacgataagaagctactggatgacctggaatttggctctaaaacaatgctgctttttgaaacaaattcaaattctaatggcccattaataaaggctcatcttttggaagacgcacaaaaaatcacacacgaaacgaggacaaccccatcagttaatacgataaataaatccaatccacagggcccttctgataacgctacaagtatcaaaaagactttaaatagagtacctaaatggatgaaattaagtaaaaaataa

SEQ ID NO: 8482 - DNA, 1251 bp, Artificial Sequence
  Description of Artificial Sequence: Synthetic polynucleotide
atgcctatggttaccgtgaagtataacttccaacttttcaaatgtaaagtttctttgaattctacattgaacgatgtgttacaccaatccatacaattctttcaattacacacctcttccaacgactggtctttgatacatttggataaaccggtgccattagatttgccatggaggcttttgaacttaccaacgggtgtcaacttagaattatctaaaagtagtaattttccggtggcgaataagaccaaccgcgaagatattccattcaatacgatcaaaataagatttcaaatcccaggaagagattccgtggttaaagaaatgccatctgaccaaccaattgcccctatcttgagacagatgagcggcgctgcgggagatgattttaagatccaggtcttttccaagataatagagttcaaaacaattaaggatgagaatttgactctcgaaaatttagggattcaggagccttcttctgttagattgatttttaataatacatctcattctgagggcattagcgctaatagcgctattcacccaaaacaaactccccctacgatgacgaacccggaaacggttgcttctttaccacctcacgaattacataaaccttctgtgtttttgccctctgatgagccattagcagttatcaaggatcaaatcgaggatgaagaagattatgaattgacagtagaacaagccaagaaataccaaaaaatgttatcttccaaggctggtactttgggtggtcctattttgacaaagagacttagagagcaatctgccaacaacttgccaaagaaaaataaggctatatctgagtgtttgttaagagtcaagttccccgatagaagccatattcaaatagcattcaaacccaatgaagacatgcgtacagtttataacgtcgtgtcccagttcttgatcgatgagaacatgccttttacgttaaaccaatctcatcctttcaaacccttggctaaagacgataagaagttattagatgacttggaatttggctctaaaacaatgttactttttgaaacaaatagtaattctaatggcccattaataaaggctcatcttttggaagacgcacaaaaaatcacacacgaaacgaggacaaccccatctgttaatacgataaataaatccaatccacagggcccttctgataacgctacaagtatcaaaaagactttaaatagagtacctaaatggatgaaattaagtaaaaaatga

SEQ ID NO: 8483 - DNA, 1281 bp, Saccharomyces cerevisiae
atgttgaaagagccctcagttcgcttgcgggaggctattattgaaggcaatttacttatagtgaaaagattattgcgacggaatccggatttgctaaccaacatagactcagagaacggatggagttcattacattacgcctcataccatggaagataccttatatgcgtgtatttaattcagctggggcacgacaagcatgaactaataaaaacctttaaaggaaacacctgtgtgcatttagcattaatgaaagggcacgagcaaaccttacatttacttttgcaacaatttccgcgatttatcaaccatcgcggagagaatggtagagcccccatccatatagcatgtatgaacgattactaccaatgtctgagtctgttgataggagttggtgctgatttatgggtaatggacactaatggcgacacgccgctgcatgtatgcctggagtatggcagtataagttgtatgaagatgcttctcaatgaaggtgaggtgtccttggatgataatgtcagggacaagggaaattggaagccaatagatgtagcacaaacgtttgaagtaggtaatatatattcaaaagtgttaaaagaggtgaaaaagaaggggccaccgttgggtgcaggcaaaaaaccaagttcattcagaactcctatactaaatgcgaaggccactttcgaggacgggccttccccagttttaagcatgaattcgccatattcgctctattccaataatagtccgttgccggtattaccaagaaggatatcaacgcatacaacaagcggtaacggtgggaatcggaggagttctatcacaaatccagtattcaacccacgaaaaccaaccttgtctacggacagtttttcgtcaagctcaaattccagctcgagactaagagtgaactccatcaacgtcaagactccagtaggtgtgtcgcccaagaaagagcttgtatctgaatcagtacgacacagtgcaacaccaacaagtccgcacaacaacatcgcgttgattaatagatacttgttgcctaacaagagcaatgacaacgtgagaggagactcacagacagctacaatcaacgatgacggtggcggcggcaatggcggtgatgccactataggaatgggactaagaaaggacccggacgatgagaacgagaacaagtacaagattaaggtaaacaatggcgagccgaggagacgagtgtcacttctgaacatacccatctcaaaattaagaaatagcaataacacgcgtgcagaagattga

SEQ ID NO: 8484 - DNA, 1281 bp, Artificial Sequence
  Description of Artificial Sequence: Synthetic polynucleotide
atgttgaaagagccctctgttcgcttgagagaggctattattgaaggcaatttacttatagtgaaaagattattgaggagaaatccggatttgttgaccaacatagactctgagaacggatggagttctttacattacgcctcttaccatggaagataccttatatgcgtgtatttaattcagttagggcacgacaagcatgaattgataaaaacctttaaaggaaacacctgtgtgcatttagcattaatgaaagggcacgagcaaaccttacatttacttttgcaacaatttccgagatttatcaaccatcgcggagagaatggtagagcccccatccatatagcatgtatgaacgattactaccaatgtttaagtttattgataggagttggtgctgatttatgggtaatggacactaatggcgacacgccgcttcatgtatgcttagagtatggcagtataagttgtatgaagatgcttctcaatgaaggtgaggtgtccttggatgataatgtcagggacaagggaaattggaagccaatagatgtagcacaaacgtttgaagtaggtaatatatattctaaagtgttaaaagaggtgaaaaagaaggggccaccgttgggtgcaggcaaaaaaccaagttctttcagaactcctatattgaatgcgaaggccactttcgaggacgggccttccccagttttaagcatgaattctccatattccctctattccaataatagtccgttgccggtattaccaagaaggatatctacgcatacaacaagcggtaacggtgggaatagaaggagttctatcacaaatccagtattcaacccaagaaaaccaaccttgtctacggacagtttttcttctagcagtaattccagcagcagattgagagtgaactccatcaacgtcaagactccagtaggtgtgtctcccaagaaagagcttgtatctgaaagtgtaagacacagtgcaacaccaacaagtccgcacaacaacatcgcgttgattaatagatacttgttgcctaacaagagcaatgacaacgtgagaggagactctcagacagctacaatcaacgatgacggtggcggcggcaatggcggtgatgccactataggaatgggattaagaaaggacccggacgatgagaacgagaacaagtacaagattaaggtaaacaatggcgagccgaggagaagagtgtctcttttgaacatacccatctccaaattaagaaatagcaataacacgcgtgcagaagattga

SEQ ID NO: 8485 - DNA, 858 bp, Saccharomyces cerevisiae
atgcgttcttcggtatatagtgagaacacttacaactgtatacgaacatcgaaggagcacctaacagaaagaaggagggtcgccatggcgccaatgttccaacatttcttaaacttatgcgtggaaaaatttcctgaatccatcgagcacaaggatacagatggaaacggtaacttcaccaccgctattttagaaagggagattatctacatccccgaagatgacactgacagtattgacagcgttgacagcctcaagtgtataaactacaagctgcacaaatctcgcggcgaccaagtgctggacgcctgtgtgcaattgatagacaagcacctgggcgccaagtatcgccgggcctcgcgcattatgtacggcaacaggaaaccatggaaggcaaacaaactcgcagagatgaaaagcgccggccttgtgtatgtctgttactgggacaacggcgtgctaggtgcatttacttcattcatgcttacagaggagacgggtctcgtcgaaggtgacgctttacacgaggttagcgtgcccgtgatatacctttacgaagtacatgtagctagcgcgcaccgcgggcatggaatcggtcggcggctactggagcatgcactgtgcgatggcgtagctcgacacacccgccgcatgtgcgacaatttcttcggtgtagcactcaccgtattcagtgataacactcgggcccggcgactatatgaggcgcttgggttctaccgcgctccgggatcacccgcaccagcatcacccacaattcgtcacacgcgacatggtgggggacgtgtagtcgtgccctgcgatccgctttattacgtatattgccttcacatgccgtga

SEQ ID NO: 8486 - DNA, 858 bp, Artificial Sequence
  Description of Artificial Sequence: Synthetic polynucleotide
atgcgttcttctgtatatagtgagaacacttacaactgtataagaacatccaaggagcacttgacagaaagaaggagggtcgccatggcgccaatgttccaacatttcttaaacttatgcgtggaaaaatttcctgaatccatcgagcacaaggatacagatggaaacggtaacttcaccaccgctattttagaaagggagattatctacatccccgaagatgacactgacagtattgacagcgttgacagcctcaagtgtataaactacaagttgcacaaatctcgcggcgaccaagtgcttgacgcctgtgtgcaattgatagacaagcacttgggcgccaagtatcgccgtgcctctcgcattatgtacggcaacaggaaaccatggaaggcaaacaaactcgcagagatgaaaagcgccggccttgtgtatgtctgttactgggacaacggcgtgttgggtgcatttacttctttcatgcttacagaggagacgggtctcgtcgaaggtgacgctttacacgaggttagcgtgcccgtgatatacctttacgaagtacatgtagctagcgcgcaccgcgggcatggaatcggtagaagattattggagcatgcattatgcgatggcgtagctagacacacccgccgcatgtgcgacaatttcttcggtgtagcactcaccgtattcagtgataacactagagcccgtcgtttatatgaggcgcttgggttctaccgcgctccgggaagtcccgcaccagcatctcccacaattcgtcacacgaggcatggtgggggacgtgtagtcgtgccctgcgatccgctttattacgtatattgccttcacatgccgtga

SEQ ID NO: 8487 - DNA, 1473 bp, Saccharomyces cerevisiae
atgaatgcggaccatcacctgcaacagcagcagcaacagcgacaacagcatcaacaacaacagcatcaacaacaacagcatcagcatcagcatcaacagcagcagcacacgatattacaaaatgtgtcgaacactaacaatatcggcagcgattcgctggcgtcacagcctttcaacacgactactgtttcctctaacaaggacgacgttatggtgaactctggggcaagagaacttccaatgcccttacatcagcagcagtatatatacccttactatcagtatacaagtaataacagtaacaacaataatgtgacggctggtaacaatatgtctgcgtcgccgattgtccataacaacagcaacaacagcaacaacagcaatatttctgcttctgattacactgtcgcaaacaacagtactagcaataataacaataataataataataacaacaataataacaataatattcacccaaaccagtttactgcggccgcaaatatgaactcaaatgctgcagcggctgcttattactccttccccactgcgaatatgccaataccgcaacaggatcaacaatatatgttcaatcctgcttcatacataagccattactattcagcagttaacagcaataacaatggtaataacgccgctaacaatggcagcaacaactcttctcactcagccccagccccggcccccggtccaccccatcaccatcaccatcatagtaatacacacaacaacctcaacaatggtggtgctgtaaatacaaacaacgctcctcagcaccatccaacgataataacggatcaatttcaattccaactacaacaaaacccttctccaaatttgaatctcaatattaacccggcacaacctctgcatctacctcctggttggaaaataaacactatgccgcaaccacgtcctacgacagcacctaaccatccccctgcgccggtgccttcttcgaaccctgtggcctcgaacttggttcctgccccatcatcagaccataaatatatccatcaatgccaattttgtgagaagtctttcaaaagaaaatcatggttgaaaaggcacctattgtcacactcgcaacaaagacattttctatgcccttggtgcttaagcaggcagaagagaaaagataatcttttacagcatatgaaactcaagcatacaaattatttattagacgaactcaagaaaaacaacatcatctttaactacaacaattcttcctcctctaataataacaacgacaataataataataataacagcaatagcgctagcggcagtggcggtgccggtgccgcggcggcagcagcaacagctcccgaaaatgaagatggaaacggttacgatacaaacatcaagactttaatcaatgatggtgtactgaataaggacgacgttaaacgtgttttgaataaccttattgttagtcacaacaaatag

SEQ ID NO: 8488 - DNA, 1473 bp, Artificial Sequence
  Description of Artificial Sequence: Synthetic polynucleotide
atgaatgcggaccatcacttgcaacagcagcagcaacagagacaacagcatcaacaacaacagcatcaacaacaacagcatcagcatcagcatcaacagcagcagcacacgatattacaaaatgtgtctaacactaacaatatcggcagcgattctttagcgtctcagcctttcaacacgactactgtttcctctaacaaggacgacgttatggtgaactctggggcaagagaacttccaatgcccttacatcagcagcagtatatatacccttactatcagtatacaagtaataacagtaacaacaataatgtgacggctggtaacaatatgtctgcgtccccgattgtccataacaacagcaacaacagcaacaacagcaatatttctgcttctgattacactgtcgcaaacaacagtactagcaataataacaataataataataataacaacaataataacaataatattcacccaaaccagtttactgcggccgcaaatatgaacagtaatgctgcagcggctgcttattactccttccccactgcgaatatgccaataccgcaacaggatcaacaatatatgttcaatcctgcttcttacataagccattactattctgcagttaacagcaataacaatggtaataacgccgctaacaatggcagcaacaactcttctcactccgccccagccccggcccccggtccaccccatcaccatcaccatcatagtaatacacacaacaacctcaacaatggtggtgctgtaaatacaaacaacgctcctcagcaccatccaacgataataacggatcaatttcaattccaattacaacaaaacccttctccaaatttgaatctcaatattaacccggcacaacctttgcatttacctcctggttggaaaataaacactatgccgcaaccacgtcctacgacagcacctaaccatccccctgcgccggtgccttcttccaaccctgtggcctccaacttggttcctgccccatcttctgaccataaatatatccatcaatgccaattttgtgagaagtctttcaaaagaaaaagttggttgaaaaggcacttattgtctcactctcaacaaagacattttttatgcccttggtgcttaagcaggcagaagagaaaagataatcttttacagcatatgaaactcaagcatacaaattatttattagacgaactcaagaaaaacaacatcatctttaactacaacaattcttcctcctctaataataacaacgacaataataataataataacagcaatagcgctagcggcagtggcggtgccggtgccgcggcggcagcagcaacagctcccgaaaatgaagatggaaacggttacgatacaaacatcaagactttaatcaatgatggtgtattgaataaggacgacgttaaacgtgttttgaataaccttattgttagtcacaacaaatga

SEQ ID NO: 8489 - DNA, 504 bp, Saccharomyces cerevisiae
atggctttaagtttaggacagttcatcaatgtgggtggtatggtgaaggatttgaaaagtttcaactttagcgtatatggtagatggtttggatatatcaacataatcttgtgtattgcactcgggatagcgaatctgttccacgttagtggggtgatagcttttggtatcattagtataatccaagggttagtgatcctattcattgaaataccatttttgttgaaaatctgtccccttagcgataatttcattgaattcatcaagagatttgaaacaaatggatggagatgtcttttctatctagcaatggcgataatccagtatatttccattgcagtgatggctacgagtctaattgtggtagctgtcgggctaacgatatcgtcaatcagttatgcggtagcatatactaaacaccaagagttccagaatacgaacattatcaaaaatcctacagatgacgatttccctcacgaggccgttgttagagagatgttgtaa

SEQ ID NO: 8490 - DNA, 504 bp, Artificial Sequence
  Description of Artificial Sequence: Synthetic polynucleotide
atggctttaagtttaggacagttcatcaatgtgggtggtatggtgaaggatttgaaaagtttcaactttagcgtatatggtagatggtttggatatatcaacataatcttgtgtattgcactcgggatagcgaatttattccacgttagtggggtgatagcttttggtatcattagtataatccaagggttagtgatcttattcattgaaataccatttttgttgaaaatctgtccccttagcgataatttcattgaattcatcaagagatttgaaacaaatggatggagatgtcttttctatttggcaatggcgataatccagtatatttccattgcagtgatggctacgagtttgattgtggtagctgtcgggcttacgatatcttctatcagttatgcggtagcatatactaaacaccaagagttccagaatacgaacattatcaaaaatcctacagatgacgatttccctcacgaggccgttgttagagagatgttgtga

SEQ ID NO: 8491 - DNA, 552 bp, Saccharomyces cerevisiae
atgaacagttacagcctattaactagatctttccacgaatcttctaagccccttttcaatttggctagcaccttgttgaaggcttccaagagaacgcagcttagaaatgaattgataaaacagggtcctaaaaggcccacatctgcttatttcttatatttgcaagaccacagaagtcaattcgttaaggaaaatccaaccttacgtcctgctgaaatcagcaagattgccggtgaaaagtggcaaaatttagaggctgatataaaggaaaaatacatttctgaaagaaaaaagttgtattctgaataccaaaaggcgaagaaggagtttgacgaaaaacttcctccaaagaaaccagcaggacccttcattaagtatgccaatgaagttcgttcgcaagtttttgcacaacatcctgacaagtctcaattggatctaatgaaaattatcggagataaatggcaatccttggatcaaagcattaaggacaaatacatacaagagtacaaaaaagctatccaagaatataatgctcgctaccctctcaactag

SEQ ID NO: 8492 - DNA, 552 bp, Artificial Sequence
  Description of Artificial Sequence: Synthetic polynucleotide
atgaacagttacagcttattaactagatctttccacgaatcttctaagccccttttcaatttggctagcaccttgttgaaggcttccaagagaacgcagcttagaaatgaattgataaaacagggtcctaaaaggcccacatctgcttatttcttatatttgcaagaccacagaagtcaattcgttaaggaaaatccaaccttacgtcctgctgaaatcagcaagattgccggtgaaaagtggcaaaatttagaggctgatataaaggaaaaatacatttctgaaagaaaaaagttgtattctgaataccaaaaggcgaagaaggagtttgacgaaaaacttcctccaaagaaaccagcaggacccttcattaagtatgccaatgaagttcgttctcaagtttttgcacaacatcctgacaagtctcaattggatttgatgaaaattatcggagataaatggcaatccttggatcaaagcattaaggacaaatacatacaagagtacaaaaaagctatccaagaatataatgctcgctaccctctcaactga

SEQ ID NO: 8493 - DNA, 606 bp, Saccharomyces cerevisiae
atgagtagtgacggcatgaacagagatgtttcaaactcgaaaccaaatgtcagattcgctgctcctcagcgactaagcgttgctcatcctgccatatcatccccgctgcatatgcccatgtcgaagtcgtcaagaaagcctcttgtaagaaccaaaataagactagatcctgggcacagtgctctggactggcactctctaacctccaatccagcgaattattatacaaaattcgtttcgctacagcttatccaggatttactcgatgatccggtatttcaaaaagataacttcaagttttcaccttcacaactgaagaaccaattgcttgtccaaaagatacccctttataaaataatgccacccttaagaataaacagaaaaatcgtaaagaagcattgtaaaggtgaggacgagttatggtgcgttataaacggcaaagtctatgacatttctagttatttgaagttccatccaggtggtacggacatcttaataaagcaccgtaatagtgacgatttgattacatattttaataagtatcatcaatgggttaactatgaaaaattattacaggtttgtttcattggcgttgtatgcgaataa

SEQ ID NO: 8494 - DNA, 606 bp, Artificial Sequence
  Description of Artificial Sequence: Synthetic polynucleotide
atgagtagtgacggcatgaacagagatgtttctaactccaaaccaaatgtcagattcgctgctcctcagaggttgagcgttgctcatcctgccatatcttccccgcttcatatgcccatgtccaagagtagtagaaagcctcttgtaagaaccaaaataagattagatcctgggcacagtgctttggactggcactctttaacctccaatccagcgaattattatacaaaattcgtttctttgcagcttatccaggatttactcgatgatccggtatttcaaaaagataacttcaagttttctccttctcaattgaagaaccaattgcttgtccaaaagatacccctttataaaataatgccacccttaagaataaacagaaaaatcgtaaagaagcattgtaaaggtgaggacgagttatggtgcgttataaacggcaaagtctatgacatttctagttatttgaagttccatccaggtggtacggacatcttaataaagcaccgtaatagtgacgatttgattacatattttaataagtatcatcaatgggttaactatgaaaaattattacaggtttgtttcattggcgttgtatgcgaatga

SEQ ID NO: 8495 - DNA, 438 bp, Saccharomyces cerevisiae
atggacccagagttacaagctattagggaagccagattggctcagttgaaaaacaacagtgggggtaccaacggcgatagaaatagcggtgctaataatggtggaggtgaaaattccgctcccgttggtgcagctattgcaaatttcttggagccacaagctttagaaagattatctcgagtggccttggtccgtagagacagggcccaagcagtagagacatacttaaagaaactgattgctacaaacaacgtcactcataaaatcactgaagctgaaattgtttcaatcttgaatggtatcgccaagcaacaaaattcacaaaataacagtaagattatcttcgaacggaaagatttcagcgaagatctgaattcatttgacaagcagaatgctaaaaatgatgacgacgaagatgatgacgacttctttgattag

SEQ ID NO: 8496 - DNA, 438 bp, Artificial Sequence
  Description of Artificial Sequence: Synthetic polynucleotide
atggacccagagttacaagctattagggaagccagattggctcagttgaaaaacaacagtgggggtaccaacggcgatagaaatagcggtgctaataatggtggaggtgaaaattccgctcccgttggtgcagctattgcaaatttcttggagccacaagctttagaaagattatctcgtgtggccttggtccgtagagacagggcccaagcagtagagacatacttaaagaaattgattgctacaaacaacgtcactcataaaatcactgaagctgaaattgtttccatcttgaatggtatcgccaagcaacaaaattctcaaaataacagtaagattatcttcgaaagaaaagatttcagcgaagatttgaattcttttgacaagcagaatgctaaaaatgatgacgacgaagatgatgacgacttctttgattga

SEQ ID NO: 8497 - DNA, 2055 bp, Saccharomyces cerevisiae
atggacaccagcaagaaagatactactaggtcgccctcacattccaacagttcttctccttcatcttcttctctctcttcatcttcttccaaagagaaaaaacgtcctaagagactatcctcccagaatgtaaattacgatttgaaaaggagaaagatcatcacttctgaaggtatagaaagatcattcaagaacgagcatagcaatcttgcagttgaagacaatatcccggaagaagaacccaaggaacttcttgaaaaggactccaagggtaatatcatcaaacttaatgagccatccaccatctcggaagattcgaaggtatctgtcactggattgccgttaaataaaggtccttctgagaaaatcaagcgagagtctctttggaattatagaaaaaatttgggaggccaatcgaacaactcagaaatgacgctggtccccagtaaaagatttactcaggtgccgaaaaattttcaggatttgaacagaaatgatttgaaaacgtttttaactgagaacatgactgaagagagcaatatacggtcaactattggttggaatggcgatataataaacagaactcgtgaccgtgaacctgaaagcgaccgcgataataaaaagctatcaaatattagaaccaaaataatactttcaacgaatgctacctatgattcaaaaagtaaactatttggccaaaattccatcaagtcaacatcgaatgcgagtgaaaaaattttcagggacaagaacaattcaaccatagattttgagaatgaagatttttgttcggcttgtaatcagtcaggttcttttttatgctgtgatacatgccccaaatcctttcactttctttgcttagacccaccaattgatccgaacaacctgcctaaaggtgattggcattgtaatgaatgtaagtttaaaatcttcataaataactcaatggcaactttaaaaaaaattgaatccaacttcattaagcaaaataacaacgtcaagatttttgctaaattacttttcaatatcgattcccacaacccaaaacagttccagctaccaaattatataaaagaaacctttcctgctgtgaaaacgggttcgagaggacaatactctgatgagaatgataagattccattaactgatagacaattgtttaacacttcttatggccaaagcataactaaattggactcttacaacccggatacacatatagattcaaattcaggtaagtttttaatttgttacaaatgcaatcaaaccagactaggttcatggtctcatccagaaaattcaagattaataatgacttgtgattattgtcagactccatggcatttggattgtgtaccgagggcttctttcaagaacttaggttcaaaatggaaatgtcctctacattccccaactaaagtttacaaaaagatacaccattgtcaagaagataatagcgtaaattataaggtgtggaaaaaacaacgattgataaacaagaaaaaccaactttattatgaacctttacaaaaaataggctaccaaaataacgggaacattcaaatcataccaacaactagtcatacagattatgatttcaatcaagatttcaaaattacacaaatagatgaaaattccattaaatatgatttttttgataaaatttacaaatcaaaaatggttcaaaaaagaaaactctttcaatttcaagaaagtttaatagataagttagtatcaaatggatcccaaaatggcaatagcgaggataatatggtcaaagacatagcctctttaatatatttccaagttagcaacaacgacaagagtagtaacaataaatcggcttccaaaagcaataacttaagaaaattatgggatttgaaagaactgactaacgtagtcgtgccgaacgaactagattctatacaattcaatgacttttccagcgatgaaataaagcatctgttatatttaaagaagattatcgaatccaaaccaaaggaagaactgttaaaatttttaaacatagaaaatcccgaaaaccaatccgaatag

SEQ ID NO: 8498 - DNA, 2055 bp, Artificial Sequence
  Description of Artificial Sequence: Synthetic polynucleotide
atggacaccagcaagaaagatactactaggtctccctctcattccaacagttcttctccttcttcttcttctctctcttcttcttcttccaaagagaaaaaacgtcctaagagattatcctcccagaatgtaaattacgatttgaaaaggagaaagatcatcacttctgaaggtatagaaagatctttcaagaacgagcatagcaatcttgcagttgaagacaatatcccggaagaagaacccaaggaacttcttgaaaaggactccaagggtaatatcatcaaacttaatgagccatccaccatcagtgaagattctaaggtatctgtcactggattgccgttaaataaaggtccttctgagaaaatcaagagagagtctctttggaattatagaaaaaatttgggaggccaaagtaacaactctgaaatgacgttagtccccagtaaaagatttactcaggtgccgaaaaattttcaggatttgaacagaaatgatttgaaaacgtttttaactgagaacatgactgaagagagcaatataagatctactattggttggaatggcgatataataaacagaactcgtgaccgtgaacctgaaagcgaccgcgataataaaaagttatccaatattagaaccaaaataatactttctacgaatgctacctatgattctaaaagtaaattatttggccaaaattccatcaagagtacaagtaatgcgagtgaaaaaattttcagggacaagaacaattctaccatagattttgagaatgaagatttttgttctgcttgtaatcagtctggttcttttttatgctgtgatacatgccccaaatcctttcactttctttgcttagacccaccaattgatccgaacaacttgcctaaaggtgattggcattgtaatgaatgtaagtttaaaatcttcataaataactccatggcaactttaaaaaaaattgaatccaacttcattaagcaaaataacaacgtcaagatttttgctaaattacttttcaatatcgattcccacaacccaaaacagttccagttaccaaattatataaaagaaacctttcctgctgtgaaaacgggttccagaggacaatactctgatgagaatgataagattccattaactgatagacaattgtttaacacttcttatggccaaagcataactaaattggactcttacaacccggatacacatatagattctaattctggtaagtttttaatttgttacaaatgcaatcaaaccagattaggttcttggtctcatccagaaaattctagattaataatgacttgtgattattgtcagactccatggcatttggattgtgtaccgagggcttctttcaagaacttaggttccaaatggaaatgtcctttgcattccccaactaaagtttacaaaaagatacaccattgtcaagaagataatagcgtaaattataaggtgtggaaaaaacaaagattgataaacaagaaaaaccaactttattatgaacctttacaaaaaataggctaccaaaataacgggaacattcaaatcataccaacaactagtcatacagattatgatttcaatcaagatttcaaaattacacaaatagatgaaaattccattaaatatgatttttttgataaaatttacaaatctaaaatggttcaaaaaagaaaactctttcaatttcaagaaagtttaatagataagttagtatctaatggatcccaaaatggcaatagcgaggataatatggtcaaagacatagcctctttaatatatttccaagttagcaacaacgacaagagtagtaacaataaatctgcttccaaaagcaataacttaagaaaattatgggatttgaaagaattgactaacgtagtcgtgccgaacgaattagattctatacaattcaatgacttttccagcgatgaaataaagcatcttttatatttaaagaagattatcgaatccaaaccaaaggaagaattattaaaatttttaaacatagaaaatcccgaaaaccaatccgaatga

SEQ ID NO: 8499 - DNA, 366 bp, Saccharomyces cerevisiae
atgtatgtacgccgtttctattcggattggttttcgggattttctatgtttaaaaattttaacagttcttcctttggtttggattcgataatcttctttaaatataacagatgctttatttcatcgctggaaaagtcattgaattgtatagaatctagttcgttcggcacgactacgttagtcagttctttcaaatcccataattttcttaagttattgcttttggaagccgatttattgttactactcttgtcgttgttgctaacttggaaatatattaaagaggctatgtctttgaccatattatcctcgctattgccattttgggatccatttgatactaacttatctattaaactttcttga

SEQ ID NO: 8500 - DNA, 366 bp, Artificial Sequence
  Description of Artificial Sequence: Synthetic polynucleotide
atgtatgtacgccgtttctattctgattggttttctggattttctatgtttaaaaattttaacagttcttcctttggtttggattctataatcttctttaaatataacagatgctttatttcttctttggaaaagtctttgaattgtatagaatctagttctttcggcacgactacgttagtcagttctttcaaatcccataattttcttaagttattgcttttggaagccgatttattgttacttctcttgtctttgttgttgacttggaaatatattaaagaggctatgtctttgaccatattatcctctttgttgccattttgggatccatttgatactaacttatctattaaactttcttga

SEQ ID NO: 8501 - DNA, 3834 bp, Saccharomyces cerevisiae
atggctaaaggtgctgttactaaactgaagtttaactcacctataatatctacctccgatcagctgatatcaacaaatgaactattagatcgtttaaaagctttacatgaggaattagcctctctggatcaagacaatacagatttaacgggattagataaatatagggacgcactagttagcagaaaattattaaaacataaagacgtggggatccgcgctttcaccgcttgttgtctaagcgatatcctgagattatatgctccagatgcgccttatacggatgctcaactaacggacattttcaagctggtgctctcacaatttgaacaattaggtgaccaagaaaacggctatcacatccaacaaacttatttgatcactaagctactagaatacagatcaatcgtattattagccgatttacctagttcaaacaatttacttatcgaactattccatattttttacgatcctaacaagagcttccccgcaaggctcttcaatgtaataggcggtattctcggtgaagtcatctctgagttcgattctgttcccctagaagtactaagattaatttttaataagtttttgacctataacccgaatgaaattcctgaaggtttgaacgttacttctgactgtggctacgaagttagtctaattttgtgtgatacttattccaatagaatgagtagacatctaactaaatactattccgagattattcatgaagcaactaatgatgacaataattcaagacttctcactgtggtagtgaaattacataaactggtattgagactttgggaaacagtacccgaactgatcaatgcagtaatcggatttatataccacgaattatcttcggaaaacgagcttttcagaaaagaagctacaaaattaattggtcaaatacttacctcatattcggatttaaattttgtttctacacattccgatacgttcaaggcatggatttccaaaattgctgatattagtcccgatgttagagtagaatggacagaatcaattcctcaaatcattgccacgagagaagacatatccaaagaactgaatcaggcactggcaaaaacctttattgattctgatcctcgtgtacgcaggacttctgttatgatttttaataaagttcccgttactgaaatttggaaaaatataaccaataaagccatttatacatctttacttcatttggcccgagaaaaacataaggaggttagggaactctgcattaacactatggccaagttttactcaaattcattgaatgagatcgaaaggacataccaaaataaagaaatttgggaaatcatagacaccataccatccactttatacaatctctattatatcaatgatttaaacatcaatgaacaagtcgacagcgtaattttcgaatacctactaccgtttgaaccagataacgataaaagagtccacagactgctaacggttttgtcacattttgataagaaggcattcacttcatttttcgctttcaatgcaagacaaatcaaaatatccttcgctatatccaaatatattgattttagtaaatttttgaacaatcaagaaagtatgagctcgtctcaaggtcctattgtaatgaacaagtacaaccaaactctccagtggttagcttctggcctttctgactctacgaaagcaatcgacgccctcgaaacaataaaacaatttaacgacgaaagaatcttttatttattaaatgcctgtgtcaccaacgatattccgtttcttacttttaaaaattgttacaatgaattggtcagtaagttacaaacgccaggactatttaaaaaatataatatatctactggtgcttccattatgccacgtgatatcgccaaggtaatacaaattttgctttttagagcctcaccaataatttataatgtatccaacatcagtgttttattgaacctatctaataattctgacgcaaaacaattggatttgaaaagaagaatcttggatgatatatcgaaagtcaatcccacattatttaaagatcagattagaacattaaaaaccattatcaaggatttggatgatccagatgcagaaaaaaatgataacttgtcattggaagaagctttaaaaaccctttacaaggcttccaaaacattaaaggatcaagtggattttgacgacacgtttttcttcaccaaattatacgattttgcagttgaaagtaaaccagaaataacgaaatacgccacaaaacttatcgctttatcgcccaaagctgaagaaactctgaaaaagataaaaatacgtatcctacctttagatttgcaaaaagacaagtattttacatctcatattattgtactcatggaaatatttaaaaaattccctcacgtcctaaatgatgattccactgatatcatatcatacctaattaaagaagttctattatcaaaccaggtcgttggtgattcaaaaaaagaaattgactgggtagaagattctctattaagtgacacgaaatattctgcaataggtaataaggtgtttactttaaagctgttcaccaacaaattgagatcaattgctccggatgttccacgagatgaattggcagaaagtttcaccgaaaaaactatgaagttattcttttacttgattgcaagtggtggtgagctgatttccgagtttaacaaggagttttatcccacccccagtaattatcaaacaaaattgaggtgtgtggcaggaattcaagttttaaaactggccaggatttctaatttgaacaactttatcaaaccttcggacattattaaattaattaatttggttgaagatgaatcgctgccagtaagaaaaacatttttggaacaactgaaagattatgttgctaatgaactgatttccataaagttcctaccactagtattttttactgcttatgaaccagatgtcgaactgaaaaccacaacgaagatatggataaactttacatttggcttaaaatcatttaaaaaagggacgatatttgaaagagctttgcctaggttgatacatgcgattgcacatcaccctgatattgtgggaggtttagattccgaaggagacgcatatctaaatgctttaacaacagcgattgattatttgctgttttactttgactctattgccgcccaagagaacttcagtttgctctattatttatcagaaagggtaaaaaactatcaagataagttagttgaggatgaaattgatgaagaagaaggaccacaaaaagaagaagcgccaaagaagcatagaccttacggtcagaaaatgtatatcataggtgagctgtcgcaaatgattctattgaatttaaaagagaagaaaaattggcaacattcagcatatccaggtaaattaaacttaccatcagatttgttcaaaccttttgcaacggttcaggaggcccagttatctttcaaaacatacataccagagagcttgactgaaaaaatacaaaacaatataaaagctaaaatcggacggattcttcacacgtcacaaactcaaagacaaaggcttcaaaagaggttattagctcacgaaaacaatgaatcacaaaaaaaaaagaagaaagttcatcatgcgagatcacaggctgacgacgaagaaggtgatggggatcgagaatcagacagtgatgatgacagttattcaccgtctaacaaaaatgaaaccaagaaagggcacgaaaatattgtgatgaagaaattgagggtcaggaaagaagttgactacaaagacgatgaagatgatgacatcgagatgacttag

SEQ ID NO: 8502 - DNA, 3834 bp, Artificial Sequence
  Description of Artificial Sequence: Synthetic polynucleotide
atggctaaaggtgctgttactaaattgaagtttaactctcctataatatctacctccgatcagttgatatctacaaatgaattattagatcgtttaaaagctttacatgaggaattagcctctttagatcaagacaatacagatttaacgggattagataaatatagggacgcattggttagcagaaaattattaaaacataaagacgtggggatccgcgctttcaccgcttgttgtttgagcgatatcttaagattatatgctccagatgcgccttatacggatgctcaattaacggacattttcaagttagtgctctctcaatttgaacaattaggtgaccaagaaaacggctatcacatccaacaaacttatttgatcactaagttattggaatacagatctatcgtattattagccgatttacctagtagtaacaatttacttatcgaattattccatattttttacgatcctaacaagagcttccccgcaaggctcttcaatgtaataggcggtattctcggtgaagtcatctctgagttcgattctgttcccttagaagtattaagattaatttttaataagtttttgacctataacccgaatgaaattcctgaaggtttgaacgttacttctgactgtggctacgaagttagtttgattttgtgtgatacttattccaatagaatgagtagacatttgactaaatactattccgagattattcatgaagcaactaatgatgacaataattctagacttctcactgtggtagtgaaattacataaattagtattgagactttgggaaacagtacccgaattgatcaatgcagtaatcggatttatataccacgaattatcttctgaaaacgagcttttcagaaaagaagctacaaaattaattggtcaaatacttacctcttattctgatttaaattttgtttctacacattccgatacgttcaaggcatggatttccaaaattgctgatattagtcccgatgttagagtagaatggacagaaagtattcctcaaatcattgccacgagagaagacatatccaaagaattgaatcaggcattggcaaaaacctttattgattctgatcctcgtgtacgcaggacttctgttatgatttttaataaagttcccgttactgaaatttggaaaaatataaccaataaagccatttatacatctttacttcatttggccagagaaaaacataaggaggttagggaactctgcattaacactatggccaagttttactctaattctttgaatgagatcgaaaggacataccaaaataaagaaatttgggaaatcatagacaccataccatccactttatacaatctctattatatcaatgatttaaacatcaatgaacaagtcgacagcgtaattttcgaatacttgttaccgtttgaaccagataacgataaaagagtccacagattattgacggttttgtctcattttgataagaaggcattcacttcttttttcgctttcaatgcaagacaaatcaaaatatccttcgctatatccaaatatattgattttagtaaatttttgaacaatcaagaaagtatgagctcttctcaaggtcctattgtaatgaacaagtacaaccaaactctccagtggttagcttctggcctttctgactctacgaaagcaatcgacgccctcgaaacaataaaacaatttaacgacgaaagaatcttttatttattaaatgcctgtgtcaccaacgatattccgtttcttacttttaaaaattgttacaatgaattggtcagtaagttacaaacgccaggattatttaaaaaatataatatatctactggtgcttccattatgccacgtgatatcgccaaggtaatacaaattttgctttttagagcctctccaataatttataatgtatccaacatcagtgttttattgaacttatctaataattctgacgcaaaacaattggatttgaaaagaagaatcttggatgatatatccaaagtcaatcccacattatttaaagatcagattagaacattaaaaaccattatcaaggatttggatgatccagatgcagaaaaaaatgataacttgtctttggaagaagctttaaaaaccctttacaaggcttccaaaacattaaaggatcaagtggattttgacgacacgtttttcttcaccaaattatacgattttgcagttgaaagtaaaccagaaataacgaaatacgccacaaaacttatcgctttatctcccaaagctgaagaaactttgaaaaagataaaaatacgtatcttacctttagatttgcaaaaagacaagtattttacatctcatattattgtactcatggaaatatttaaaaaattccctcacgtcttgaatgatgattccactgatatcatatcttacttgattaaagaagttttattatctaaccaggtcgttggtgattctaaaaaagaaattgactgggtagaagattctttattaagtgacacgaaatattctgcaataggtaataaggtgtttactttaaagcttttcaccaacaaattgagatctattgctccggatgttccaagagatgaattggcagaaagtttcaccgaaaaaactatgaagttattcttttacttgattgcaagtggtggtgagttgatttccgagtttaacaaggagttttatcccacccccagtaattatcaaacaaaattgaggtgtgtggcaggaattcaagttttaaaattggccaggatttctaatttgaacaactttatcaaaccttctgacattattaaattaattaatttggttgaagatgaatctttaccagtaagaaaaacatttttggaacaattgaaagattatgttgctaatgaattgatttccataaagttcttaccattagtattttttactgcttatgaaccagatgtcgaattgaaaaccacaacgaagatatggataaactttacatttggcttaaaaagttttaaaaaagggacgatatttgaaagagctttgcctaggttgatacatgcgattgcacatcaccctgatattgtgggaggtttagattccgaaggagacgcatatttgaatgctttaacaacagcgattgattatttgttattttactttgactctattgccgcccaagagaacttcagtttgctctattatttatctgaaagggtaaaaaactatcaagataagttagttgaggatgaaattgatgaagaagaaggaccacaaaaagaagaagcgccaaagaagcatagaccttacggtcagaaaatgtatatcataggtgagttatctcaaatgattttattgaatttaaaagagaagaaaaattggcaacattctgcatatccaggtaaattaaacttaccaagtgatttgttcaaaccttttgcaacggttcaggaggcccagttatctttcaaaacatacataccagagagcttgactgaaaaaatacaaaacaatataaaagctaaaatcggaagaattcttcacacgtctcaaactcaaagacaaaggcttcaaaagaggttattagctcacgaaaacaatgaatctcaaaaaaaaaagaagaaagttcatcatgcgagaagccaggctgacgacgaagaaggtgatggggatagagaaagtgacagtgatgatgacagttattctccgtctaacaaaaatgaaaccaagaaagggcacgaaaatattgtgatgaagaaattgagggtcaggaaagaagttgactacaaagacgatgaagatgatgacatcgagatgacttga

SEQ ID NO: 8503 - DNA, 666 bp, Saccharomyces cerevisiae
atgggccaaaaaagtagtaaagtgcatataaccaaaacagatagggcgatcctagaagtaaaacgatctaaagatgaaattcataagtttacgaggaggacagataatttgattttggtagagaagagtcaactaaaagacctaatacgaaaaaatcctgaaaattataaatctaacatgaaggtacgatttctactaaaaagaattcattatcaggagcatttgttgcagcaggcttcggatcagcttattaatttggaaaatatggtgtcaacacttgagttcaaaatggtagaaaagcaatttattaatggactgaaaaatggaaatgaaatcttgaaaaaactaaacaaggaatttagcaatgttgatgaactgatggacgatgtacaagatcaaattgcgtatcaaaatgaaattaacgagacattatctagaagcttagtcggaacaagcaattatgaagacgatctagataaggaattggatgctctagaaagtgaactcaatccagagaagatgaataacgcaaaagtagctaacatgccatcaacagaaggtttgccatcattgcctcaaggagaacaaaccgagcaaaaagaaagagaggaattcgcgacggaggagagatcagacactaaggaacctttagcattactatcctga

SEQ ID NO: 8504 - DNA, 666 bp, Artificial Sequence
  Description of Artificial Sequence: Synthetic polynucleotide
atgggccaaaaaagtagtaaagtgcatataaccaaaacagatagggcgatcttggaagtaaaaagatctaaagatgaaattcataagtttacgaggaggacagataatttgattttggtagagaagagtcaattgaaagacttgataagaaaaaatcctgaaaattataaatctaacatgaaggtaagatttttattgaaaagaattcattatcaggagcatttgttgcagcaggcttctgatcagcttattaatttggaaaatatggtgtctacacttgagttcaaaatggtagaaaagcaatttattaatggattgaaaaatggaaatgaaatcttgaaaaaattgaacaaggaatttagcaatgttgatgaattgatggacgatgtacaagatcaaattgcgtatcaaaatgaaattaacgagacattatctagaagcttagtcggaacaagcaattatgaagacgatttggataaggaattggatgctttggaaagtgaactcaatccagagaagatgaataacgcaaaagtagctaacatgccatctacagaaggtttgccatctttgcctcaaggagaacaaaccgagcaaaaagaaagagaggaattcgcgacggaggagagaagtgacactaaggaacctttagcattattatcctga

SEQ ID NO: 8505 - DNA, 2226 bp, Saccharomyces cerevisiae
atggttgataccgcaccatacattggttcactagggagaagttccctttttgatactggtgatatagaacaagcccctggtaataatgcaattggtattaatgaggaagatattcacgcgtttgtatcaagtactggcgaaacggttcaattaaagaagaagcctgcgaagttagcaaccgggaatattagtctatacactaacccagatactgtttggagatcagacgacacgtacggcatcaatataaactatttgttagacaaaattgaggcatctggcgatgaccgcactaacgcacaaaagacttcacctataactggcaagataggtagcgacacactctgggtagagaaatggcgtcctaaaaaatttctagatttggttggtaatgaaaagacaaacaggagaatgttaggttggttgagacaatggacgccggctgtgtttaaagagcaattacccaaattgccaaccgaaaaagaggtcagtgatatggaactcgatccattgaaaaggccaccaaagaaaattttactactgcacgggccaccaggaataggcaaaacctcagtagctcacgttattgccaaacaatcagggttttctgtctcagaaatcaatgcaagtgatgaaagggctggacctatggtaaaagagaaaatatataatcttttattcaatcatactttcgatacaaatcctgtgtgcttagtggcggatgagattgatggaagtattgagagtggatttattagaattttagttgacattatgcaaagcgatattaaagccactaataaactattatacggtcaaccagataaaaaggacaaaaagcgcaaaaagaaaaggtctaaattgcttacgcgacctattatttgtatttgcaataatctatatgctccttctttggaaaagctgaaaccattctgtgaaattattgctgtgaaaagaccttccgatactaccctactagagcgattgaaccttatctgccataaagaaaacatgaatattcctataaaagcaatcaatgacttaattgatttggctcaaggtgacgtaaggaattgtataaacaatttacaattcttggcctcgaatgttgattcaagagattcctctgcatcagataaacctgcttgtgcaaaaaatacgtgggcgtcatccaacaaggactcccccatatcatggtttaaaatcgtgaaccaattgtttagaaaggatccacatcgtgatataaaggagcagttttatgaattgctaaaccaagtagagcttaatggtaactctgacaggatattgcaaggctgttttaatatatttccctacgtaaaatattccgacaatggtataagaaagccagcaaacatttcagattggctatttttccatgatttaatgtaccaatcaatgtatgcgcataatggcgaattgttacgttactccgcccttgtgcccctagtcttcttccaaacgtttggcgatatcgcaaacaaagatgatattagaatgaagaatagtgaatacgaacaacgtgaattaaaacgagccaattcagatatagttagtctgattatgagacatatctcggttcagtccccactaatggcaagttttacggatagaaaatcgttaatctttgaaatactaccatatctagattcgatgatctcttccgattttaataaaataaggaacctgaaactcaaacaagccatcatggaggaattagttcaattgctgaaaagctttcaactgaatctaatccaaaatcggtcagaaggatttgatgtaaggggtggcctaacaatcgatcccccaatcgatgaagtcgtattgttaaatcctaaacatattaacgaagtccaacataaacgggctaataatttgagttcactgttagcaaagattgaggaaaaccgggccaagaaaaggcatatagaccaagtgactgaggatagactacagtcacaggaaatgcatagcaaaaaagtcaaaactgggttaaattcttcctcaagtacaatcgactttttcaagaatcagtacggattattgaagcaaactcaggaattggaagagacacaaaaaactattggatcagacgaaaccaaccaagcagatgactgcaatcaaacggttaaaatatgggtgaaatacaatgaggggttctctaacgctgtcaggaaaaatgtgacttggaataacctgtgggaataa

SEQ ID NO: 8506 - DNA, 2226 bp, Artificial Sequence
  Description of Artificial Sequence: Synthetic polynucleotide
atggttgataccgcaccatacattggttctttagggagaagttccctttttgatactggtgatatagaacaagcccctggtaataatgcaattggtattaatgaggaagatattcacgcgtttgtatctagtactggcgaaacggttcaattaaagaagaagcctgcgaagttagcaaccgggaatattagtttatacactaacccagatactgtttggagaagtgacgacacgtacggcatcaatataaactatttgttagacaaaattgaggcatctggcgatgaccgcactaacgcacaaaagacttctcctataactggcaagataggtagcgacacactctgggtagagaaatggcgtcctaaaaaatttttggatttggttggtaatgaaaagacaaacaggagaatgttaggttggttgagacaatggacgccggctgtgtttaaagagcaattacccaaattgccaaccgaaaaagaggtcagtgatatggaactcgatccattgaaaaggccaccaaagaaaattttattattacacgggccaccaggaataggcaaaacctctgtagctcacgttattgccaaacaaagtgggttttctgtcagtgaaatcaatgcaagtgatgaaagggctggacctatggtaaaagagaaaatatataatcttttattcaatcatactttcgatacaaatcctgtgtgcttagtggcggatgagattgatggaagtattgagagtggatttattagaattttagttgacattatgcaaagcgatattaaagccactaataaattattatacggtcaaccagataaaaaggacaaaaagcgcaaaaagaaaaggtctaaattgcttacgagacctattatttgtatttgcaataatttatatgctccttctttggaaaagttgaaaccattctgtgaaattattgctgtgaaaagaccttccgatactaccttattggagagattgaaccttatctgccataaagaaaacatgaatattcctataaaagcaatcaatgacttaattgatttggctcaaggtgacgtaaggaattgtataaacaatttacaattcttggcctctaatgttgattccagagattcctctgcatctgataaacctgcttgtgcaaaaaatacgtgggcgtcttccaacaaggactcccccatatcttggtttaaaatcgtgaaccaattgtttagaaaggatccacatcgtgatataaaggagcagttttatgaattgttgaaccaagtagagcttaatggtaactctgacaggatattgcaaggctgttttaatatatttccctacgtaaaatattccgacaatggtataagaaagccagcaaacatttctgattggttatttttccatgatttaatgtaccaatctatgtatgcgcataatggcgaattgttacgttactccgcccttgtgcccttggtcttcttccaaacgtttggcgatatcgcaaacaaagatgatattagaatgaagaatagtgaatacgaacaacgtgaattaaaaagagccaattctgatatagttagtttgattatgagacatatctccgttcagtccccattaatggcaagttttacggatagaaaatctttaatctttgaaatattgccatatttggattctatgatctcttccgattttaataaaataaggaacttgaaactcaaacaagccatcatggaggaattagttcaattgttgaaaagctttcaattgaatttgatccaaaatagaagtgaaggatttgatgtaaggggtggcttaacaatcgatcccccaatcgatgaagtcgtattgttaaatcctaaacatattaacgaagtccaacataaaagagctaataatttgagttctttattagcaaagattgaggaaaacagagccaagaaaaggcatatagaccaagtgactgaggatagattacagtctcaggaaatgcatagcaaaaaagtcaaaactgggttaaattcttcctccagtacaatcgactttttcaagaatcagtacggattattgaagcaaactcaggaattggaagagacacaaaaaactattggatctgacgaaaccaaccaagcagatgactgcaatcaaacggttaaaatatgggtgaaatacaatgaggggttctctaacgctgtcaggaaaaatgtgacttggaataacctttgggaatga

SEQ ID NO: 8507 - DNA, 915 bp, Saccharomyces cerevisiae
atggttacacaacaagaaaaggaatttttagaatcctaccctcaaaactgtcctccagatgccttgcctggtactccaggaaatttagacagcgctcaagagaaggcattggcagaactaagaaaacttttggaagacgctggtttcattgaacgtttagacgattcaactttactacgttttttgagagccagaaaatttgatgttcaattggctaaagaaatgtttgaaaactgcgaaaaatggaggaaggattatggtaccgacactatcttgcaagattttcattatgatgaaaaaccattgattgccaaattctacccacaatattatcataaaaccgataaagatggccgcccagtatattttgaagaattaggtgctgttaacttacatgaaatgaacaaggttacctctgaagagaggatgttgaaaaacttggtttgggaatacgaatctgtcgttcaatacagattacctgcctgttcaagagctgctggtcacctagtggaaacttcatgtacaattatggatttgaaaggtatctccatatctagtgcatacagtgttatgtcatatgttagggaagcctcctacataagtcaaaactattaccccgaacgtatgggtaaattttacatcatcaacgcgccattcggtttctctaccgcatttaggctatttaaacctttcttggatccagtcactgtttcaaagatttttatcttgggttcttcttaccagaaggaattattaaagcaaattccagctgaaaacttaccagtcaaatttggcggtaagtctgaagttgatgaatccaagggtgggttatacctatccgatatcggtccatggagggatccaaagtatattggaccggaaggtgaagctccggaagccttttcgatgaaatga

SEQ ID NO: 8508 - DNA, 915 bp, Artificial Sequence
  Description of Artificial Sequence: Synthetic polynucleotide
atggttacacaacaagaaaaggaatttttagaatcctaccctcaaaactgtcctccagatgccttgcctggtactccaggaaatttagacagcgctcaagagaaggcattggcagaattgagaaaacttttggaagacgctggtttcattgaacgtttagacgattctactttattacgttttttgagagccagaaaatttgatgttcaattggctaaagaaatgtttgaaaactgcgaaaaatggaggaaggattatggtaccgacactatcttgcaagattttcattatgatgaaaaaccattgattgccaaattctacccacaatattatcataaaaccgataaagatggccgcccagtatattttgaagaattaggtgctgttaacttacatgaaatgaacaaggttacctctgaagagaggatgttgaaaaacttggtttgggaatacgaatctgtcgttcaatacagattacctgcctgttccagagctgctggtcacttggtggaaacttcttgtacaattatggatttgaaaggtatctccatatctagtgcatacagtgttatgtcttatgttagggaagcctcctacataagtcaaaactattaccccgaacgtatgggtaaattttacatcatcaacgcgccattcggtttctctaccgcatttaggttatttaaacctttcttggatccagtcactgtttccaagatttttatcttgggttcttcttaccagaaggaattattaaagcaaattccagctgaaaacttaccagtcaaatttggcggtaagtctgaagttgatgaatccaagggtgggttatacttgtccgatatcggtccatggagggatccaaagtatattggaccggaaggtgaagctccggaagccttttccatgaaatga

SEQ ID NO: 8509 - DNA, 2916 bp, Saccharomyces cerevisiae
atggtcggttccggttctcacactccttatgatatatcaaactctccatctgatgtaaatgtccaacccgcaacacaactaaattccaccttggtggaggatgacgatgtagataatcagctatttgaagaggctcaagtcactgagactggattccgttcgccttcagcttcagacaattcatgtgcgtattgtggtatagattctgcaaagtgtgtcatcaaatgtaattcatgtaagaaatggttttgtaacactaaaaacggtacaagcagctcccacattgttaatcacttagttttatcccaccataacgtagtttctttacatccagattctgacttaggggataccgttttggaatgttataactgtggacgtaagaacgtgtttttattgggatttgtttccgctaaaagtgaggccgtggttgttttactttgtagaataccttgtgcccagacgaaaaatgcgaactgggatactgatcaatggcaaccattaattgaagacagacaacttttatcatgggtcgcagagcaaccaactgaagaagaaaaattgaaagctcgtttaatcactcctagccaaatttccaagttggaggcaaaatggagatccaataaagacgctacaattaatgatattgacgccccagaggaacaggaagcaatcccacctttactattgagatatcaagacgcctacgaataccaaagatcttacgggcctttaatcaaattggaggccgactatgataaacaactcaaggaatctcaagctttagaacatatttctgtttcatggtccttagctttaaataataggcatttagcatctttcactttatctactttcgaatctaacgagttgaaagttgccatcggtgatgaaatgatactatggtactctggcatgcaacatcctgattgggaaggtcgtggttacattgttcggttaccaaatagcttccaggacacattcacattagagttaaaaccaagtaaaacgccacctccaacacatttgaccactggttttactgctgagttcatctggaaaggtacctcttatgacaggatgcaagacgcattgaaaaaatttgccattgataaaaaatctatttcaggttatttgtactataaaattttaggccatcaagtggttgacatttcatttgatgtcccattacctaaggagttttcaattccgaattttgcacaattaaactcatcccagtcgaacgctgttagtcatgtattacaacgtccgttatctttaattcaaggcccaccaggcactggtaaaacagttacttcagcaacgattgtgtatcacctttccaaaatacacaaggatagaatattggtgtgtgccccatcaaacgttgctgtagatcatttggctgccaaattacgtgacttgggtttaaaagttgttagacttaccgcgaaaagtagagaagatgtggagagttccgtctccaacttagcattgcataatttggttggccgtggtgctaaaggggaattaaaaaacctattaaagttaaaggatgaagttggcgaattatctgcttctgatacaaaacggtttgttaaattagtaaggaaaacagaagcagaaattctcaataaggcagatgtcgtatgttgcacatgtgttggtgctggtgataagcgcttagacactaaatttaggactgtgttaattgatgaaagtactcaagcttctgagccggaatgtttaatcccaatcgttaaaggtgcgaaacaagttatacttgttggtgatcaccagcaactgggcccagtcatattggaacgaaaggcggcagacgctggtttgaaacaatctctctttgaaagattaatctctctaggccacgtaccgattcgtttggaagttcaataccgtatgaatccttatttgagtgagtttccaagtaacatgttttatgaaggcagcctacaaaatggtgtaacgattgaacagcgtaccgttcccaacagcaaattcccatggccaattcgcggtataccaatgatgttttgggccaattacggtagagaggagatttctgctaacggtacttccttcttaaacagaattgaagccatgaattgtgaacgaatcatcactaaacttttcagagacggtgtcaagcccgagcaaattggtgttatcacaccatatgagggacaaagagcttatattttacaatatatgcaaatgaatggttcattggataaggatttgtatatcaaagtggaagttgcctcagttgatgcattccaaggtcgtgaaaaggattacataatcttatcgtgtgttcgtgccaatgaacaacaggccattggtttcttacgtgatcctcgtcgtctaaacgtgggtctaacccgtgccaaatatggtctagttattcttggtaatcctagatctttggcaagaaacacattatggaaccatctgttaatccacttcagagagaagggttgtttagtcgaaggtacgttggataacttacagttatgcactgttcaattagttcgtcctcagccaagaaagactgaacggccaatgaacgctcaatttaacgtagaatctgaaatgggtgactttccgaagttccaggattttgatgcacagagtatggtgtcattcagtggtcaaattggggactttggtaatgcatttgttgacaacacagaactttcttcttacatcaataatgaatattggaattttgagaattttaaaagtgctttttctcaaaagcaaaatcgcaatgaaattgacgatagaaatttgtaccaggaggaggcttctcatttgaactctaacttcgcgagagagttacagagagaagaacaaaagcatgaattgtcaaaagacttcagcaatttgggaatataa

SEQ ID NO: 8510 - DNA, 2916 bp, Artificial Sequence
  Description of Artificial Sequence: Synthetic polynucleotide
atggtcggttccggttctcacactccttatgatataagcaactctccatctgatgtaaatgtccaacccgcaacacaattgaattccaccttggtggaggatgacgatgtagataatcagttatttgaagaggctcaagtcactgagactggattccgtagtccttctgcttctgacaattcttgtgcgtattgtggtatagattctgcaaagtgtgtcatcaaatgtaattcttgtaagaaatggttttgtaacactaaaaacggtacaagcagctcccacattgttaatcacttagttttatcccaccataacgtagtttctttacatccagattctgacttaggggataccgttttggaatgttataactgtggacgtaagaacgtgtttttattgggatttgtttccgctaaaagtgaggccgtggttgttttactttgtagaataccttgtgcccagacgaaaaatgcgaactgggatactgatcaatggcaaccattaattgaagacagacaacttttatcttgggtcgcagagcaaccaactgaagaagaaaaattgaaagctcgtttaatcactcctagccaaatttccaagttggaggcaaaatggagatccaataaagacgctacaattaatgatattgacgccccagaggaacaggaagcaatcccacctttattattgagatatcaagacgcctacgaataccaaagatcttacgggcctttaatcaaattggaggccgactatgataaacaactcaaggaatctcaagctttagaacatatttctgtttcctggtccttagctttaaataataggcatttagcatctttcactttatctactttcgaatctaacgagttgaaagttgccatcggtgatgaaatgatattatggtactctggcatgcaacatcctgattgggaaggtcgtggttacattgttagattaccaaatagcttccaggacacattcacattagagttaaaaccaagtaaaacgccacctccaacacatttgaccactggttttactgctgagttcatctggaaaggtacctcttatgacaggatgcaagacgcattgaaaaaatttgccattgataaaaaatctatttctggttatttgtactataaaattttaggccatcaagtggttgacatttcctttgatgtcccattacctaaggagttttctattccgaattttgcacaattaaactcttcccagtccaacgctgttagtcatgtattacaacgtccgttatctttaattcaaggcccaccaggcactggtaaaacagttacttctgcaacgattgtgtatcacctttccaaaatacacaaggatagaatattggtgtgtgccccatctaacgttgctgtagatcatttggctgccaaattacgtgacttgggtttaaaagttgttagacttaccgcgaaaagtagagaagatgtggagagttccgtctccaacttagcattgcataatttggttggccgtggtgctaaaggggaattaaaaaacttattaaagttaaaggatgaagttggcgaattatctgcttctgatacaaaaagatttgttaaattagtaaggaaaacagaagcagaaattctcaataaggcagatgtcgtatgttgcacatgtgttggtgctggtgataagcgcttagacactaaatttaggactgtgttaattgatgaaagtactcaagcttctgagccggaatgtttaatcccaatcgttaaaggtgcgaaacaagttatacttgttggtgatcaccagcaattaggcccagtcatattggaaagaaaggcggcagacgctggtttgaaacaatctctctttgaaagattaatctctttaggccacgtaccgattcgtttggaagttcaataccgtatgaatccttatttgagtgagtttccaagtaacatgttttatgaaggcagcttacaaaatggtgtaacgattgaacagcgtaccgttcccaacagcaaattcccatggccaattcgcggtataccaatgatgttttgggccaattacggtagagaggagatttctgctaacggtacttccttcttaaacagaattgaagccatgaattgtgaaagaatcatcactaaacttttcagagacggtgtcaagcccgagcaaattggtgttatcacaccatatgagggacaaagagcttatattttacaatatatgcaaatgaatggttctttggataaggatttgtatatcaaagtggaagttgcctctgttgatgcattccaaggtcgtgaaaaggattacataatcttaagttgtgttcgtgccaatgaacaacaggccattggtttcttacgtgatcctcgtcgtttgaacgtgggtttgacccgtgccaaatatggtttagttattcttggtaatcctagatctttggcaagaaacacattatggaaccatcttttaatccacttcagagagaagggttgtttagtcgaaggtacgttggataacttacagttatgcactgttcaattagttcgtcctcagccaagaaagactgaaagaccaatgaacgctcaatttaacgtagaatctgaaatgggtgactttccgaagttccaggattttgatgcacagagtatggtgtctttcagtggtcaaattggggactttggtaatgcatttgttgacaacacagaactttcttcttacatcaataatgaatattggaattttgagaattttaaaagtgctttttctcaaaagcaaaatcgcaatgaaattgacgatagaaatttgtaccaggaggaggcttctcatttgaactctaacttcgcgagagagttacagagagaagaacaaaagcatgaattgagtaaagacttcagcaatttgggaatatga

SEQ ID NO: 8511 - DNA, 1017 bp, Saccharomyces cerevisiae
atgattgcttcagaaatttttgaaagaggtgtacaagatccattttgtcaagattgtgattatgaagatgaaacagacgtacaaagttttttaggttcaaatgatttgaatgattttgtaaattccaaattagcgtcctttagttttcaaaattcctcgaaatcaaataattctcaccacagcagcagtaccaatgccggtaatacaagcagacacataggcaatcatactattggccaccatttgagaaaaatcaagacagctccgcatcacttgtatggcttcgtcccagcaaattcaacgaacaattccaatgaaccaattcgcccttctccaagaagaataagagcaaatagtagcaccctcattcaccagttgtccagacaatccacaagacagtcttccttgggcgacgcggcggattcctgttttgaccacaaatgcataaagccaagatccaggcattcttcctgttacggtataccaacacatctatacggccttgaaaaatacgtttcatccgagctagactctctagcagtagctaacgaccagtcaaatgatctcacttccccattaacatctgtttcaacacccgcctcgaattccaactcgtatttgaatctgaattcaagttcggctgcatatccgtcgtcttatctctccaacgaaaagaataatcgactaaaattgatttcccatgggaaaatatcatcaaataacgtcccaggtcacagtggaaaccttaaccactatcacagagaacgaacgccatcaaatctaagaagagaatccttttcgcttctttccaatggttcctcttcctctcccttgcagactagaaacaactcgtattccaactctttggtgaaatctccttccaatagttcattgaatactagtgtggcttcttctaacgaagaatctagtcctcacacttctaattgcctggaggaaaggaatcccaggagaaaatcattcataaaattgtcactagcgagttcattctccaattga

SEQ ID NO: 8512 - DNA, 1017 bp, Artificial Sequence
  Description of Artificial Sequence: Synthetic polynucleotide
atgattgcttctgaaatttttgaaagaggtgtacaagatccattttgtcaagattgtgattatgaagatgaaacagacgtacaaagttttttaggtagtaatgatttgaatgattttgtaaattccaaattagcgtcctttagttttcaaaattcctctaaatctaataattctcaccacagcagcagtaccaatgccggtaatacaagcagacacataggcaatcatactattggccaccatttgagaaaaatcaagacagctccgcatcacttgtatggcttcgtcccagcaaattctacgaacaattccaatgaaccaattcgcccttctccaagaagaataagagcaaatagtagcaccctcattcaccagttgtccagacaatccacaagacagtcttccttgggcgacgcggcggattcctgttttgaccacaaatgcataaagccaagatccaggcattcttcctgttacggtataccaacacatctttacggccttgaaaaatacgtttcttccgagttggactctttggcagtagctaacgaccagtctaatgatctcacttccccattaacatctgtttctacacccgcctctaattccaacagttatttgaatttgaatagtagttctgctgcatatccgtcttcttatctctccaacgaaaagaataatagattgaaattgatttcccatgggaaaatatcttccaataacgtcccaggtcacagtggaaaccttaaccactatcacagagaaagaacgccatccaatttaagaagagaatccttttcccttctttccaatggttcctcttcctctcccttgcagactagaaacaacagttattccaactctttggtgaaatctccttccaatagttctttgaatactagtgtggcttcttctaacgaagaatctagtcctcacacttctaattgcttagaggaaaggaatcccaggagaaaatctttcataaaattgtccttagcgagttctttctccaattga

SEQ ID NO: 8513 - DNA, 357 bp, Saccharomyces cerevisiae
atgactatcgctgaaataactataagacaaaagttctcttacccctttttatttggcaatgttttaggtcatccgtggccaagaaatgtgccaaggaaggaaattaaaatgcttttatttcgaaccgcaaataatagtttccccggatttttacttatttttacgagaaagcgaaggaacttaccaaaacaacgtgacaacgaaattccccgcacacgcgcattagaaacatatctacgggttttctctgccgctagaaaacagcgcgaggcagatgccaccgcctcgttctggcggctcgtaacatctgcttcgagaagccattaccatatgtggcccatcaagcggattatctag

SEQ ID NO: 8514 - DNA, 357 bp, Artificial Sequence
  Description of Artificial Sequence: Synthetic polynucleotide
atgactatcgctgaaataactataagacaaaagttctcttacccctttttatttggcaatgttttaggtcatccgtggccaagaaatgtgccaaggaaggaaattaaaatgcttttatttaggaccgcaaataatagtttccccggatttttacttatttttacgagaaagagaaggaacttaccaaaacaacgtgacaacgaaattccccgcacacgcgcattagaaacatatcttcgtgttttctctgccgctagaaaacagcgcgaggcagatgccaccgcctctttctggaggctcgtaacatctgcttccagaagccattaccatatgtggcccatcaagagaattatctga

SEQ ID NO: 8515 - DNA, 1128 bp, Saccharomyces cerevisiae
atgttgagaacgtcaacattgttcaccaggcgtgtccaaccaagcctattttctagaaacattcttagattgcaatccacagctgcaatccctaagactcaaaaaggtgtcatcttttatgagaataaggggaagctgcattacaaagatatccctgtccccgagcctaagccaaatgaaattttaatcaacgttaaatattctggtgtatgtcacaccgatttacatgcttggcacggcgattggccattacctgttaaactaccattagtaggtggtcatgaaggtgctggtgtagttgtcaaactaggttccaatgtcaagggctggaaagtcggtgatttagcaggtatcaaatggctgaacggttcttgtatgacatgcgaattctgtgaatcaggtcatgaatcaaattgtccagatgctgatttatctggttacactcatgatggttctttccaacaatttgcgaccgctgatgctattcaagccgccaaaattcaacagggtaccgacttggccgaagtagccccaatattatgtgctggtgttactgtatataaagcactaaaagaggcagacttgaaagctggtgactgggttgccatctctggtgctgcaggtggcttgggttccttggccgttcaatatgcaactgcgatgggttacagagttctaggtattgatgcaggtgaggaaaaggaaaaacttttcaagaaattggggggtgaagtattcatcgactttactaaaacaaagaatatggtttctgacattcaagaagctaccaaaggtggccctcatggtgtcattaacgtttccgtttctgaagccgctatttctctatctacggaatatgttagaccatgtggtaccgtcgttttggttggtttgcccgctaacgcctacgttaaatcagaggtattctctcatgtggtgaagtccatcaatatcaagggttcttatgttggtaacagagctgatacgagagaagccttagacttctttagcagaggtttgatcaaatcaccaatcaaaattgttggattatctgaattaccaaaggtttatgacttgatggaaaagggcaagattttgggtagatacgtcgtcgatactagtaaataa

SEQ ID NO: 8516 - DNA, 1128 bp, Artificial Sequence
  Description of Artificial Sequence: Synthetic polynucleotide
atgttgagaacgagtacattgttcaccaggcgtgtccaaccaagcttgttttctagaaacattcttagattgcaatccacagctgcaatccctaagactcaaaaaggtgtcatcttttatgagaataaggggaagttgcattacaaagatatccctgtccccgagcctaagccaaatgaaattttaatcaacgttaaatattctggtgtatgtcacaccgatttacatgcttggcacggcgattggccattacctgttaaattaccattagtaggtggtcatgaaggtgctggtgtagttgtcaaattgggttccaatgtcaagggctggaaagtcggtgatttagcaggtatcaaatggttgaacggttcttgtatgacatgcgaattctgtgaaagtggtcatgaaagtaattgtccagatgctgatttatctggttacactcatgatggttctttccaacaatttgcgaccgctgatgctattcaagccgccaaaattcaacagggtaccgacttggccgaagtagccccaatattatgtgctggtgttactgtatataaagcattgaaagaggcagacttgaaagctggtgactgggttgccatctctggtgctgcaggtggcttgggttccttggccgttcaatatgcaactgcgatgggttacagagttttaggtattgatgcaggtgaggaaaaggaaaaacttttcaagaaattggggggtgaagtattcatcgactttactaaaacaaagaatatggtttctgacattcaagaagctaccaaaggtggccctcatggtgtcattaacgtttccgtttctgaagccgctatttctttatctacggaatatgttagaccatgtggtaccgtcgttttggttggtttgcccgctaacgcctacgttaaaagtgaggtattctctcatgtggtgaagtccatcaatatcaagggttcttatgttggtaacagagctgatacgagagaagccttagacttctttagcagaggtttgatcaaatctccaatcaaaattgttggattatctgaattaccaaaggtttatgacttgatggaaaagggcaagattttgggtagatacgtcgtcgatactagtaaatga

SEQ ID NO: 8517 - DNA, 789 bp, Saccharomyces cerevisiae
atgtgtggcatttttggctattgcaattttttaattgagaagacaagaggagaaatcatcgacactttaatcgaagggttacaggcattggagtacaaggaatatgactccagtggaatttcgatccaaggtgatgagctggagtctctcaatatttataagcaaaccggtaaaataagcagtttgaaggaagaaatcgacctttacaatcttaataagaacctgccctttatttcgcattgtggcattgcccatactaggcgggcaacacatggagggctaagacgtgcaaattgtcatccacataactcagatccatctaatgaatttgttgtggtacacaacggggttattaccaacttcgctaatttgaaagccttattgatggcaaagggctatgtgttcaaaagtgacactgataccgaatgtattcctaaactgtacaaacacatttatgatacaagcattgaactcgggtacaacctcgatttccatgtattaacaaatttagtacttaaagaattggaaggctcttatggtctgctatgcacttcttctcattttcccgatgaagtggttgccgcaagaaagggttccccgttagttattggtgttaaaggtaaaactgacatggacgtaaactttgtcgaggtggaatatttggatcaagaagaagactacttgaagcttaatactcaaaccaagagttctggtaatgtcttggctgccgcacctgtaaaatataacacttgtttaaggaagtcaccccccttcgttcacaatacctga

SEQ ID NO: 8518 - DNA, 789 bp, Artificial Sequence
  Description of Artificial Sequence: Synthetic polynucleotide
atgtgtggcatttttggctattgcaattttttaattgagaagacaagaggagaaatcatcgacactttaatcgaagggttacaggcattggagtacaaggaatatgactccagtggaatttccatccaaggtgatgagttagagtctctcaatatttataagcaaaccggtaaaataagcagtttgaaggaagaaatcgacctttacaatcttaataagaacttgccctttatttctcattgtggcattgcccatactaggagagcaacacatggagggttgagacgtgcaaattgtcatccacataacagtgatccatctaatgaatttgttgtggtacacaacggggttattaccaacttcgctaatttgaaagccttattgatggcaaagggctatgtgttcaaaagtgacactgataccgaatgtattcctaaactttacaaacacatttatgatacaagcattgaactcgggtacaacctcgatttccatgtattaacaaatttagtacttaaagaattggaaggctcttatggtttattatgcacttcttctcattttcccgatgaagtggttgccgcaagaaagggttccccgttagttattggtgttaaaggtaaaactgacatggacgtaaactttgtcgaggtggaatatttggatcaagaagaagactacttgaagcttaatactcaaaccaagagttctggtaatgtcttggctgccgcacctgtaaaatataacacttgtttaaggaagtctccccccttcgttcacaatacctga

SEQ ID NO: 8519 - DNA, 1299 bp, Saccharomyces cerevisiae
atggaattctatttgtcatccgattgtgcatcactagcgcggtatgtgagtaaagtagtatatttggaggataatgatattgcccatatctatgatggggagcttcatatccattgttctaaaattggttccgaggacttttcatttagaacagttcaaaaattagaattggagttgtccaaaatcaaaaaaggcccttacgataattttatgcaaaaggaaatatacgagcagtgtgaaacaacaaaaaatgtcatgagaggaagagttgacgcctttacaaacagagtagttttgggaggactagaaaattggttgacagaattgagaagagcaaaacgaataataatgattgcatccaaggcctccttccattcatgcctagctgcccgtcccatctttgaggagttaatggaagttccagtaaacgttgaattggccttggattttgttgaccgcaattgttgcattttcaggaacgatgtttgcatatttgtttctcgaagtggggagacaactgatacaattaatgctttgaactactgtatcaaaaaagaggcagtcacaatcggggtagttaattgcagcggttcctctatctcaagatttacacattgcggtgttcatacaaacacaggccccgagaaaggtattgcaacaaccaagtcttatacttctcaatacatcgctttagtcatgattgccctatggatgtcggaagatttggtgtctaaaatagaaaggaggaaagaaataattcaagccttaactatagtcccaagccaaataaaagaagttttggagcttgaaccattgattattgaattgtgtgacaagaaactaaaacagcatgatacatttttgcttttaggaagaggttaccaatttgcctctgctttggaaggcgcctcgaagatgaaagaaatttcttacgtgcattctgaaagtattcttaccaacgagctaggacacagagtcctagctgtggcatctgataatccgccaattatcgcctttgcgacaaaggatgctttttcgcccaaaatcgcgtcttgcattgaccaaataatagaaaggaagggcaatccgattatcatttgtaacaaggggcataagatatgggagcaagacaaacaaaaaggaaacgttgttacactcgaggtaccccaaaccgtagattgtctccaagggatacttaacgttattcctttacaattaatttcttactggttagcgatcaagaaagacatcggagttgatttgccaagggactcggcgatgtcggccccggatatataa

SEQ ID NO: 8520 - DNA, 1299 bp, Artificial Sequence
  Description of Artificial Sequence: Synthetic polynucleotide
atggaattctatttgtcttccgattgtgcatctttagcgagatatgtgagtaaagtagtatatttggaggataatgatattgcccatatctatgatggggagcttcatatccattgttctaaaattggttccgaggacttttcttttagaacagttcaaaaattagaattggagttgtccaaaatcaaaaaaggcccttacgataattttatgcaaaaggaaatatacgagcagtgtgaaacaacaaaaaatgtcatgagaggaagagttgacgcctttacaaacagagtagttttgggaggattagaaaattggttgacagaattgagaagagcaaaaagaataataatgattgcatccaaggcctccttccattcttgccttgctgcccgtcccatctttgaggagttaatggaagttccagtaaacgttgaattggccttggattttgttgaccgcaattgttgcattttcaggaacgatgtttgcatatttgtttctagaagtggggagacaactgatacaattaatgctttgaactactgtatcaaaaaagaggcagtcacaatcggggtagttaattgcagcggttcctctatctccagatttacacattgcggtgttcatacaaacacaggccccgagaaaggtattgcaacaaccaagtcttatacttctcaatacatcgctttagtcatgattgccttatggatgtctgaagatttggtgtctaaaatagaaaggaggaaagaaataattcaagccttaactatagtcccaagccaaataaaagaagttttggagcttgaaccattgattattgaattgtgtgacaagaaattgaaacagcatgatacatttttgcttttaggaagaggttaccaatttgcctctgctttggaaggcgcctccaagatgaaagaaatttcttacgtgcattctgaaagtattcttaccaacgagttaggacacagagtcttggctgtggcatctgataatccgccaattatcgcctttgcgacaaaggatgctttttctcccaaaatcgcgtcttgcattgaccaaataatagaaaggaagggcaatccgattatcatttgtaacaaggggcataagatatgggagcaagacaaacaaaaaggaaacgttgttacactcgaggtaccccaaaccgtagattgtctccaagggatacttaacgttattcctttacaattaatttcttactggttagcgatcaagaaagacatcggagttgatttgccaagggactctgcgatgtctgccccggatatatga

SEQ ID NO: 8521 - DNA, 2883 bp, Saccharomyces cerevisiae
atgtttagaagaagaacaactgcaccagaaatggaacaggcggacccgacagcagtggcagctgcagcaagtatcggtaaattattaatgaagaagggtaatcaatctgataacgaacaaaggccgacctatcgatccgcttcgatgacaaacttaagaaaaccttctgcccccaaaagaatgtcttctatttctagtatatcatcggaatctagaaggagcgatggtaaaggtcgtcccgggaaaataaacagccttacccaacggtcatcaatggggaagggagattcattaaattctcctttaacgaaggaaccgcagcacaaaactaggtctcacaatagaacttcgagtctccctaaccagagaggtcagcaaagcagaaacagttctggtttacaacgtcaaaagtccaaaacacaccaaagaataagctatgatgaggctcaacgtacgttcaaggattttggcggaccacaggccagaggaattttaacgggacaacaccgtactgaaaatcctagcgggtctattcctttgaggactacgcgaaagtatattcctgggcccaacgggctggttgcaattgaggtccccgttgaaaaaccaagcaatgccaatacttctaaattgctaaggcgttccaactctgcccacagtgccttgaatgcaagaaatggttcacttttaagaaaaaaagtatcgcaggaatctttacattctcaaccaaagaagacttcgtctttagggaatacatcaagtacacaagcaaaaaaaggccaaaaggcggttcaggagagaaatcttgccaagaaacatccaataaattcaaatgttcctctcattgaaacacaagttcgtgaagaaacagaccaagagttgaaacttgataattctaactcttccgaatccgaaacagtagtcaatagcgaaaataatctagaaaaaccttcttcactaaacattgaaaaagatgatctaagcaaactaatacatgaaaacattgagttagaaagttttattgaagaaaaagggaaggaaaaacctttaaattctgatcaagaagatgttttcataagcgaaaaaactgtaaaaggcgatgtacaatggccaaaaaataaccgtcaagcatctactcttgagaaaacttttaattacgacaacgaagagaagagggaggggaataaaccagtagcagaacatcctcttccggaggccgaagtggatgacaagtcggttgaacaactgaacaacatttcttctagcggcagttattcggcccaaggatcagttgaaaactccaaaccagaaaatggcaataaaaatctagagaatgacacaacatcgtctcccacacaagaccttgatgaaaaatcccgctcaatagaagagaaggataccttggaagggaccgagagttcaaaaaaagttgaaaagccagacaattgttgtgagaaaatttctggtgctaatacttcttccaaaaaagggaatgttggcgatactaaggatgaattcttcgatacagtagaagaaagcgatcagaaaacgagcaagtcgaattcctccaagaacaccgatcattctaatcaaacagaaccaacgccttctttggctcagtatttaaggacctcaaatacctacctttctcgaaaaaaccaatcgaaacaagctgagcaagaaaagtttcacaagcctgaagctcctatggttcctgtaacgaaagtagttacaccaatcaaatctgctcttaaaaaatcgtcaggatcgtccaaccatgactcatccatgtactctgataactctcccgccaatggcgcatacctgtctcttacgactgctgaaaatacgagattaaatgctcaaatgacgatgtccgacagcgtatcacgcagagcaagtttaaaacgatcttctataaaaagacctcagtcagtaggccagttcagaagcatcagatcaaattcgccttctcccccagagaaaataaacaataaacgccattctgctatacccctaggaaccccagagaagggtaaaccaaaaagaaattcggttatggcttctctgtctaaaaattcgcagcaaattcaagagcccgcaagtgtatatgagtcaaatggcccaaataaacctaaaaaccaaatcaataagaatataaagagaggatcacagatcgcgcaaaacaataaaccttcaacgaaggacatgaatagtattttgtaccccaaagaaccacctcctcgcaaatctagttttgagaagacgagaagcaatgaatcccatctcggatttaaaaagctttctttgagaaatggtaattttgaggaggcattgagtgaaagctataatgggcaagctagccagaatagcacaaatgtgaatcgaaccgatacagcacaggagtttttcaaatatttgggtcattcatcaagatttgcggattcagactcagaagatgagtcccaatttttcaaccaaggcccatcaaaatacaacacagaaacagaaggcaataaaaccagcggtaacaaaaatagtaatggtggtaacggtgctttttcgcttttcaagagcaaaagtaagcaaaaggaaaataatgtggtttcccctggagtctcaagtcctaatcatactaccaccgatcctgccattacaagtaaaaaggtggacaagaaattcagcgggttatctttaagagctgccagtgaagctgaacctgcaaaaaattcaaacccttcgatgaccaataggttacgcttctctagtaatccagagaacggcgaaagcaggctcccacaagcacaggaagtcagcgttacaaaagaaaagaagggtagtttcggcaaaaaactgaaaaaaatctttggtagaaagaaatag

SEQ ID NO: 8522 - DNA, 2883 bp, Artificial Sequence
  Description of Artificial Sequence: Synthetic polynucleotide
atgtttagaagaagaacaactgcaccagaaatggaacaggcggacccgacagcagtggcagctgcagcaagtatcggtaaattattaatgaagaagggtaatcaatctgataacgaacaaaggccgacctatagatccgcttccatgacaaacttaagaaaaccttctgcccccaaaagaatgtcttctatttctagtatatcttctgaatctagaaggagcgatggtaaaggtcgtcccgggaaaataaacagccttacccaaagaagttctatggggaagggagattctttaaattctcctttaacgaaggaaccgcagcacaaaactaggtctcacaatagaacttctagtctccctaaccagagaggtcagcaaagcagaaacagttctggtttacaacgtcaaaagtccaaaacacaccaaagaataagctatgatgaggctcaacgtacgttcaaggattttggcggaccacaggccagaggaattttaacgggacaacaccgtactgaaaatcctagcgggtctattcctttgaggactacgagaaagtatattcctgggcccaacgggttggttgcaattgaggtccccgttgaaaaaccaagcaatgccaatacttctaaattgttgaggcgttccaactctgcccacagtgccttgaatgcaagaaatggttctcttttaagaaaaaaagtatctcaggaatctttacattctcaaccaaagaagacttcttctttagggaatacatctagtacacaagcaaaaaaaggccaaaaggcggttcaggagagaaatcttgccaagaaacatccaataaatagtaatgttcctctcattgaaacacaagttcgtgaagaaacagaccaagagttgaaacttgataattctaactcttccgaatccgaaacagtagtcaatagcgaaaataatttggaaaaaccttcttctttgaacattgaaaaagatgatttgagcaaattgatacatgaaaacattgagttagaaagttttattgaagaaaaagggaaggaaaaacctttaaattctgatcaagaagatgttttcataagcgaaaaaactgtaaaaggcgatgtacaatggccaaaaaataaccgtcaagcatctactcttgagaaaacttttaattacgacaacgaagagaagagggaggggaataaaccagtagcagaacatcctcttccggaggccgaagtggatgacaagtctgttgaacaattgaacaacatttcttctagcggcagttattctgcccaaggatctgttgaaaactccaaaccagaaaatggcaataaaaatttggagaatgacacaacatcttctcccacacaagaccttgatgaaaaatcccgcagcatagaagagaaggataccttggaagggaccgagagttctaaaaaagttgaaaagccagacaattgttgtgagaaaatttctggtgctaatacttcttccaaaaaagggaatgttggcgatactaaggatgaattcttcgatacagtagaagaaagcgatcagaaaacgagcaagagcaattcctccaagaacaccgatcattctaatcaaacagaaccaacgccttctttggctcagtatttaaggacctctaatacctacctttctagaaaaaaccaaagtaaacaagctgagcaagaaaagtttcacaagcctgaagctcctatggttcctgtaacgaaagtagttacaccaatcaaatctgctcttaaaaaatcttctggatcttccaaccatgactcttccatgtactctgataactctcccgccaatggcgcatacttgtctcttacgactgctgaaaatacgagattaaatgctcaaatgacgatgtccgacagcgtatcccgcagagcaagtttaaaaagatcttctataaaaagacctcagtctgtaggccagttcagaagcatcagatctaattctccttctcccccagagaaaataaacaataaacgccattctgctatacccttaggaaccccagagaagggtaaaccaaaaagaaattctgttatggcttctttatctaaaaattctcagcaaattcaagagcccgcaagtgtatatgagagcaatggcccaaataaacctaaaaaccaaatcaataagaatataaagagaggatctcagatcgcgcaaaacaataaaccttctacgaaggacatgaatagtattttgtaccccaaagaaccacctcctcgcaaatctagttttgagaagacgagaagcaatgaatcccatctcggatttaaaaagctttctttgagaaatggtaattttgaggaggcattgagtgaaagctataatgggcaagctagccagaatagcacaaatgtgaatagaaccgatacagcacaggagtttttcaaatatttgggtcattcttctagatttgcggattctgactctgaagatgagtcccaatttttcaaccaaggcccatctaaatacaacacagaaacagaaggcaataaaaccagcggtaacaaaaatagtaatggtggtaacggtgctttttcccttttcaagagcaaaagtaagcaaaaggaaaataatgtggtttcccctggagtctctagtcctaatcatactaccaccgatcctgccattacaagtaaaaaggtggacaagaaattcagcgggttatctttaagagctgccagtgaagctgaacctgcaaaaaatagcaacccttctatgaccaataggttacgcttctctagtaatccagagaacggcgaaagcaggctcccacaagcacaggaagtcagcgttacaaaagaaaagaagggtagtttcggcaaaaaattgaaaaaaatctttggtagaaagaaatga

SEQ ID NO: 8523 - DNA, 855 bp, Saccharomyces cerevisiae
atgacaggatctttaaacagacactcacttttgaacggggtaaaaaaaatgagaataatattatgcgatacaaacgaagtagttaccaatctctggcaggaatctataccccatgcatatattcaaaatgataagtatctttgtattcatcatgggcaccttcaatctcttatggattcaatgcgtaaaggtgatgcaatccatcatggccactcttacgcaattgtttcacctggtaactcgtatggctatcttggaggagggttcgataaagctttgtataattatttcgggggaaagccctttgaaacatggttcaggaatcagcttggaggaagatatcacacggtcggatctgctacagtggttgacctacagcgatgtcttgaagagaaaacaattgaatgtagagatggtattaggtatattattcatgttccgaccgttgtagccccatcagctcctatatttaatccgcagaatcccctcaagacagggtttgaaccggttttcaacgccatgtggaatgccttgatgcattctccaaaagacattgatggtcttattattcctggattatgtactgggtatgcaggtgtaccacccattatcagttgcaagagtatggcctttgcgttaagactatatatggcgggagatcacataagcaaagaattgaaaaatgtgctgatcatgtattatttgcaatatccgtttgaaccttttttcccggaaagttgcaaaatagagtgccaaaaactaggaatagatatcgaaatgctgaaatcctttaatgtagaaaaagatgcaatagaattgctcattcctagaaggattttgaccttggatttataa

SEQ ID NO: 8524 - DNA, 855 bp, Artificial Sequence
  Description of Artificial Sequence: Synthetic polynucleotide
atgacaggatctttaaacagacactcccttttgaacggggtaaaaaaaatgagaataatattatgcgatacaaacgaagtagttaccaatctctggcaggaatctataccccatgcatatattcaaaatgataagtatctttgtattcatcatgggcaccttcaatctcttatggattctatgcgtaaaggtgatgcaatccatcatggccactcttacgcaattgtttctcctggtaacagttatggctatcttggaggagggttcgataaagctttgtataattatttcgggggaaagccctttgaaacatggttcaggaatcagcttggaggaagatatcacacggtcggatctgctacagtggttgacttacagcgttgtcttgaagagaaaacaattgaatgtagagatggtattaggtatattattcatgttccgaccgttgtagccccatctgctcctatatttaatccgcagaatcccctcaagacagggtttgaaccggttttcaacgccatgtggaatgccttgatgcattctccaaaagacattgatggtcttattattcctggattatgtactgggtatgcaggtgtaccacccattatcagttgcaagagtatggcctttgcgttaagattatatatggcgggagatcacataagcaaagaattgaaaaatgtgttaatcatgtattatttgcaatatccgtttgaaccttttttcccggaaagttgcaaaatagagtgccaaaaattaggaatagatatcgaaatgttgaaatcctttaatgtagaaaaagatgcaatagaattgctcattcctagaaggattttgaccttggatttatga

SEQ ID NO: 8525 - DNA, 1689 bp, Saccharomyces cerevisiae
atgcaaacactagacgagacttcaaatctactccctccacctgaggaagctgaagcccctcccttggaacaaaaatttcatgaatataatttggccttacctaagtttcccattttgttttcgctatggttgggtagttttttgagttccttggatagcactattgtcgcaaatataatgaatagagttgctgaggaattctctgaatcaagtaaaaagcaatggattgcgacgagttttcttttgacaaatacggctttccaaccactatatgggaagctttctgatataacagggcggaagtcagcattattaaccgctcaatttttttttggccttgggtgcttattaacatgttttgccagaaacgtcacggaattctcaatagcaagagccatatgtggtattggtgcaggaggattgaatgctattagtagcattgctgttagtgacatatgtacagcaagagaaaggggcgtttaccagggatatgcgaatattgttttcgggtttggtcaattactaggtgctccgttgggtggtgtatttatagaaaccattggatggagggctctttttggtatccaagtacccgtgataatgttgtgctcggtattagcaatcaaaaacattaatattaagctattccatgttcctcctatgaaagaaagatataccttaaagaatctgtcacggatagatatatttggctcattaagcctggtggcgaccattagtggagttttatttttgtgctctagccagttgaacaagttgtatttagcattgtttaccattggtagctttattgtttttatcctggttgaacgttattacgcgactgagaaaattttaccattcgaactattgactcgctcattctgtttgagctcagcggtaacggttatatcttcatttgttgtatttggtgaaatctttaggtcaccaatctatttacaattgcttcaaaatattagtgtaacaaagactggcctctttttgattttcccctctatatcagttgcagtcggatcattggtaacaggatgggtattgcggaatacgaaaattaacctagcacactgtgcatatcaaatcatttttggtggtatgataatgcagctattgggtttgggattgggctatttcctactttcacacttgaatcctgactacaccatatatgatatgcttgagtctattacattcagatctaactcaatatggtggaaattgatatatgtgtttgcatcagtccttgtgtcctttggttacgcttgtctattagtggccacgttagtaagcatcgtattcaccgtcgaaaaatcacagcaaggaaccatgactggtgttttctatttgtggagatccattggtaacgttcttggtgcctctttaactttagtgtcctatgagaatagcctgtcgtccatgttatggaattatatgttcaaaaccaagcgtgatgacgaatatcacttcaccaaaaagcagtactactcccttatcaatgattcgagttacttgagagggcccaattttccaacggatatatttgttcgcattcttgatgtctacaaaaaggcattcctgatttcctatattccaaatatagccctggcagcagtgggaattgttttatcgttatatctggtgaaacatacttacaaacgtagttcaagttcttga

SEQ ID NO: 8526 - DNA, 1689 bp, Artificial Sequence
  Description of Artificial Sequence: Synthetic polynucleotide
atgcaaacattagacgagacttccaatttactccctccacctgaggaagctgaagcccctcccttggaacaaaaatttcatgaatataatttggccttacctaagtttcccattttgttttctctttggttgggtagttttttgagttccttggatagcactattgtcgcaaatataatgaatagagttgctgaggaattctctgaaagtagtaaaaagcaatggattgcgacgagttttcttttgacaaatacggctttccaaccattgtatgggaagctttctgatataacagggagaaagtctgcattattaaccgctcaatttttttttggccttgggtgcttattaacatgttttgccagaaacgtcacggaattctctatagcaagagccatatgtggtattggtgcaggaggattgaatgctattagtagcattgctgttagtgacatatgtacagcaagagaaaggggcgtttaccagggatatgcgaatattgttttcgggtttggtcaattattgggtgctccgttgggtggtgtatttatagaaaccattggatggagggctctttttggtatccaagtacccgtgataatgttgtgcagtgtattagcaatcaaaaacattaatattaagcttttccatgttcctcctatgaaagaaagatataccttaaagaatttatccagaatagatatatttggctctttaagcttggtggcgaccattagtggagttttatttttgtgctctagccagttgaacaagttgtatttagcattgtttaccattggtagctttattgtttttatcttggttgaacgttattacgcgactgagaaaattttaccattcgaattattgactcgctctttctgtttgagctctgcggtaacggttatatcttcttttgttgtatttggtgaaatctttaggtctccaatctatttacaattgcttcaaaatattagtgtaacaaagactggcctctttttgattttcccctctatatctgttgcagtcggatctttggtaacaggatgggtattgagaaatacgaaaattaacttggcacactgtgcatatcaaatcatttttggtggtatgataatgcagttattgggtttgggattgggctatttcttgctttctcacttgaatcctgactacaccatatatgatatgcttgagtctattacattcagatctaacagcatatggtggaaattgatatatgtgtttgcatctgtccttgtgtcctttggttacgcttgtcttttagtggccacgttagtaagcatcgtattcaccgtcgaaaaatctcagcaaggaaccatgactggtgttttctatttgtggagatccattggtaacgttcttggtgcctctttaactttagtgtcctatgagaatagcttatcttccatgttatggaattatatgttcaaaaccaagcgtgatgacgaatatcacttcaccaaaaagcagtactactcccttatcaatgattctagttacttgagagggcccaattttccaacggatatatttgttcgcattcttgatgtctacaaaaaggcattcttgatttcctatattccaaatatagccttggcagcagtgggaattgttttatctttatatttggtgaaacatacttacaaacgtagtagtagttcttga

SEQ ID NO: 8527 - DNA, 2478 bp, Saccharomyces cerevisiae
atgttgctactttcttggtcaagaattgctactaaggtagttagaaggcccgttcgcttccggtcctattacggcttgacccatatcaagagtttacatactcaatatcggctactcaataggctgcaagagaataagagcggtaacaagaacgaggacaataacgaagacgctaaacttaacaaagaaattcccacagacgaagaggttgaagcaataagaaaacaagtagaaaaatatatcgaacaaactaaaaataatactataccggctaactggaaagaacagaaacgcaaaattgatgaaagtattaggcgtttagaagatgctgtattgaaacaagaatctaacagaattcaagaagaaagaaaggaaaaagaggaggaaaatggtccttcaaaagccaagtcaaacagaacaaaagagcagggctactttgaaggtaacaatagcagaaatattccaccgccaccaccacctcctcccccaaaaccacctctaaatgatcctagtaatcctgtatcgaaaaatgttaacttattccagataggactaacttttttcctcctttcgtttttattggatctcctcaacagtttggaagagcaaagtgagataacgtggcaggattttagagagaaactattggcaaaaggttatgttgcgaagttgattgttgtcaacaagtccatggtgaaagtgatgttaaatgacaacggaaaaaaccaagccgacaattacggtcgcaacttctattatttcacaattggttcaattgatagcttcgaacacaaacttcagaaagcacaggacgaactggacattgataaggatttcagaatacctgtactatatgttcaagaaggcaattgggctaaagctatgttccaaattttgccaactgttttaatgattgcaggtattatttggttgacaagaagatcggcacaagcagcgggcggtagccgtggaggcatatttggtctgagtcgttctaaggctaaaaaatttaacactgaaacagacgttaagatcaagttcaaggacgttgccggatgcgatgaggctaaggaagaaattatggagtttgttagcttcttgaaagaaccttctcgttatgaaaaaatgggagctaaaattcctagaggtgcgattctatctggtccaccaggtaccggtaaaactttgcttgcaaaggcaacagcaggtgaagccggtgttccgttttattttgtttctggttcagaatttgtagaaatgtttgttggtgttggtgcagcaagagtaagagatttgttcaaaactgcaagagaaaatgcaccctcaattgtgtttattgacgaaattgatgctataggaaaagcaagacaaaagggtaatttttcaggtgccaatgatgagagagagaacacgctaaatcaaatgttagtagaaatggatggtttcactccagctgaccacgttgttgttttagctggtaccaatagacccgatattctcgataaagcattattaaggcctggtagatttgacaggcatatcaatatcgacaagcccgaacttgagggtagaaaagccatttttgctgttcatttacatcatttgaaacttgccggggaaatttttgatttgaaaaatagattagcggctttgacgccaggcttttctggtgctgatattgccaacgtttgtaacgaggccgccttgattgctgctagaagtgatgaagatgcagtaaaattgaatcattttgaacaagctatcgaaagagtcatcggtggagtggaacgcaaatccaagctactctctcccgaagagaagaaagtagtggcttaccacgaggctggtcatgctgtatgtggatggtacttaaaatacgcagatcctcttctgaaagtcagtattattccacgtggccagggcgcccttggttatgcacagtatttgccaggtgatatcttcttactaactgaacagcaacttaaggacagaatgaccatgtctctgggtggaagagtttctgaagaattacatttcccatcagttacaagtggcgcatctgatgacttcaaaaaagttactagcatggccacggcaatggtcacagaattaggcatgagtgataaaattggctgggtcaattaccagaagagagatgatagcgatttgacaaaaccattttcggacgagacaggtgacattattgattccgaagtatacagaatcgtccaagaatgccatgacagatgtacaaagctgcttaaagaaaaagcagaagatgtagagaagattgctcaagtactactgaaaaaagaagttttgacaagagaagatatgattgatttacttggtaagcgccctttcccagaaaggaatgatgcttttgataagtacttgaacgattacgaaacggaaaaaatcaggaaggaagaagaaaaaaacgaaaaacgtaatgagcctaagccatctacaaactga

SEQ ID NO: 8528 - DNA, 2478 bp, Artificial Sequence
  Description of Artificial Sequence: Synthetic polynucleotide
atgttgttactttcttggtccagaattgctactaaggtagttagaaggcccgttcgcttcagatcctattacggcttgacccatatcaagagtttacatactcaatataggttactcaataggttacaagagaataagagcggtaacaagaacgaggacaataacgaagacgctaaacttaacaaagaaattcccacagacgaagaggttgaagcaataagaaaacaagtagaaaaatatatcgaacaaactaaaaataatactataccggctaactggaaagaacagaaacgcaaaattgatgaaagtattaggcgtttagaagatgctgtattgaaacaagaatctaacagaattcaagaagaaagaaaggaaaaagaggaggaaaatggtccttccaaagccaagtctaacagaacaaaagagcagggctactttgaaggtaacaatagcagaaatattccaccgccaccaccacctcctcccccaaaaccacctttaaatgatcctagtaatcctgtatccaaaaatgttaacttattccagataggattaacttttttcctcctttcttttttattggatctcctcaacagtttggaagagcaaagtgagataacgtggcaggattttagagagaaacttttggcaaaaggttatgttgcgaagttgattgttgtcaacaagtccatggtgaaagtgatgttaaatgacaacggaaaaaaccaagccgacaattacggtcgcaacttctattatttcacaattggttccattgatagcttcgaacacaaacttcagaaagcacaggacgaattagacattgataaggatttcagaatacctgtattatatgttcaagaaggcaattgggctaaagctatgttccaaattttgccaactgttttaatgattgcaggtattatttggttgacaagaagaagtgcacaagcagcgggcggtagccgtggaggcatatttggtttgagtcgttctaaggctaaaaaatttaacactgaaacagacgttaagatcaagttcaaggacgttgccggatgcgatgaggctaaggaagaaattatggagtttgttagcttcttgaaagaaccttctcgttatgaaaaaatgggagctaaaattcctagaggtgcgattttatctggtccaccaggtaccggtaaaactttgcttgcaaaggcaacagcaggtgaagccggtgttccgttttattttgtttctggttctgaatttgtagaaatgtttgttggtgttggtgcagcaagagtaagagatttgttcaaaactgcaagagaaaatgcaccctctattgtgtttattgacgaaattgatgctataggaaaagcaagacaaaagggtaatttttctggtgccaatgatgagagagagaacacgttgaatcaaatgttagtagaaatggatggtttcactccagctgaccacgttgttgttttagctggtaccaatagacccgatattctcgataaagcattattaaggcctggtagatttgacaggcatatcaatatcgacaagcccgaacttgagggtagaaaagccatttttgctgttcatttacatcatttgaaacttgccggggaaatttttgatttgaaaaatagattagcggctttgacgccaggcttttctggtgctgatattgccaacgtttgtaacgaggccgccttgattgctgctagaagtgatgaagatgcagtaaaattgaatcattttgaacaagctatcgaaagagtcatcggtggagtggaacgcaaatccaagttactctctcccgaagagaagaaagtagtggcttaccacgaggctggtcatgctgtatgtggatggtacttaaaatacgcagatcctcttttgaaagtcagtattattccacgtggccagggcgcccttggttatgcacagtatttgccaggtgatatcttcttattaactgaacagcaacttaaggacagaatgaccatgtctttgggtggaagagtttctgaagaattacatttcccatctgttacaagtggcgcatctgatgacttcaaaaaagttactagcatggccacggcaatggtcacagaattaggcatgagtgataaaattggctgggtcaattaccagaagagagatgatagcgatttgacaaaaccattttctgacgagacaggtgacattattgattccgaagtatacagaatcgtccaagaatgccatgacagatgtacaaagcttcttaaagaaaaagcagaagatgtagagaagattgctcaagtattgttgaaaaaagaagttttgacaagagaagatatgattgatttacttggtaagcgccctttcccagaaaggaatgatgcttttgataagtacttgaacgattacgaaacggaaaaaatcaggaaggaagaagaaaaaaacgaaaaacgtaatgagcctaagccatctacaaactga

SEQ ID NO: 8529 - DNA, 684 bp, Saccharomyces cerevisiae
atgtctcctatgaaagttgcggttgtcggtgccagtggtaaagttggacgtttattgataaaccaattgaaggccaacgatagtttctcaacaccattagcgattgttagaacacaggatcaagtcaattatttcaagaatgaagtaggtgttgatgctagtttgacagatatagaaaacgcgtccgttagtgagatcacagacgctattaaggcttatgatgccgtggtctttagcgccggtgcgggtggtaaaggaatggaaagaattttcacggttgatctggatggctgtatcaaagttgttgaagcatgcgaaaaggctggtatcaaaaggttcgttgttgtttcagcgctcaaggcggaggatagagatttttggtataacattaagggtttgcgtgaatactatattgcaaagagatctgctgatcgtgaggttagaaactctaatttggattacactattttacagcctggatcgttggaactaaataaaggtaccggtcttttgcaaccccttgacaaattagaagagaaggcttctgttaactactccattaacagggaggatgtagcttcttttattgtggaaagcttgctacatccaaatgcaacagtgaaaaaaaccatttcgttggtaaatggcaacgagccaatggaaaaattcattcaaagtttgtag

SEQ ID NO: 8530 - DNA, 684 bp, Artificial Sequence
  Description of Artificial Sequence: Synthetic polynucleotide
atgtctcctatgaaagttgcggttgtcggtgccagtggtaaagttggacgtttattgataaaccaattgaaggccaacgatagtttcagtacaccattagcgattgttagaacacaggatcaagtcaattatttcaagaatgaagtaggtgttgatgctagtttgacagatatagaaaacgcgtccgttagtgagatcacagacgctattaaggcttatgatgccgtggtctttagcgccggtgcgggtggtaaaggaatggaaagaattttcacggttgatttggatggctgtatcaaagttgttgaagcatgcgaaaaggctggtatcaaaaggttcgttgttgtttctgcgctcaaggcggaggatagagatttttggtataacattaagggtttgcgtgaatactatattgcaaagagatctgctgatcgtgaggttagaaactctaatttggattacactattttacagcctggatctttggaattgaataaaggtaccggtcttttgcaaccccttgacaaattagaagagaaggcttctgttaactactccattaacagggaggatgtagcttcttttattgtggaaagcttgttgcatccaaatgcaacagtgaaaaaaaccatttctttggtaaatggcaacgagccaatggaaaaattcattcaaagtttgtga

SEQ ID NO: 8531 - DNA, 1308 bp, Saccharomyces cerevisiae
atgtcagattcagagggaggtctagcttccgaagttgaacatgagaagcggtcaagatctactagcaacagacccaattatgcaattgatactgaggatttagatattgatgaaaatgatgagaatgaagatgatgattacagagaagaagaagccaatgagggagtgaatgaagaagaaataagtgatgaggaggaacagataaataaaagcggaagaaacaaaaggaggcacgtggacgaagaagaggatttgtcagaggataaaggcgttactagatctagaaaccgttcaaagttcaaaaaaccagtatttcccggaatcgatgatgctgaggagaacttaaatcctttgaaagtggtcaatgaagaatatgttctaccagatgatcctgaaggtgagacgaagataactgcagatggtgatctattaggaggcagagaatttttagtgcgcaccttcacattaactgagaaggggaatcgaaagtttatgctggccaccgaaccggctaggatagtgggttttagagattcatatttattttttcaaactcaccccaacctttataagttcattctgaatcaaactcaaaagaacgacttgatagaccgtggcgttttaccttattcatatagaaatagacaaatcgctctagtcaccgctagaggcgtgtttaaagaatttggtgctaaaatcattcgtggcggcaaacatataaccgatgattattatgcttctgaattaagaacaaagggaaatgtaattgaaggaaaacttgctggtgatcctattgataaatccgcaagggccttagaaaccatgatgtatcctgcttccgagaatggcataaaccctgcaaaaaaccaggtggaattctttgaacacaggccacatggtcacatgagtaattctaatattattgcatcaggtagtaagctgagctctacaaattggctctatcagcattctgctgcgtgtagtagatttaatagcgatttgttttatgatagagtgaaggttcttcttgtagatcaacaaggcttgagagatgcatacacaaatatattacacataccagaatccacacagtcaaccactgttttaggatggaggagatcaaaaaacgatagtcccagcgacacaagcattgtgtatgagaccgttatacacgataacgatttgaataaaccgaaaacgggactgtcggaaatcccgaaagagatctatgaagacgttgttgatgaagacgttttaagggctatcaccgaacaacaaaatttcgaaaaatgcaacgaatatatttag

SEQ ID NO: 8532 - DNA, 1308 bp, Artificial Sequence
  Description of Artificial Sequence: Synthetic polynucleotide
atgagtgattctgagggaggtttagcttccgaagttgaacatgagaagagatctagatctactagcaacagacccaattatgcaattgatactgaggatttagatattgatgaaaatgatgagaatgaagatgatgattacagagaagaagaagccaatgagggagtgaatgaagaagaaataagtgatgaggaggaacagataaataaaagcggaagaaacaaaaggaggcacgtggacgaagaagaggatttgagtgaggataaaggcgttactagatctagaaaccgttccaagttcaaaaaaccagtatttcccggaatcgatgatgctgaggagaacttaaatcctttgaaagtggtcaatgaagaatatgttttgccagatgatcctgaaggtgagacgaagataactgcagatggtgatttattaggaggcagagaatttttagtgcgcaccttcacattaactgagaaggggaatagaaagtttatgttggccaccgaaccggctaggatagtgggttttagagattcttatttattttttcaaactcaccccaacctttataagttcattttgaatcaaactcaaaagaacgacttgatagaccgtggcgttttaccttattcttatagaaatagacaaatcgctttggtcaccgctagaggcgtgtttaaagaatttggtgctaaaatcattcgtggcggcaaacatataaccgatgattattatgcttctgaattaagaacaaagggaaatgtaattgaaggaaaacttgctggtgatcctattgataaatccgcaagggccttagaaaccatgatgtatcctgcttccgagaatggcataaaccctgcaaaaaaccaggtggaattctttgaacacaggccacatggtcacatgagtaattctaatattattgcatctggtagtaagttgagctctacaaattggctctatcagcattctgctgcgtgtagtagatttaatagcgatttgttttatgatagagtgaaggttcttcttgtagatcaacaaggcttgagagatgcatacacaaatatattacacataccagaatccacacagtctaccactgttttaggatggaggagaagtaaaaacgatagtcccagcgacacaagcattgtgtatgagaccgttatacacgataacgatttgaataaaccgaaaacgggattatctgaaatcccgaaagagatctatgaagacgttgttgatgaagacgttttaagggctatcaccgaacaacaaaatttcgaaaaatgcaacgaatatatttga

SEQ ID NO: 8533 - DNA, 1848 bp, Saccharomyces cerevisiae
atgtcatctatctctttgaaggaaattataccacctcagccttcgacacagcgtaactttactacgcatttatcgtatgaccctacaaccaacgcaattgcttacccatgtggaaaatctgcatttgtacgttgtttggacgatggagacagtaaagtacctccagtagtacaatttactggtcatggctcttcggtagtcacaacggtaaagttctctccaattaagggttcccagtacctatgctccggtgacgaatctggaaaagtgattgtttggggatggacatttgacaaagaaagcaattctgttgaagtgaatgttaagtctgaattccaagttttagcaggtccaatcagcgatatctcctgggattttgaagggcgaagactctgcgttgtgggagaaggtcgtgataactttggtgttttcatatcctgggattctggtaattccttaggtgaagtttcaggtcactcacaacgcatcaatgcttgtcatttgaagcaatctagacctatgagatctatgacagttggagatgatggatctgttgtcttttatcaaggacctccatttaagttctctgccagtgacagaacacaccacaaacaaggctcatttgtcagggatgttgaattttcacctgacagcggtgaatttgttattacggtagggtctgacagaaagatttcttgctttgatggcaaatcaggtgagtttcttaaatacatagaggatgatcaagaaccagttcaaggtggtatatttgcactatcgtggcttgattcccaaaagtttgctaccgtaggagcagacgctaccattagggtttgggacgtcacgacttcaaaatgcgttcaaaaatggaccttagacaagcaacaactgggaaatcaacaagttggtgttgttgcaacaggaaacggaaggattatttctctttcactggatgggaccttaaacttctatgaacttggacatgacgaggttttaaaaaccattagtggtcataacaagggtattactgctttgacagtcaacccactaatcagtgggtcatatgatggtaggattatggaatggtctagctcttccatgcaccaagatcactccaacttgattgtatcattggataatagtaaagcgcaagaatactccagtatttcttgggatgatactttgaaagtgaacggtattactaagcatgaatttggatcgcaaccaaaggttgctagtgcgaacaatgatggcttcactgcagtactaacaaatgatgatgatttgttgatattacagtcttttacgggcgatataatcaagagtgtaagactgaactcaccaggctctgccgttagcttgagccaaaattacgttgcagttggtttggaagaaggtaatactattcaggtattcaaattatcagatttggaagtcagttttgatttaaaaacacctcttcgcgcaaaaccctcgtacatatcaatttcgccatctgaaacatacatcgctgctggagatgttatgggcaagatattgctatatgatttacaatcaagagaagtgaaaacttcaagatgggctttccacaccagtaaaatcaacgccatttcatggaaacctgctgaaaagggagcaaacgaagaggaaattgaagaggacttagttgccactggttctttagacaccaatatttttatttactccgtcaaaagacctatgaaaatcattaaggcgttgaatgctcacaaggacggtgttaacaaccttttatgggaaacaccatctaccttggttagttctggtgcggacgcttgcattaaaaggtggaatgttgtcctcgagtga

SEQ ID NO: 8534 - DNA, 1848 bp, Artificial Sequence
  Description of Artificial Sequence: Synthetic polynucleotide
atgtcttctatctctttgaaggaaattataccacctcagccttctacacagcgtaactttactacgcatttatcttatgaccctacaaccaacgcaattgcttacccatgtggaaaatctgcatttgtacgttgtttggacgatggagacagtaaagtacctccagtagtacaatttactggtcatggctcttctgtagtcacaacggtaaagttctctccaattaagggttcccagtacttgtgctccggtgacgaatctggaaaagtgattgtttggggatggacatttgacaaagaaagcaattctgttgaagtgaatgttaagtctgaattccaagttttagcaggtccaatcagcgatatctcctgggattttgaagggagaagactctgcgttgtgggagaaggtcgtgataactttggtgttttcatatcctgggattctggtaattccttaggtgaagtttctggtcactctcaacgcatcaatgcttgtcatttgaagcaatctagacctatgagatctatgacagttggagatgatggatctgttgtcttttatcaaggacctccatttaagttctctgccagtgacagaacacaccacaaacaaggctcttttgtcagggatgttgaattttctcctgacagcggtgaatttgttattacggtagggtctgacagaaagatttcttgctttgatggcaaatctggtgagtttcttaaatacatagaggatgatcaagaaccagttcaaggtggtatatttgcattatcttggcttgattcccaaaagtttgctaccgtaggagcagacgctaccattagggtttgggacgtcacgacttctaaatgcgttcaaaaatggaccttagacaagcaacaattaggaaatcaacaagttggtgttgttgcaacaggaaacggaaggattatttctctttctttagatgggaccttaaacttctatgaacttggacatgacgaggttttaaaaaccattagtggtcataacaagggtattactgctttgacagtcaacccattgatcagtgggtcttatgatggtaggattatggaatggtctagctcttccatgcaccaagatcactccaacttgattgtatctttggataatagtaaagcgcaagaatactccagtatttcttgggatgatactttgaaagtgaacggtattactaagcatgaatttggatctcaaccaaaggttgctagtgcgaacaatgatggcttcactgcagtattaacaaatgatgatgatttgttgatattacagtcttttacgggcgatataatcaagagtgtaagattgaactctccaggctctgccgttagcttgagccaaaattacgttgcagttggtttggaagaaggtaatactattcaggtattcaaattaagtgatttggaagtcagttttgatttaaaaacacctcttcgcgcaaaaccctcttacatatctatttctccatctgaaacatacatcgctgctggagatgttatgggcaagatattgttatatgatttacaatctagagaagtgaaaacttccagatgggctttccacaccagtaaaatcaacgccatttcttggaaacctgctgaaaagggagcaaacgaagaggaaattgaagaggacttagttgccactggttctttagacaccaatatttttatttactccgtcaaaagacctatgaaaatcattaaggcgttgaatgctcacaaggacggtgttaacaaccttttatgggaaacaccatctaccttggttagttctggtgcggacgcttgcattaaaaggtggaatgttgtcctcgagtga

SEQ ID NO: 8535 - DNA, 1542 bp, Saccharomyces cerevisiae
atgtcgactgctaggcctagaataatcacttcgaaggctccattattgcctcaacagactaccccggagcagcgttactggcgtcaatacacttccgcacaactggttaaagaacataatagcgttactcacatatcattcaatcctcaacatcctcatgattttgcagtaacttcctcaaccagagttcaaatattttcttcaagaactaggcaagtgatcaagaccttttcaagatttaaagatgttgtctattctgcatcctttaggagtgatggtaaattgctttgtgccggtgatgctaccggtttagtgtctgtatacgacagttataatcccaggactatccttttatctataaacgcttccacacatcccacacatgttacgaaattccatacgcaagataacaaaattctggctacggcgagtgacgatagagtgacaagactttgggatatatccaacgcatatgagccacaattagagctcaccggagctactgactatgttcgtaccttatcatttatcccagcagccccacatttggttgcaacaggctcatacgacggtttgatcagattatatgacacaagatctagcggatccacgccaatttattctctgaatcatgaccaacctgttgaaaatgttattgcagtatctccaacccaaattgtttcttgcggtggcaataatttcaaagtgtgggacttgaccagtaacaagaaattatacgaacgtggcaatttcaataaggctgtgacatgcttggactatgttgaaaattttgattctccaatgcaatcggcgttgatcgcttcttccttagatggtcatgtcaaagtctttgatcctttagacaatttccaagtcaaatttggctggaaattttcgggtcccgtactaagttgtgctgtctcccctagtaccgcacaagggaataggcatttagtagcaggtttatcatcaggactactagccattagaactaaaaagaaagagaaacgttcttccgataaagaaaacgcacccgccagttttaataagaatgcgaaaagtaataacttccagagaatgatgcgaggctcggaataccaaggtgatcaagagcatataatccacaatgataaggtaagatctcaacgtcgtatgcgtgcattcgaaaggaacataaatcagtttaaatggagcgaagcactcgacaatgcctttgtaccaggtatggccaaagagttgacacttactgttcttcaagaactacgcaaacgtggcaaagttcgtgtagcgctatatggtagagatgaatctacattagagccgctactgaattggtgcttaaaaggtattgaagatgtgagatcagcatctattgtagcggattgggtcgccgtggttttagaattatatgggaatacgttagaaagctctccagttcttcaagaattgatgatagatttgaaaactaaagttagacatgaaattcataagtctaaagaagctcaaagaattgaaggtatgcttcaacttttaacgagttaa

SEQ ID NO: 8536 - DNA, 1542 bp, Artificial Sequence
  Description of Artificial Sequence: Synthetic polynucleotide
atgtctactgctaggcctagaataatcacttctaaggctccattattgcctcaacagactaccccggagcagcgttactggcgtcaatacacttccgcacaattggttaaagaacataatagcgttactcacatatctttcaatcctcaacatcctcatgattttgcagtaacttcctccaccagagttcaaatattttcttctagaactaggcaagtgatcaagaccttttccagatttaaagatgttgtctattctgcatcctttaggagtgatggtaaattgctttgtgccggtgatgctaccggtttagtgtctgtatacgacagttataatcccaggactatccttttatctataaacgcttccacacatcccacacatgttacgaaattccatacgcaagataacaaaattttggctacggcgagtgacgatagagtgacaagactttgggatatatccaacgcatatgagccacaattagagctcaccggagctactgactatgttcgtaccttatcttttatcccagcagccccacatttggttgcaacaggctcttacgacggtttgatcagattatatgacacaagatctagcggatccacgccaatttattctttgaatcatgaccaacctgttgaaaatgttattgcagtatctccaacccaaattgtttcttgcggtggcaataatttcaaagtgtgggacttgaccagtaacaagaaattatacgaacgtggcaatttcaataaggctgtgacatgcttggactatgttgaaaattttgattctccaatgcaaagtgcgttgatcgcttcttccttagatggtcatgtcaaagtctttgatcctttagacaatttccaagtcaaatttggctggaaattttctggtcccgtattgagttgtgctgtctcccctagtaccgcacaagggaataggcatttagtagcaggtttatcttctggattattagccattagaactaaaaagaaagagaaacgttcttccgataaagaaaacgcacccgccagttttaataagaatgcgaaaagtaataacttccagagaatgatgagaggctctgaataccaaggtgatcaagagcatataatccacaatgataaggtaagatctcaacgtcgtatgcgtgcattcgaaaggaacataaatcagtttaaatggagcgaagcactcgacaatgcctttgtaccaggtatggccaaagagttgacacttactgttcttcaagaattacgcaaacgtggcaaagttcgtgtagcgttatatggtagagatgaatctacattagagccgttattgaattggtgcttaaaaggtattgaagatgtgagaagtgcatctattgtagcggattgggtcgccgtggttttagaattatatgggaatacgttagaaagctctccagttcttcaagaattgatgatagatttgaaaactaaagttagacatgaaattcataagtctaaagaagctcaaagaattgaaggtatgcttcaacttttaacgagttga

SEQ ID NO: 8537 - DNA, 1437 bp, Saccharomyces cerevisiae
atgccttctttcaatcctgttagattcttagagttaccaattgacattagaaaagaagtttacttccatttagatggtaatttttgcggagcacatccctacccaatagatatattatacaaatctaatgatgtggagcttccaggaaaaccaagttataaaaggtctaagagatctaagaaattattgagatacatgtatcctgtttttgccacgtatttgaacattttcgaatactctccgcaactcattgaaaaatggcttgagtatgcattttggttgcgctatgattgcctggttttggactgtttcaaagtaaaccatctttatgacggaacgcttatagatgcattagaatggacgtaccttgataatgaacttcgactggcctacttcaataaggccagtatgttagaagtttggtatacttttaaagagtacaagaagtgggtgatagacagtgttgcttttgacgagcttgacttacttaatgtaagtaatattcaattcaacattgataatctaactccacaactagtagacaaatgcttatcaattttagaacagaaagatttattcgcaacaatcggggaggtacaatttggacaagatgaagaagtaggagaagagaaagatgttgatgttagtggagctaattctgacgaaaactcctcacctagctccacaattaaaaacaagaaaaggtcagcatccaaaagatcacattcagataatggcaatgtgggagcaacgcacaaccaactaacaagtatttctgttataagaacaataagaagtatggaatccatgaagagcctgcggaagatcactgtgagaggagagaaattatatgagttgctaataaattttcatgggttcagagacaatcctggtaaaacgattagttacatagtgaaacgtaggataaatgaaatacgcctatcacgcatgaatcaaatttccagaaccggactagctgactttacaagatgggacaacttgcaaaagcttgtattaagtagagtagcttacatcgacctgaatagcattgtctttcccaaaaattttaaatctctgacaatgaaacgtgtaagtaaaatcaagtggtggaacatcgaggaaaatatactaaaggaactaaaagtcgataagagaacttttaaatcgttgtacataaaggaagatgatagtaaattcacaaaattttttaatttacgacacacaagaataaaagagcttgacaaaagtgaaattaatcaaataacataccttcgatgtcaagcaatagtttggctatcttttcggactttgaaccatatcaagctacaaaatgtatctgaagtttttaacaatatcatcgtacctagagcattgttcgatagtaaacgagtagagatttatcgatgtgaaaaaatctctcaggttttggtaatataa

SEQ ID NO: 8538 - DNA, 1437 bp, Artificial Sequence
  Description of Artificial Sequence: Synthetic polynucleotide
atgccttctttcaatcctgttagattcttagagttaccaattgacattagaaaagaagtttacttccatttagatggtaatttttgcggagcacatccctacccaatagatatattatacaaatctaatgatgtggagcttccaggaaaaccaagttataaaaggtctaagagatctaagaaattattgagatacatgtatcctgtttttgccacgtatttgaacattttcgaatactctccgcaactcattgaaaaatggcttgagtatgcattttggttgcgctatgattgcttagttttggactgtttcaaagtaaaccatctttatgacggaacgcttatagatgcattagaatggacgtaccttgataatgaacttagattggcctacttcaataaggccagtatgttagaagtttggtatacttttaaagagtacaagaagtgggtgatagacagtgttgcttttgacgagcttgacttacttaatgtaagtaatattcaattcaacattgataatttaactccacaattggtagacaaatgcttatccattttagaacagaaagatttattcgcaacaatcggggaggtacaatttggacaagatgaagaagtaggagaagagaaagatgttgatgttagtggagctaattctgacgaaaactcctcccctagctccacaattaaaaacaagaaaaggtctgcatccaaaagaagccattctgataatggcaatgtgggagcaacgcacaaccaattgacaagtatttctgttataagaacaataagaagtatggaatccatgaagagcttaagaaagatcactgtgagaggagagaaattatatgagttgttaataaattttcatgggttcagagacaatcctggtaaaacgattagttacatagtgaaacgtaggataaatgaaatacgcttatctcgcatgaatcaaatttccagaaccggattggctgactttacaagatgggacaacttgcaaaagcttgtattaagtagagtagcttacatcgacttgaatagcattgtctttcccaaaaattttaaatctttaacaatgaaacgtgtaagtaaaatcaagtggtggaacatcgaggaaaatatattgaaggaattgaaagtcgataagagaacttttaaatctttgtacataaaggaagatgatagtaaattcacaaaattttttaatttaagacacacaagaataaaagagcttgacaaaagtgaaattaatcaaataacataccttcgctgtcaagcaatagtttggttatcttttagaactttgaaccatatcaagttacaaaatgtatctgaagtttttaacaatatcatcgtacctagagcattgttcgatagtaaaagagtagagatttatagatgtgaaaaaatctctcaggttttggtaatatga

SEQ ID NO: 8539 - DNA, 675 bp, Saccharomyces cerevisiae
atgcacaaaacccacagtacaatgtccggaaagtcgatgaaagtaattggggttttggcgttgcaaggtgcctttttggagcataccaaccatttaaaaaggtgtttggctgaaaacgactacggaataaagatagaaatcaaaactgtaaaaactcctgaggatctagcccagtgcgacgccttaattattcccggaggagaatctacgtcgatgtccctcatcgctcaaagaacaggcttatatccttgtttatacgaatttgttcataatccggaaaaggtagtttggggtacttgtgctggtctcatctttttaagcgcgcaattagaaaacgaaagtgccctagtaaagactttaggtgtgttgaaggtcgacgtgagaagaaacgcatttggaagacaagctcaatcttttacacaaaagtgtgatttttccaatttcatacctggctgtgataattttcctgctacatttattcgcgcacccgtgatcgagagaattcttgatcctatcgcggttaaaagtttatatgaattgccagtgaatggaaaggatgtggttgtagctgcaacgcaaaatcataatatccttgtgacttcttttcatccagagcttgctgacagtgatacaagatttcatgattggtttatcagacagtttgtttctaattaa

SEQ ID NO: 8540 - DNA, 675 bp, Artificial Sequence
  Description of Artificial Sequence: Synthetic polynucleotide
atgcacaaaacccacagtacaatgtccggaaagtctatgaaagtaattggggttttggcgttgcaaggtgcctttttggagcataccaaccatttaaaaaggtgtttggctgaaaacgactacggaataaagatagaaatcaaaactgtaaaaactcctgaggatttggcccagtgcgacgccttaattattcccggaggagaatctacgtctatgtccctcatcgctcaaagaacaggcttatatccttgtttatacgaatttgttcataatccggaaaaggtagtttggggtacttgtgctggtctcatctttttaagcgcgcaattagaaaacgaaagtgccttggtaaagactttaggtgtgttgaaggtcgacgtgagaagaaacgcatttggaagacaagctcaatcttttacacaaaagtgtgatttttccaatttcatacctggctgtgataattttcctgctacatttattcgcgcacccgtgatcgagagaattcttgatcctatcgcggttaaaagtttatatgaattgccagtgaatggaaaggatgtggttgtagctgcaacgcaaaatcataatatccttgtgacttcttttcatccagagcttgctgacagtgatacaagatttcatgattggtttatcagacagtttgtttctaattga

SEQ ID NO: 8541 - DNA, 894 bp, Saccharomyces cerevisiae
atgactggagaagactttaagatcaagagtggtctcgcccaaatgttaaaaggtggcgttattatggatgttgttactccagagcaggcaaaaatagctgaaaaatctggtgcatgtgcggtaatggcattagaatccatcccagcagatatgcgtaagtcaggaaaggtttgccgcatgtcagatccgaagatgattaaggacatcatgaactccgtttccattcccgtcatggctaaggtaaggattggccattttgttgaagctcaaattattgaggcattggaagttgactatattgacgaaagtgaagtcttgactcctgctgattggactcaccacattgaaaaggacaaattcaaagttccatttgtttgtggcgctaaagacttaggtgaagctttgagaagaattaatgaaggcgccgctatgattcgtaccaagggtgaagctggaacgggcgatgtctctgaagccgtcaagcatataaggagaattacagaggagataaaggcgtgccaacaattgaagagcgaagatgacattgcaaaagttgctgaggaaatgagggtaccagtttctttgctgaaagatgttttagaaaaaggtaagttgccagtagtaaattttgctgcaggtggtgtagcaacgccagccgatgccgcattgttaatgcagttgggttgtgatggtgtgtttgttggctcaggaatttttaaatcatctaatcctgtaaggttggccactgcagtagtagaggctaccactcactttgacaatcccagcaaattgttggaagtatctagtgacttaggagagttaatgggtggtgtatcaatcgaatctattagtcatgcttccaatggagtaagactttccgaaattgggtggtga

SEQ ID NO: 8542 - DNA, 894 bp, Artificial Sequence
  Description of Artificial Sequence: Synthetic polynucleotide
atgactggagaagactttaagatcaagagtggtctcgcccaaatgttaaaaggtggcgttattatggatgttgttactccagagcaggcaaaaatagctgaaaaatctggtgcatgtgcggtaatggcattagaatccatcccagcagatatgcgtaagagtggaaaggtttgccgcatgagtgatccgaagatgattaaggacatcatgaactccgtttccattcccgtcatggctaaggtaaggattggccattttgttgaagctcaaattattgaggcattggaagttgactatattgacgaaagtgaagtcttgactcctgctgattggactcaccacattgaaaaggacaaattcaaagttccatttgtttgtggcgctaaagacttaggtgaagctttgagaagaattaatgaaggcgccgctatgattcgtaccaagggtgaagctggaacgggcgatgtctctgaagccgtcaagcatataaggagaattacagaggagataaaggcgtgccaacaattgaagagcgaagatgacattgcaaaagttgctgaggaaatgagggtaccagtttctttgttgaaagatgttttagaaaaaggtaagttgccagtagtaaattttgctgcaggtggtgtagcaacgccagccgatgccgcattgttaatgcagttgggttgtgatggtgtgtttgttggcagtggaatttttaaatcttctaatcctgtaaggttggccactgcagtagtagaggctaccactcactttgacaatcccagcaaattgttggaagtatctagtgacttaggagagttaatgggtggtgtatctatcgaatctattagtcatgcttccaatggagtaagactttccgaaattgggtggtga

SEQ ID NO: 8543 - DNA, 1104 bp, Saccharomyces cerevisiae
atgcacataaatgtgagaggaactaggaaaataatttccaacgtttcatccttcacaccaagatatgaatttccaaagtacagtatgcctctcactgatttcaagggacaccaagtcaaagctcttaaaacatttgaaaagttgcttcctcaaatgaatatgataatagaactacgtgatatacgtgccccgttatctacaaggaatgtggttttcgatcgaatagcaagaaaggaacacgatgtgatgaaattagtggtatacactagaaaggatcttatgcccggcaataagccatatataggaaagttaaagaattggcatgaagagctgggagaaaagtttattttactggattgccgaaacaaaactgacgtcaggaatctactaaaaatactagaatggcaaaattacgaactagaaacaaatggcggatatctacctatgggataccgagcattgattactggcatgccaaatgttggaaaatctactttaataaatagcttgaggacaatttttcacaatcaagtgaatatgggaagaaaatttaagaaagtagccaaaactggtgcagaagctggtgttactagagccacaagcgaggttattagagtaacttcacggaatacggaatcaagaaatgaaatatacttgatagatactccaggaatcggtgttcccggtcgcgtttcagatcataatagaatgctaggactggcgttgtgtggtagtgttaaaaataaccttgtagatccaatatttcaagcggattaccttttatacctaatgaacttgcaaaatttgaacgatggaagaacagagctttaccctggaagcaccaattctcccacaaatgatatatatgatgttttaagaaggcttcaagtgaataaaagccaaaatgaaaaatcaacggctatcgagtggactaacaaatggaggttgcatggaaagggtatcatatttgaccctgaggtactgttgaataatgacgagttttcttataaaaactatgtaaatgatcaattggaaaagttaggagatctttcgtatgagggattgtctaacaaactaaaagggaaccccaatcaagtattctag

SEQ ID NO: 8544 - DNA, 1104 bp, Artificial Sequence
  Description of Artificial Sequence: Synthetic polynucleotide
atgcacataaatgtgagaggaactaggaaaataatttccaacgtttcttccttcacaccaagatatgaatttccaaagtacagtatgcctctcactgatttcaagggacaccaagtcaaagctcttaaaacatttgaaaagttgcttcctcaaatgaatatgataatagaattgcgtgatatacgtgccccgttatctacaaggaatgtggttttcgatagaatagcaagaaaggaacacgatgtgatgaaattagtggtatacactagaaaggatcttatgcccggcaataagccatatataggaaagttaaagaattggcatgaagagttaggagaaaagtttattttattagattgcaggaacaaaactgacgtcaggaatttattgaaaatattggaatggcaaaattacgaattggaaacaaatggcggatatttacctatgggatacagagcattgattactggcatgccaaatgttggaaaatctactttaataaatagcttgaggacaatttttcacaatcaagtgaatatgggaagaaaatttaagaaagtagccaaaactggtgcagaagctggtgttactagagccacaagcgaggttattagagtaacttctagaaatacggaatctagaaatgaaatatacttgatagatactccaggaatcggtgttcccggtcgcgtttctgatcataatagaatgcttggattagcgttgtgtggtagtgttaaaaataaccttgtagatccaatatttcaagcggattaccttttatacttgatgaacttgcaaaatttgaacgatggaagaacagagctttaccctggaagcaccaattctcccacaaatgatatatatgatgttttaagaaggcttcaagtgaataaaagccaaaatgaaaaatctacggctatcgagtggactaacaaatggaggttgcatggaaagggtatcatatttgaccctgaggtacttttgaataatgacgagttttcttataaaaactatgtaaatgatcaattggaaaagttaggagatctttcctatgagggattgtctaacaaattgaaagggaaccccaatcaagtattctga

SEQ ID NO: 8545 - DNA, 1839 bp, Saccharomyces cerevisiae
atgaataaattctgtctactacctttccatggcaagaggataggcgtggccaatattccttttaccatattattcaaaaagggcccttattttcttcatagtcacatcacagcagtttattactcgacaaagggcaaaaatgacagtcatgaacaaagtcgtgtatccaaaaagtctacttttacccctctggaaacaccttggtacctcaggattgttgacaatgaaaaggaactaatggaaggtaagaaaaataaccaccacacgatgaacaaagaattggagatacctaaaacctctccaaactcattaagaaaaatagcagacctcctaactggtaaacttggtctggatgacttcctggttttcgatttacggaagaaaagcccaaactctgtttcagccgttaataagttgggtgacttcatggtcatatgtacagcaagatctaccaaacattgtcataaaagtttcttagagttgaacaagtttttgaagcacgaattctgtagtagtgcatacgttgaaggaaactttaatgagcgacaagaaagtagaagaaaaagaagattagcaagaaaatccaaccttagtaaactattaggtagaagctctgaatgctctgcaaaagacttaaatagtgaggcttggtatatgattgattgtcgtgtcgatggtatttttgtaaatattttgacacagagaaggcgtaatgaattgaatttagaagagctgtatgcacctgaaaatgagaaatctaagttccaaaatatagattcaggtaatgtccctactatttcaggggtaaatgaaatttcaagcaacaataatattcttttaggcctaagaagactggcccagcaaaggagaaggtattcaactatcaacccaaacgggctaagtaatttaagatactttctacaaaaggaagacttcaaaggagccaataagataattcagagtagtagtggtactgaaactcacaatatacgtactttggagcatgttaaaaatactttaaaggatttggtaggacaagagaggaaagtagatgttgttcaatggaagtccttatttgacgaacattcaacttttttaaccataaatcaatcggctgcatattggccactacgactagaatatgcgatacttctaaacaaagcagacccacaattttattcagatcgtgttttcctcaaggattatctacttttaaaaaaatcgttggggcaagagttaataagggaagatctaatcgctcttttagaaatggttttgaaaacgcagcattctagtcattcatactttaacctagtaaagcaaaatagggtgattatcagagctttgaacctatttaaaggtctacaaacagaggacgatggctcagttgtttacgatgaagtggtaatatcccttcttttaaattccatggtcgcggatgaacgggtaaaattgagatcactctacgagacaatagaccacattttccaaacatttggagataagttgacttcaggcatgattgtctcaatattgcaaaacttggccaaaatcaaagactggaataagctacttcaagtctgggaagctatcacaccaacggaaggggaaggtcaggacaaaaggccctggaatgaatttataaatgttatcaatcaaagcggtgatagtcacgttatatcgaaaatcgtaaataatggtcatttgctatggatcagacgtttaaatgttaacgtaactccggagttatgcaactccattaaagcgttattaaaaaccgctggaatggagaattccacattggaagaattcctagtccgtggaacaaacaatcaatag

SEQ ID NO: 8546 - DNA, 1839 bp, Artificial Sequence
  Description of Artificial Sequence: Synthetic polynucleotide
atgaataaattctgtttattgcctttccatggcaagaggataggcgtggccaatattccttttaccatattattcaaaaagggcccttattttcttcatagtcacatcacagcagtttattactccacaaagggcaaaaatgacagtcatgaacaaagtcgtgtatccaaaaagtctacttttacccctttggaaacaccttggtacctcaggattgttgacaatgaaaaggaattgatggaaggtaagaaaaataaccaccacacgatgaacaaagaattggagatacctaaaacctctccaaactctttaagaaaaatagcagacctcttaactggtaaacttggtttggatgacttcttggttttcgatttaagaaagaaaagcccaaactctgtttctgccgttaataagttgggtgacttcatggtcatatgtacagcaagatctaccaaacattgtcataaaagtttcttagagttgaacaagtttttgaagcacgaattctgtagtagtgcatacgttgaaggaaactttaatgagagacaagaaagtagaagaaaaagaagattagcaagaaaatccaaccttagtaaattattaggtagaagctctgaatgctctgcaaaagacttaaatagtgaggcttggtatatgattgattgtcgtgtcgatggtatttttgtaaatattttgacacagagaaggcgtaatgaattgaatttagaagagttgtatgcacctgaaaatgagaaatctaagttccaaaatatagattctggtaatgtccctactatttctggggtaaatgaaatttctagcaacaataatattcttttaggcttaagaagattggcccagcaaaggagaaggtattctactatcaacccaaacgggttgagtaatttaagatactttttgcaaaaggaagacttcaaaggagccaataagataattcagagtagtagtggtactgaaactcacaatatacgtactttggagcatgttaaaaatactttaaaggatttggtaggacaagagaggaaagtagatgttgttcaatggaagtccttatttgacgaacattctacttttttaaccataaatcaatctgctgcatattggccattaaggttagaatatgcgatacttttgaacaaagcagacccacaattttattctgatcgtgttttcctcaaggattatttacttttaaaaaaatctttggggcaagagttaataagggaagatttgatcgctcttttagaaatggttttgaaaacgcagcattctagtcattcttactttaacttggtaaagcaaaatagggtgattatcagagctttgaacttgtttaaaggtttacaaacagaggacgatggctctgttgtttacgatgaagtggtaatatcccttcttttaaattccatggtcgcggatgaaagagtaaaattgagaagtctctacgagacaatagaccacattttccaaacatttggagataagttgacttctggcatgattgtcagtatattgcaaaacttggccaaaatcaaagactggaataagcttcttcaagtctgggaagctatcacaccaacggaaggggaaggtcaggacaaaaggccctggaatgaatttataaatgttatcaatcaaagcggtgatagtcacgttatatccaaaatcgtaaataatggtcatttgttatggatcagacgtttaaatgttaacgtaactccggagttatgcaactccattaaagcgttattaaaaaccgctggaatggagaattccacattggaagaattcttggtccgtggaacaaacaatcaatga

SEQ ID NO: 8547 - DNA, 894 bp, Saccharomyces cerevisiae
atgcctatcaaagaaactgataaagaagttgttttgactcatccagctgatgagaccaccagcgttcatattctaaagtacggtgctacagtttattcttggaaattgaaatctgaagaacagttgtggttgtctactgctgctaaattggatggtagcaaacctgtgagaggtggtatacctttggtctttcctgtattcgggaaaaatagcaccgatgaacatttgagtaaattacctcaacatggtcttgcaagaaattctacttgggagtttttgggtcaaactaaggaaaacccaccgaccgtacaatttggcttgaaaccagaaattgctaacccagaattgaccaaattgtggccaatggattatcttttgattttgactgttgaattaggctccgattatttgaaaactgccatagaagtagaaaacacatctagttccaaggaattaaagttcaactggttgttccatacatacttccgtatcgaagatattgaaggaacaatggtctctaatttagctggcatgaaactttatgaccaactgttgaaggaatcctacgtcgacaagcacccagtcgttaccttcaatcaagaaaccgatgtaatttatcagaatgtcagcgccgaacgggccattcaaatagttgacaagggcgttcaaattcacactctaaaaagatacaacttgcccgacactgttgtttggaatccatggattgagaagtctcaagggatggccgatttcgaaccaaaaactggttaccaacaaatgatatgtattgaacctggtcatgttcatgattttatttccttggctcctggtaaaaaatggaatgcttatcaattactttgcaaagaagaattgaaatatcaagctattcaataa

SEQ ID NO: 8548 - DNA, 894 bp, Artificial Sequence
  Description of Artificial Sequence: Synthetic polynucleotide
atgcctatcaaagaaactgataaagaagttgttttgactcatccagctgatgagaccaccagcgttcatattttgaagtacggtgctacagtttattcttggaaattgaaatctgaagaacagttgtggttgtctactgctgctaaattggatggtagcaaacctgtgagaggtggtatacctttggtctttcctgtattcgggaaaaatagcaccgatgaacatttgagtaaattacctcaacatggtcttgcaagaaattctacttgggagtttttgggtcaaactaaggaaaacccaccgaccgtacaatttggcttgaaaccagaaattgctaacccagaattgaccaaattgtggccaatggattatcttttgattttgactgttgaattaggctccgattatttgaaaactgccatagaagtagaaaacacatctagttccaaggaattaaagttcaactggttgttccatacatacttccgtatcgaagatattgaaggaacaatggtctctaatttagctggcatgaaactttatgaccaattattgaaggaatcctacgtcgacaagcacccagtcgttaccttcaatcaagaaaccgatgtaatttatcagaatgtcagcgccgaaagagccattcaaatagttgacaagggcgttcaaattcacactttgaaaagatacaacttgcccgacactgttgtttggaatccatggattgagaagtctcaagggatggccgatttcgaaccaaaaactggttaccaacaaatgatatgtattgaacctggtcatgttcatgattttatttccttggctcctggtaaaaaatggaatgcttatcaattactttgcaaagaagaattgaaatatcaagctattcaatga

SEQ ID NO: 8549 - DNA, 1863 bp, Saccharomyces cerevisiae
atgagagactctaatcatcgatcattaacgtcgaacaagcctatagtaacaataacatctactgtctatgaccgaagggcattggatatcaactctagtattccgttaataaactccctaaactacttaacatatctaacctctaattcatcaaaagttagggaaacggtagctaacgacggtgctctcgaaagattagtctcaatattgaggagttgtcatttaagtttgtttgagttgctggatttggatttagaaaattttaatgagcacgaaaacataaaggatctatggaaggagaaaagactagcactatgcgcttggaaatggactttaacatttcagtgcttagtattgacaggtactagagggacagaacaaattcgtaaaaaagtggtaatgtctggggtcttatctgtgctggtcacagtattggataactatttactatatcataaaaattacgacttcatcaaagatcaaacaatgacctttgacttcaaagggataaccacggagacaatgtataaattcatgagaaaagatgagaatgaaacatatcagcagtatatagagttcattacaggtcaggataaattgaagttgtcaactgacaaaaattttctaaacgaacgattagtggcaccgtctatgacaattccaactgattttagtgatatatggggccggtttgcagacctagctagcaattttgaacctgaccaggaaagacacgacgacgacattgatattgatagtgaagtagaaagtgaaaattttgatgcacataagaatttcttttcgcaaccagacattaatagacctacaatttccactccacgtgaattttttctcggaagaattgtccccaaacaagacgacgttatatggtcgcttcagttattagcttttgtttcgaagtatacatatatgaaatcaacccttcaaaatgttgagctggttgaatccctatcgttcagaagtatggcttacaaaattaaacagagaatctcagaagagaatgacttagaagaacaagaaagagacgtaactgtaaaattgtcttcattatatccttatttatcgaaaaatcctgaaaacaattccaaagttaaggcactagatactagcaaaatggatccatttttcaaagaattagaagaactctcaaacagatgtcaacaagaagaacaaaatgaaatatgtaataaccactgtcccgttcttaatttgtttgagcgctaccgtgtaccgaaacctagcgacgacaatgcctatggcaaagacaaggaaagaattaatttaaggaagaaaatatctgataactttgaaaggcgctggagctacgataaaatgaaaaaggaattaacaaatattgtttacaaaaacaaggtactaacaaatgttgtaaacatcttccccttagtcgaaaaatatacagtgagcgcagaaaatacacatgatgttatatattggagttctgtcatcatgagaaattcatgtcgaaaaaatgagatcttaggtgtgcgtcagtgtgccaatttttcgtgcggaaaatgggaagattttccaagacaatttgcaaaatgtcgtcgatgcaaaagaacgaaatattgctcacgaaagtgtcaattaaaagcatggggatatcataggtattggtgtcacgaagttggatcaagtcatatgagatccacgaatactaccacaggtgtcaataccccaaatgagcctagttctttaaatgccaccgctactacagcagctgatgtttcgaattctaccagtacgttcactcctaatatatccaccaccgtacctgatgaaataagcaatagggatgaaaatagcatacctgagtaa

SEQ ID NO: 8550 - DNA, 1863 bp, Artificial Sequence
  Description of Artificial Sequence: Synthetic polynucleotide
atgagagactctaatcatagatctttaacgtccaacaagcctatagtaacaataacatctactgtctatgacagaagggcattggatatcaactctagtattccgttaataaactccttgaactacttaacatatttgacctctaattcttctaaagttagggaaacggtagctaacgacggtgctctcgaaagattagtcagtatattgaggagttgtcatttaagtttgtttgagttgttggatttggatttagaaaattttaatgagcacgaaaacataaaggatttatggaaggagaaaagattagcattatgcgcttggaaatggactttaacatttcagtgcttagtattgacaggtactagagggacagaacaaattcgtaaaaaagtggtaatgtctggggtcttatctgtgttggtcacagtattggataactatttattatatcataaaaattacgacttcatcaaagatcaaacaatgacctttgacttcaaagggataaccacggagacaatgtataaattcatgagaaaagatgagaatgaaacatatcagcagtatatagagttcattacaggtcaggataaattgaagttgtctactgacaaaaattttttgaacgaaagattagtggcaccgtctatgacaattccaactgattttagtgatatatggggcagatttgcagacttggctagcaattttgaacctgaccaggaaagacacgacgacgacattgatattgatagtgaagtagaaagtgaaaattttgatgcacataagaatttcttttctcaaccagacattaatagacctacaatttccactccacgtgaattttttctcggaagaattgtccccaaacaagacgacgttatatggagtcttcagttattagcttttgtttccaagtatacatatatgaaatctacccttcaaaatgttgagttagttgaatccttatctttcagaagtatggcttacaaaattaaacagagaatcagtgaagagaatgacttagaagaacaagaaagagacgtaactgtaaaattgtcttctttatatccttatttatccaaaaatcctgaaaacaattccaaagttaaggcattggatactagcaaaatggatccatttttcaaagaattagaagaactctccaacagatgtcaacaagaagaacaaaatgaaatatgtaataaccactgtcccgttcttaatttgtttgagcgctaccgtgtaccgaaacctagcgacgacaatgcctatggcaaagacaaggaaagaattaatttaaggaagaaaatatctgataactttgaaaggcgctggagctacgataaaatgaaaaaggaattaacaaatattgtttacaaaaacaaggtattaacaaatgttgtaaacatcttccccttagtcgaaaaatatacagtgagcgcagaaaatacacatgatgttatatattggagttctgtcatcatgagaaattcttgtagaaaaaatgagatcttaggtgtgcgtcagtgtgccaatttttcttgcggaaaatgggaagattttccaagacaatttgcaaaatgtcgtcgttgcaaaagaacgaaatattgctctagaaagtgtcaattaaaagcatggggatatcataggtattggtgtcacgaagttggaagtagtcatatgagatccacgaatactaccacaggtgtcaataccccaaatgagcctagttctttaaatgccaccgctactacagcagctgatgtttctaattctaccagtacgttcactcctaatatatccaccaccgtacctgatgaaataagcaatagggatgaaaatagcatacctgagtga

SEQ ID NO: 8551 - DNA, 1032 bp, Saccharomyces cerevisiae
atgaaaatgcccagtattattcagattcagtttgtagccctaaaaaggcttttggtagaaaccaaagaacagatgtgcttcgcagtgaaaagtatatttcagagagtatttgcgtgggttatgtcattaagcttgttttcatggttttatgtaaatcttcagaatattttgataaaagcattaagggtagggccagtgcctgaacatgtctcctttatcatggatggtaaccggagatatgccaagtcaagaaggctaccagtaaaaaaaggccatgaagctggtgggttaacgttactaacactactgtatatctgcaaaagattgggtgtaaaatgtgtttccgcctatgcattttctattgaaaattttaatagaccaaaagaagaagtagatacgctaatgaatttgtttacggtaaagcttgatgaattcgcaaaaagagccaaggactataaggatcccttatacggatctaaaataagaatagtaggtgatcaatctttactatctccagaaatgagaaaaaaaattaaaaaagtggaagaaatcacacaggatggagacgatttcactttatttatatgttttccttacacttcaagaaatgatatgttacatactattcgtgattcagttgaagaccatttggaaaataaatcaccaaggattaatataagaaaatttactaataaaatgtacatgggtttccattccaataaatgtgaattattaatcagaacaagtgggcataggaggctctcagactatatgctatggcaagtacatgaaaatgccaccattgaatttagtgatacgttgtggccaaattttagcttctttgctatgtacctgatgattctcaaatggtccttcttttccaccattcaaaaatataatgagaagaatcactcattgtttgaaaaaatacatgaaagcgttccttcaatatttaaaaaaaagaaaacagctatgtctttgtacaactttccaaacccccccatttcagtttcggttacaggagatgaataa

SEQ ID NO: 8552 - DNA, 1032 bp, Artificial Sequence
  Description of Artificial Sequence: Synthetic polynucleotide
atgaaaatgcccagtattattcagattcagtttgtagccttgaaaaggcttttggtagaaaccaaagaacagatgtgcttcgcagtgaaaagtatatttcagagagtatttgcgtgggttatgtctttaagcttgttttcttggttttatgtaaatcttcagaatattttgataaaagcattaagggtagggccagtgcctgaacatgtctcctttatcatggatggtaacagaagatatgccaagtctagaaggttaccagtaaaaaaaggccatgaagctggtgggttaacgttattaacattattatatatctgcaaaagattgggtgtaaaatgtgtttccgcctatgcattttctattgaaaattttaatagaccaaaagaagaagtagatacgttgatgaatttgtttacggtaaagcttgatgaattcgcaaaaagagccaaggactataaggatcccttatacggatctaaaataagaatagtaggtgatcaatctttattatctccagaaatgagaaaaaaaattaaaaaagtggaagaaatcacacaggatggagacgatttcactttatttatatgttttccttacacttccagaaatgatatgttacatactattcgtgattctgttgaagaccatttggaaaataaatctccaaggattaatataagaaaatttactaataaaatgtacatgggtttccattccaataaatgtgaattattaatcagaacaagtgggcataggaggctctctgactatatgttatggcaagtacatgaaaatgccaccattgaatttagtgatacgttgtggccaaattttagcttctttgctatgtacttgatgattctcaaatggtccttcttttccaccattcaaaaatataatgagaagaatcactctttgtttgaaaaaatacatgaaagcgttccttccatatttaaaaaaaagaaaacagctatgtctttgtacaactttccaaacccccccatttctgtttctgttacaggagatgaatga

SEQ ID NO: 8553 - DNA, 2505 bp, Saccharomyces cerevisiae
atgacgaatatggcggaggataaaacaagtataagcaaggtacattctgaattcagcaattcctcgaataccactggatctgaagaggagagtcggtcgcatcaagagagcttcgacggcgagtccagttccggtgaaagtaaaagtaaaagcaaactaaatcttgaatattctgcagatatcgagccattgaagttcagaatgacaaaaactaataatacaaatgacaaattaaaatatagtaacaacggcaacgccactgattcatttatgagactaaaggaacatttacagagaggcaatactttaaattcgaatcttagggtcaatgagttttaccctttcaattccattgatacagagcaatttgaaaactatttgagagagccaaaatacattaaaatgttgaaacgtcggaaaaacctgaaacaatttagaagattgtttctcgcgcaagaactaatggcctacgaaggtgaaacggttacctccacttccaaatcatctgaaccaacctctaaagctatatggagtacaaagtttagccgcgatggaaaatttatggccactggtagcaaagatggtaaaataagaatatggaaagttattggctctccagttgaaagagccgaattggactcgagtgcggaatcaaataaagaggcacgagccaagtcgatgcggatcaaacagcaggtcagttcattgaacaatccaaaagaaaaacaatttttggattctgctacagagaaatacgaagagaaggaaaaattattgaatttgtatgcgcctgtctttcacccaacgcctttgcgactgtataaagaacacgtgcaagatgttctggatataaattggtctaaaaataattttattttgtcagcatcgatggataagacagtaaaactatggcatcccgataggaaaaattcacttaagacattcatacatcctgattttgtcacttgtgtggaatttcaccccaccgacgatagatttttcattagcggctgtctggatcacaaatgcaggttatggtctatactggatgatgaagttagctttgagtacgattgtcaagacttaataacatctgttacattatcccctgaggagggaaaatacactataataggaacatttaatggatacgttcatattctgatgaccagaggtctcactccagtttcttcatttcacgtagctgatagacaaacacaagaacaaaacgctcacgtcatggtcacggaaactgactcaaaaattcgtcatggtccacgtgtgacgggtttgcaagcttttagatctcaactggacaattctttccgcttagtagttacatcgaatgattcgaggataagaatttttgacttagaacagaggaagcttctagaggtattgaaaggcttccatagcggatcttcccaacacaaggcacaattgtccatctggcatggtcagccaatcgttgtaaatagtagtgatgaccattgggtttacggctggaggttaaagtcttcggatagagagaatgatcaagacgaacctaaaaggaaaccaaagggattggctcggtccggaagtttgagaagcatatttagtaaatcaatgagtaggtcttccagccagaataacgaagaaaaaccacatcatcatttaaaacttactaacttacttcccttgcctcatcatagcaacgatcattatatcaaaaatacggattacatttcttttcatgcacacaatgcccctgttacttgtgttagcattgcaccgccagaaacttcgaaaacattatctttgtctaacgatgttatctgcgagctatctctagagttttttcagacatccgatagtttcgatgttttgagtcggagtaacgacgatggcataatgtcagatgtagagtcgtctttgggctacaattctaaaccaggctcaatttctaatgcttccgccaccagtgctatcccagatgtcgttgacgcaattggaacgatattgatcagtactgataacgtagggactattcgtgtgtttagagcagatatgccctctgttataagaaagcgcgtgttactcaaactagaagaatacaatagagaggttcggagaaggtttaacagttctgattctttgcattctttgagtcgaagcttcaactcgagagcgaaatcaaacttggctggccaaccggcagcggcgtatactaatactggaaaaggctatgcaacgggacgtggatactctaatatatgtcccaaaagcagtacatcactaaaaacactcggcagtaatgcacagccaagaacaccaagggaaagcatgtcatctattttctccaatgcacatgggcctaccactccaacgagcgcaatgaatttacctatccgttgcaatgtttgtaacggttcaaggtttgaggctttttctggtgctaatgaccaacaagatagaaactattattgcgtagactgcggtacagtagttaataacttccgctaa

SEQ ID NO: 8554 - DNA, 2505 bp, Artificial Sequence
  Description of Artificial Sequence: Synthetic polynucleotide
atgacgaatatggcggaggataaaacaagtataagcaaggtacattctgaattcagcaattcctctaataccactggatctgaagaggagagtaggagccatcaagagagcttcgacggcgagtccagttccggtgaaagtaaaagtaaaagcaaattgaatcttgaatattctgcagatatcgagccattgaagttcagaatgacaaaaactaataatacaaatgacaaattaaaatatagtaacaacggcaacgccactgattcttttatgagattaaaggaacatttacagagaggcaatactttaaatagtaatcttagggtcaatgagttttaccctttcaattccattgatacagagcaatttgaaaactatttgagagagccaaaatacattaaaatgttgaaacgtcgtaaaaacttgaaacaatttagaagattgtttctcgcgcaagaattgatggcctacgaaggtgaaacggttacctccacttccaaatcttctgaaccaacctctaaagctatatggagtacaaagtttagccgcgatggaaaatttatggccactggtagcaaagatggtaaaataagaatatggaaagttattggctctccagttgaaagagccgaattggacagcagtgcggaaagtaataaagaggcaagagccaagtctatgagaatcaaacagcaggtcagttctttgaacaatccaaaagaaaaacaatttttggattctgctacagagaaatacgaagagaaggaaaaattattgaatttgtatgcgcctgtctttcacccaacgcctttgagattatataaagaacacgtgcaagatgttttggatataaattggtctaaaaataattttattttgagtgcatctatggataagacagtaaaattatggcatcccgataggaaaaattctcttaagacattcatacatcctgattttgtcacttgtgtggaatttcaccccaccgacgatagatttttcattagcggctgtttggatcacaaatgcaggttatggtctatattggatgatgaagttagctttgagtacgattgtcaagacttaataacatctgttacattatcccctgaggagggaaaatacactataataggaacatttaatggatacgttcatattttgatgaccagaggtctcactccagtttcttcttttcacgtagctgatagacaaacacaagaacaaaacgctcacgtcatggtcacggaaactgactctaaaattcgtcatggtccacgtgtgacgggtttgcaagcttttagatctcaattggacaattctttccgcttagtagttacaagtaatgatagtaggataagaatttttgacttagaacagaggaagcttttggaggtattgaaaggcttccatagcggatcttcccaacacaaggcacaattgtccatctggcatggtcagccaatcgttgtaaatagtagtgatgaccattgggtttacggctggaggttaaagtcttctgatagagagaatgatcaagacgaacctaaaaggaaaccaaagggattggctagatccggaagtttgagaagcatatttagtaaatctatgagtaggtcttccagccagaataacgaagaaaaaccacatcatcatttaaaacttactaacttacttcccttgcctcatcatagcaacgatcattatatcaaaaatacggattacatttcttttcatgcacacaatgcccctgttacttgtgttagcattgcaccgccagaaacttctaaaacattatctttgtctaacgatgttatctgcgagctttctttggagttttttcagacatccgatagtttcgatgttttgagtagaagtaacgacgatggcataatgagtgatgtagagtcttctttgggctacaattctaaaccaggctccatttctaatgcttccgccaccagtgctatcccagatgtcgttgacgcaattggaacgatattgatcagtactgataacgtagggactattcgtgtgtttagagcagatatgccctctgttataagaaagcgcgtgttactcaaattagaagaatacaatagagaggttagaagaaggtttaacagttctgattctttgcattctttgagtagaagcttcaactctagagcgaaaagtaacttggctggccaaccggcagcggcgtatactaatactggaaaaggctatgcaacgggacgtggatactctaatatatgtcccaaaagcagtacatctttgaaaacactcggcagtaatgcacagccaagaacaccaagggaaagcatgtcttctattttctccaatgcacatgggcctaccactccaacgagcgcaatgaatttacctatccgttgcaatgtttgtaacggttctaggtttgaggctttttctggtgctaatgaccaacaagatagaaactattattgcgtagactgcggtacagtagttaataacttccgctga

SEQ ID NO: 8555 - DNA, 363 bp, Saccharomyces cerevisiae
atggtccgcagaggctgcgctcttcttttagcaactctcacacgacttatgttgcttattcatttcttttacagcattatcagaattcttccatctacggaattgagatcaaagaccgacctgttgtcggccgaaggacggacgcttatacccgcggatgtcaaagcgaagcccgcggggcgcaagtcgaggttaccggaattcgccaaacggcaaaggacccttgcattgcctgaaaggaaagattcgcttttctgtttgttgccacttttcttacatagtctgggccgggagcagcttatttcttccgcggatgatcctggatttccttgcgcgggctcagccatggggagccttacctag

SEQ ID NO: 8556 - DNA, 363 bp, Artificial Sequence
  Description of Artificial Sequence: Synthetic polynucleotide
atggtccgcagaggctgcgctcttcttttagcaactctcacaagacttatgttgcttattcatttcttttacagcattatcagaattcttccatctacggaattgagatccaagaccgacttgttgagtgccgaaggaagaacgcttatacccgcggatgtcaaagcgaagcccgcggggcgcaagtccaggttaccggaattcgccaaaagacaaaggacccttgcattgcctgaaaggaaagattctcttttctgtttgttgccacttttcttacatagtttgggcagagagcagcttatttcttccgcggatgatcctggatttccttgcgcgggctctgccatggggagccttacctga

SEQ ID NO: 8557 - DNA, 2034 bp, Saccharomyces cerevisiae
atgcattcctggcgaatatccaagtttaagttaggaaggtccaaagaagatgatgggagtagtgaagatgaaaatgaaaaatcgtggggtaatggcctgtttcatttccaccatggagaaaaacatcacgatggtagcccgaagaatcataatcatgaacacgaacaccatataagaaagatcaatacaaatgagactctcccaagttccttaagttctccaaaattacgtaatgatgcatccttcaagaatccatcggggataggaaatgacaattctaaggcttccgaaaggaaagctagtcagtcgtctactgagacgcagggaccgagttcggaatccggactaatgacagtgaaggtgtattctggtaaagattttactcttcccttccctatcacctctaactctactattttacaaaaactactaagttccggcatccttacttcatcatccaatgacgcttccgaagttgcagccataatgcggcagctaccacgatacaagagagtggatcaagattcagcaggggaaggcttgatagatagagcttttgccactaaattcattccttcctctatattgttacctgggtcaacaaattcaagcccattactttattttacaattgaatttgataattctattactactattagtccagatatgggaacgatggagcaaccagtgtttaacaaaatatcgacatttgatgtaacaagaaaattacgatttttaaaaatcgatgtctttgcaaggattccatccctacttttaccctctaaaaactggcaacaggagattggcgagcaggacgaagtactgaaggagattttaaaaaaaatcaatacaaatcaggatatccatttggactccttccatttacctttgaatttaaaaatcgattctgcagcccaaataagactatacaatcaccattggatttctttagaaaggggatatggtaaattaaatatcacggtggactacaaaccttctaagaacaagcctctctccattgatgactttgatctattgaaggttatcgggaagggttcgttcggcaaagtgatgcaagtaaggaaaaaagatacccaaaagatttacgctttgaaggctctgagaaaagcatatattgtatcgaaatgtgaagtgacacatactttagcggagaggactgtcctagcaagagttgactgcccctttattgttccgttgaagttctcattccaatctccggagaagttgtacctagtattagctttcattaatggcggtgaactgttctaccatttacaacacgagggacgattcagtctagcacgctcccgtttttatattgcagaactattatgtgctctcgattcattacacaaacttgacgtcatttatcgtgacctaaagcctgaaaacattctattggattaccaaggacatattgcactgtgtgattttgggctttgcaagctgaacatgaaggataatgacaaaacagacactttctgtggtactcccgaatatttggcaccagaaatcttgttggggcagggctatactaaaacagttgactggtggacattaggtatcttactgtatgagatgatgacagggctgccaccatactatgatgagaacgttcctgttatgtacaagaaaattctgcagcaaccgctactatttcctgatggatttgaccctgcggcaaaagacctattaattggcctcttaagcagagacccaagcagaagactcggcgttaacggtacagatgaaattcgtaaccatcctttctttaaagacatctcatggaaaaagctacttttgaagggctatattccgccttacaagccaattgtaaagagtgaaatagatactgcaaattttgatcaagagttcactaaggaaaaaccgatcgatagtgtagtggacgagtacttaagtgcaagtattcaaaagcagtttggtgggtggacgtacattggtgacgaacagttgggtgattctccttcgcaggggagaagcattagttag

SEQ ID NO: 8558 - DNA, 2034 bp, Artificial Sequence
  Description of Artificial Sequence: Synthetic polynucleotide
atgcattcctggagaatatccaagtttaagttaggaaggtccaaagaagatgatgggagtagtgaagatgaaaatgaaaaaagttggggtaatggcttatttcatttccaccatggagaaaaacatcacgatggtagcccgaagaatcataatcatgaacacgaacaccatataagaaagatcaatacaaatgagactctcccaagttccttaagttctccaaaattacgtaatgatgcatccttcaagaatccatctgggataggaaatgacaattctaaggcttccgaaaggaaagctagtcagtcttctactgagacgcagggaccgagttctgaatccggattaatgacagtgaaggtgtattctggtaaagattttactcttcccttccctatcacctctaactctactattttacaaaaattattaagttccggcatccttacttcttcttccaatgacgcttccgaagttgcagccataatgaggcagttaccaagatacaagagagtggatcaagattctgcaggggaaggcttgatagatagagcttttgccactaaattcattccttcctctatattgttacctgggtctacaaatagtagcccattactttattttacaattgaatttgataattctattactactattagtccagatatgggaacgatggagcaaccagtgtttaacaaaatatctacatttgatgtaacaagaaaattaagatttttaaaaatcgatgtctttgcaaggattccatccttacttttaccctctaaaaactggcaacaggagattggcgagcaggacgaagtattgaaggagattttaaaaaaaatcaatacaaatcaggatatccatttggactccttccatttacctttgaatttaaaaatcgattctgcagcccaaataagattatacaatcaccattggatttctttagaaaggggatatggtaaattaaatatcacggtggactacaaaccttctaagaacaagcctctctccattgatgactttgatttattgaaggttatcgggaagggttctttcggcaaagtgatgcaagtaaggaaaaaagatacccaaaagatttacgctttgaaggctttgagaaaagcatatattgtatccaaatgtgaagtgacacatactttagcggagaggactgtcttggcaagagttgactgcccctttattgttccgttgaagttcagtttccaatctccggagaagttgtacttggtattagctttcattaatggcggtgaattattctaccatttacaacacgagggaagattcagtttagcacgctcccgtttttatattgcagaattattatgtgctctcgattctttacacaaacttgacgtcatttatcgtgacttgaagcctgaaaacattttattggattaccaaggacatattgcattatgtgattttgggctttgcaagttgaacatgaaggataatgacaaaacagacactttctgtggtactcccgaatatttggcaccagaaatcttgttggggcagggctatactaaaacagttgactggtggacattaggtatcttattatatgagatgatgacagggttaccaccatactatgatgagaacgttcctgttatgtacaagaaaattttacagcaaccgttgttatttcctgatggatttgaccctgcggcaaaagacttattaattggcctcttaagcagagacccaagcagaagactcggcgttaacggtacagatgaaattcgtaaccatcctttctttaaagacatcagttggaaaaagcttcttttgaagggctatattccgccttacaagccaattgtaaagagtgaaatagatactgcaaattttgatcaagagttcactaaggaaaaaccgatcgatagtgtagtggacgagtacttaagtgcaagtattcaaaagcagtttggtgggtggacgtacattggtgacgaacagttgggtgattctccttctcaggggagaagcattagttga

SEQ ID NO: 8559 - DNA, 1710 bp, Saccharomyces cerevisiae
atgtcatttcaaattgaaacggttcccaccaaaccatatgaagaccaaaagcctggtacctctggtttgcgtaagaagacaaaggtgtttaaagacgaacctaactacacagaaaatttcattcaatcgatcatggaagctattccagagggttctaaaggtgccactcttgttgtcggtggtgatgggcgttactacaatgatgtcattcttcataagattgccgctatcggtgctgccaacggtattaaaaagttagttattggccagcatggtcttctgtctacgccagccgcttctcacatcatgagaacctacgaggaaaaatgtactggtggtattatcttaaccgcctcacataatccaggtggtccagaaaatgacatgggtattaagtataacttatccaatgggggtcctgctcctgaatccgtcacaaatgctatttgggagatttccaaaaagcttaccagctataagattatcaaagacttcccagaactagacttgggtacgataggcaagaacaagaaatacggtccattactcgttgacattatcgatattacaaaagattatgtcaacttcttgaaggaaatcttcgatttcgacttaatcaagaaattcatcgataatcaacgttctactaagaattggaagttactgtttgacagtatgaacggtgtaactggaccatacggtaaggctattttcgttgatgaatttggtttaccggcggatgaggttttacaaaactggcatccttctccggattttggtggtatgcatccagatccaaacttaacttatgccagttcgttagtgaaaagagtagatcgtgaaaagattgagtttggtgctgcatccgatggtgatggtgatagaaatatgatttacggttacggcccatctttcgtttctccaggtgactccgtcgcaattattgccgaatatgcagctgaaatcccatatttcgccaagcaaggtatatatggtctggcccgttcattccctacctcaggagccatagaccgtgttgccaaggcccatggtctaaactgttatgaggtcccaactggctggaaatttttctgtgctttgttcgacgctaaaaaattatctatttgtggtgaagaatcgtttggtactggttccaaccacgtaagggaaaaggacggtgtttgggccattatggcgtggttgaacatcttggccatttacaacaagcatcatccggagaacgaagcttctattaagacgatacagaatgaattctgggcaaagtacggccgtactttcttcactcgttatgattttgaaaaagttgaaacagaaaaagctaacaagattgtcgatcaattgagagcatatgttaccaaatcgggtgttgttaattccgccttcccagccgatgagtctcttaaggtcaccgattgtggtgatttttcatacacagatttggacggttctgtttctgaccatcaaggtttatatgtcaagctttccaatggtgcaagattcgttctaagattgtcaggtacaggttcttcaggtgctaccattagattgtacattgaaaaatactgcgatgataaatcacaataccaaaagacagctgaagaatacttgaagccaattattaactcggtcatcaagttcttgaactttaaacaagttttaggaactgaagaaccaacggttcgtacttaa

SEQ ID NO: 8560 - DNA, 1710 bp, Artificial Sequence
  Description of Artificial Sequence: Synthetic polynucleotide
atgagttttcaaattgaaacggttcccaccaaaccatatgaagaccaaaagcctggtacctctggtttgcgtaagaagacaaaggtgtttaaagacgaacctaactacacagaaaatttcattcaatccatcatggaagctattccagagggttctaaaggtgccactcttgttgtcggtggtgatgggcgttactacaatgatgtcattcttcataagattgccgctatcggtgctgccaacggtattaaaaagttagttattggccagcatggtcttttatctacgccagccgcttctcacatcatgagaacctacgaggaaaaatgtactggtggtattatcttaaccgcctctcataatccaggtggtccagaaaatgacatgggtattaagtataacttatccaatgggggtcctgctcctgaatccgtcacaaatgctatttgggagatttccaaaaagcttaccagctataagattatcaaagacttcccagaattagacttgggtacgataggcaagaacaagaaatacggtccattactcgttgacattatcgatattacaaaagattatgtcaacttcttgaaggaaatcttcgatttcgacttaatcaagaaattcatcgataatcaacgttctactaagaattggaagttactttttgacagtatgaacggtgtaactggaccatacggtaaggctattttcgttgatgaatttggtttaccggcggatgaggttttacaaaactggcatccttctccggattttggtggtatgcatccagatccaaacttaacttatgccagttctttagtgaaaagagtagatcgtgaaaagattgagtttggtgctgcatccgatggtgatggtgatagaaatatgatttacggttacggcccatctttcgtttctccaggtgactccgtcgcaattattgccgaatatgcagctgaaatcccatatttcgccaagcaaggtatatatggtttagcccgttctttccctacctctggagccatagaccgtgttgccaaggcccatggtttgaactgttatgaggtcccaactggctggaaatttttctgtgctttgttcgacgctaaaaaattatctatttgtggtgaagaaagttttggtactggttccaaccacgtaagggaaaaggacggtgtttgggccattatggcgtggttgaacatcttggccatttacaacaagcatcatccggagaacgaagcttctattaagacgatacagaatgaattctgggcaaagtacggccgtactttcttcactcgttatgattttgaaaaagttgaaacagaaaaagctaacaagattgtcgatcaattgagagcatatgttaccaaatctggtgttgttaattccgccttcccagccgatgagtctcttaaggtcaccgattgtggtgatttttcttacacagatttggacggttctgtttctgaccatcaaggtttatatgtcaagctttccaatggtgcaagattcgttttgagattgtctggtacaggttcttctggtgctaccattagattgtacattgaaaaatactgcgatgataaatctcaataccaaaagacagctgaagaatacttgaagccaattattaactctgtcatcaagttcttgaactttaaacaagttttaggaactgaagaaccaacggttcgtacttga

SEQ ID NO: 8561 - DNA, 195 bp, Saccharomyces cerevisiae
atgattttagtacatacagggaacgtcctctacccacgttttattgttgttgcatttacttttgaacagcgacaggggggaaggtgtaaaggaggaaaagcaacctgcatggctagtgttcaaagttacaaggtaacaatgcaaatcagtagtatgacaattatttacccgctatttatttttttttctctttaa

SEQ ID NO: 8562 - DNA, 195 bp, Artificial Sequence
  Description of Artificial Sequence: Synthetic polynucleotide
atgattttagtacatacagggaacgtcctctacccacgttttattgttgttgcatttacttttgaacagagacaggggggaaggtgtaaaggaggaaaagcaacctgcatggctagtgttcaaagttacaaggtaacaatgcaaatcagtagtatgacaattatttacccgttgtttatttttttttctctttga

SEQ ID NO: 8563 - DNA, 1890 bp, Saccharomyces cerevisiae
atgtcaagtgagtcaacaactttcatcgtggatgtttcaccatcaatgatgaaaaataataatgtttccaaatctatggcatatctagagtacactctattaaacaaatctaaaaaaagtagaaaaacagattggataagctgttatctcgctaattgtcccgtatctgagaattcccaggaaataccaaatgtgttccaaatacaatcctttttggctcctgttaccacgacggccaccattgggtttataaaacgcctgaaacaatattgtgatcagcacagtcatgatagttcgaatgaaggcttacaatcaatgattcaatgtctgttggtcgtctcattagatattaaacaacaatttcaagcaagaaaaattctaaaacaaattgttgtatttacagacaatttagatgatctggatattactgatgaagaaatagacctgctaacggaagaattaagcacaagaatcattttgattgattgcggtaaagacactcaagaggagaggaaaaaatcgaactggttaaagttggtcgaagcgataccgaattcaagaatctacaatatgaatgaacttcttgttgaaatcacttccccagcaacatctgtcgttaagccagtaagagtattctcaggcgagcttaggttaggggcagatatattatcaacacaaacatcgaatcctagcggcagcatgcaagatgaaaattgcttatgtatcaaggtagaggcttttcctgctacgaaagcagtttcaggcttaaataggaaaaccgctgttgaggtggaagactcccagaagaaagaaaggtatgtgggggtcaaatccataatcgaatatgaaattcacaacgaaggaaataagaaaaatgtcagtgaagatgaccagtctggatcgtcatacattcccgtgaccatctccaaagactctgtaacgaaggcataccgttatggtgcagactacgtagtgctaccgtccgttctagtcgatcaaactgtatatgaatcttttccaggcttggatttaagaggatttttgaatagagaagctcttccaaggtactttttgacgtcggaatcctccttcattaccgccgacacaagacttggctgtcaatctgacttaatggctttcagtgctctagtggatgttatgctagaaaatagaaaaattgctgttgcaagatatgtgagcaagaaagacagtgaagtgaatatgtgtgcattgtgtcccgttctaattgagcacagtaacattaattccgagaagaagtttgttaagagccttaccttgtgtagattaccattcgcggaagacgagagggtaactgattttccaaaacttctggatcgaacaactacatccggggtaccgctgaaaaaggaaacagacgggcatcaaatcgatgagcttatggaacaatttgtagattcaatggatacagatgagctaccagagattccgttaggcaactactatcaacccataggcgaagtaacaacagacaccactctcccacttccctctttaaataaagaccaagaggaaaacaaaaaggatcctcttagaatacccacggtttttgtctacaggcaacaacaggtgctactggaatggattcaccaactgatgatcaatgattccagggaatttgaaatcccagagcttcctgactcattgaaaaacaaaataagtccttacacgcacaagaaatttgatagcacaaaattggttgaagtgctcggcatcaagaaagtagacaaattaaaactcgactccgaactaaaaactgagcttgagagggaaaagatcccggacctagaaacgctattgaagcgcggtgaacaacacagtaggggaagtccaaacaatagcaataattaa

SEQ ID NO: 8564 - DNA, 1890 bp, Artificial Sequence
  Description of Artificial Sequence: Synthetic polynucleotide
atgagcagtgagtctacaactttcatcgtggatgtttctccaagcatgatgaaaaataataatgtttccaaatctatggcatatttggagtacactttattaaacaaatctaaaaaaagtagaaaaacagattggataagctgttatctcgctaattgtcccgtatctgagaattcccaggaaataccaaatgtgttccaaatacaatcctttttggctcctgttaccacgacggccaccattgggtttataaaacgcttaaaacaatattgtgatcagcacagtcatgatagtagtaatgaaggcttacaatctatgattcaatgtttgttggtcgtctctttagatattaaacaacaatttcaagcaagaaaaattttgaaacaaattgttgtatttacagacaatttagatgatttggatattactgatgaagaaatagacttattgacggaagaattaagcacaagaatcattttgattgattgcggtaaagacactcaagaggagaggaaaaaaagtaactggttaaagttggtcgaagcgataccgaattctagaatctacaatatgaatgaacttcttgttgaaatcacttccccagcaacatctgtcgttaagccagtaagagtattcagtggcgagcttaggttaggggcagatatattatctacacaaacaagtaatcctagcggcagcatgcaagatgaaaattgcttatgtatcaaggtagaggcttttcctgctacgaaagcagtttctggcttaaataggaaaaccgctgttgaggtggaagactcccagaagaaagaaaggtatgtgggggtcaaatccataatcgaatatgaaattcacaacgaaggaaataagaaaaatgtcagtgaagatgaccagtctggaagtagttacattcccgtgaccatctccaaagactctgtaacgaaggcataccgttatggtgcagactacgtagtgttgccgtccgttttggtcgatcaaactgtatatgaatcttttccaggcttggatttaagaggatttttgaatagagaagctcttccaaggtactttttgacgagtgaatcctccttcattaccgccgacacaagacttggctgtcaatctgacttaatggctttcagtgctttggtggatgttatgttggaaaatagaaaaattgctgttgcaagatatgtgagcaagaaagacagtgaagtgaatatgtgtgcattgtgtcccgttttgattgagcacagtaacattaattccgagaagaagtttgttaagagccttaccttgtgtagattaccattcgcggaagacgagagggtaactgattttccaaaacttttagatagaacaactacatccggggtaccgttaaaaaaggaaacagacgggcatcaaatcgatgagcttatggaacaatttgtagattctatggatacagatgagttaccagagattccgttaggcaactactatcaacccataggcgaagtaacaacagacaccactctcccacttccctctttaaataaagaccaagaggaaaacaaaaaggatcctcttagaatacccacggtttttgtctacaggcaacaacaggtgttgttggaatggattcaccaattgatgatcaatgattccagggaatttgaaatcccagagcttcctgactctttgaaaaacaaaataagtccttacacgcacaagaaatttgatagcacaaaattggttgaagtgctcggcatcaagaaagtagacaaattaaaactcgactccgaattgaaaactgagcttgagagggaaaagatcccggacttggaaacgttattgaagcgcggtgaacaacacagtaggggaagtccaaacaatagcaataattga

SEQ ID NO: 8565 - DNA, 348 bp, Saccharomyces cerevisiae
atgggtagtttttgggacgcattcgcagtatacgacaagaaaaagcacgcagatccaagtgtatatggaggaaaccataacaacacaggagacagtaaaacgcaggttatgttttcgaaagagtaccgtcaacctaggacacatcagcaagagaacttgcagagcatgagaagatcttccataggatcacaggacagttccgatgttgaggacgttaaggaagggagattacccgcagaagtagaaataccaaagaatgttgacatctctaacatgtcgcaaggtgagtttttaagactttacgaaagtttgaggaggggggaacccgacaataaagtaaatagataa

SEQ ID NO: 8566 - DNA, 348 bp, Artificial Sequence
  Description of Artificial Sequence: Synthetic polynucleotide
atgggtagtttttgggacgcattcgcagtatacgacaagaaaaagcacgcagatccaagtgtatatggaggaaaccataacaacacaggagacagtaaaacgcaggttatgttttccaaagagtaccgtcaacctaggacacatcagcaagagaacttgcagagcatgagaagatcttccataggatctcaggacagttccgatgttgaggacgttaaggaagggagattacccgcagaagtagaaataccaaagaatgttgacatctctaacatgtctcaaggtgagtttttaagactttacgaaagtttgaggaggggggaacccgacaataaagtaaatagatga

SEQ ID NO: 8567 - DNA, 2064 bp, Saccharomyces cerevisiae
atgatcagacaatctacgctaaaaaacttcgctattaagcgttgctttcaacatatagcataccgcaacacacctgccatgagatcagtagctctcgcgcagcgcttttatagttcgtcttcccgttattacagtgcgtctccattaccagcctctaaaaggccagagcctgctccaagtttcaatgttgatccattagaacagcccgctgaaccttcaaaattggctaagaaactacgcgctgagcctgacatggatacctctttcgtcggtttaactggtggtcaaatatttaacgaaatgatgtccagacaaaacgttgatactgtatttggttatccaggtggtgctatcctacctgtttacgatgccattcataacagtgataaattcaacttcgttcttccaaaacacgaacaaggtgccggtcacatggcagaaggctacgccagagcttctggtaaaccaggtgttgtcttggttacttctgggccaggtgccaccaatgtcgttactccaatggcagatgcctttgcagacgggattccaatggttgtctttacagggcaagtcccaactagtgctatcggtactgatgctttccaagaggctgacgtcgttggtatttctagatcttgtacgaaatggaatgtcatggtcaagtccgtggaagaattgccattgcgtattaacgaggcttttgaaattgccacgagcggtagaccgggaccagtcttggtcgatttaccaaaggatgttacagcagctatcttaagaaatccaattccaacaaaaacaactcttccatcaaacgcactaaaccaattaaccagtcgcgcacaagatgaatttgtcatgcaaagtatcaataaagcagcagatttgatcaacttggcaaagaaacctgtcttatacgtcggtgctggtattttaaaccatgcagatggtccaagattactaaaagaattaagtgaccgtgctcaaatacctgtcaccactactttacaaggtttaggttcattcgaccaagaagatccaaaatcattggatatgcttggtatgcacggttgtgctactgccaacctggcagtgcaaaatgccgacttgataattgcagttggtgctagattcgacgaccgtgtcactggtaatatttctaaattcgctccagaagctcgtcgtgcagctgccgagggtagaggtggtattattcatttcgaggttagtccaaaaaacataaacaaggttgttcaaactcaaatagcagtggaaggtgatgctacgaccaatctgggcaaaatgatgtcaaagattttcccagttaaggagaggtctgaatggtttgctcaaataaataaatggaagaaggaatacccatacgcttatatggaggagactccaggatctaaaattaaaccacagacggttataaagaaactatccaaggttgccaacgacacaggaagacatgtcattgttacaacgggtgtggggcaacatcaaatgtgggctgctcaacactggacatggagaaatccacatactttcatcacatcaggtggtttaggtacgatgggttacggtctccctgccgccatcggtgctcaagttgcaaagccagaatctttggttattgacattgatggtgacgcatcctttaacatgactctaacggaattgagttctgccgttcaagctggtactccagtgaagattttgattttgaacaatgaagagcaaggtatggttactcaatggcaatccctgttctacgaacatcgttattcccacacacatcaattgaaccctgatttcataaaactagcggaggctatgggtttaaaaggtttaagagtcaagaagcaagaggaattggacgctaagttgaaagaattcgtttctaccaagggcccagttttgcttgaagtggaagttgataaaaaagttcctgttttgccaatggtggcaggtggtagcggtctagacgagttcataaattttgacccagaagttgaaagacaacagactgaattacgtcataagcgtacaggcggtaagcactga

SEQ ID NO: 8568 - DNA, 2064 bp, Artificial Sequence
  Description of Artificial Sequence: Synthetic polynucleotide
atgatcagacaatctacgttgaaaaacttcgctattaagcgttgctttcaacatatagcataccgcaacacacctgccatgagatctgtagctctcgcgcagcgcttttatagttcttcttcccgttattacagtgcgtctccattaccagcctctaaaaggccagagcctgctccaagtttcaatgttgatccattagaacagcccgctgaaccttccaaattggctaagaaattgcgcgctgagcctgacatggatacctctttcgtcggtttaactggtggtcaaatatttaacgaaatgatgtccagacaaaacgttgatactgtatttggttatccaggtggtgctatcttacctgtttacgatgccattcataacagtgataaattcaacttcgttcttccaaaacacgaacaaggtgccggtcacatggcagaaggctacgccagagcttctggtaaaccaggtgttgtcttggttacttctgggccaggtgccaccaatgtcgttactccaatggcagatgcctttgcagacgggattccaatggttgtctttacagggcaagtcccaactagtgctatcggtactgatgctttccaagaggctgacgtcgttggtatttctagatcttgtacgaaatggaatgtcatggtcaagtccgtggaagaattgccattgcgtattaacgaggcttttgaaattgccacgagcggtagaccgggaccagtcttggtcgatttaccaaaggatgttacagcagctatcttaagaaatccaattccaacaaaaacaactcttccatctaacgcattgaaccaattaaccagtcgcgcacaagatgaatttgtcatgcaaagtatcaataaagcagcagatttgatcaacttggcaaagaaacctgtcttatacgtcggtgctggtattttaaaccatgcagatggtccaagattattgaaagaattaagtgaccgtgctcaaatacctgtcaccactactttacaaggtttaggttctttcgaccaagaagatccaaaatctttggatatgcttggtatgcacggttgtgctactgccaacttggcagtgcaaaatgccgacttgataattgcagttggtgctagattcgacgaccgtgtcactggtaatatttctaaattcgctccagaagctcgtcgtgcagctgccgagggtagaggtggtattattcatttcgaggttagtccaaaaaacataaacaaggttgttcaaactcaaatagcagtggaaggtgatgctacgaccaatttgggcaaaatgatgtccaagattttcccagttaaggagaggtctgaatggtttgctcaaataaataaatggaagaaggaatacccatacgcttatatggaggagactccaggatctaaaattaaaccacagacggttataaagaaactttccaaggttgccaacgacacaggaagacatgtcattgttacaacgggtgtggggcaacatcaaatgtgggctgctcaacactggacatggagaaatccacatactttcatcacatctggtggtttaggtacgatgggttacggtctccctgccgccatcggtgctcaagttgcaaagccagaatctttggttattgacattgatggtgacgcatcctttaacatgactttaacggaattgagttctgccgttcaagctggtactccagtgaagattttgattttgaacaatgaagagcaaggtatggttactcaatggcaatcccttttctacgaacatcgttattcccacacacatcaattgaaccctgatttcataaaattagcggaggctatgggtttaaaaggtttaagagtcaagaagcaagaggaattggacgctaagttgaaagaattcgtttctaccaagggcccagttttgcttgaagtggaagttgataaaaaagttcctgttttgccaatggtggcaggtggtagcggtttggacgagttcataaattttgacccagaagttgaaagacaacagactgaattacgtcataagcgtacaggcggtaagcactga

SEQ ID NO: 8569 - DNA, 3660 bp, Saccharomyces cerevisiae
atggctatcttaaaaagaggagctagaaaaaaggtacatcaggagccagctaaacgctctgcgaatatcaagaaagctacttttgattcctcgaagaagaaagaagttggtgtgtctgatctgacgcttctttctaaaatctccgacgaagccataaatgaaaacttgaagaagagatttttgaatgctacaatctacacttatataggtcatgtgttaattagtgtcaatccattccgagacctcggaatctatactgatgctgttatgaatgaatacaaaggtaagaatagattggaagttccaccccatgtatttgcaattgcagagtctatgtactacaacatgaaatcatataatgaaaatcagtgtgttattatttcaggtgaatcaggtgccggtaaaactgaagcagctaaaagaattatgcaatatattgcggctgcttctagcacacatacggagtcaattggaaagattaaagacatggttttagccactaatccattgttggaatcttttggctgtgcaaagactctaagaaataacaactcttctagacatgggaaatatctagaaataaaattcaataaccagtttgaaccatgtgctggtaatatcacaaactatttattggagaagcagagagttgtgagtcaaattaagaatgaaagaaatttccatatattctatcagttcacgaaaggtgcttccgatgcttataggcaaacatttggggtccaaaaaccggaacaatatgtgtacacagctgctgcgggttgcatatctgctgagacaattgatgatttgcaagattatcaagagacattaaaagctatgagagttattggtctcggtcaagaagaacaagaccaaattttcaggatgttagctgcaattctttggattggtaatgtttcctttatagaaaatgaggaggggaatgcgcaagttagggacacctcagtaaccgattttgttgcttacttgttacaaatagatagccaattgctgattaaatcacttgtggaaagaattatggaaaccaatcatggtatgaaaagagggtcagtgtatcatgttccattgaatattgtccaagcagatgcggttagagatgctttggcaaaggctatttacaataacttatttgactggattgtgagtagggttaacaaatctctgcaggcttttccaggcgctgaaaaatccattggtattcttgatatttacggctttgaaatttttgaacataactcttttgagcagatttgtatcaattatgttaatgaaaagttacaacaaatctttattcaattgacattgaaatctgagcaagaaacttacgagagagaaaaaatccaatggaccccaattaaatactttgataacaaggttgtgtgtgatttgattgaggcaagaagaccacctggtatatttgcagcaatgaatgattctgttgcaactgcacacgcggattcaaatgctgctgatcaggcttttgctcagcgtttgaacttgttcacaacaaatccacattttgacttgagatctaacaagtttgttattaagcattatgccggtgatgtcacatacgatattgacggtattacagataaaaataaggatcaattacaaaaggatctggtagaattaattggtaccactaccaatacatttttagccaccattttcccggatactgtagacagagaatcaaaaagaaggccacctacagcaggcgacaaaattataaagagtgcaaatgatttggttgaaactttatcaaaagcacaaccttcatatatcagaacaattaaaccaaacgaaaccaaatctcctaacgattatgacgatcggcaagttctacaccagattaagtatctaggtctgcaagaaaacgtgcgtatcagaagagcaggttttgcatatagacaagtgtttgagaagttcgtggaaagattttatttattatctccacactgttcttacgctggtgactatacatggcaaggtgataccttagatgctgttaagtatatattgcaagattcctctatcccacagcaggagtaccaattgggtgtcacaagtgttttcatcaaaacacctgaaacattatttgctttggagcatatgagagatagatactggcacaatatggctgccagaatccaacgtgcttggaggagatttttgcaaagaagaattgatgcggccactaagatccagcgcaccatcagggagaggaaggaaggtaataagtatgagaagctccgggattatggtacgaaggttttgggtggaagaaaagaaagaaggtctatgtccttattaggttacagagccttcatgggtgattatctatcatgcaacgagtccaaatcgaagggcgcttatatcaaaagacaagtgagcattaaagagaaggtcatcttttccatacatggtgaggccttgcatacaaaatttggccgttctgcacaaagattgaaaaaaactttcctattaactccaactacattgtacattgttggtcagactttggtccaaaatgctatgacctatactcaggattataaaatcgatgtgcgaaacattcaagcggttagtttaaccaatttacaggatgattgggtcgccattaagttggctagctcaggtcaacctgaccccttaatcaacacatatttcaaaacagaactcataacgcatctgaaaaggcttaacgacaaaattcaaattaaaataggctcggcgatagagtaccaaaagaaacctggaaagttgcattcagtgaaatgtcaaatcaatgaatctgcaccaaaatatggcgacatatataaatccagtacaatatcagttcgtcgtggtaacccacctaattctcaagtgcacaaaaaaccgagaaaaaagagttcaatctcttcaggatatcatgctagttcctcgcaagcaacgaggaggccagtttcgattgctgcagcccagcatgttcccaccgccccggcttctaggcattctaaaaagcctgcccctccaccaccaggaatgcagaacaaagctgctacaagaagatctgttcctaatcctgcttccactctcactgcatcccaaagtaatgcccgtccttctccccctactgctgccactcgtgctacacccgctgctacacccgctgctgccgcaatgggctctggtagacaggcaaatatccctccaccacctcctccacccccaccctcttcaaagccaaaagaacccatgtttgaagcggcttacgattttcctggttcaggatcaccatctgagttacctttaaagaaaggagacgtaatttacattacaagagaagaaccaagcggttggtctctcgggaaacttctggatggctctaaggaaggttgggtgccaacagcttacatgaaaccacattccggaaataataatatccctactcctcctcaaaacagggatgttcctaaacccgttctgaattctgtacaacatgataacacctctgcaaacgttattccagctgcagcccaagcaagtttgggtgatggtttggcgaatgcgcttgctgctagggccaataaaatgagattagagagtgatgacgaggaggctaacgaagatgaagaggaagatgattggtaa

SEQ ID NO: 8570 - DNA, 3660 bp, Artificial Sequence
  Description of Artificial Sequence: Synthetic polynucleotide
atggctatcttaaaaagaggagctagaaaaaaggtacatcaggagccagctaaacgctctgcgaatatcaagaaagctacttttgattcctccaagaagaaagaagttggtgtgtctgatttgacgcttctttctaaaatctccgacgaagccataaatgaaaacttgaagaagagatttttgaatgctacaatctacacttatataggtcatgtgttaattagtgtcaatccattcagggacctcggaatctatactgatgctgttatgaatgaatacaaaggtaagaatagattggaagttccaccccatgtatttgcaattgcagagtctatgtactacaacatgaaaagttataatgaaaatcagtgtgttattatttctggtgaaagtggtgccggtaaaactgaagcagctaaaagaattatgcaatatattgcggctgcttctagcacacatacggagtctattggaaagattaaagacatggttttagccactaatccattgttggaatcttttggctgtgcaaagactttgagaaataacaactcttctagacatgggaaatatttggaaataaaattcaataaccagtttgaaccatgtgctggtaatatcacaaactatttattggagaagcagagagttgtgagtcaaattaagaatgaaagaaatttccatatattctatcagttcacgaaaggtgcttccgatgcttataggcaaacatttggggtccaaaaaccggaacaatatgtgtacacagctgctgcgggttgcatatctgctgagacaattgatgatttgcaagattatcaagagacattaaaagctatgagagttattggtctcggtcaagaagaacaagaccaaattttcaggatgttagctgcaattctttggattggtaatgtttcctttatagaaaatgaggaggggaatgcgcaagttagggacacctctgtaaccgattttgttgcttacttgttacaaatagatagccaattgttaattaaatctcttgtggaaagaattatggaaaccaatcatggtatgaaaagagggtctgtgtatcatgttccattgaatattgtccaagcagatgcggttagagatgctttggcaaaggctatttacaataacttatttgactggattgtgagtagggttaacaaatctttgcaggcttttccaggcgctgaaaaatccattggtattcttgatatttacggctttgaaatttttgaacataactcttttgagcagatttgtatcaattatgttaatgaaaagttacaacaaatctttattcaattgacattgaaatctgagcaagaaacttacgagagagaaaaaatccaatggaccccaattaaatactttgataacaaggttgtgtgtgatttgattgaggcaagaagaccacctggtatatttgcagcaatgaatgattctgttgcaactgcacacgcggattctaatgctgctgatcaggcttttgctcagcgtttgaacttgttcacaacaaatccacattttgacttgagatctaacaagtttgttattaagcattatgccggtgatgtcacatacgatattgacggtattacagataaaaataaggatcaattacaaaaggatttagtagaattaattggtaccactaccaatacatttttagccaccattttcccggatactgtagacagagaaagtaaaagaaggccacctacagcaggcgacaaaattataaagagtgcaaatgatttggttgaaactttatccaaagcacaaccttcttatatcagaacaattaaaccaaacgaaaccaaatctcctaacgattatgacgatagacaagttttgcaccagattaagtatttgggtttacaagaaaacgtgcgtatcagaagagcaggttttgcatatagacaagtgtttgagaagttcgtggaaagattttatttattatctccacactgttcttacgctggtgactatacatggcaaggtgataccttagatgctgttaagtatatattgcaagattcctctatcccacagcaggagtaccaattgggtgtcacaagtgttttcatcaaaacacctgaaacattatttgctttggagcatatgagagatagatactggcacaatatggctgccagaatccaacgtgcttggaggagatttttgcaaagaagaattgatgcggccactaagatccagcgcaccatcagggagaggaaggaaggtaataagtatgagaagctcagagattatggtacgaaggttttgggtggaagaaaagaaagaaggtctatgtccttattaggttacagagccttcatgggtgattatttaagttgcaacgagtccaaatccaagggcgcttatatcaaaagacaagtgagcattaaagagaaggtcatcttttccatacatggtgaggccttgcatacaaaatttggccgttctgcacaaagattgaaaaaaactttcttattaactccaactacattgtacattgttggtcagactttggtccaaaatgctatgacctatactcaggattataaaatcgatgtgagaaacattcaagcggttagtttaaccaatttacaggatgattgggtcgccattaagttggctagcagtggtcaacctgaccccttaatcaacacatatttcaaaacagaactcataacgcatttgaaaaggcttaacgacaaaattcaaattaaaataggcagtgcgatagagtaccaaaagaaacctggaaagttgcattctgtgaaatgtcaaatcaatgaatctgcaccaaaatatggcgacatatataaatccagtacaatatctgttcgtcgtggtaacccacctaattctcaagtgcacaaaaaaccgagaaaaaagagttctatctcttctggatatcatgctagttcctctcaagcaacgaggaggccagtttctattgctgcagcccagcatgttcccaccgccccggcttctaggcattctaaaaagcctgcccctccaccaccaggaatgcagaacaaagctgctacaagaagatctgttcctaatcctgcttccactctcactgcatcccaaagtaatgcccgtccttctccccctactgctgccactcgtgctacacccgctgctacacccgctgctgccgcaatgggctctggtagacaggcaaatatccctccaccacctcctccacccccaccctcttccaagccaaaagaacccatgtttgaagcggcttacgattttcctggttctggatctccatctgagttacctttaaagaaaggagacgtaatttacattacaagagaagaaccaagcggttggtctctcgggaaacttttagatggctctaaggaaggttgggtgccaacagcttacatgaaaccacattccggaaataataatatccctactcctcctcaaaacagggatgttcctaaacccgttttgaattctgtacaacatgataacacctctgcaaacgttattccagctgcagcccaagcaagtttgggtgatggtttggcgaatgcgcttgctgctagggccaataaaatgagattagagagtgatgacgaggaggctaacgaagatgaagaggaagatgattggtga

SEQ ID NO: 8571 - DNA, 1599 bp, Saccharomyces cerevisiae
atgtcaaacgacggctcaaaaatattgaattataccccagtgtctaaaatagatgaaatagttgaaatctcaagaaatttcttctttgagaaacaattgaaattgtcccacgaaaataacccaaggaaaaaagatctagaattcaggcagttgcagttgaaaaaactctattatgccgtcaaagatcatgaggaagaactgatcgatgctatgtacaaggactttcatcggaacaaaattgaatcggttctgaatgaaacgaccaaacttatgaacgatatacttcacctaattgagattttaccaaaattgatcaaacctcggagagtatctgattcttctcctccatttatgtttggtaaaacaatcgtggagaaaatatcaaggggcagtgtcttgattattgctcctttcaattttcccctacttttagcatttgccccattggcagcagctcttgctgcaggtaacaccattgttctgaagccaagtgaactaacaccacacactgctgtagttatggaaaatttgttaaccacagctggtttccctgatggattgattcaagtagttcagggagctatagatgaaactacaagactactagattgtggaaaatttgacctaatattctacacaggttctccccgtgtcggatcaatagttgctgagaaagcagcaaaaagtctaacaccttgtgtacttgaacttggtggtaaatcacctacctttattacagaaaatttcaaagcaagtaacataaaaattgctttgaaaaggattttttttggtgctttcggaaattctggccagatttgtgtttcaccagattatttgttagtacataaatctatctatccaaaagtcattaaagagtgtgaatcagtactaaatgaattttatccaagctttgatgaacaaacagatttcactcgtatgattcatgagcctgcttacaaaaaggccgttgcaagtataaactcaactaacggctccaagattgtgccttcaaaaatttctatcaattcagatactgaggatctatgccttgtaccaccaaccatagtttataacattggttgggatgatcctttgatgaaacaggaaaactttgctcctgtattgcccatcattgagtacgaggatcttgatgagaccattaacaagataatagaagaacatgacactccattggtgcaatacatattctctgatagccaaactgaaataaatcgtatcttgacgcgcttaagatctggtgactgtgttgtcggtgatacagtgattcatgtaggaattaccgacgctccatttggagggatcggtacttcaggttatggtaactatggtggatattatggattcaatacctttagtcatgaaagaacaatttttaaacaaccatattggaatgattttaccctttttatgagataccctccaaatagcgcacaaaaggaaaagctcgtccgttttgcgatggaaagaaaaccttggtttgacagaaatggcaataacaagtgggggttacgccaatatttttcattatctgccgccgttattttaattagtaccatttacgctcattgttcttcctga

SEQ ID NO: 8572 - DNA, 1599 bp, Artificial Sequence
  Description of Artificial Sequence: Synthetic polynucleotide
atgtccaacgacggctctaaaatattgaattataccccagtgtctaaaatagatgaaatagttgaaatctccagaaatttcttctttgagaaacaattgaaattgtcccacgaaaataacccaaggaaaaaagatttggaattcaggcagttgcagttgaaaaaactctattatgccgtcaaagatcatgaggaagaattgatcgatgctatgtacaaggactttcatagaaacaaaattgaatctgttttgaatgaaacgaccaaacttatgaacgatatacttcacttgattgagattttaccaaaattgatcaaacctagaagagtatctgattcttctcctccatttatgtttggtaaaacaatcgtggagaaaatatctaggggcagtgtcttgattattgctcctttcaattttcccttgcttttagcatttgccccattggcagcagctcttgctgcaggtaacaccattgttttgaagccaagtgaattaacaccacacactgctgtagttatggaaaatttgttaaccacagctggtttccctgatggattgattcaagtagttcagggagctatagatgaaactacaagattattagattgtggaaaatttgacttgatattctacacaggttctccccgtgtcggatccatagttgctgagaaagcagcaaaaagtttgacaccttgtgtacttgaacttggtggtaaatctcctacctttattacagaaaatttcaaagcaagtaacataaaaattgctttgaaaaggattttttttggtgctttcggaaattctggccagatttgtgtttctccagattatttgttagtacataaatctatctatccaaaagtcattaaagagtgtgaaagtgtattgaatgaattttatccaagctttgatgaacaaacagatttcactcgtatgattcatgagcctgcttacaaaaaggccgttgcaagtataaactctactaacggctccaagattgtgccttccaaaatttctatcaattctgatactgaggatttatgccttgtaccaccaaccatagtttataacattggttgggatgatcctttgatgaaacaggaaaactttgctcctgtattgcccatcattgagtacgaggatcttgatgagaccattaacaagataatagaagaacatgacactccattggtgcaatacatattctctgatagccaaactgaaataaatcgtatcttgacgcgcttaagatctggtgactgtgttgtcggtgatacagtgattcatgtaggaattaccgacgctccatttggagggatcggtacttctggttatggtaactatggtggatattatggattcaatacctttagtcatgaaagaacaatttttaaacaaccatattggaatgattttaccctttttatgagataccctccaaatagcgcacaaaaggaaaagctcgtccgttttgcgatggaaagaaaaccttggtttgacagaaatggcaataacaagtgggggttacgccaatatttttctttatctgccgccgttattttaattagtaccatttacgctcattgttcttcctga

SEQ ID NO: 8573 - DNA, 1389 bp, Saccharomyces cerevisiae
atgcccgctcgagaatataactatgtagaaggttttggtgggtacggctcgttggacgatgatgattcagatagagattctgaacgcaggaatcacgatctagggcagcgaactataaccacaagtccaacaggagtatcaagacatgctgcattaaataggtacatgatcccaggccgtatcaatcctcttttcagaccgacagacgctgctcaacctcccatagtgtctacatccacatcagcatcggcaacagaaccgaccaacagaataggccctggaaggataaaagaaacccctgaaacaaatttcaatgcatttcttatagcacaactaaccagaatggaggagcaaaatgccaatctgaaggaagaaatcagcctaatgaaaaaggaacaagaactcttctttctagagaatcaaaagaagttggagaaaggatttaaagacatcaataagtatgttgaagatgtttccgcaatgaaagaagtcttcaaagaggtagttggtattatgactggggagagaataagatttatagaccatactggggaaaatgttactcctcaggaagctgctcgtgttggaaatccatcaacaagtacgcaagctcatcaaagtcagtcaagatcaacaaactggcaagaatatagtatgcacgcaagcatattagccggcgatcctcgtatcaagcctgagccagggctgtcagactttgaaaatggggaatacgatggtaatgaaagtgatgagaacgctaccaccaggaacctacctttaaataaccccgattctgttagcaatgctgatgacagtaataaccaactcgatggaacaggaaacgagaatgatatcagaaacagaagagggtgcgttggaacgtcatataaactaaatcgtgcaatccagaacgttacagatgcggcccgtgaatactttgaaggcttaccgggccaaccgtcagttctttcccttgagaggagatatgggtccacttggaggcgatctgccaaagaaaggactttgttcactaaaagaatgaccatcataaaaagaataatagatataaaagatgatccaagcaaatatggtttgtcgctacctgagaataaaataagtagaaaccaagccatcaaggttgtcgaaaatataagattgggaaacaataccttcaaaggacatcattgccgattatcaatgtcccagttatacgaatacttctccaaaaaaatggacaaactcgaagactattcacttactctaaagagaagagggaagccaagaagaattttcttgttagaagagagagaagctagattatcattacagcagccacatagtataccaaattccagtacaggcacaccagaacatgatcaagacacttag

SEQ ID NO: 8574 - DNA, 1389 bp, Artificial Sequence
  Description of Artificial Sequence: Synthetic polynucleotide
atgcccgctagagaatataactatgtagaaggttttggtgggtacggctctttggacgatgatgattctgatagagattctgaacgcaggaatcacgatttagggcagagaactataaccacaagtccaacaggagtatctagacatgctgcattaaataggtacatgatcccaggccgtatcaatcctcttttcagaccgacagacgctgctcaacctcccatagtgtctacatccacaagtgcatctgcaacagaaccgaccaacagaataggccctggaaggataaaagaaacccctgaaacaaatttcaatgcatttcttatagcacaattgaccagaatggaggagcaaaatgccaatttgaaggaagaaatcagcttgatgaaaaaggaacaagaactcttctttttggagaatcaaaagaagttggagaaaggatttaaagacatcaataagtatgttgaagatgtttccgcaatgaaagaagtcttcaaagaggtagttggtattatgactggggagagaataagatttatagaccatactggggaaaatgttactcctcaggaagctgctcgtgttggaaatccatctacaagtacgcaagctcatcaaagtcagtctagatctacaaactggcaagaatatagtatgcacgcaagcatattagccggcgatcctcgtatcaagcctgagccagggctttctgactttgaaaatggggaatacgatggtaatgaaagtgatgagaacgctaccaccaggaacttgcctttaaataaccccgattctgttagcaatgctgatgacagtaataaccaactcgatggaacaggaaacgagaatgatatcagaaacagaagagggtgcgttggaacgtcctataaattgaatcgtgcaatccagaacgttacagatgcggcccgtgaatactttgaaggcttaccgggccaaccgtctgttctttcccttgagaggagatatgggtccacttggaggcgttctgccaaagaaaggactttgttcactaaaagaatgaccatcataaaaagaataatagatataaaagatgatccaagcaaatatggtttgtccttacctgagaataaaataagtagaaaccaagccatcaaggttgtcgaaaatataagattgggaaacaataccttcaaaggacatcattgcaggttatctatgtcccagttatacgaatacttctccaaaaaaatggacaaactcgaagactattctcttactttgaagagaagagggaagccaagaagaattttcttgttagaagagagagaagctagattatctttacagcagccacatagtataccaaattccagtacaggcacaccagaacatgatcaagacacttga

SEQ ID NO: 8575 - DNA, 396 bp, Saccharomyces cerevisiae
atgcaggttctcaatacgaagagtgaaacgaaacaagaaaacgaaacaatgcagccaccatatatacaagaacgtcttaagtcattaaatgatatagagacccagttatgctccatgttgcaggaggcgtctcaagtcacgttcatatttggtgaactaaaaagaggtaatgaatcagtgaaaccccaattcgaaaatcatgtcaaacagttttacgaacgactagataaatcaaccacacagctacgcaaggagatacagttgttggatgagaacgttggaacacgactactgcccatcaatgtcaacaagaaggccctaggccaagacacagaaaaaatggaagaacaattggatttattgtcggctatattagatccttcgaaatccaagtaa

SEQ ID NO: 8576 - DNA, 396 bp, Artificial Sequence
  Description of Artificial Sequence: Synthetic polynucleotide
atgcaggttctcaatacgaagagtgaaacgaaacaagaaaacgaaacaatgcagccaccatatatacaagaacgtcttaagtctttaaatgatatagagacccagttatgctccatgttgcaggaggcgtctcaagtcacgttcatatttggtgaattgaaaagaggtaatgaatctgtgaaaccccaattcgaaaatcatgtcaaacagttttacgaaagattagataaatctaccacacagttgcgcaaggagatacagttgttggatgagaacgttggaacaaggttattgcccatcaatgtcaacaagaaggccttaggccaagacacagaaaaaatggaagaacaattggatttattgtctgctatattagatccttccaaatccaagtga

SEQ ID NO: 8577 - DNA, 1284 bp, Saccharomyces cerevisiae
atggccattgaattgggactttcccgtattacaaaactactagagcatttaggcaatccgcaaaactcacttagagtgctgcacattgcagggacaaatggtaaaggttcagtatgtacttacctatcttctgtgttgcaacaaaagtcctaccaaattggaaaatttaccactccacacttggtgcatgttactgattccattacaatcaacaataagccgattccgttagagagataccagaatattagattacaactagaagctttaaacaagtcacactctttaaaatgtacggaattcgagctattaacatgtaccgcattcaaatatttttatgatgtgcagtgccaatggtgtgtcatagaagtaggccttggcggaagacttgatgcgaccaatgttattccaggcgcaaataaggcatgttgtggtattactaaaatcagtttggatcatgaaagctttttaggtaacaccttgtctgaaatctctaaagagaaagcaggtataataacagaaggggtacccttcacagtgattgatggaaccaatgaggcaagtgttataaatgttgtgaaagaaagatgcaaggctttagggtctgaactatccgttacagattctcaacttaacggaaatatgattgacaccaactcctggggttgttttgacttggcaaaattgccactgaatggagaatatcagatatttaatctcagggtggccatgggtatgttagactacttacaaatgaacgaacttattgatattaccaagaatgaagtaagtacgagattggcgaaggttgattggccaggaaggttatatcgtatggattatcgctttgacaaagtaagtaataggacagtgcctatattaatggacggtgcccacaatggctcagctgcagtagagttagttaagtacctaagaaaggagtacggaaaccagcctttgacctttgtgatggcagtaacgcatgggaaaaacttggagccgctgctccagccattattgaggcctatagatcaagtaattcttactcggtttaataatgtggaaggtatgccctggattcatgccactgatcctgaagaaataaaagattttattttgactcaaggatacacaaaggagatagtgattgaaaatgatttacatcaggtattgccttctctggcgcatgtatcagacgagcaaagacggccaattgttgtatgcggttcactgtatttatgtggtgaattattacggattcacaatagtcacttgagaaactaa

SEQ ID NO: 8578 - DNA, 1284 bp, Artificial Sequence
  Description of Artificial Sequence: Synthetic polynucleotide
atggccattgaattgggactttcccgtattacaaaattattggagcatttaggcaatccgcaaaactctcttagagtgttacacattgcagggacaaatggtaaaggttctgtatgtacttacttgtcttctgtgttgcaacaaaagtcctaccaaattggaaaatttaccactccacacttggtgcatgttactgattccattacaatcaacaataagccgattccgttagagagataccagaatattagattacaattggaagctttaaacaagtctcactctttaaaatgtacggaattcgagttattaacatgtaccgcattcaaatatttttatgatgtgcagtgccaatggtgtgtcatagaagtaggccttggcggaagacttgatgcgaccaatgttattccaggcgcaaataaggcatgttgtggtattactaaaatcagtttggatcatgaaagctttttaggtaacaccttgtctgaaatctctaaagagaaagcaggtataataacagaaggggtacccttcacagtgattgatggaaccaatgaggcaagtgttataaatgttgtgaaagaaagatgcaaggctttagggtctgaattatccgttacagattctcaacttaacggaaatatgattgacaccaactcctggggttgttttgacttggcaaaattgccattgaatggagaatatcagatatttaatctcagggtggccatgggtatgttagactacttacaaatgaacgaacttattgatattaccaagaatgaagtaagtacgagattggcgaaggttgattggccaggaaggttatatcgtatggattatcgctttgacaaagtaagtaataggacagtgcctatattaatggacggtgcccacaatggctctgctgcagtagagttagttaagtacttgagaaaggagtacggaaaccagcctttgacctttgtgatggcagtaacgcatgggaaaaacttggagccgttgctccagccattattgaggcctatagatcaagtaattcttactagatttaataatgtggaaggtatgccctggattcatgccactgatcctgaagaaataaaagattttattttgactcaaggatacacaaaggagatagtgattgaaaatgatttacatcaggtattgccttctttagcgcatgtaagtgacgagcaaagaagaccaattgttgtatgcggttctttgtatttatgtggtgaattattaagaattcacaatagtcacttgagaaactga

SEQ ID NO: 8579 - DNA, 1107 bp, Saccharomyces cerevisiae
atgtgtggtaggtttgccttagcttacgatagcggagatttgccgcaacttctaagagattggaacttaccggttaatacacccaaggacgcctcatcgaacagccagcatccacatgacgaggaagacaccaaagatcagcctaccgttagtaaggatatcttcaaggcctcttacaatatttcccctacaaactactctgcggtatatcgtcctgatactaaagcaatacaatttatgagatggggccttgtaccattctggaccaaggacgtttcacaattcaagacctatcgtacctttaatgcccgtttagagaatttacaagagagcaaaatgtggatgagaccctgtgagaagaaaaggtgtgctgtgcttatgagcggatattttgaatggaaaaccgtagggaaaaagaagacgccttatttcatttctagacgagacggcagattgatgtttgtagcaggaatgtatgattacgtcgaaaaggatgatttatatacgttcaccataataactgcacaaggccccagagagttagaatggctccacgaaagaatgccttgcgtgctggaaccaggcaccgaaagttgggatgcatggatggatgtggataaaacgacatggagcactgaagaactggtaaagctgctgaagccggactacgatgaatcaaagttacaattctatcaagttaccgatgatgtggggaagactaccaacaccggagagcggctgataaaaccgcttttgaaagaggattcggacatgttcagcgtaaagagagaaaaagaagaagccttgctagaaaatgataacgaacaaggtattgataatcgaggtgtaaagggtgacaaatcgttgaaaggcgaagatgtttttaatcaaaagaaaagcctcaaaaggaattcctatgatggattaaaaaagaatgaagaacaagaggaaacaactttaccagaggaaggaagtataggtgaccgagtgaagagagaagaagctaatttgtcacccaaaagagagggaaacagagagaagagaaatatagtaaatatgttgggaaaccagaaagactccagaggcaagaaaaaaataaaaaaatga

SEQ ID NO: 8580 - DNA, 1107 bp, Artificial Sequence
  Description of Artificial Sequence: Synthetic polynucleotide
atgtgtggtaggtttgccttagcttacgatagcggagatttgccgcaacttttgagagattggaacttaccggttaatacacccaaggacgcctcttccaacagccagcatccacatgacgaggaagacaccaaagatcagcctaccgttagtaaggatatcttcaaggcctcttacaatatttcccctacaaactactctgcggtatatcgtcctgatactaaagcaatacaatttatgagatggggccttgtaccattctggaccaaggacgtttctcaattcaagacctatcgtacctttaatgcccgtttagagaatttacaagagagcaaaatgtggatgagaccctgtgagaagaaaaggtgtgctgtgcttatgagcggatattttgaatggaaaaccgtagggaaaaagaagacgccttatttcatttctagaagagacggcagattgatgtttgtagcaggaatgtatgattacgtcgaaaaggatgatttatatacgttcaccataataactgcacaaggccccagagagttagaatggctccacgaaagaatgccttgcgtgttggaaccaggcaccgaaagttgggatgcatggatggatgtggataaaacgacatggagcactgaagaattggtaaagttattgaagccggactacgatgaatccaagttacaattctatcaagttaccgatgatgtggggaagactaccaacaccggagagaggttgataaaaccgcttttgaaagaggattctgacatgttcagcgtaaagagagaaaaagaagaagccttgttggaaaatgataacgaacaaggtattgataatagaggtgtaaagggtgacaaatctttgaaaggcgaagatgtttttaatcaaaagaaaagcctcaaaaggaattcctatgatggattaaaaaagaatgaagaacaagaggaaacaactttaccagaggaaggaagtataggtgacagagtgaagagagaagaagctaatttgagccccaaaagagagggaaacagagagaagagaaatatagtaaatatgttgggaaaccagaaagactccagaggcaagaaaaaaataaaaaaatga

SEQ ID NO: 8581 - DNA, 1506 bp, Saccharomyces cerevisiae
atgcttttacaaggaatgcgtttatcgcaaaggttacataagagacatctatttgcttccaagattttaacgtggactacgaaccctgctcatatacgccacctacatgatataaggccgcctgcatcaaacttcaatacgcaagaatcggcccccataccggagtctccagcaaactcaccaactcgaccacagatggcacctaaacccaatttgaaaaaaaaaaatcgtagtttaatgtattctattattggggtttccatagtaggtttatatttttggtttaaaagtaactccaggaaacaaaaactacctctttcggcgcaaaaagtctggaaggaagccatatggcaagaaagtgataaaatggattttaattacaaagaagcgttaaggcggtatattgaggcgttggatgaatgcgatcgctctcatgtcgatttattgtcagatgattataccagaatagagctgaaaattgctgaaatgtatgaaaagctcaatatgcttgaagaagcccaaaatttgtaccaagaattattaagtcggtttttcgaagcgctgaatgttcctggcaaagttgatgagagtgaaagaggcgaggttttaagaaaagacttgagaatcttgattaaatcgttagaaatcaataaggacatagaaagtggcaagagaaaattgctacaacatttacttttagctcaagaggaaattttaagcaaatcgccagagttgaaggaattttttgaaaacagaaaaaagaagctctcgatggtaaaagacatcaatagagaccctaatgatgattttaaaacatttgttagtgaggaaaatattaagtttgatgagcaaggctatatgattttggatctggaaaagaatagcagcgcttgggaaccctttaaggaagaattttttactgcgagagatttatatacagcttattgtctgtcatcaaaagacatagctgcagctctaagttgcaagataactagtgtggaatggatggttatggcagacatgccaccaggacagatattgctatcacaggcaaatttggggtcattgttctatcttcaagcagaaaagctagaagctgacttaaatcaattagagcaaaagaaaagtaaagagtccaaccaagagttagatatgggaacatacataaaagccgttagattcgtacgcaaaaatcgtgacttatgtctggaaagagcacaaaaatgttacgacagcgttattgcgtttgccaaaagaaacagaaaaattaggtttcatgtgaaggatcaactggatccttcaattgcacagtcaattgctctatctacctatggaatgggggttttaagccttcatgaaggtgttttggctaaagctgaaaaactattcaaagattcgatcactatggccaaggagactgaatttaatgaactccttgcagaagctgaaaaggaactagaaaagacgacagtcttgaaagcggccaaaaaagagggtttaaactaa

SEQ ID NO: 8582 - DNA, 1506 bp, Artificial Sequence
  Description of Artificial Sequence: Synthetic polynucleotide
atgcttttacaaggaatgcgtttatctcaaaggttacataagagacatttatttgcttccaagattttaacgtggactacgaaccctgctcatatacgccacttgcatgatataaggccgcctgcatctaacttcaatacgcaagaaagtgcccccataccggagtctccagcaaactctccaactagaccacagatggcacctaaacccaatttgaaaaaaaaaaatcgtagtttaatgtattctattattggggtttccatagtaggtttatatttttggtttaaaagtaactccaggaaacaaaaattacctctttctgcgcaaaaagtctggaaggaagccatatggcaagaaagtgataaaatggattttaattacaaagaagcgttaaggagatatattgaggcgttggatgaatgcgatcgctctcatgtcgatttattgagtgatgattataccagaatagagttgaaaattgctgaaatgtatgaaaagctcaatatgcttgaagaagcccaaaatttgtaccaagaattattaagtagatttttcgaagcgttgaatgttcctggcaaagttgatgagagtgaaagaggcgaggttttaagaaaagacttgagaatcttgattaaatctttagaaatcaataaggacatagaaagtggcaagagaaaattgttgcaacatttacttttagctcaagaggaaattttaagcaaatctccagagttgaaggaattttttgaaaacagaaaaaagaagctctctatggtaaaagacatcaatagagaccctaatgatgattttaaaacatttgttagtgaggaaaatattaagtttgatgagcaaggctatatgattttggatttggaaaagaatagcagcgcttgggaaccctttaaggaagaattttttactgcgagagatttatatacagcttattgtttatcttctaaagacatagctgcagctttaagttgcaagataactagtgtggaatggatggttatggcagacatgccaccaggacagatattgttatctcaggcaaatttggggtctttgttctatcttcaagcagaaaagttggaagctgacttaaatcaattagagcaaaagaaaagtaaagagtccaaccaagagttagatatgggaacatacataaaagccgttagattcgtacgcaaaaatcgtgacttatgtttagaaagagcacaaaaatgttacgacagcgttattgcgtttgccaaaagaaacagaaaaattaggtttcatgtgaaggatcaattggatccttctattgcacagagtattgctttatctacctatggaatgggggttttaagccttcatgaaggtgttttggctaaagctgaaaaattattcaaagattctatcactatggccaaggagactgaatttaatgaactccttgcagaagctgaaaaggaattggaaaagacgacagtcttgaaagcggccaaaaaagagggtttaaactga

SEQ ID NO: 8583 - DNA, 960 bp, Saccharomyces cerevisiae
atggcatctaacgaagttttagttttgagaggtaccttggaaggtcacaacggttgggtcacatctttggctacttctgctggtcaaccaaacctattgttgtccgcttcccgtgataagactttgatctcctggaagttgactggtgacgaccaaaagtttggtgtcccagttagatctttcaagggtcacagtcacattgtccaagactgtactttgactgctgacggtgcttacgctttgtctgcttcttgggacaagaccttgagattatgggatgttgccaccggtgaaacctaccaaagattcgtcggtcacaagtccgatgttatgtccgttgacattgacaagaaggcttccatgattatctctggttcccgtgacaagaccatcaaggtctggaccatcaaaggtcaatgtttggccactttgttgggtcacaatgactgggtttcccaagtcagagttgttccaaacgaaaaagctgatgatgactctgtcaccatcatttctgccggtaacgacaaaatggttaaggcttggaacttaaaccaattccaaattgaagctgacttcatcggtcacaactccaacatcaacactttgactgcttccccagacggaactttgattgcttccgctggtaaggacggtgaaattatgttgtggaacttggctgctaagaaggctatgtacactttgtctgcccaagatgaagttttctctttggctttctctccaaacagatactggttggctgctgccactgctaccggtattaaggtcttttctttggacccacaatacttggtcgatgacttgagaccagaatttgctggttacagcaaggccgctgaaccacatgctgtttctttggcttggtctgctgacggtcaaactttgtttgccggttacaccgacaacgtcattagagtttggcaagttatgactgctaactaa

SEQ ID NO: 8584 - DNA, 960 bp, Artificial Sequence
  Description of Artificial Sequence: Synthetic polynucleotide
atggcatctaacgaagttttagttttgagaggtaccttggaaggtcacaacggttgggtcacatctttggctacttctgctggtcaaccaaaccttttgttgtccgcttcccgtgataagactttgatctcctggaagttgactggtgacgaccaaaagtttggtgtcccagttagatctttcaagggtcacagtcacattgtccaagactgtactttgactgctgacggtgcttacgctttgtctgcttcttgggacaagaccttgagattatgggatgttgccaccggtgaaacctaccaaagattcgtcggtcacaagtccgatgttatgtccgttgacattgacaagaaggcttccatgattatctctggttcccgtgacaagaccatcaaggtctggaccatcaaaggtcaatgtttggccactttgttgggtcacaatgactgggtttcccaagtcagagttgttccaaacgaaaaagctgatgatgactctgtcaccatcatttctgccggtaacgacaaaatggttaaggcttggaacttaaaccaattccaaattgaagctgacttcatcggtcacaactccaacatcaacactttgactgcttccccagacggaactttgattgcttccgctggtaaggacggtgaaattatgttgtggaacttggctgctaagaaggctatgtacactttgtctgcccaagatgaagttttctctttggctttctctccaaacagatactggttggctgctgccactgctaccggtattaaggtcttttctttggacccacaatacttggtcgatgacttgagaccagaatttgctggttacagcaaggccgctgaaccacatgctgtttctttggcttggtctgctgacggtcaaactttgtttgccggttacaccgacaacgtcattagagtttggcaagttatgactgctaactga

SEQ ID NO: 8585 - DNA, 642 bp, Saccharomyces cerevisiae
atgtcacaaaaggataacctactcgacaatccggttgaatttttaaaagaggtcagagaaagttttgatattcagcaagatgttgatgccatgaaaagaatccgacacgatcttgatgttataaaagaggaaagcgaagcaagaattagtaaagagcattcaaaggtttctgagtcgaacaagaaattgaatgcggaaagaataaatgttgctaaattggagggagacttagaatatactaacgaagagagcaatgagtttggtagtaaagacgaactagttaaacttctgaaagatttggacggattggaacgtaatattgtgtcacttcgaagtgaattggacgaaaagatgaaattgtacctcaaagatagtgaaataatatccacaccgaacggttccaaaataaaagcaaaagtaattgaacctgagctggaagaacaaagtgcggtcaccccggaagcaaacgaaaatattctaaaattgaagctatacagatctttaggagttattttggatttagaaaatgatcaagtccttattaacagaaaaaatgatgggaatattgatattttacccttggacaataacctcagcgatttctataagaccaaatacatctgggaaagattaggaaagtga

SEQ ID NO: 8586 - DNA, 642 bp, Artificial Sequence
  Description of Artificial Sequence: Synthetic polynucleotide
atgtctcaaaaggataacttactcgacaatccggttgaatttttaaaagaggtcagagaaagttttgatattcagcaagatgttgatgccatgaaaagaatcagacacgatcttgatgttataaaagaggaaagcgaagcaagaattagtaaagagcattctaaggtttctgagagcaacaagaaattgaatgcggaaagaataaatgttgctaaattggagggagacttagaatatactaacgaagagagcaatgagtttggtagtaaagacgaattggttaaacttttgaaagatttggacggattggaacgtaatattgtgtctcttaggagtgaattggacgaaaagatgaaattgtacctcaaagatagtgaaataatatccacaccgaacggttccaaaataaaagcaaaagtaattgaacctgagttagaagaacaaagtgcggtcaccccggaagcaaacgaaaatattttgaaattgaagttgtacagatctttaggagttattttggatttagaaaatgatcaagtccttattaacagaaaaaatgatgggaatattgatattttacccttggacaataacctcagcgatttctataagaccaaatacatctgggaaagattaggaaagtga

SEQ ID NO: 8587 - DNA, 591 bp, Saccharomyces cerevisiae
atgaaagcaaccattcaaagagtaacatctgtatttggagttccccgagcatctgtattcgtgccaagaatcagcacaccatttattttgcataattatatctctaatggcagaatggaccttttttccaaagaattccacaatggccgcgtatccaaatctgatctttggtcaagcaacaaggaagaggagctcttagtatctcaaaggaaaaaaagaccgatctctcctcatttaactgtttacgaacctgaaatgagctggtatctttcctctttacatcgtatatctggcgttttactggctcttggattctatgctttcacaattactttgggtgtgacgacaataatgggaatggatacgacttttcaggatctaaacaagtggtatcacgaaaagatgcctaagtggtcccaatgggtggccaaaggctctgcagcatatctgtttgcattccattttggtaacggtataaggcatctcatctgggatatgggctacgaattgaccaaccgtggggttataaaaaccggatcaatcgttttagccggcacactcgtcttaggaacgtatttactggctcagtaa

SEQ ID NO: 8588 - DNA, 591 bp, Artificial Sequence
  Description of Artificial Sequence: Synthetic polynucleotide
atgaaagcaaccattcaaagagtaacatctgtatttggagttcccagagcatctgtattcgtgccaagaatcagcacaccatttattttgcataattatatctctaatggcagaatggaccttttttccaaagaattccacaatggccgcgtatccaaatctgatctttggtctagcaacaaggaagaggagctcttagtatctcaaaggaaaaaaagaccgatctctcctcatttaactgtttacgaacctgaaatgagctggtatctttcctctttacatcgtatatctggcgttttattagctcttggattctatgctttcacaattactttgggtgtgacgacaataatgggaatggatacgacttttcaggatttgaacaagtggtatcacgaaaagatgcctaagtggtcccaatgggtggccaaaggctctgcagcatatttatttgcattccattttggtaacggtataaggcatctcatctgggatatgggctacgaattgaccaaccgtggggttataaaaaccggatctatcgttttagccggcacactcgtcttaggaacgtatttattagctcagtga

SEQ ID NO: 8589 - DNA, 1875 bp, Saccharomyces cerevisiae
atgaactcttccacttcttcagaaaatgtgttcataaattcatttagctatttgaatcaaacatcacaagccgtaatctcaggtaactccactttcgcaaatgttatcaactttccttatagacttggattatcctttattggggctgtgaacttgcagtacgagcaaaccgttaaatctgaagaaattcccccaactctaaggtctgtttttgatacaatagggttttttttcagcccgtacgccatattttgctttgtaatcgccattgtcctgaaccggttcgttgtattttacgccgtccttaacaacggttccagacgtactttaccgttatggttgagtaatgttttccatgtatcagcagtagttgtattagcaatggtatccttaggtccgctgaccttgggtaaggatttcaaaatattaggcgaccctgcttttgcccaagaaaaatttttactgaatatattctacgctttcgcttactcttattgtgtcgaaaccatatttaccatcatgcggaattccagccctttggagggcactgactattcattgtttgaactttcgattcagttttatacaatgactaataataatactaaatttttagattctcctgattacattatagactgttctatggctattttgagcaggatattgatccatttggtggagattttcaggcttagaaattatcgtctactttttagtactattatgaacctctgtcatatttgttacttagggataagagttaagcagggcggctggaaaagccttccattttcggtgaaatttaggcactttccaaaactgttttcagtgtctattatttgcttatcattactgatttttaaattatcatgcttaattagatgggatccatttggaaaatcacgtaattcttgcgaacttttacagttttaccctctcagtagaaattggaaaaaatacttaaattacacgggagaagaagatttttctgctatggccactaaattcgcactattattatgctcaggaactgaactaatggaaaagggtatacgaagagaatttcctgctattaacatcccggataatgttaatgagaaattttttattagcggttatttaaatgaactttctaaaccgtataaagagaacacttccatcagcttcccaaagaaaaattcatcaatattaaagcaaagattttttttaatgtttccaaaatctataatatggatcatgaagaagcttgtaggccaagtattctttggcttcagagataacaaggacgaggacatccccgacaacgacccatcaaaaatgttaaagataactaaaacgaactctctcaataatagtgccggccacaaagaagatattgaacttgaactattgaacacatcagatgatgagtattctgaagattacgagccttctgaagttgagtcactgggggattctgatgaagaaaacttggaagaagattcactgattttcaacgaaactcgggatgccctactggatttattttcttccgaagataatgaagttcatactgattataattggatcatgtcaactagccgtatccttcaacaaaaattactgtcagataaaactttgacaagggcgtctatcttagatacaaagttaagtgaagtagatgagacttttggtacagaaagtgattttgatctatcttgcgcggtatgcaaagtcaatgaaagaaatacagtattatggccctgccgatgttttgccatttgcgaggattgcagaatttctttgggtttacgtgggttcagcacttgcgtatgttgtaggagtaaagttcatgggtactgtaaggttcatcctgtttcagatagtaaataa

SEQ ID NO: 8590 - DNA, 1875 bp, Artificial Sequence
  Description of Artificial Sequence: Synthetic polynucleotide
atgaactcttccacttcttctgaaaatgtgttcataaattcttttagctatttgaatcaaacatctcaagccgtaatcagtggtaactccactttcgcaaatgttatcaactttccttatagacttggattatcctttattggggctgtgaacttgcagtacgagcaaaccgttaaatctgaagaaattcccccaactttgaggtctgtttttgatacaatagggttttttttcagcccgtacgccatattttgctttgtaatcgccattgtcttgaacagattcgttgtattttacgccgtccttaacaacggttccagacgtactttaccgttatggttgagtaatgttttccatgtatctgcagtagttgtattagcaatggtatccttaggtccgttaaccttgggtaaggatttcaaaatattaggcgaccctgcttttgcccaagaaaaatttttattgaatatattctacgctttcgcttactcttattgtgtcgaaaccatatttaccatcatgagaaattccagccctttggagggcactgactattctttgtttgaactttctattcagttttatacaatgactaataataatactaaatttttagattctcctgattacattatagactgttctatggctattttgagcaggatattgatccatttggtggagattttcaggcttagaaattatcgtttactttttagtactattatgaacctctgtcatatttgttacttagggataagagttaagcagggcggctggaaaagccttccattttctgtgaaatttaggcactttccaaaattattttctgtgtctattatttgcttatctttattgatttttaaattaagttgcttaattagatgggatccatttggaaaatctcgtaattcttgcgaacttttacagttttaccctctcagtagaaattggaaaaaatacttaaattacacgggagaagaagatttttctgctatggccactaaattcgcattattattatgctctggaactgaattgatggaaaagggtataagaagagaatttcctgctattaacatcccggataatgttaatgagaaattttttattagcggttatttaaatgaactttctaaaccgtataaagagaacacttccatcagcttcccaaagaaaaattcttctatattaaagcaaagattttttttaatgtttccaaaatctataatatggatcatgaagaagcttgtaggccaagtattctttggcttcagagataacaaggacgaggacatccccgacaacgacccatctaaaatgttaaagataactaaaacgaactctctcaataatagtgccggccacaaagaagatattgaacttgaattattgaacacatctgatgatgagtattctgaagattacgagccttctgaagttgagtctttaggggattctgatgaagaaaacttggaagaagattctttgattttcaacgaaactagagatgccttattagatttattttcttccgaagataatgaagttcatactgattataattggatcatgtctactagccgtatccttcaacaaaaattattaagtgataaaactttgacaagggcgtctatcttagatacaaagttaagtgaagtagatgagacttttggtacagaaagtgattttgatttatcttgcgcggtatgcaaagtcaatgaaagaaatacagtattatggccctgcagatgttttgccatttgcgaggattgcagaatttctttgggtttacgtgggttcagcacttgcgtatgttgtaggagtaaagttcatgggtactgtaaggttcatcctgtttctgatagtaaatga

SEQ ID NO: 8591 - DNA, 1779 bp, Saccharomyces cerevisiae
atggccaattacacaaaaaccgcaatcctatccgtctatgacaagacaggtctacttgatttagccagaggcctcatcgagaagaacgttcgtattctcgcctccggtggtactgctcgtatgattcgtgacgctggttttccaatcgaagacgtttctgctatcacacatgccccagaaatgttgggaggtagagtgaaaactttacatcctgccgttcatggtggtatccttgctagggacatcgatagcgatgagaaagacttgaaggaacagcacattgaaaaagtcgattatgtcgtttgtaacctatacccattcaaagaaactgttgctaaggtgggtgtgactattccagaagcagtagaagaaattgatattggtggtgttactctattaagagcagctgctaagaaccatgctagagtcactattttatctgatccaaaggactactccgaatttttaagtgaattatccagtaatggtgaaatctctcaagatttgagaaacagattggcattaaaggctttcgaacacactgccgattatgatgctgcaatttcagatttcttcaggaaacaatactctgaaggtcaagctcaaattactctacgttatggtgccaatccacaccaaaagccggctcaagcttacgtcagtcaacaagacagtttacctttcaaagtcctatgtggttcaccaggttacattaatttgttggatgctctaaattcctggcccctggttaaggaattatccgcctcgttgaatttaccagcagcagcatcgttcaagcatgtatcaccagctggtgccgctgtgggtatcccattgtctgatgttgaaaagcaagtttattttgttgccgacattgaaaacttatctcccctggcatgtgcctatgctagggcccgtggtgctgatagaatgtcttcctttggtgattggattgctctttccaacatagttgatgttccaacagctaagatcatatctagagaagtttctgatggtgttattgccccaggttatgagcctgaggcgttggccattctatccaagaagaagggaggtaagtactgcatattacaaattgatccaaactatgttccagaagctgtcgaaagaagacaagtatacggtgtgactttggaacaaaagagaaacgatgccataatcaatcaatcaactttcaaagaaattgtttctcaaaataaaaatctcactgaacaagccataattgatttaacggttgccaccattgctattaaatatactcaatctaattccgtatgttatgctagaaatggtatggttgtcggattgggtgcaggtcaacaatctagaatccattgtacaagattagctggtgataaggctgataattggtggttcagacaacaccctagagttttggagattaaatgggctaaaggcgtcaagagaccagaaaaatctaatgctatcgatttattcgtaaccggccaaattccaacagaagaaccagaattgtctgaataccaatcgaagttcgaggagattccaaaaccatttactccagaagaaagaaaggaatggttgagtaaattaaccaacgtttctttgtcatcggatgcatttttcccattcccagacaatgtttacagagcagttaaatccggtgtcaaatacattgccgctccatctggttctgtcatggacaaggttgtattttcagctgccgattcattcgatttggtttacgtagagaacccaatccgtttgttccaccattag

SEQ ID NO: 8592 - DNA, 1779 bp, Artificial Sequence
  Description of Artificial Sequence: Synthetic polynucleotide
atggccaattacacaaaaaccgcaatcttgtccgtctatgacaagacaggtttacttgatttagccagaggcctcatcgagaagaacgttcgtattctcgcctccggtggtactgctcgtatgattcgtgacgctggttttccaatcgaagacgtttctgctatcacacatgccccagaaatgttgggaggtagagtgaaaactttacatcctgccgttcatggtggtatccttgctagggacatcgatagcgatgagaaagacttgaaggaacagcacattgaaaaagtcgattatgtcgtttgtaacctttacccattcaaagaaactgttgctaaggtgggtgtgactattccagaagcagtagaagaaattgatattggtggtgttactttattaagagcagctgctaagaaccatgctagagtcactattttatctgatccaaaggactactccgaatttttaagtgaattatccagtaatggtgaaatctctcaagatttgagaaacagattggcattaaaggctttcgaacacactgccgattatgatgctgcaatttctgatttcttcaggaaacaatactctgaaggtcaagctcaaattactttacgttatggtgccaatccacaccaaaagccggctcaagcttacgtcagtcaacaagacagtttacctttcaaagtcttatgtggttctccaggttacattaatttgttggatgctttgaattcctggcccttagttaaggaattatccgcctctttgaatttaccagcagcagcatctttcaagcatgtatctccagctggtgccgctgtgggtatcccattgtctgatgttgaaaagcaagtttattttgttgccgacattgaaaacttatctcccttggcatgtgcctatgctagggcccgtggtgctgatagaatgtcttcctttggtgattggattgctctttccaacatagttgatgttccaacagctaagatcatatctagagaagtttctgatggtgttattgccccaggttatgagcctgaggcgttggccattttatccaagaagaagggaggtaagtactgcatattacaaattgatccaaactatgttccagaagctgtcgaaagaagacaagtatacggtgtgactttggaacaaaagagaaacgatgccataatcaatcaatctactttcaaagaaattgtttctcaaaataaaaatctcactgaacaagccataattgatttaacggttgccaccattgctattaaatatactcaatctaattccgtatgttatgctagaaatggtatggttgtcggattgggtgcaggtcaacaatctagaatccattgtacaagattagctggtgataaggctgataattggtggttcagacaacaccctagagttttggagattaaatgggctaaaggcgtcaagagaccagaaaaatctaatgctatcgatttattcgtaaccggccaaattccaacagaagaaccagaattgtctgaataccaatccaagttcgaggagattccaaaaccatttactccagaagaaagaaaggaatggttgagtaaattaaccaacgtttctttgtcttctgatgcatttttcccattcccagacaatgtttacagagcagttaaatccggtgtcaaatacattgccgctccatctggttctgtcatggacaaggttgtattttctgctgccgattctttcgatttggtttacgtagagaacccaatccgtttgttccaccattga

SEQ ID NO: 8593 - DNA, 615 bp, Saccharomyces cerevisiae
atgggagcctacaaatatttagaagaattagaaagaaagaagcaatctgatgttttgagattcttgcaaagagtcagggtctgggaatacagacaaaaaaatgtcattcacagagccgctagaccaactagaccagacaaggctaggagactaggctacaaagccaagcaaggtttcgttatctaccgtgtcagggttagacgcggtaacagaaagagacctgttccaaagggtgctacttacggtaagccaactaaccaaggtgtcaatgaattgaaataccaaagatccttgagagctaccgctgaagaaagagttggccgtcgtgctgctaacttgagagtcttgaactcctactgggtcaaccaagactctacttacaagtacttcgaagttatattggttgatcctcaacacaaggctatcagaagagatgctcggtacaactggatctgcaatcccgtccataagcatcgtgaagctagaggcttgactgccaccggtaagaaatccaggggtatcaacaagggacacaaattcaacaacaccaaggccggcagaagaaagacctggaaaagacaaaatactctgtcgttatggaggtatagaaaatga

SEQ ID NO: 8594 - DNA, 615 bp, Artificial Sequence
  Description of Artificial Sequence: Synthetic polynucleotide
atgggagcctacaaatatttagaagaattagaaagaaagaagcaatctgatgttttgagattcttgcaaagagtcagggtctgggaatacagacaaaaaaatgtcattcacagagccgctagaccaactagaccagacaaggctaggagattgggctacaaagccaagcaaggtttcgttatctaccgtgtcagggttagacgcggtaacagaaagagacctgttccaaagggtgctacttacggtaagccaactaaccaaggtgtcaatgaattgaaataccaaagatccttgagagctaccgctgaagaaagagttggccgtcgtgctgctaacttgagagtcttgaactcctactgggtcaaccaagactctacttacaagtacttcgaagttatattggttgatcctcaacacaaggctatcagaagagatgctagatacaactggatctgcaatcccgtccataagcatcgtgaagctagaggcttgactgccaccggtaagaaatccaggggtatcaacaagggacacaaattcaacaacaccaaggccggcagaagaaagacctggaaaagacaaaatactttatctttatggaggtatagaaaatga

SEQ ID NO: 8595 - DNA, 375 bp, Saccharomyces cerevisiae
atgctacgtcagttcggaggcgtgtttcgcaatcttcgcgttccagaacgcaccaacgcgttgttatttgcgcagcacaagggggacgagagacattctggccaacgtgcattcgacggaagtaaatttcggctggaggctaagcgctgctttactgcaatttgcatcattacggtggctcgcagggatagattgggcgtactggtttgtggcaaaaacaccgcctccacgctaccttatttgccagccaaccgcatattcaggttgccaaaggtacagatcaggaaaatgtttcccattggatgcgcaactttccttagtagggaatatataatcactgcattgctggtttcgtactgccatctttgcgtttaa

SEQ ID NO: 8596 - DNA, 375 bp, Artificial Sequence
  Description of Artificial Sequence: Synthetic polynucleotide
atgcttcgtcagttcggaggcgtgtttcgcaatcttcgcgttccagaacgcaccaacgcgttgttatttgcgcagcacaagggggacgagagacattctggccaacgtgcattcgacggaagtaaatttagattggaggctaagcgctgctttactgcaatttgcatcattacggtggctcgcagggatagattgggcgtattggtttgtggcaaaaacaccgcctccacgttaccttatttgccagccaaccgcatattcaggttgccaaaggtacagatcaggaaaatgtttcccattggatgcgcaactttccttagtagggaatatataatcactgcattgttggtttcttactgccatctttgcgtttga

SEQ ID NO: 8597 - DNA, 255 bp, Saccharomyces cerevisiae
atggccagcagtacttccacttccgcttccgcttcctcctccatcaaaactaacagtgccttagtttccaacaatgtcgttgccgcctcttccgtctctgctacttctactgctagttccagtgccgctaagaacactacttccagttcaaagaacgctgctccaggcatggttgcaaaccctgtttcctcgaagtacggtatcatcatggccgcatttgctgctgtttctttcgtcctaggcaccggtatttaa

SEQ ID NO: 8598 - DNA, 255 bp, Artificial Sequence
  Description of Artificial Sequence: Synthetic polynucleotide
atggccagcagtacttccacttccgcttccgcttcctcctccatcaaaactaacagtgccttagtttccaacaatgtcgttgccgcctcttccgtctctgctacttctactgctagttccagtgccgctaagaacactacttccagttccaagaacgctgctccaggcatggttgcaaaccctgtttcctccaagtacggtatcatcatggccgcatttgctgctgtttctttcgtccttggcaccggtatttga

SEQ ID NO: 8599 - DNA, 369 bp, Saccharomyces cerevisiae
atggccaatttttttgttagactgtgggaaagtgtatttgaaccagggacctccccccagctgatcatcgccacacacgtatcttttgttgcactactactgaccctcatctggctcatctatgccacaaacgggaatatccacttctatgctcttttctgtatatcacttttactatggattaccgttatctggtttataaacgaattatcacacgtcaaattgaaggataatgatgagctggataaagatgccaataaaaaggacgacagtgccatcaaggaagacagcgaagacaagcaagaaagcgggaaatccactagtactgccagacggactcaagcacaatctaggtcaagaaaagcatag

SEQ ID NO: 8600 - DNA, 369 bp, Artificial Sequence
  Description of Artificial Sequence: Synthetic polynucleotide
atggccaatttttttgttagattatgggaaagtgtatttgaaccagggacctccccccagttaatcatcgccacacacgtatcttttgttgcattattattaaccctcatctggctcatctatgccacaaacgggaatatccacttctatgctcttttctgtatatctcttttattatggattaccgttatctggtttataaacgaattatcccacgtcaaattgaaggataatgatgagttagataaagatgccaataaaaaggacgacagtgccatcaaggaagacagcgaagacaagcaagaaagcgggaaatccactagtactgccagaagaactcaagcacaatctaggagcagaaaagcatga

SEQ ID NO: 8601 - DNA, 2832 bp, Saccharomyces cerevisiae
atggatgcaggtttatcgaccatggcaacaagaaacggtcagtcttctgctagagttaaattgagaaataacctcttgaataatgatataggaaatattgacattagggatgaaacacctatttcaaggaacgggaatgacagcaatattaacatccagccttcttccgtgccgcagcagcagcagcagcagcagcaatactaccgtaatggcatgaatgaggctccaatacaagcgccacttcaacaacgtcaaattcccatgcagaattattcacaacagcaacgccagcaacaacagtataattttgagtattccaatccacatatgaatgagattcccctcatgcagcataacttcaccaaaccatcactaagcaataatcgcgataatgttaatggtaagaaagcttcctcatttacccagagctcattttccaattttttcaaacataagcatcaatttgggaagtcaaagaaaaacactaaggggacaggaggtggtggagatggtgatgatgacgatgaggttatcttggatgattctgcaaactccgacctaacattcaatgacattcagaccttcggtcacaagggcggtgacaaatatggatatggtggtgattccactcctatcattccaacattggtgactaaagaccgcggcaatatgagtaatactgagtataggaagtacattactaatcaaaggaaaaccgcaatgaatgccatggctaaacaaactaaaaatggtacattagcctcgttgcctccgagagcaatgtctttgcaaagtttcccgaatggtaatcctttaatgcaagcacccactcctcatcctagatttcaaccgaataaaatggtgagcgctaattattcgagatcaaattcgttgatgagtggacctcccggacaatttcgacagccgcagcaacaaagaatgctaccgatgaacaactacaacaatcacccaggtcaattccagaataccccaccagtaatgccctctggacaacagccacctcagcaaccacgtactctgtcattaactaatggcccaagatattcaccccaaaatcctcggccattcgcaggtcatcagcagatatcacaaagacaacaacaacaacaacaacaacttcaacttcatccaatgtctgaaggctatcggacaatgtctctacaaagtcagaacgttccccaagggtttaatccatggtcaccaaatgacaacgatcgtaaagctgtgtccatgaaacagccaatcagtcaatcgtcaatttcctcaaagaataattcagcttattcaataccgaacgtacaaaacaactccctgactacattctctccgtcatctcctactgatgctacagcaatgcctaactctacaaaacaaggatcttcaccactaaaaaaacaagtgaacattgatcaacctattgaaaacaagggaaaactgaatgttttgcaattatccactcctcaacaaaacgagttaaaggaaaaagaaaggaagctagctgaaatggaaaaatctttacgtgagagagaagcactagtagaagaaaaagaaaaggaaagagctgagaaaaatactgaagcaaatgaagaggaggaaatttcacatgaatcagacgatttaaatttaagacctgcgagtgcgctagagactggtttaaaagatcttaaattggaaagtgaaagtgcagtcgccaatagagcgtccttgtcgactttctcatccacatttagtgattctccctccaagcaaagaatcatcaataccagaacaggtatgtataagctagaaaactctactgatatcaatgaatacgtgaccgcacaagaattcccctctcccggaaagtataactcaaattcggataatggcgaaatgaatacaacgaacgaggtcgattttgatttcaatactagtaaaagggcttctttgttacaatccataccggaaagagatcccaaaagaaatgtctcagatgctaccattaagcgacgtgaatccgatggcaatggcaggagactaagtaatgtcaacatatccatgaaccaggaaaacatcaacaatgatacttttctatataaaaaaaataatcgcgatggtcatttatcagcagtttctcatatgtccagctcttcccgtagatcgttcatctccaatacgctgccgttgaatattgattccgcctcagaatctgataattttgtaccgcatatggatggttcaccctccaaaacaaaatcagccccagttagctacgataaggatggcatgaatgcttcagaagaagacttcagttttgataatactttagccaaaccgtatgaaccgttatatgctaggagaggagacataacttccgccggatcaactagtggagaagatagctctcagccaaagatgataacaatatctggtgagcaattgaatttgataacagaaaacaaagaattaatgaatgagttgacactggtgtctacagaattagcagaatcgataaaaagggaaactgaattagaagaaagaatacggctgtatgaaaccaataattcagcaccatcttttgacgattcttcgagtgtgtctttttctgactttgaaaaggaactgagaaaaaaatccagtaaaattgtgcaattgatccagcaattaaatgacgagagattaaagagattcattgcggaggagcagttattactccaagaaaatggcaccaaaccaagttctatggaactagtaggaagaattgaaaacttgaataaacttattgatgagagagattcagaaattgaaatgcttaaaggacgtttacagtag

SEQ ID NO: 8602 - DNA, 2832 bp, Artificial Sequence
  Description of Artificial Sequence: Synthetic polynucleotide
atggatgcaggtttatctaccatggcaacaagaaacggtcagtcttctgctagagttaaattgagaaataacctcttgaataatgatataggaaatattgacattagggatgaaacacctatttctaggaacgggaatgacagcaatattaacatccagccttcttccgtgccgcagcagcagcagcagcagcagcaatactaccgtaatggcatgaatgaggctccaatacaagcgccacttcaacaacgtcaaattcccatgcagaattattctcaacagcaacgccagcaacaacagtataattttgagtattccaatccacatatgaatgagattcccctcatgcagcataacttcaccaaaccatctttaagcaataatcgcgataatgttaatggtaagaaagcttcctcttttacccagagctccttttccaattttttcaaacataagcatcaatttgggaagtccaagaaaaacactaaggggacaggaggtggtggagatggtgatgatgacgatgaggttatcttggatgattctgcaaactccgacttgacattcaatgacattcagaccttcggtcacaagggcggtgacaaatatggatatggtggtgattccactcctatcattccaacattggtgactaaagaccgcggcaatatgagtaatactgagtataggaagtacattactaatcaaaggaaaaccgcaatgaatgccatggctaaacaaactaaaaatggtacattagcctctttgcctccgagagcaatgtctttgcaaagtttcccgaatggtaatcctttaatgcaagcacccactcctcatcctagatttcaaccgaataaaatggtgagcgctaattattctagatctaattctttgatgagtggacctcccggacaatttagacagccgcagcaacaaagaatgttaccgatgaacaactacaacaatcacccaggtcaattccagaataccccaccagtaatgccctctggacaacagccacctcagcaaccacgtactttatctttaactaatggcccaagatattctccccaaaatcctaggccattcgcaggtcatcagcagatatctcaaagacaacaacaacaacaacaacaacttcaacttcatccaatgtctgaaggctatagaacaatgtctttacaaagtcagaacgttccccaagggtttaatccatggtctccaaatgacaacgatcgtaaagctgtgtccatgaaacagccaatcagtcaatcttccatttcctccaagaataattctgcttattctataccgaacgtacaaaacaactccttgactacattctctccgtcttctcctactgatgctacagcaatgcctaactctacaaaacaaggatcttctccattgaaaaaacaagtgaacattgatcaacctattgaaaacaagggaaaattgaatgttttgcaattatccactcctcaacaaaacgagttaaaggaaaaagaaaggaagttggctgaaatggaaaaatctttacgtgagagagaagcattggtagaagaaaaagaaaaggaaagagctgagaaaaatactgaagcaaatgaagaggaggaaatttctcatgaaagtgacgatttaaatttaagacctgcgagtgcgctcgagactggtttaaaagatcttaaattggaaagtgaaagtgcagtcgccaatagagcgtccttgtctactttctcttccacatttagtgattctccctccaagcaaagaatcatcaataccagaacaggtatgtataagttggaaaactctactgatatcaatgaatacgtgaccgcacaagaattcccctctcccggaaagtataacagtaattctgataatggcgaaatgaatacaacgaacgaggtcgattttgatttcaatactagtaaaagggcttctttgttacaatccataccggaaagagatcccaaaagaaatgtctctgatgctaccattaagagacgtgaatccgatggcaatggcaggagattaagtaatgtcaacatatccatgaaccaggaaaacatcaacaatgatacttttttatataaaaaaaataatcgcgatggtcatttaagtgcagtttctcatatgtccagctcttcccgtagatctttcatctccaatacgttgccgttgaatattgattccgccagtgaatctgataattttgtaccgcatatggatggttctccctccaaaacaaaaagtgccccagttagctacgataaggatggcatgaatgcttctgaagaagacttcagttttgataatactttagccaaaccgtatgaaccgttatatgctaggagaggagacataacttccgccggatctactagtggagaagatagctctcagccaaagatgataacaatatctggtgagcaattgaatttgataacagaaaacaaagaattaatgaatgagttgacattagtgtctacagaattagcagaaagtataaaaagggaaactgaattagaagaaagaataaggttatatgaaaccaataattctgcaccatcttttgacgattcttccagtgtgtctttttctgactttgaaaaggaattgagaaaaaaatccagtaaaattgtgcaattgatccagcaattaaatgacgagagattaaagagattcattgcggaggagcagttattactccaagaaaatggcaccaaaccaagttctatggaattggtaggaagaattgaaaacttgaataaacttattgatgagagagattctgaaattgaaatgcttaaaggacgtttacagtga

SEQ ID NO: 8603 - DNA, 2586 bp, Saccharomyces cerevisiae
atgtttaatagaaaaagaagaggagacttcgatgaagatgaaaattaccgtgattttaggcctcgcatgcctaaaagacagagaatcccacctgttgtacaactgtgtaaagaaatgatgcccgatattcgcactattggtgaatctgttaaagcttttgaagatgatatcaaattcttgagtgaagctataatgaatgagtatggccatgaggactactttaataatgctttactgagcactttaaacgctgttgttgtggagcaaccacagaagcaagctgctatcgctctcttaaccatggttgttaattcgaaaaataatgttgccggaaagagtattatcaattacttcttcgaagaattacaaaaatggtgcaagcaaacatataatgatgaattcaagagtacgtcaaatgaaactgggccatggaacaagatcaagttaatcctgagatttttatccattctatcgcccatgtttttagttgatgaactaatcaatatctacaagagcttatttgaattgagtatcgaattaaacaatctggatccaggtaacagagttcctttatctgaagcaatttacaccaatacattattaaatatcccgtatttgttcttttttaataggaataatgacggtttgaggacaaaagtggaggagttacttgcatacgttgaacaaaactatctagttaaaacaacggatataaacctattaagagaatacaatggtgaacctccatatgaaatggtagaacttgtccgagtcgtattaccaaacgtcaagaaggcgctaatcaataacttggaacagctgaatgaattatttcctgattggaatcatttattaactccccaaaccggtgatgaagggttcaatgacgctttaacccttccatcagtagatgatctaaagtctttcgtgcgcttgaataaaaactttggttcagttgatagcatgtggaagacaccaaggtatgcttttcatgtttacttgccaaactccgctggtaatttcgaaacagttgtaccaatcagcacttatgctggtcaattattcaacgatatcattattgatctggtggaaagtttagaattcaatagaaaggaagtagctagacaagtgataactttggatctttttttcaaagcaggtatatttacagaacctggtgaatctattgcccaattaattgccacttatgaagagaacccattggctcctacatttaagatagaagatttggctattgaaaccattttgggacttatttttaaattacctagtgtttcccagccttttgcatacttttacactttattggtggatatttgtcaaaattctccaaaagcaattgctcctgtctttggtagagcctttaggtttttttatagtcatttggattcattagattttgaactaaaattaagatatttggactggttttcaattcaaatgagcaactttaatttttcttggaagtggaatgaatgggaagacgattcgatcaaatttggcaagtatttttataatccaaaggtaaattttgctaaaaatttgattcaaaaagaactacgattgacctctaacttttcagaagtagaggacagcctaccacaagaattcacgaaatatttggatacttcttacattccaagagatcaactgattaactactatcaatcattattcaccggttatacggtagaagaagattccgttagaaaaaatgatctatattttagacaagaaggtgtacctatggaaaacacagtccgtaaaattttagattatacccacaaagcaaacaattctagggaagttactgaattagaaagtattctaggtgagttaaagaatgagtatggttccataatttccgactttaacagatttgttatcatattgttagtccaggccgttacagactctggtagtagatctttatcacatgctaataaatatattaatgatttaaaagaagatctcaaaaccatatttgcgaagattgaattggatatcgagacaaaagagtatatcataattgaagccgtcctaacattttggaacgccaaccctcagacaggtttcttagtagcagatgcattcaaatatgcaggtttacttacttccagaaccatttttacatttatatttaacgaaactggtttgaagaataatggtttgattgaagctacagcaattgaagcggtctttagaaatttatctcaacaaatctcggaagagaacgaaagtggaaataattttgagttcgttttcgaaagattatgtaccatcgccaacagtactatagacttactagatgtcaatgctgatgaagatattgagatacctaaagtcaacggggaaatggacatcgacgatattgaagatgataaactggatttgaaatggaaatattttacagtgattgggtttattaaaagtatattaagaaggtattcccacgaatatcgtgagttagcagacaaattcattgccaacattgataacgctattccacacgaatccactaggagaacaatttcgaattggattcaagaaacaaaggaagtttaa

SEQ ID NO: 8604 - DNA, 2586 bp, Artificial Sequence
  Description of Artificial Sequence: Synthetic polynucleotide
atgtttaatagaaaaagaagaggagacttcgatgaagatgaaaattaccgtgattttaggcctcgcatgcctaaaagacagagaatcccacctgttgtacaattatgtaaagaaatgatgcccgatattcgcactattggtgaatctgttaaagcttttgaagatgatatcaaattcttgagtgaagctataatgaatgagtatggccatgaggactactttaataatgctttattaagcactttaaacgctgttgttgtggagcaaccacagaagcaagctgctatcgctctcttaaccatggttgttaattctaaaaataatgttgccggaaagagtattatcaattacttcttcgaagaattacaaaaatggtgcaagcaaacatataatgatgaattcaagagtacgtccaatgaaactgggccatggaacaagatcaagttaatcttaagatttttatccattttatctcccatgtttttagttgatgaattgatcaatatctacaagagcttatttgaattgagtatcgaattaaacaatttggatccaggtaacagagttcctttatctgaagcaatttacaccaatacattattaaatatcccgtatttgttcttttttaataggaataatgacggtttgaggacaaaagtggaggagttacttgcatacgttgaacaaaactatttggttaaaacaacggatataaacttattaagagaatacaatggtgaacctccatatgaaatggtagaacttgtcagagtcgtattaccaaacgtcaagaaggcgttgatcaataacttggaacagttgaatgaattatttcctgattggaatcatttattaactccccaaaccggtgatgaagggttcaatgacgctttaacccttccatctgtagatgatttgaagtctttcgtgcgcttgaataaaaactttggttctgttgatagcatgtggaagacaccaaggtatgcttttcatgtttacttgccaaactccgctggtaatttcgaaacagttgtaccaatcagcacttatgctggtcaattattcaacgatatcattattgatttggtggaaagtttagaattcaatagaaaggaagtagctagacaagtgataactttggatctttttttcaaagcaggtatatttacagaacctggtgaatctattgcccaattaattgccacttatgaagagaacccattggctcctacatttaagatagaagatttggctattgaaaccattttgggacttatttttaaattacctagtgtttcccagccttttgcatacttttacactttattggtggatatttgtcaaaattctccaaaagcaattgctcctgtctttggtagagcctttaggtttttttatagtcatttggattctttagattttgaattgaaattaagatatttggactggttttctattcaaatgagcaactttaatttttcttggaagtggaatgaatgggaagacgattctatcaaatttggcaagtatttttataatccaaaggtaaattttgctaaaaatttgattcaaaaagaattaagattgacctctaacttttctgaagtagaggacagcttgccacaagaattcacgaaatatttggatacttcttacattccaagagatcaattgattaactactatcaatctttattcaccggttatacggtagaagaagattccgttagaaaaaatgatttatattttagacaagaaggtgtacctatggaaaacacagtccgtaaaattttagattatacccacaaagcaaacaattctagggaagttactgaattagaaagtattttgggtgagttaaagaatgagtatggttccataatttccgactttaacagatttgttatcatattgttagtccaggccgttacagactctggtagtagatctttatctcatgctaataaatatattaatgatttaaaagaagatctcaaaaccatatttgcgaagattgaattggatatcgagacaaaagagtatatcataattgaagccgtcttaacattttggaacgccaaccctcagacaggtttcttagtagcagatgcattcaaatatgcaggtttacttacttccagaaccatttttacatttatatttaacgaaactggtttgaagaataatggtttgattgaagctacagcaattgaagcggtctttagaaatttatctcaacaaatcagtgaagagaacgaaagtggaaataattttgagttcgttttcgaaagattatgtaccatcgccaacagtactatagacttattagatgtcaatgctgatgaagatattgagatacctaaagtcaacggggaaatggacatcgacgatattgaagatgataaattggatttgaaatggaaatattttacagtgattgggtttattaaaagtatattaagaaggtattcccacgaatatcgtgagttagcagacaaattcattgccaacattgataacgctattccacacgaatccactaggagaacaatttctaattggattcaagaaacaaaggaagtttga

SEQ ID NO: 8605 - DNA, 1029 bp, Saccharomyces cerevisiae
atgtccggattcgcaaaactcaagtcgtggttatacaaagcttcccttttcgtttctttgatacttttgattgggttttcagttgttttacccatagattccattgcacaagcttctaaatcagaaaacaatgcctttaatacgttcattgttgtaggcgctttagttgtctttggcgttttttgtatctttattattattggaagaatgctatttcataagagttgtttaaaagatataccaagaagatatattccgatcacacctgctgatctcccgcatcgttctagtagggaagcagtactgcagaacatggaaagatctaaagaattaacaattcttctcaaaaaacctaaagaccctgttattcacgacggacttgagcccccgaggagatgtgactacccattagatgaaaagttatttccagaatacctaaactatgctgattgtataaaaagtttaacagatagactgaaataccatggattgtttctgaacaatttagatgttagaatgaatctagaagatacgtttgccgacgtggtgaactcacaatttgttaatcacaacgccaataaaattcagttagaaaaggcgaaggagtttatcgatttatatgaaacaattagattttcagggaaggacgttactagagaccagttcataaagtttgttaagttttgtctctatttcggtgaagtgtcattaacaagagacacttcatttgcaaatttacataattttagattaaatggcagttcaaataacattggaagaactgaatcaaaatattcaataaacccatttgatgaaaacgaatacgcgcaggatgatatgcattactttcccgaaccgcctacacatttggttagagaaagtagcataagtactgtcgcaaggcatgtttcatcaggtgtagatctgactaattctgaagaacatcctttggatacggattctgattgtaacgcccttcgtctcaaactttccaaagcggatagttatagaagtgtaattcgtcattag

SEQ ID NO: 8606 - DNA, 1029 bp, Artificial Sequence
  Description of Artificial Sequence: Synthetic polynucleotide
atgtccggattcgcaaaactcaagtcttggttatacaaagcttcccttttcgtttctttgatacttttgattgggttttctgttgttttacccatagattccattgcacaagcttctaaaagtgaaaacaatgcctttaatacgttcattgttgtaggcgctttagttgtctttggcgttttttgtatctttattattattggaagaatgttatttcataagagttgtttaaaagatataccaagaagatatattccgatcacacctgctgatctcccgcatcgttctagtagggaagcagtattacagaacatggaaagatctaaagaattaacaattcttctcaaaaaacctaaagaccctgttattcacgacggacttgagcccccgaggagatgtgactacccattagatgaaaagttatttccagaatacttgaactatgctgattgtataaaaagtttaacagatagattgaaataccatggattgtttttgaacaatttagatgttagaatgaatttggaagatacgtttgccgacgtggtgaactctcaatttgttaatcacaacgccaataaaattcagttagaaaaggcgaaggagtttatcgatttatatgaaacaattagattttctgggaaggacgttactagagaccagttcataaagtttgttaagttttgtctctatttcggtgaagtgtctttaacaagagacacttcttttgcaaatttacataattttagattaaatggcagtagtaataacattggaagaactgaaagtaaatattctataaacccatttgatgaaaacgaatacgcgcaggatgatatgcattactttcccgaaccgcctacacatttggttagagaaagtagcataagtactgtcgcaaggcatgtttcttctggtgtagatttgactaattctgaagaacatcctttggatacggattctgattgtaacgcccttcgtctcaaactttccaaagcggatagttatagaagtgtaattcgtcattga

SEQ ID NO: 8607 - DNA, 1017 bp, Saccharomyces cerevisiae
atggcaagatctttaagtcaatcactcacagcgactacccagaagctaaaaggaaagaagaatggtggaaaaggcaagaataagccctcagcaaaaattaaaaaaactcaaaaagagatgctatatggaatactgaacgaaaggaacataagacagattcagtttggactgaataaaaaattctctacttggtatgggagcgccgtttatttcgatcctgaaacaaaaaggctagggtgctccgagaccaagggtcagctttcctctgtttctaacagccaatactggctagacactcttttcgtttgtgaatactgcttcaaatacacggatgatcagacgcggtttgtaggacatgttgcaagttgtccatttcaatatcgtgttccaggcaaaataaaatacaagagtcctgaatatacaataagaagagtaaaaggatccaagtatcaactcttttgccaatgtctttgtcttttcactaagctatatctggacaataaatccatgtatttcaaagtagatcattatgaattttacatagtttatgaaactggatcaacaaagccgatgggattcttttcgaaagatttagtgtcatatcagcaaaataatctagcgtgcatcttgatatttcccccatatcaacgacgtggattaggccttttacttatcgagttttcatacaaactatcccaattagaaggtgtaatatcagggccagaagtaccgttatcaccttttggactaatcgggtacttgaaatattggtcacagatactctgttggcaccttattgaaggtgacctcgcccattatgataaagtgaccctggaggatctttccatcgtgactggaatgagagtcaatgatgttattttgaccttgaagcacttgaactgtattggggagaataaccaaatttacttgcagtcattgaatagctggttgaaactacatggaacaaaacggaattggttcaaattaaaagatgaatatttgctgatagatgactag

SEQ ID NO: 8608 - DNA, 1017 bp, Artificial Sequence
  Description of Artificial Sequence: Synthetic polynucleotide
atggcaagatctttaagtcaatctctcacagcgactacccagaagttgaaaggaaagaagaatggtggaaaaggcaagaataagccctctgcaaaaattaaaaaaactcaaaaagagatgctttatggaatattaaacgaaaggaacataagacagattcagtttggattgaataaaaaattctctacttggtatgggagcgccgtttatttcgatcctgaaacaaaaaggttggggtgctccgagaccaagggtcagctttcctctgtttctaacagccaatactggttagacactcttttcgtttgtgaatactgcttcaaatacacggatgatcagacgagatttgtaggacatgttgcaagttgtccatttcaatatcgtgttccaggcaaaataaaatacaagagtcctgaatatacaataagaagagtaaaaggatccaagtatcaactcttttgccaatgtctttgtcttttcactaagctttatttggacaataaatccatgtatttcaaagtagatcattatgaattttacatagtttatgaaactggaagtacaaagccgatgggattcttttccaaagatttagtgtcttatcagcaaaataatttggcgtgcatcttgatatttcccccatatcaacgtcgtggattaggccttttacttatcgagttttcttacaaactttcccaattagaaggtgtaataagcgggccagaagtaccgttatctccttttggattgatcgggtacttgaaatattggtctcagatactctgttggcaccttattgaaggtgacctcgcccattatgataaagtgaccttagaggatctttccatcgtgactggaatgagagtcaatgatgttattttgaccttgaagcacttgaactgtattggggagaataaccaaatttacttgcagtctttgaatagctggttgaaattgcatggaacaaaaagaaattggttcaaattaaaagatgaatatttgttaatagatgactga

SEQ ID NO: 8609 - DNA, 3804 bp, Saccharomyces cerevisiae
atgggtacttacagaaaaaggtttaatgaaaaagccagatccggccatatggccaaattaaaagaactgaaaagaattaggaataagcagttcactagacaggatgaaaacgatgaaagagtagaaaacccagattcagctcccgctgagagttctactacggagccaaatgccaatgcggaaattcttgaacctctcactgaagaagaaaagaaaatgaagaaaagaaaactacaggagttatttaccccaaaggaatcgaaagtttcgagattgaagaagaaaagactggataaatttattgaacatcaattaaaaagagaggaaagaaagacaattattggtaaacttcaagattataagatagatacaagtttgttgacaagctctaaaaggttaggagagggcaggcagactaaaaaggaagaattcaaagaagcactgagtttagaacgtcaaggaagaggaaatgaacaaacaaatgaaatattatacgaagaatatgaaccaaaagtttgggatgagtatggtgaaggagggagctctgaggatgatgacggcgaagatgatttcgaggcttcatttggtagtatgccgaaaccaacggacaatgaggagaagaaatcatcaggttttattgatcatagaccagcaaaatttggtggatctggtcttagctttgggtttagcaatataaaagtcataaacaaagaaagcaaaactccgaagaagaaatataattggagacaacgagtagaaatggaagaattgaagaagcatgggaaagaagatgaaatggatttcgacacgacatctgaagatgatgacgaagaggaggatcaggaagaagaagacaaaatgcatcctagtgaaaacccactcgaagaagttgaaagcgcagatagtgaaactggctcagaaaaatttgaccaaaatgatgttgctaacgaattcaaggattgggccaatcaagaaataaaaaaattggaaggtagagatcaagagctagttactcccactttgaacatcgattataaaccgataattagaaaggaagatttagatgatggtctccaagaagcttatgttccaataaacgagaattccacccgtaaagccttctatgttgaagttagcagatcagatgaaattcagaaagcaagaattcaactaccagtatttggtgaagaacacaaaattatggaggctattcaccataatgatgtagtgattatttgtggtgaaacggggtcaggtaagactacacaagtcccacaatttttatatgaggctgggtttggtgccgaagattctccagattacccaggaatggtgggtatcactcaaccaagaagagtggccgctgtgtccatggctgaacgtgtagctaatgaattgggggaccatggtcataaagtaggataccaaattaggtttgactctaccgcaaaggaggacacaaaggtcaagtttatgacagatggtgtcttgctacgagaaatgatgcacgatttcaagttgactaaatattcctccattatcatagatgaagcacatgaaagaaacattaacactgatattttgatcggtatgcttagccgttgtgttcggttaagagctaaactacataaggagaacccgatcgagcacaagaagctaaaactcatcatcatgtcagctacattaagggtatcagatttcagcgaaaacaaaacattgttccccatagcgccccctgtcttacaggttgatgcaaggcagtttccagtctctattcactttaatcgtagaactgcattcaactatacagacgaggctttcagaaagacttgcaaaattcaccagaaacttcctcctggcgctatattggtgtttttaaccggtcagcaggaaattacacacatggtaaaaaggctaagaaaggaatttccttttaagaaaaactccaagtacaacaaagatttagaaacacccgtttctaaaatgggtatcaattcaaaaacaacagatttggaggctgaggatatagacttcagtgtacaagttatcgatcaagataagttcaagagcgcgataagatacgaagaagatgaaggtaacagtggaaacggtgaagatgaggaagacgaagaggaagaagggtttgaagaagtcctaactgaagggcaaacagctaacgatcctttatatgtccttccactgtattctctattaccaaccaaggaacaaatgagagtctttcaaaaacctcctcaaggttctaggctttgtattgttgcaacaaatgttgcagaaacatcgttaactatacctggagttagatatgttgttgattccgggaggtctaaagagcgtaaatataatgaatcaaatggcgtacagagttttgaagtgggctgggtaagtaaagctagtgccaatcaaagaagcggtagagcaggtcgtactggaccaggccattgttaccgtttatattcgtctgctgtttttgaacatgatttcgaacagttctctaaacctgaaatcttaagaatgccagtggagagcatcgtgttacaaatgaagagcatggccattcataatatcattaattttccatttccaactcctccagatagagttgccctttccaaggcaatacaattactgcaatatttaggtgctcttgataataaggagatgattactgaagatggtaaaaaaatgagcctgttcccactttcacccagattttccaaaatgttacttgtttctgacgaaaaagcctgccttccttatattgtagcaattgttagtgccctttcggtgggagatccttttatcaatgaatttgagttgggaataaacgaaatttctagaaaaccaaatccagatgaaaatctagatgataagattagagagcacgatgaatcaacaccaggtatggatcctgaactgaaaaaggaattgcgcagtaaattctataaaagcaggagtcagtttagtaaattagacaaatttagtgacgtattccgtttattaagtgttgtaagtgcaatggactacgttccaaaggaacaaaaagaaatattcatgaagaaaaattttttaagaggcaaactaatggaagaaatagtaaaattgaggaagcagttaatgtatatcatcaagtccaacacttcaaaagaaaatattgccgtagtaattaggaatgaagacttgaaaagtgatattccaagcgtcatacaaataaaacttttaaaacaaatgatttgcgctggttttgtcgaccatgttgccgtaagagcagatgttttatttccagatgatgctaagataaccaacagaacttccataatcaacattccttatattcctgttttggccacgagaacaccaaatatcgaggactgctttgtctatatccatccgacttcaattttaaataatttgggggaaatgccacccaaatacatgctctattattccttgcaccttggtggaaataataaaacaaggatgaatactttatgtgacatcgcaagcacccccttagcgaacatagcaagaaagggacttcttttgacatacagtaaacctctgactggtcaaggcttgaagaccgttaatttatcacctacggaacggtattgttatgtggttcctagatttggatccacagttgacaacgatctcaagattggttgggatttaaatcctatagcagtgcatcagaagaagcaaaaaggccagtggacagtcattaagtttatcaccagaaagggcttccagaccatcacaggtgaagagaaagaaaaaaaataa

SEQ ID NO: 8610 - DNA, 3804 bp, Artificial Sequence
  Description of Artificial Sequence: Synthetic polynucleotide
atgggtacttacagaaaaaggtttaatgaaaaagccagatccggccatatggccaaattaaaagaattgaaaagaattaggaataagcagttcactagacaggatgaaaacgatgaaagagtagaaaacccagattctgctcccgctgagagttctactacggagccaaatgccaatgcggaaattcttgaacctctcactgaagaagaaaagaaaatgaagaaaagaaaattacaggagttatttaccccaaaggaaagtaaagtttctagattgaagaagaaaagattagataaatttattgaacatcaattaaaaagagaggaaagaaagacaattattggtaaacttcaagattataagatagatacaagtttgttgacaagctctaaaaggttaggagagggcaggcagactaaaaaggaagaattcaaagaagcattaagtttagaacgtcaaggaagaggaaatgaacaaacaaatgaaatattatacgaagaatatgaaccaaaagtttgggatgagtatggtgaaggagggagctctgaggatgatgacggcgaagatgatttcgaggcttcttttggtagtatgccgaaaccaacggacaatgaggagaagaaatcttctggttttattgatcatagaccagcaaaatttggtggatctggtcttagctttgggtttagcaatataaaagtcataaacaaagaaagcaaaactccgaagaagaaatataattggagacaaagagtagaaatggaagaattgaagaagcatgggaaagaagatgaaatggatttcgacacgacatctgaagatgatgacgaagaggaggatcaggaagaagaagacaaaatgcatcctagtgaaaacccactcgaagaagttgaaagcgcagatagtgaaactggctctgaaaaatttgaccaaaatgatgttgctaacgaattcaaggattgggccaatcaagaaataaaaaaattggaaggtagagatcaagagttagttactcccactttgaacatcgattataaaccgataattagaaaggaagatttagatgatggtctccaagaagcttatgttccaataaacgagaattccacccgtaaagccttctatgttgaagttagcagaagtgatgaaattcagaaagcaagaattcaattaccagtatttggtgaagaacacaaaattatggaggctattcaccataatgatgtagtgattatttgtggtgaaacggggtctggtaagactacacaagtcccacaatttttatatgaggctgggtttggtgccgaagattctccagattacccaggaatggtgggtatcactcaaccaagaagagtggccgctgtgtccatggctgaacgtgtagctaatgaattgggggaccatggtcataaagtaggataccaaattaggtttgactctaccgcaaaggaggacacaaaggtcaagtttatgacagatggtgtcttgttaagagaaatgatgcacgatttcaagttgactaaatattcctccattatcatagatgaagcacatgaaagaaacattaacactgatattttgatcggtatgcttagccgttgtgttagattaagagctaaattgcataaggagaacccgatcgagcacaagaagttgaaactcatcatcatgtctgctacattaagggtatctgatttcagcgaaaacaaaacattgttccccatagcgccccctgtcttacaggttgatgcaaggcagtttccagtctctattcactttaatcgtagaactgcattcaactatacagacgaggctttcagaaagacttgcaaaattcaccagaaacttcctcctggcgctatattggtgtttttaaccggtcagcaggaaattacacacatggtaaaaaggttaagaaaggaatttccttttaagaaaaactccaagtacaacaaagatttagaaacacccgtttctaaaatgggtatcaattctaaaacaacagatttggaggctgaggatatagacttcagtgtacaagttatcgatcaagataagttcaagagcgcgataagatacgaagaagatgaaggtaacagtggaaacggtgaagatgaggaagacgaagaggaagaagggtttgaagaagtcttgactgaagggcaaacagctaacgatcctttatatgtccttccattgtattctttattaccaaccaaggaacaaatgagagtctttcaaaaacctcctcaaggttctaggctttgtattgttgcaacaaatgttgcagaaacaagtttaactatacctggagttagatatgttgttgattccgggaggtctaaagagcgtaaatataatgaaagtaatggcgtacagagttttgaagtgggctgggtaagtaaagctagtgccaatcaaagaagcggtagagcaggtcgtactggaccaggccattgttaccgtttatattcttctgctgtttttgaacatgatttcgaacagttctctaaacctgaaatcttaagaatgccagtggagagcatcgtgttacaaatgaagagcatggccattcataatatcattaattttccatttccaactcctccagatagagttgccctttccaaggcaatacaattattacaatatttaggtgctcttgataataaggagatgattactgaagatggtaaaaaaatgagcttattcccactttctcccagattttccaaaatgttacttgtttctgacgaaaaagcctgccttccttatattgtagcaattgttagtgccctttctgtgggagatccttttatcaatgaatttgagttgggaataaacgaaatttctagaaaaccaaatccagatgaaaatttggatgataagattagagagcacgatgaatctacaccaggtatggatcctgaattgaaaaaggaattgcgcagtaaattctataaaagcaggagtcagtttagtaaattagacaaatttagtgacgtattccgtttattaagtgttgtaagtgcaatggactacgttccaaaggaacaaaaagaaatattcatgaagaaaaattttttaagaggcaaattaatggaagaaatagtaaaattgaggaagcagttaatgtatatcatcaagtccaacacttctaaagaaaatattgccgtagtaattaggaatgaagacttgaaaagtgatattccaagcgtcatacaaataaaacttttaaaacaaatgatttgcgctggttttgtcgaccatgttgccgtaagagcagatgttttatttccagatgatgctaagataaccaacagaacttccataatcaacattccttatattcctgttttggccacgagaacaccaaatatcgaggactgctttgtctatatccatccgacttctattttaaataatttgggggaaatgccacccaaatacatgctctattattccttgcaccttggtggaaataataaaacaaggatgaatactttatgtgacatcgcaagcacccccttagcgaacatagcaagaaagggacttcttttgacatacagtaaacctttaactggtcaaggcttgaagaccgttaatttatctcctacggaaagatattgttatgtggttcctagatttggatccacagttgacaacgatctcaagattggttgggatttaaatcctatagcagtgcatcagaagaagcaaaaaggccagtggacagtcattaagtttatcaccagaaagggcttccagaccatcacaggtgaagagaaagaaaaaaaatga

SEQ ID NO: 8611 - DNA, 4014 bp, Saccharomyces cerevisiae
atggagcacagatataacgtgtttaatgatactccacgagggaaccattggatgggcagttctgtgtcaggatcaccacgtccatcttatagcagtcgtcctaatgtaaacacaacacgacgcttccaatatagtgacgatgagcccgctgagaaaatccgacctttacgctcgaggagctttaaaagtactgaaagtaacataagcgatgaaaaatcaaggatatctgaacgtgacagcaaagaccgctacattaatggtgataaaaaggtagacatttattcactgcctctaatatcaaccgatgttttagaaatttccaaacaaaggacatttgcggtgatattgtttttaataattcaatgttataaaatatatgacctggtaatacttaaatcggggttaccgctttcgggtttactgtttaagaactatcgatttaatttcatatccaagtatttcattatagattccttcttcctgtatgttttaccatcctttaacattcctaggttgacttttaagccatgggttgtttatctccagattttagctatgctactattgaacattttcatatcaagcgatcacgagttcgttttgatttcattaattatgaccacatggagaaaactttatacgaaagaattaagtgtaacaggttcagccattaaccatcatcgtatttttgattcttccgctcattttaagggtgctctaacaatcaagatcctacctgaaaacacagctatgtttaatcctcttcatgaatcatattgtttgcccatggataccaatctttttaaaattaactcaattgacgtacccatcagaataaactcaactgaagagattgaatatatcgagttggaatatagagatctttacacaaattcggtagagttacggtctttgagtaagaaagacttcaaaatcatcgataaccccaaatcctttttaaaaaaagatcagtcagttctaaagtcacattcaaacgattttgaagaaggcagtacaattcgttatttggctgtaactcttcaagatattggcttttatcaaatcaaaaaaattgttgattcaaaaaaactgaatttaaagatccatcagtcacacttggttgtaccctactgtccaattgcatctattactggaactggaagcaatgatagatgtattggcgattcagataatgtttcttttgaaattcaaggtgtgcccccaatgaaattagcatactctaagatcgttaatggtcaaactttttcatatgtagactccagcttgcaaccagaatattttgagtctcctttgcagtcaagcaaatccaaacaaagttttactcaaggagaactaaacgatttgaaatggggaagaaaccaacctgttaatattaatttagactcttccattacccaggacggcaaatttgcatataaaattgataaaataactgatggtctgggaaatgtcgtggattttacatctctccctgaagaattaaaaaagcgctatgatctatcttataatttcaatgttcatgaggttccacgtgcagcgctagaagaaagatttgatccaaagtcacccacaaaaaggtctattgccatcgtgtttgaagaaatcaaaaactggatttcagacattccatatgttattagcctatcctatactgatgcacaagacaagtcgaaaaagataatgaatgttactacagattctttgaccaaagtgttgcaagcggatcttccggggtcatataacttagaatatattgaatctaagttttgtccaggtgaaattgtgggtaaatcaaacgttcttgtaactatgccagttgcacctactatggaagttaaatcatttccaatattggaccagtgtgtgggacaggttggtctaaactttgaactatcttttactggggctccaccatactattataacactaaaatctataagcttgaaaacggtgaaagaaagttatatgatgcaaagagatacacctctgaaggtacgagaaatcgcttcagctatagtccacctaaagaaggtaactatgaaatcgtgtttgatactgtttctaataaattattcactgaaccaatcaaattggaacctgtaaaagaatatactttcaagacatcaatgagggtgaaaccaagcgcatcactaaaattacaccatgatttgaaactctgtttgggtgaccacagcagtgtcccagtagcactaaaaggccaaggcccttttacgttaacatatgatatcattgaaactttttctagcaagaggaaaacttttgaaattaaagaaataaaaaccaacgaatatgtcattaaaacaccagtctttactactggtggtgattatattctatctttggtttctatcaaggattctaccggctgtgtagttggactcagccaaccagatgctaaaatacaggtgaggagagatattccatctgctgcattcaatttttttgaacctatcaaagaagctaaaattaagcacggttctgtcactgaaattccgctcaaattaagtggagaggggccattcaccgttaagtttaaacacatggattacgatggaaacattgtgaaagaatttgaaaacaaatttcagaatagttataagcccgctttgaaagtaagtaaagaagggctttaccaattggtcgatattcgtgactcaagttgccaaggtaatgtgatttaccggaacagtctgtataaggtatctttcttggagaagccaaaatttgcaattcaagacaatcatcacattacaaaagtaacggaaaatttattctctaaagaagaagtctgtcaagggatggaaggtacggttgatttggctctatttggttctccaccattcatattagaatatgatttgatggcacccaacggtcatatttctacaaaaaaaattcaggtggcaaccaaatacgcttcactgaaactgcctaatcaaattcctggagagtacataactactattaaggccatcttcgatggcaattatggtgaaagcgacatacattttagagaacatcagtcggagctcataatcaaacagacagtgcaccccattccagacgtcgcctttgctgatggtggtaaaaccttgcgtgcatgtgctgctaatgtagatcaaatctcatttttggaaccaataaatttgaaatttttacaaggcgaaagcccattttcaatcacctttagcgtttatcacgagagtaccagtaggacagatcagtataccattgacaacattgactcagagaacttttcatttgaaaagttatatgaagggatgaagttaggtaaccatgccattactattgattctgttgttgacgcaaatggttgtgttaacagcctcatatctggaccgcgtaatcaaattcttgtgtcaattactgatgcaccaaagatacatatattagatccttctaccgagtattgtgttggggactatgttgcatatcaattaaacggtgtggcacctttcatgattaagtatgaattcaacggtattccactaaaatctaaggaacgcagctcccaatttgttagattagcatctgaaccgggcattatatctatcacttctttacaggattcatcatcacaatgcattgtcgactttacgaaccctaaattaaagagtgaatttgatgacttatctttaaacatacatcctattccttccgtaactgtttctcaaggaaattacgttactgaggatatccgcgaaggtgaccaggctgaagtaatcttttcgtttgaaggtaccccaccattctcactaacttatgtaaggacagaagagactgatggaaaacacggcaaaaggaggtcgcaggttgttgagacgcataaagtcactgatatatattctcatgaatacaaggtaattacaagcttgcaaggtacctacgaggcgattgaaattacagatgcttattgttttgccaaaaatgatctttttttcaataactaa

SEQ ID NO: 8612 - DNA, 4014 bp, Artificial Sequence
  Description of Artificial Sequence: Synthetic polynucleotide
atggagcacagatataacgtgtttaatgatactccaagagggaaccattggatgggcagttctgtgtctggatctccacgtccatcttatagcagtcgtcctaatgtaaacacaacaagacgcttccaatatagtgacgatgagcccgctgagaaaatcagacctttacgcagcaggagctttaaaagtactgaaagtaacataagcgatgaaaaatctaggatatctgaacgtgacagcaaagaccgctacattaatggtgataaaaaggtagacatttattctttgcctttgatatctaccgatgttttagaaatttccaaacaaaggacatttgcggtgatattgtttttaataattcaatgttataaaatatatgacttggtaatacttaaaagtgggttaccgctttctggtttactttttaagaactataggtttaatttcatatccaagtatttcattatagattccttcttcctctatgttttaccatcctttaacattcctaggttgacttttaagccatgggttgtttatctccagattttagctatgttattattgaacattttcatatctagcgatcacgagttcgttttgatttctttaattatgaccacatggagaaaactttatacgaaagaattaagtgtaacaggttctgccattaaccatcatcgtatttttgattcttccgctcattttaagggtgctttaacaatcaagatcttacctgaaaacacagctatgtttaatcctcttcatgaaagttattgtttgcccatggataccaatctttttaaaattaactctattgacgtacccatcagaataaactctactgaagagattgaatatatcgagttggaatatagagatctttacacaaattctgtagagttaagatctttgagtaagaaagacttcaaaatcatcgataaccccaaatcctttttaaaaaaagatcagtctgttttgaagagtcattccaacgattttgaagaaggcagtacaattcgttatttggctgtaactcttcaagatattggcttttatcaaatcaaaaaaattgttgattctaaaaaattgaatttaaagatccatcagtctcacttggttgtaccctactgtccaattgcatctattactggaactggaagcaatgatagatgtattggcgattctgataatgtttcttttgaaattcaaggtgtgcccccaatgaaattagcatactctaagatcgttaatggtcaaactttttcttatgtagactccagcttgcaaccagaatattttgagtctcctttgcagagtagcaaatccaaacaaagttttactcaaggagaattgaacgatttgaaatggggaagaaaccaacctgttaatattaatttagactcttccattacccaggacggcaaatttgcatataaaattgataaaataactgatggtttgggaaatgtcgtggattttacatctctccctgaagaattaaaaaagcgctatgatttatcttataatttcaatgttcatgaggttccacgtgcagcgttagaagaaagatttgatccaaagtctcccacaaaaaggtctattgccatcgtgtttgaagaaatcaaaaactggatttctgacattccatatgttattagcctttcctatactgatgcacaagacaagagtaaaaagataatgaatgttactacagattctttgaccaaagtgttgcaagcggatcttccggggtcttataacttagaatatattgaatctaagttttgtccaggtgaaattgtgggtaaaagtaacgttcttgtaactatgccagttgcacctactatggaagttaaaagttttccaatattggaccagtgtgtgggacaggttggtttgaactttgaattatcttttactggggctccaccatactattataacactaaaatctataagcttgaaaacggtgaaagaaagttatatgatgcaaagagatacacctctgaaggtacgagaaatcgcttcagctatagtccacctaaagaaggtaactatgaaatcgtgtttgatactgtttctaataaattattcactgaaccaatcaaattggaacctgtaaaagaatatactttcaagacatctatgagggtgaaaccaagcgcatctttgaaattacaccatgatttgaaactctgtttgggtgaccacagcagtgtcccagtagcattgaaaggccaaggcccttttacgttaacatatgatatcattgaaactttttctagcaagaggaaaacttttgaaattaaagaaataaaaaccaacgaatatgtcattaaaacaccagtctttactactggtggtgattatattttatctttggtttctatcaaggattctaccggctgtgtagttggactcagccaaccagatgctaaaatacaggtgaggagagatattccatctgctgcattcaatttttttgaacctatcaaagaagctaaaattaagcacggttctgtcactgaaattccgctcaaattaagtggagaggggccattcaccgttaagtttaaacacatggattacgatggaaacattgtgaaagaatttgaaaacaaatttcagaatagttataagcccgctttgaaagtaagtaaagaagggctttaccaattggtcgatattcgtgacagcagttgccaaggtaatgtgatttacagaaacagtctttataaggtatctttcttggagaagccaaaatttgcaattcaagacaatcatcacattacaaaagtaacggaaaatttattctctaaagaagaagtctgtcaagggatggaaggtacggttgatttggctttgtttggttctccaccattcatattagaatatgatttgatggcacccaacggtcatatttctacaaaaaaaattcaggtggcaaccaaatacgcttctttgaaattacctaatcaaattcctggagagtacataactactattaaggccatcttcgatggcaattatggtgaaagcgacatacattttagagaacatcagtctgagctcataatcaaacagacagtgcaccccattccagacgtcgcctttgctgatggtggtaaaaccttgcgtgcatgtgctgctaatgtagatcaaatctcttttttggaaccaataaatttgaaatttttacaaggcgaaagcccattttctatcacctttagcgtttatcacgagagtaccagtaggacagatcagtataccattgacaacattgactctgagaacttttcttttgaaaagttatatgaagggatgaagttaggtaaccatgccattactattgattctgttgttgacgcaaatggttgtgttaacagcctcatatctggaccgcgtaatcaaattcttgtgtccattactgatgcaccaaagatacatatattagatccttctaccgagtattgtgttggggactatgttgcatatcaattaaacggtgtggcacctttcatgattaagtatgaattcaacggtattccattgaaatctaaggaacgcagctcccaatttgttagattagcatctgaaccgggcattatatctatcacttctttacaggattcttcttctcaatgcattgtcgactttacgaaccctaaattaaagagtgaatttgatgacttatctttaaacatacatcctattccttccgtaactgtttctcaaggaaattacgttactgaggatatccgcgaaggtgaccaggctgaagtaatcttttcttttgaaggtaccccaccattctctttgacttatgtaaggacagaagagactgatggaaaacacggcaaaaggaggagccaggttgttgagacgcataaagtcactgatatatattctcatgaatacaaggtaattacaagcttgcaaggtacctacgaggcgattgaaattacagatgcttattgttttgccaaaaatgatctttttttcaataactga

SEQ ID NO: 8613 - DNA, 909 bp, Saccharomyces cerevisiae
atgacctatccgaaaagaatacctataaatgcgtggtctgaagttcatagggtggcaaggccactaattattactttcgacgcatataatacactatacgccacaaaacttcccgtcatggaacaatactgcattgttgggcgtaaatatggtatcaaggcgaatccttcgactttaacaaacaattttccacacgtttttaaaaaactgaaggaagactatccccaatacggaaaatattctggtatcaagcccgaacaatggtggtccatcttgattaggaacgtcttcgcaccaaacgaaattcccgatgagatgataaatgaaatattaatgcggtttgagggcttcgattcgtattttgtttatccagatttgatcaaatttttaaaggatttgaagtcaagacatcctgatgttatcttaggaatagtaagcaatactgatccaattttttacaaattattaaagaatatcggattatttgagacattttccggtcacatttatttatcatatgagcttaatctcgccaaacctgatagagcaatatttcaatatgcgcttgacgatattatatctaaacaacctcatttactcgaaaagtacaccagggaggaaattctacagcattgctttcacatcggagatgaattaaagaacgatctcgaaggggcagaagctgccggttggactggtatactgttagatagaaatgataaatacgggtttctttcaaactcgattagtaaaccaatgcgggacgaatacaagctgtcaattgataaaatagataataattcaataaacacttgggaagccaatactaagcaaactgacacgttacagttgagtgaaagaaagtacgttgtttcgaatcttgaggttttagaggaactctttccctga

SEQ ID NO: 8614 - DNA, 909 bp, Artificial Sequence
  Description of Artificial Sequence: Synthetic polynucleotide
atgacctatccgaaaagaatacctataaatgcgtggtctgaagttcatagggtggcaaggccattgattattactttcgacgcatataatacattgtacgccacaaaacttcccgtcatggaacaatactgcattgttgggcgtaaatatggtatcaaggcgaatccttccactttaacaaacaattttccacacgtttttaaaaaattgaaggaagactatccccaatacggaaaatattctggtatcaagcccgaacaatggtggtccatcttgattaggaacgtcttcgcaccaaacgaaattcccgatgagatgataaatgaaatattaatgagatttgagggcttcgattcttattttgtttatccagatttgatcaaatttttaaaggatttgaagtctagacatcctgatgttatcttaggaatagtaagcaatactgatccaattttttacaaattattaaagaatatcggattatttgagacattttccggtcacatttatttatcttatgagcttaatctcgccaaacctgatagagcaatatttcaatatgcgcttgacgatattatatctaaacaacctcatttactcgaaaagtacaccagggaggaaattttacagcattgctttcacatcggagatgaattaaagaacgatctcgaaggggcagaagctgccggttggactggtatattattagatagaaatgataaatacgggtttctttccaactctattagtaaaccaatgagagacgaatacaagttatccattgataaaatagataataattctataaacacttgggaagccaatactaagcaaactgacacgttacagttgagtgaaagaaagtacgttgtttctaatcttgaggttttagaggaactctttccctga

SEQ ID NO: 8615 - DNA, 1536 bp, Saccharomyces cerevisiae
atgtcgaaaaggtctatcgaggtcaacgaggaacaagatagagtggtctctgctaaaacagaatctcactctgttcctgctattcccgcctctgaagagcaagatgctcccaagaatgacctagaagaacaattgagtgatgaatttgatagtgatggtgaaattattgaaattgatggcgatgatgagattaatgacgaagatgaccttaggaaaaagcaagaagaagctgaaactttagtacaaaaggaccaatccgaaggcaacaaagaaaagatccaggagctttacttaccccatatgtctcgtccattagggccagatgaagtccttgaggctgatcccactgtttatgaaatgctacataatgtcaatatgccatggccatgcttgacattagatgtcattccagatacactaggttctgaacgtagaaactatccacagtctattttgttgaccacggctactcaatcttccaggaaaaaggagaatgaactaatggttctagcactttctaatttagcgaaaacacttttgaaagacgataatgaaggtgaagatgatgaagaggatgatgaagatgatgtggatccagtcattgagaatgaaaatataccattgagagatacaaccaatagattaaaggtttctccttttgccatttctaatcaagaggtgttaaccgctacaatgagcgaaaatggtgatgtttatatatacaatctagctccacaaagcaaagctttttccacaccaggttatcagattccgaagtctgctaagcgtcctattcacactgtaaaaaatcatgggaatgttgaaggctacgggttggattggtcaccattgatcaagactggtgcgttactatcaggtgattgctcaggacaaatatattttacccaaaggcacacatcgagatgggtgactgataaacaaccatttactgtttcaaacaataaatccatagaagatatccagtggtctcgcactgaatccaccgtttttgcaaccgcaggatgtgatggatatataaggatttgggacacaagatcaaaaaaacataaacctgctatctctgttaaagcttctaatactgacgtaaatgtcataagttggagtgataaaattggttacttgctagcaagcggtgacgataacggtacatggggagtatgggatttaagacagtttacgccaagtaatgctgacgccgtccaaccggttgctcaatatgacttccataagggagccattacttccattgcattcaacccattagatgagtctatcgttgcggtaggctcagaagataatactgtgactttgtgggatttgtctgtagaagctgacgatgaggaaattaaacaacaggccgccgaaacaaaagagctacaagaaattccaccacaattattgtttgttcactggcaaaaggaagttaaagatgtcaaatggcataagcaaatcccaggttgtttagtaagtaccggtactgacggtttgaacgtctggaaaacaatcagtgtctaa

SEQ ID NO: 8616 - DNA, 1536 bp, Artificial Sequence
  Description of Artificial Sequence: Synthetic polynucleotide
atgtccaaaaggtctatcgaggtcaacgaggaacaagatagagtggtctctgctaaaacagaatctcactctgttcctgctattcccgcctctgaagagcaagatgctcccaagaatgacttggaagaacaattgagtgatgaatttgatagtgatggtgaaattattgaaattgatggcgatgatgagattaatgacgaagatgaccttaggaaaaagcaagaagaagctgaaactttagtacaaaaggaccaatccgaaggcaacaaagaaaagatccaggagctttacttaccccatatgtctcgtccattagggccagatgaagtccttgaggctgatcccactgtttatgaaatgttgcataatgtcaatatgccatggccatgcttgacattagatgtcattccagatacattaggttctgaacgtagaaactatccacagtctattttgttgaccacggctactcaatcttccaggaaaaaggagaatgaattgatggttttagcactttctaatttagcgaaaacacttttgaaagacgataatgaaggtgaagatgatgaagaggatgatgaagatgatgtggatccagtcattgagaatgaaaatataccattgagagatacaaccaatagattaaaggtttctccttttgccatttctaatcaagaggtgttaaccgctacaatgagcgaaaatggtgatgtttatatatacaatttggctccacaaagcaaagctttttccacaccaggttatcagattccgaagtctgctaagcgtcctattcacactgtaaaaaatcatgggaatgttgaaggctacgggttggattggtctccattgatcaagactggtgcgttattatctggtgattgctctggacaaatatattttacccaaaggcacacatctagatgggtgactgataaacaaccatttactgtttctaacaataaatccatagaagatatccagtggtctcgcactgaatccaccgtttttgcaaccgcaggatgtgatggatatataaggatttgggacacaagaagtaaaaaacataaacctgctatctctgttaaagcttctaatactgacgtaaatgtcataagttggagtgataaaattggttacttgttggcaagcggtgacgataacggtacatggggagtatgggatttaagacagtttacgccaagtaatgctgacgccgtccaaccggttgctcaatatgacttccataagggagccattacttccattgcattcaacccattagatgagtctatcgttgcggtaggctctgaagataatactgtgactttgtgggatttgtctgtagaagctgacgatgaggaaattaaacaacaggccgccgaaacaaaagagttacaagaaattccaccacaattattgtttgttcactggcaaaaggaagttaaagatgtcaaatggcataagcaaatcccaggttgtttagtaagtaccggtactgacggtttgaacgtctggaaaacaatcagtgtctga

SEQ ID NO: 8617 - DNA, 627 bp, Saccharomyces cerevisiae
atggtgtatttctatgaatcaaaaccaactgagtattcaacaccttaccaaattgtgatgggcaaagataagtttgaaaacgatctacttatcaaatggagctatagggagttaaactatgtttggtttcacgcggataagtactcaagtggtcatgtttatttaaagttacgcccaaatgaaaaaacaatcgatgacataccgcaagaagtgatatgtgactgtctgcagctatgtaaatcagaatccattcaaggaaacaaaatgccacaatgcaccatcttgataacaccatggcataacttgagaaaaaacaggtatatgaatcccggtgaagtatcatttaagtctctaagacaatgtagaaaaatggaatgcggagcacgagataacaaaatactaaacagactggccaagacaagggtagaactatttaataatgtggaagctacacttaacgaagcaaagaagaccaaaaatggtgatttttttgtaaactatattgagtcgaatagatcaaatcttattgaagaagaaaagctaaggaaagtagcgaaaaaaaaccaaaagaagaagaacaaacagtctaaagatgaggttactgacgatatgcaactggaagtatga

SEQ ID NO: 8618 - DNA, 627 bp, Artificial Sequence
  Description of Artificial Sequence: Synthetic polynucleotide
atggtgtatttctatgaaagtaaaccaactgagtattctacaccttaccaaattgtgatgggcaaagataagtttgaaaacgatttacttatcaaatggagctatagggagttaaactatgtttggtttcacgcggataagtactctagtggtcatgtttatttaaagttacgcccaaatgaaaaaacaatcgatgacataccgcaagaagtgatatgtgactgtttacagttgtgtaaaagtgaatccattcaaggaaacaaaatgccacaatgcaccatcttgataacaccatggcataacttgagaaaaaacaggtatatgaatcccggtgaagtatcctttaagtctttgagacaatgtagaaaaatggaatgcggagcaagagataacaaaatattaaacagattggccaagacaagggtagaattatttaataatgtggaagctacacttaacgaagcaaagaagaccaaaaatggtgatttttttgtaaactatattgagagcaatagatctaatcttattgaagaagaaaagttaaggaaagtagcgaaaaaaaaccaaaagaagaagaacaaacagtctaaagatgaggttactgacgatatgcaattggaagtatga

SEQ ID NO: 8619 - DNA, 1287 bp, Saccharomyces cerevisiae
atgtacgagtactgctcagttgtaataaagaaatactccaagtatacaattccctccttcgctccaaatggttttcaatcaatgcttgagcctcctcagatagacaagtggcaacacctttccgctaactgcactctccaatttcgggttcttctaatggactctagacaaattctgatcaatgtggttctcaataattcaacacttctcgaaaatattcgcctgccgctgggggataatcaagatttaatacaattttcatgtaaaagccccataatctcttgtaaatatatctccgaagaattcggacccagaatgttaaggaggtttcagatgaatttgccaaatgacgttgagttcaacaggactgtagtttctttaaagaaccttaattttgttttaaggacagctaggacatcaatagcccagagtacaataacaagccaggtgcaaggcaataataacggtacaaaggtctgtttcacagaaggtccaaaagttagtagctacacaaatccgaacacgcaatttcaaactcaaaacatgattatggatttcagtcaacgttatcaggaagaatctgaaagagagtcaaataatcgttcaaatataactttaccacacgacagcattcaaatagctcaacaaatatggccaaacacggatttaaatgtagtacaatcttcacaagacctcaacactccaatggctacgcaaactgttttgggtcgtcctgagtcgctaattgtacagccattggaggtttctcaatctccaccaaacactaccaactgccttcctaatgcagaaaacaaaaagaaaaaagtcgacaccacttctgattttacttcaagaaaggagattgctctgtgtaaaactggtttattagaaactattcatataccaaaggaaagggaaagtcagatgcaaagcgtcactggtttagatgcaacaccaacgattatatggagccccgggaaagacaacacggcgaagaaaaataccagtaataagaaaaatattgatgataaactaacaaacccccaaaaatctggaaatacacatacccctgatagaaataaagaagtgctacctaacggcacacttaatgaaacgaggaaagaagcatcgccaagcgaaggattaacgataagagttaaaaacgttaatcggaatgcgtcaagaaaaatatctaagcggctaatcaaggaaaagttgaaagacgaagaattcatgaaatgggttaataaggttgaaacggttctcaataaaatgttcgaaaagtga

SEQ ID NO: 8620 - DNA, 1287 bp, Artificial Sequence
  Description of Artificial Sequence: Synthetic polynucleotide
atgtacgagtactgctctgttgtaataaagaaatactccaagtatacaattccctccttcgctccaaatggttttcaatctatgcttgagcctcctcagatagacaagtggcaacacctttccgctaactgcactctccaatttagagttcttttgatggactctagacaaattttgatcaatgtggttctcaataattctacacttctcgaaaatattcgcttaccgttaggggataatcaagatttaatacaattttcttgtaaaagccccataatctcttgtaaatatatctccgaagaattcggacccagaatgttaaggaggtttcagatgaatttgccaaatgacgttgagttcaacaggactgtagtttctttaaagaaccttaattttgttttaaggacagctaggacatctatagcccagagtacaataacaagccaggtgcaaggcaataataacggtacaaaggtctgtttcacagaaggtccaaaagttagtagctacacaaatccgaacacgcaatttcaaactcaaaacatgattatggatttcagtcaacgttatcaggaagaatctgaaagagagagcaataatcgttccaatataactttaccacacgacagcattcaaatagctcaacaaatatggccaaacacggatttaaatgtagtacaatcttctcaagacctcaacactccaatggctacgcaaactgttttgggtcgtcctgagtctttgattgtacagccattggaggtttctcaatctccaccaaacactaccaactgccttcctaatgcagaaaacaaaaagaaaaaagtcgacaccacttctgattttacttccagaaaggagattgctctttgtaaaactggtttattagaaactattcatataccaaaggaaagggaaagtcagatgcaaagcgtcactggtttagatgcaacaccaacgattatatggagccccgggaaagacaacacggcgaagaaaaataccagtaataagaaaaatattgatgataaattaacaaacccccaaaaatctggaaatacacatacccctgatagaaataaagaagtgttgcctaacggcacacttaatgaaacgaggaaagaagcatctccaagcgaaggattaacgataagagttaaaaacgttaatagaaatgcgtccagaaaaatatctaagagattgatcaaggaaaagttgaaagacgaagaattcatgaaatgggttaataaggttgaaacggttctcaataaaatgttcgaaaagtga

SEQ ID NO: 8621 - DNA, 714 bp, Saccharomyces cerevisiae
atgtcgttaaaggataggtatctaaatctcgaattaaaattaataaataaactacaggagttgccatatgttcatcaatttatccatgatcgaataagtggtaggataactctctttttgatagtggttggtacgcttgcattttttaacgaactgtatataacgatcgaaatgagtcttctacaaaagaacacatcagaagaactagagcgtggaagaatcgatgaaagtctgaagcttcatcggatgttggtgagtgatgaatatcacggtaaagaatacaaagacgagaaaagcggtattgttattgaagagttcgaagatcgcgataagttttttgcaaaacctgtgtttgtatcagaattggatgtcgaatgtaatgttattgtagatgggaaagaacttctgtccaccccattaaaatttcatgttgaattttctccagaggattatgaaaatgaaaaaagacctgagtttggtactaccttgcgtgtattgaggctgagactttaccactactttaaagattgcgaaatatatcgcgatataattaagaatgagggcggtgaaggggcaagaaagtttacgatttccaacggtgtcaaaatttacaatcataaagatgaactactgccattgaatatcgatgatgttcaattatgtttcctgaagattgatacgggaaacacgataaaatgcgaattcatactatga

SEQ ID NO: 8622 - DNA, 714 bp, Artificial Sequence
  Description of Artificial Sequence: Synthetic polynucleotide
atgtctttaaaggataggtatttgaatctcgaattaaaattaataaataaattacaggagttgccatatgttcatcaatttatccatgatagaataagtggtaggataactctctttttgatagtggttggtacgcttgcattttttaacgaattgtatataacgatcgaaatgagtcttttacaaaagaacacaagtgaagaattagagcgtggaagaatcgatgaaagtttgaagcttcatagaatgttggtgagtgatgaatatcacggtaaagaatacaaagacgagaaaagcggtattgttattgaagagttcgaagatcgcgataagttttttgcaaaacctgtgtttgtatctgaattggatgtcgaatgtaatgttattgtagatgggaaagaacttctttccaccccattaaaatttcatgttgaattttctccagaggattatgaaaatgaaaaaagacctgagtttggtactaccttgcgtgtattgaggttaagactttaccactactttaaagattgcgaaatatatcgcgatataattaagaatgagggcggtgaaggggcaagaaagtttacgatttccaacggtgtcaaaatttacaatcataaagatgaattattaccattgaatatcgatgatgttcaattatgtttcttgaagattgatacgggaaacacgataaaatgcgaattcatattatga

SEQ ID NO: 8623 - DNA, 1368 bp, Saccharomyces cerevisiae
atgactatatctactcttagtaacgagaccacgaagagcggatcttgcagcggccaaggcaagaatggtgggaaagactttacgtatggaaagaagtgcttcacgaaggaagaatggaaggagcaggtggccaagtattctgccatgggcgagctatatgcaaataagacaatacattatccgctgaaaattcagcccaacagcagtggcggctcgcaggacgagggatttgctaccatacagaccacacccatagagcccacactgccacggcttctgttgaactactttgtttctatggcatatgaagactcgagcattaggatggccaaggagctgggatttatacggaacaacaaagacattgcggttttcaatgatttgtacaagatcaaggagcgtttccatatcaaacatcttattaagctggggcgtatcaatgaggcgatggaggagataaactctatcttcgggctggaggtgctggaagagactttcaatgctacgggaagttatacgggtagaactgacaggcagcagcagcagcagcagcagcagtttgacatagatggagatttacacttcaaactgctgttactgaatttgatcgagatgataagaagtcaccatcaacaggagaacatcaccaaggattccaacgactttatactcaatctaattcagtattctcaaaataaacttgcaataaaggcttcgtcaagtgtcaaaaagatgcaagagttagaattagcaatgactctgctgcttttccccttgtcagattcggcggacagcggcagcattaagctgcccaaatcgttacaaaatctgtactcgatatctctaagatctaagatagcagatctggttaatgagaagctgctgaagtttattcatccaaggattcaatttgagatcagcaataataattccaaatttccagatttgttaaattccgacaagaaaataattacgcagaacttcacggtgtataacaacaatctcgtcaatggttcaaatggtacaaaaataactcacatttcgtctgaccaacctatcaacgaaaagatgtcaagcaacgaggtcacggctgctgctaattcagtttggctaaatcaaagggatggaaatgttggcacaggttcagcggcgacaacttttcataacttagaaaataaaaattactggaatcaaacttctgaattgctttcctcttcaaatggaaaggaaaaaggtttagaattcaataattactactcttccgaatttccctatgaaccaagattgacgcagataatgaaactgtggtgttggtgcgaaaatcagcttcatcacaaccaaataggggttcctagggtcgaaaactga

SEQ ID NO: 8624 - DNA, 1368 bp, Artificial Sequence
  Description of Artificial Sequence: Synthetic polynucleotide
atgactatatctactcttagtaacgagaccacgaagagcggatcttgcagcggccaaggcaagaatggtgggaaagactttacgtatggaaagaagtgcttcacgaaggaagaatggaaggagcaggtggccaagtattctgccatgggcgagttgtatgcaaataagacaatacattatccgttaaaaattcagcccaacagcagtggcggctctcaggacgagggatttgctaccatacagaccacacccatagagcccacattaccaaggcttttattgaactactttgtttctatggcatatgaagactccagcattaggatggccaaggagttaggatttataagaaacaacaaagacattgcggttttcaatgatttgtacaagatcaaggagcgtttccatatcaaacatcttattaagttagggcgtatcaatgaggcgatggaggagataaactctatcttcgggttagaggtgttggaagagactttcaatgctacgggaagttatacgggtagaactgacaggcagcagcagcagcagcagcagcagtttgacatagatggagatttacacttcaaattattattattgaatttgatcgagatgataagaagtcaccatcaacaggagaacatcaccaaggattccaacgactttatactcaatttaattcagtattctcaaaataaacttgcaataaaggcttcttccagtgtcaaaaagatgcaagagttagaattagcaatgactttattacttttccccttgagtgattctgcggacagcggcagcattaagttgcccaaatctttacaaaatctttactctatatctttgagatctaagatagcagatttggttaatgagaagttattgaagtttattcatccaaggattcaatttgagatcagcaataataattccaaatttccagatttgttaaattccgacaagaaaataattacgcagaacttcacggtgtataacaacaatctcgtcaatggtagtaatggtacaaaaataactcacatttcttctgaccaacctatcaacgaaaagatgtctagcaacgaggtcacggctgctgctaattctgtttggttaaatcaaagggatggaaatgttggcacaggttctgcggcgacaacttttcataacttagaaaataaaaattactggaatcaaacttctgaattgctttcctcttccaatggaaaggaaaaaggtttagaattcaataattactactcttccgaatttccctatgaaccaagattgacgcagataatgaaattatggtgttggtgcgaaaatcagcttcatcacaaccaaataggggttcctagggtcgaaaactga

SEQ ID NO: 8625 - DNA, 1683 bp, Saccharomyces cerevisiae
atgcaagcccccaatatctaccccttctctcaaacacagccacaagcactgcccgggttcacatacggtcctccacaacttgtttttgaccattctgctccgagagtagatcctttgcattctactgtaactataaattctccattacccttgcagcattataatggaccgaatgcccatataaacagcgcaaacaacaactacgcatactactatcatcatcccaacaataatgataacaacaaccatagtaacaacactataaaaaataacaacattaattctgttcttcccgccgttaatattcaaatatccaacaactcacattatagaaatacacaccaaattccttctgctcctcagcggctggtcagcatcataccggatccccacatgccgcccaatatttctcactttcagctaaataatattcaccctcaaatgcatgctcctgttgctactgatattcatttccaacaagtaccagtttacaataaaaccaataatggcattggtactgataacattaataacgataaacccgtaaactcgaatcagaatgaagtgctggacaatattgatgaacgttcctgtcatgaaattaacagggtagtttcattttctaaacattttgaaaacaacgaacttaccactacagcaaatgatctaaacattcaatctactatggatgaattagctaaactgaaatctttatcaaattctacccatttcaggcagagtattgctactcagaatttccattctttacaaaatcatatcacaaccatcgaaaaccgtctggcttctttacttactgacagacaacaagagcagcaacagttgaagcagcaagagtctgaaaaggagagctcttcaccgttttccaataagataaagttaccttccttacaggaattaactgactccatctccacccaacatcttccaacattctatgacaataaaaggcatgcttcggataccgatttaaagagtagcaccttacatggtccattatatcaccgtcacgcttttctttcaacctcttcttcctcaccctcccccacggccggttccgcgcctcttcaaaagttacaggttccaagacaagacgatccaaacgataagaaaatgaatatttcatcatctcccttcaattcaataacctacattccaaacactacgttatctccaatggtgcaaacgcagttaaagaacttaaccacttctaacctcaacacgaaaaagaagaataacagaggcagaccaagagctattcagagacaacccacgctgaccacttccagccatttcatcaataattccaatcctggtgctgctgcagtttcaacgacaactcccgccgctaatagcgatgaaaagaatcctaatgcaaaaaaaatcatcgagttttgtttccattgcggggagaccgagactccagaatggagaaagggaccatatggcacaagaactttgtgtaatgcctgtgggttattttataggaaagtcaccaagaaatttggctcaaaaagcagtaatttgttgttaagatatagaagatctattgatttagccaacgatcgtagaattcctgattttatcactattccaaacaggtttattcatgatatggataatgatcaaacgttggactctgagtataatacgatattgcaataa

SEQ ID NO: 8626 - DNA, 1683 bp, Artificial Sequence
  Description of Artificial Sequence: Synthetic polynucleotide
atgcaagcccccaatatctaccccttctctcaaacacagccacaagcattgcccgggttcacatacggtcctccacaacttgtttttgaccattctgctccgagagtagatcctttgcattctactgtaactataaattctccattacccttgcagcattataatggaccgaatgcccatataaacagcgcaaacaacaactacgcatactactatcatcatcccaacaataatgataacaacaaccatagtaacaacactataaaaaataacaacattaattctgttcttcccgccgttaatattcaaatatccaacaactctcattatagaaatacacaccaaattccttctgctcctcagagattggtcagcatcataccggatccccacatgccgcccaatatttctcactttcagttgaataatattcaccctcaaatgcatgctcctgttgctactgatattcatttccaacaagtaccagtttacaataaaaccaataatggcattggtactgataacattaataacgataaacccgtaaacagtaatcagaatgaagtgcttgacaatattgatgaacgttcctgtcatgaaattaacagggtagtttctttttctaaacattttgaaaacaacgaacttaccactacagcaaatgatttgaacattcaatctactatggatgaattagctaaattgaaatctttatccaattctacccatttcaggcagagtattgctactcagaatttccattctttacaaaatcatatcacaaccatcgaaaaccgtttggcttctttacttactgacagacaacaagagcagcaacagttgaagcagcaagagtctgaaaaggagagctcttctccgttttccaataagataaagttaccttccttacaggaattaactgactccatctccacccaacatcttccaacattctatgacaataaaaggcatgcttctgataccgatttaaagagtagcaccttacatggtccattatatcaccgtcacgcttttctttctacctcttcttcctctccctcccccacggccggttccgcgcctcttcaaaagttacaggttccaagacaagacgatccaaacgataagaaaatgaatatttcttcttctcccttcaattctataacctacattccaaacactacgttatctccaatggtgcaaacgcagttaaagaacttaaccacttctaacctcaacacgaaaaagaagaataacagaggcagaccaagagctattcagagacaacccacgttgaccacttccagccatttcatcaataattccaatcctggtgctgctgcagtttccacgacaactcccgccgctaatagcgatgaaaagaatcctaatgcaaaaaaaatcatcgagttttgtttccattgcggggagaccgagactccagaatggagaaagggaccatatggcacaagaactttgtgtaatgcctgtgggttattttataggaaagtcaccaagaaatttggctctaaaagcagtaatttgttgttaagatatagaagatctattgatttagccaacgatcgtagaattcctgattttatcactattccaaacaggtttattcatgatatggataatgatcaaacgttggactctgagtataatacgatattgcaatga

SEQ ID NO: 8627 - DNA, 1986 bp, Saccharomyces cerevisiae
atgtcaaggaaatctatagtgcaaataagaagatctgaagtaaagcggaaacgaagtagcaccgctagcagtacaagtgaggggaaaactcttcataagaacacacatacatcctctaaaaggcagagaactttgacagaattcaacatcccaacttcatcgaacttacctgtccgttccagttcatattcattctcaaggttcagttgttcaacatccaataagaatacagagccagtaattattaacgatgacgatcacaatagcatttgccttgaagacactgcaaaggtcgaaatcaccatagacacagacgaggaagaactagttagcttgcatgataacgaagtcagcgcaatagaaaataggaccgaagatcgaatagtaacggaattggaggagcaagtaaatgttaaagtctctacagaagttattcaatgtcctatttgtctagaaaacctttctcatttagaattgtacgaaagagagacacactgtgatacttgcataggcagtgacccgagcaatatgggaacacctaaaaagaatatcaggagctttatttctaatccatcatctcctgcaaaaacgaagagggatatagctacgtcaaaaaaaccaacaagagtaaaacttgttttaccaagtttcaagataattaagttcaataatggccacgaaatagttgtggatggtttcaattataaggccagcgagactatctctcagtactttctttctcattttcattctgatcactatattggactcaaaaaatcttggaacaatcctgatgagaatccgatcaagaaaacactttactgttctaagatcactgcaatattagtaaatttaaaattcaaaattccaatggatgaaatccaaattttacccatgaataaacgcttttggataacagataccatttcagtagttacgttggacgctaaccattgtcccggtgcaataataatgcttttccaggagtttctggcaaattcgtatgataagcctataagacaaattcttcacacgggggattttcgaagcaacgccaaaatgattgagacaattcagaagtggttggccgagacagcgaatgaaactattgaccaagtttatttagatacaacatatatgactatgggatacaactttccttcacaacattctgtgtgcgagactgtggctgattttacattacggcttataaaacatggtaaaaacaaaacatttggagattcacaaaggaacctttttcactttcagagaaagaaaacattgacaactcatcgttacagggtcctatttcttgtgggaacatatactattggaaaagagaagctagccatcaagatatgtgaatttttgaaaacaaaattatttgttatgccgaattccgttaaattttcaatgatgctaacagttttacaaaacaacgaaaatcaaaatgacatgtgggacgaaagcttactcaccagcaatttacatgaatcatccgtacatttggtacctataagagtgttgaaaagtcaagaaaccatagaagcttacttgaaaagtttaaaagaattggaaacagactatgtgaaagacattgaagatgttgtcgggtttatacctaccgggtggagtcacaattttggtttaaaatatcaaaagaaaaacgatgatgatgagaatgaaatgagtggcaatacagaatattgcttagaactaatgaagaatgatcgagataatgatgatgagaatgggtttgaaatctcgagtatattgaggcaatacaaaaagtacaacaaatttcaagtttttaacgtaccatattctgaacacagtagttttaacgatttagtgaaatttggttgtaaattgaagtgttctgaagtcattcccactgtgaatctaaacaatttatggaaagtgaggtatatgacgaattggtttcaatgttgggaaaacgttaggaaaacgcgggcggctaaataa

SEQ ID NO: 8628 - DNA, 1986 bp, Artificial Sequence
  Description of Artificial Sequence: Synthetic polynucleotide
atgtctaggaaatctatagtgcaaataagaagatctgaagtaaagagaaaaagaagtagcaccgctagcagtacaagtgaggggaaaactcttcataagaacacacatacatcctctaaaaggcagagaactttgacagaattcaacatcccaacttcttccaacttacctgtccgttccagttcttattctttctctaggttcagttgttctacatccaataagaatacagagccagtaattattaacgatgacgatcacaatagcatttgccttgaagacactgcaaaggtcgaaatcaccatagacacagacgaggaagaattggttagcttgcatgataacgaagtcagcgcaatagaaaataggaccgaagatagaatagtaacggaattggaggagcaagtaaatgttaaagtctctacagaagttattcaatgtcctatttgtttagaaaacctttctcatttagaattgtacgaaagagagacacactgtgatacttgcataggcagtgacccgagcaatatgggaacacctaaaaagaatatcaggagctttatttctaatccatcttctcctgcaaaaacgaagagggatatagctacgtccaaaaaaccaacaagagtaaaacttgttttaccaagtttcaagataattaagttcaataatggccacgaaatagttgtggatggtttcaattataaggccagcgagactatctctcagtactttctttctcattttcattctgatcactatattggactcaaaaaatcttggaacaatcctgatgagaatccgatcaagaaaacactttactgttctaagatcactgcaatattagtaaatttaaaattcaaaattccaatggatgaaatccaaattttacccatgaataaacgcttttggataacagataccattagtgtagttacgttggacgctaaccattgtcccggtgcaataataatgcttttccaggagtttttggcaaattcttatgataagcctataagacaaattcttcacacgggggattttagaagcaacgccaaaatgattgagacaattcagaagtggttggccgagacagcgaatgaaactattgaccaagtttatttagatacaacatatatgactatgggatacaactttccttctcaacattctgtgtgcgagactgtggctgattttacattaagacttataaaacatggtaaaaacaaaacatttggagattctcaaaggaacctttttcactttcagagaaagaaaacattgacaactcatcgttacagggtcttgtttcttgtgggaacatatactattggaaaagagaagttggccatcaagatatgtgaatttttgaaaacaaaattatttgttatgccgaattccgttaaattttccatgatgttaacagttttacaaaacaacgaaaatcaaaatgacatgtgggacgaaagcttactcaccagcaatttacatgaatcttccgtacatttggtacctataagagtgttgaaaagtcaagaaaccatagaagcttacttgaaaagtttaaaagaattggaaacagactatgtgaaagacattgaagatgttgtcgggtttatacctaccgggtggagtcacaattttggtttaaaatatcaaaagaaaaacgatgatgatgagaatgaaatgagtggcaatacagaatattgcttagaattgatgaagaatgatagagataatgatgatgagaatgggtttgaaatctccagtatattgaggcaatacaaaaagtacaacaaatttcaagtttttaacgtaccatattctgaacacagtagttttaacgatttagtgaaatttggttgtaaattgaagtgttctgaagtcattcccactgtgaatttgaacaatttatggaaagtgaggtatatgacgaattggtttcaatgttgggaaaacgttaggaaaacgagagcggctaaatga

SEQ ID NO: 8629 - DNA, 576 bp, Saccharomyces cerevisiae
atgggactactaagtattatcaggaaacagaagctcagggacaaagaaattcgctgtctgattctaggactagacaattcggggaagtcaacgatagtaaacaaactattgcccaaggatgagcaaaataacgatggtataatgcctactgtgggttttcaaatacatagtctgatgataaaagatgtgacaatatctctatgggacattggggggcaacgcacattaaggccattttgggataactattttgataagacacaagcgatgatatggtgtatagatgtgagcctttcaatgcggtttgacgaaaccttgcaagaactaaaagaattaatcaatagagacgaaaatcgaataggatacgagtgtgctgttatcgttgtgttgaacaagattgatttagtggaggacaagtccgagcttcatcgaaggtgtttactggtagagagcgagttgaagtgtctgttcaagccggacatccgaatagagctcgtcaaatgtagtggcgttaccggagaaggtattgataacctgcgtgaccgtctggtggaatcctgccattttacccaataa

SEQ ID NO: 8630 - DNA, 576 bp, Artificial Sequence
  Description of Artificial Sequence: Synthetic polynucleotide
atgggattattaagtattatcaggaaacagaagctcagggacaaagaaattcgctgtttaattttaggattggacaatagtgggaagtctacgatagtaaacaaacttttgcccaaggatgagcaaaataacgatggtataatgcctactgtgggttttcaaatacatagtttaatgataaaagatgtgacaatatctctttgggacattggggggcaacgcacattaaggccattttgggataactattttgataagacacaagcgatgatatggtgtatagatgtgagcctttctatgagatttgacgaaaccttgcaagaattgaaagaattaatcaatagagacgaaaatagaataggatacgagtgtgctgttatcgttgtgttgaacaagattgatttagtggaggacaagtccgagcttcatagaaggtgtttattggtagagagcgagttgaagtgtttgttcaagccggacatcagaatagagctcgtcaaatgtagtggcgttaccggagaaggtattgataacttgcgtgaccgtttagtggaatcctgccattttacccaatga

SEQ ID NO: 8631 - DNA, 1113 bp, Saccharomyces cerevisiae
atgaatattcaaagcaataattctccgaatctcagtaataacatagtgtcaaaacaggtttactacgcccatcctccacctacgatagacccgaatgatccggtgcagatatctttccctaccaccgaagtagttgggcatggttcgtttggtgtggtatttgccactgttattcaagaaactaatgaaaaagttgctattaagaaagtcctgcaagataaacgattcaagaacagagagctggaaataatgaaaatgctgagtcacataaatataatagatctgaagtactttttctatgaaagggactcccaagatgagatttatttaaatttgatactagaatacatgccacaatctttgtaccagaggttacgtcatttcgtccatcaacgtacgccgatgtcaagattggaaataaagtactacatgtttcaattgttcaagtcattgaattacctccatcatttcgcgaacgtctgtcatagagacattaagcctcaaaatttattagtagatcctgagacctggtccttaaaactgtgcgatttcggcagtgcaaagcaattgaaacctactgaacctaacgtttcctatatttgttcacggtactatagagcaccagagctaatcttcggcgcaacaaattataccaaccaaatcgacatatggtcctctggctgcgtaatggcggaactgctattgggccaaccaatgttccctggagaaagtggtattgatcaactagtggaaatcattaaaatcttaggtactccatcaaagcaagaaatttgctctatgaatcccaattatatggagcataagttcccgcaaattaaaccaataccattgtcacgtgttttcaagaaagaagatgatcaaactgtggaatttctagctgacgttttgaaatatgatccactagaaagatttaatgctctacaatgcctgtgtagtccatattttgatgaactaaaacttgatgacggtaaaataaatcaaataacaactgatttaaaattgctagagttcgatgaaaatgtcgaattgggccatctatctcccgatgaactatcatctgtaaaaaaaaagctatatccgaagtctaagtaa

SEQ ID NO: 8632 - DNA, 1113 bp, Artificial Sequence
  Description of Artificial Sequence: Synthetic polynucleotide
atgaatattcaaagcaataattctccgaatctcagtaataacatagtgtctaaacaggtttactacgcccatcctccacctacgatagacccgaatgatccggtgcagatatctttccctaccaccgaagtagttgggcatggttcttttggtgtggtatttgccactgttattcaagaaactaatgaaaaagttgctattaagaaagtcttacaagataaaagattcaagaacagagagttagaaataatgaaaatgttaagtcacataaatataatagatttgaagtactttttctatgaaagggactcccaagatgagatttatttaaatttgatattggaatacatgccacaatctttgtaccagaggttacgtcatttcgtccatcaacgtacgccgatgagtagattggaaataaagtactacatgtttcaattgttcaagtctttgaattacctccatcatttcgcgaacgtctgtcatagagacattaagcctcaaaatttattagtagatcctgagacctggtccttaaaattatgcgatttcggcagtgcaaagcaattgaaacctactgaacctaacgtttcctatatttgttctcgttactatagagcaccagagttgatcttcggcgcaacaaattataccaaccaaatcgacatatggtcctctggctgcgtaatggcggaattattattgggccaaccaatgttccctggagaaagtggtattgatcaattagtggaaatcattaaaatcttaggtactccatctaagcaagaaatttgctctatgaatcccaattatatggagcataagttcccgcaaattaaaccaataccattgtctcgtgttttcaagaaagaagatgatcaaactgtggaatttttggctgacgttttgaaatatgatccattggaaagatttaatgctttacaatgcttgtgtagtccatattttgatgaattgaaacttgatgacggtaaaataaatcaaataacaactgatttaaaattgttggagttcgatgaaaatgtcgaattgggccatttatctcccgatgaattatcttctgtaaaaaaaaagctttatccgaagtctaagtga

SEQ ID NO: 8633 - DNA, 1470 bp, Saccharomyces cerevisiae
atgggtaatgttccagggaaaatagaccaggaagatagttttaatgatgtcaggccagattcctcatataatactacatcatcgaattctgtcatcaaacaatatgatgaagaagcctcttcaagggtgagaacgagacgcacgacgtctttggtcaataatattttaaatgggaataatgctcgtacaaaaactggttctcatctatccagcactagtagaagaaagacgtcacgggaaaaagagcttgctaaagaggcacatgctaaacaattggttgtgaggtgtagcgaaactgtagatggggggtttttggccccatttggctgttattcttttgaaaagttggactatgatgctactgtcgttaaaaatttaataatcaaaagaaagttagcgccgttttacactcctttgcaggattttgatgaaagttggactagagatgagttgataaaaattgttgacggattgcccttgcatgacacgttcgatgaaaatttggaagaattcgaagacgtaccgataggcaatttaaggaagtcaacatttaatgaattaatagacaaatctttatccaagaaggaacagagaagaatgcacgcaaagatttttagagcaagattgtataagaaaagaattttatggcaagaaaatgaaaatgagacgtttttggagaggaaattggaaatgaaaagaattggcagcaagtccagcaatgttgaagataataccagtagccagccaaggaaaaattaccatttaccaagtgacgatttgaagtatactctttacaaaaatgggtcggaatgccctatttgttttttatactttccagggcctttcaactattccaaatgttgtcaacagcctatttgtaccgagtgttttgtacagattaagagagctgatcctcacttccctcatgacgaagtagacccaactgaaccacaaactaatgacagtgaaaaggacccaaatcttcttacctctgagccagcaaattgcccctactgtgcaactgctagttttagcatcacttatcaaccacccacaaatcgtgaaactggtatagggggtatgccagccgactcatacgtgtataaggacgccgccatatcaagagctgatggcggtcagccaaacatatcagccattacttcggataccattcgtcctgattgggagattaaattgaacaaagaaagggcaaggttgatgaggagatccgcgaatgccaccgctatacatataagtaataggttgatcgatccaagccatagcagaaggagaaatacaagtcacagtataacccctattcatgatgaaagtacgtcagcttcaagatctcctgaaccgacaataaacgaacttgaagatcaaatggttagagaggctattaggttaagccttgaagatcaggacaaccgaaaaaaatcaaagaatagaaacacctctttgagaccatag

SEQ ID NO: 8634 - DNA, 1470 bp, Artificial Sequence
  Description of Artificial Sequence: Synthetic polynucleotide
atgggtaatgttccagggaaaatagaccaggaagatagttttaatgatgtcaggccagattccagctataatactacatcttccaattctgtcatcaaacaatatgatgaagaagcctcttccagggtgagaacgagacgcacgacgtctttggtcaataatattttaaatgggaataatgctcgtacaaaaactggttctcatttgtccagcactagtagaagaaagacgtccagagaaaaagagcttgctaaagaggcacatgctaaacaattggttgtgaggtgtagcgaaactgtagatggggggtttttggccccatttggctgttattcttttgaaaagttggactatgatgctactgtcgttaaaaatttaataatcaaaagaaagttagcgccgttttacactcctttgcaggattttgatgaaagttggactagagatgagttgataaaaattgttgacggattgcccttgcatgacacgttcgatgaaaatttggaagaattcgaagacgtaccgataggcaatttaaggaagagtacatttaatgaattaatagacaaatctttatccaagaaggaacagagaagaatgcacgcaaagatttttagagcaagattgtataagaaaagaattttatggcaagaaaatgaaaatgagacgtttttggagaggaaattggaaatgaaaagaattggcagcaagtccagcaatgttgaagataataccagtagccagccaaggaaaaattaccatttaccaagtgacgatttgaagtatactctttacaaaaatgggagtgaatgccctatttgttttttatactttccagggcctttcaactattccaaatgttgtcaacagcctatttgtaccgagtgttttgtacagattaagagagctgatcctcacttccctcatgacgaagtagacccaactgaaccacaaactaatgacagtgaaaaggacccaaatcttcttacctctgagccagcaaattgcccctactgtgcaactgctagttttagcatcacttatcaaccacccacaaatcgtgaaactggtatagggggtatgccagccgactcttacgtgtataaggacgccgccatatctagagctgatggcggtcagccaaacatatctgccattacttctgataccattcgtcctgattgggagattaaattgaacaaagaaagggcaaggttgatgaggagatccgcgaatgccaccgctatacatataagtaataggttgatcgatccaagccatagcagaaggagaaatacaagtcacagtataacccctattcatgatgaaagtacgagcgcttccagatctcctgaaccgacaataaacgaacttgaagatcaaatggttagagaggctattaggttaagccttgaagatcaggacaacagaaaaaaatccaagaatagaaacacctctttgagaccatga

SEQ ID NO: 8635 - DNA, 309 bp, Saccharomyces cerevisiae
atgtcacgcactgacacaagtgagaagagaaaagaagattttatatatgtgagtttgaatatatacctatgcgtacgtttatatataatgcatttgatttcttcgaacacgccaaaaagtcattgttcagtcagatttctgtgtttcttcctttcagcactagcaattacctcaaatcgaaatttctttagacctgaaaaaatgccaacaagaatattctgtaatgacacattgatggtatcgcccaaaactgaaaaatttctggaacggtttaccaaccaaaaattggctaagctggaggtgaggtag

SEQ ID NO: 8636 - DNA, 309 bp, Artificial Sequence
  Description of Artificial Sequence: Synthetic polynucleotide
atgtctcgcactgacacaagtgagaagagaaaagaagattttatatatgtgagtttgaatatatacttgtgcgtacgtttatatataatgcatttgatttcttccaacacgccaaaaagtcattgttctgtcagatttttatgtttcttcctttctgcattggcaattacctctaatagaaatttctttagacctgaaaaaatgccaacaagaatattctgtaatgacacattgatggtatctcccaaaactgaaaaatttttggaaagatttaccaaccaaaaattggctaagttggaggtgaggtga

SEQ ID NO: 8637 - DNA, 600 bp, Saccharomyces cerevisiae
atggctatctccaagaatttaccaattttgaagaaccacttcagaaagcactggcaagaacgtgtcaaggttcactttgaccaagctggtaaaaaggtttctagacgtaatgctagagctgccagagccgccaagattgctccaagaccattggatttgttgagacctgttgtcagagctccaactgttaagtacaacagaaaggttagagctggtagaggtttcaccttggctgaagttaaggccgctggtttgactgctgcttacgccagaaccattggtattgctgttgaccacagacgtcaaaacagaaaccaagaaatctttgacgctaacgttcaaagattgaaggagtaccaatccaagattatcgttttcccaagagacggtaaggctccagaagctgaacaagttttgtctgctgctgccactttcccaattgctcaaccagctaccgatgttgaagctagagctgttcaagacaatggtgaatctgctttcagaaccttgagattagccagatccgaaaagaaattcagaggtatcagagaaaagagggctagagagaaggctgaagctgaagctgaaaagaagaaataa

SEQ ID NO: 8638 - DNA, 600 bp, Artificial Sequence
  Description of Artificial Sequence: Synthetic polynucleotide
atggctatctccaagaatttaccaattttgaagaaccacttcagaaagcactggcaagaacgtgtcaaggttcactttgaccaagctggtaaaaaggtttctagacgtaatgctagagctgccagagccgccaagattgctccaagaccattggatttgttgagacctgttgtcagagctccaactgttaagtacaacagaaaggttagagctggtagaggtttcaccttggctgaagttaaggccgctggtttgactgctgcttacgccagaaccattggtattgctgttgaccacagacgtcaaaacagaaaccaagaaatctttgacgctaacgttcaaagattgaaggagtaccaatccaagattatcgttttcccaagagacggtaaggctccagaagctgaacaagttttgtctgctgctgccactttcccaattgctcaaccagctaccgatgttgaagctagagctgttcaagacaatggtgaatctgctttcagaaccttgagattagccagatccgaaaagaaattcagaggtatcagagaaaagagggctagagagaaggctgaagctgaagctgaaaagaagaaatga

SEQ ID NO: 8639 - DNA, 432 bp, Saccharomyces cerevisiae
atgtcagctgtcccaagtgttcaaacttttggtaagaagaaatcagctactgctgttgcccatgtcaaggccggtaagggtttgatcaaggttaatggttctccaatcactttggttgaaccagaaatcttaagattcaaggtttacgaaccattattgttagttggtttggacaaattctccaacatcgatattagagttagagttactggtggtggtcatgtttcccaagtttacgccatcagacaagctattgctaaaggtttagttgcttaccatcaaaaatatgtcgatgaacaatccaagaacgaattgaagaaggctttcacttcttacgacagaaccttgttgattgctgattctagaagaccagaaccaaagaaattcggtggtaagggtgctcgttccagattccaaaaatcttaccgttaa

SEQ ID NO: 8640 - DNA, 432 bp, Artificial Sequence
  Description of Artificial Sequence: Synthetic polynucleotide
atgtctgctgtcccaagtgttcaaacttttggtaagaagaaatctgctactgctgttgcccatgtcaaggccggtaagggtttgatcaaggttaatggttctccaatcactttggttgaaccagaaatcttaagattcaaggtttacgaaccattattgttagttggtttggacaaattctccaacatcgatattagagttagagttactggtggtggtcatgtttcccaagtttacgccatcagacaagctattgctaaaggtttagttgcttaccatcaaaaatatgtcgatgaacaatccaagaacgaattgaagaaggctttcacttcttacgacagaaccttgttgattgctgattctagaagaccagaaccaaagaaattcggtggtaagggtgctcgttccagattccaaaaatcttaccgttga

SEQ ID NO: 8641 - DNA, 1029 bp, Saccharomyces cerevisiae
atggaagaaaataaacttagtggaaataaaccgattcaacttgctacctggtcgaaccagatggggtcaccagaaaacaatggaaataatgcaaataatggtagtgatgtacagaatgttattcagaaagctttaggcttgattcgacagttgaacaataatgggctaatgagtccgatggaagaagagcattcgcaaccttcatcttcacaagagacacttagtgtcgatagagagattaatgaacagggccgtttgcgtcttcttatgcaagcaaaagatgataatacgcggaaggaagtaggcacatattctagtccgatggattctgcgtacgccagggaaaatatgttaaacgttttgcaatcattagttacgcatctgaaccaagctgtcagccaaatacaacaattaaaattcaagaacatgattcttacttcaaatgaaaataatattcagtcgaggcatgaagtggaagataatctccagaaacagcaatttgaaaggatgaagtgtcagtttctattggaacgtcaaagtttgaaggatcaattgcgaaagcgagagaataaaattgttaaatataagcagaaaattattgaaaagaacaagaaattaaacaatctagcaaaagtacttaatcaacatgcaatatctgatacctctcaaatagatagtttcagtagctcggtaaagaaaacgccttcgtcgactacaacgccccaagaaatgaagtcggacatgttgaacaccttgggaatattggccacacatgtcttgaaagatgaaattgacgatgattctggaaatcaaacgattctgcaactggctgcagggagtataagcaacgattgtaacactacggagttggaaattacgtgcagtcctgaaatgggaaggactattacacacaatcgaccaaatactaaagatgagtcaattcaggattcacatgggaataggaccctccaattgcccaaaatgaaaagtttcagtaccatagacggaagcattaaggatattaagtga

SEQ ID NO: 8642 - DNA, 1029 bp, Artificial Sequence
  Description of Artificial Sequence: Synthetic polynucleotide
atggaagaaaataaacttagtggaaataaaccgattcaacttgctacctggagcaaccagatggggtctccagaaaacaatggaaataatgcaaataatggtagtgatgtacagaatgttattcagaaagctttaggcttgattagacagttgaacaataatgggttgatgagtccgatggaagaagagcattctcaaccttcttcttctcaagagacacttagtgtcgatagagagattaatgaacagggccgtttgcgtcttcttatgcaagcaaaagatgataatacgagaaaggaagtaggcacatattctagtccgatggattctgcgtacgccagggaaaatatgttaaacgttttgcaatctttagttacgcatttgaaccaagctgtcagccaaatacaacaattaaaattcaagaacatgattcttacttccaatgaaaataatattcagtctaggcatgaagtggaagataatctccagaaacagcaatttgaaaggatgaagtgtcagtttttattggaacgtcaaagtttgaaggatcaattgagaaagagagagaataaaattgttaaatataagcagaaaattattgaaaagaacaagaaattaaacaatttggcaaaagtacttaatcaacatgcaatatctgatacctctcaaatagatagtttcagtagctctgtaaagaaaacgccttcttctactacaacgccccaagaaatgaagagtgacatgttgaacaccttgggaatattggccacacatgtcttgaaagatgaaattgacgatgattctggaaatcaaacgattttacaattggctgcagggagtataagcaacgattgtaacactacggagttggaaattacgtgcagtcctgaaatgggaaggactattacacacaatagaccaaatactaaagatgagtctattcaggattctcatgggaataggaccctccaattgcccaaaatgaaaagtttcagtaccatagacggaagcattaaggatattaagtga

SEQ ID NO: 8643 - DNA, 1683 bp, Saccharomyces cerevisiae
atgattagacaatcattaatgaaaacagtgtgggctaactcctccaggtttagcctacagagcaagtcggggcttgtgaaatatgccaaaaatagatcgttccatgcagcaagaaatttgctagaggacaagaaagtcattttgcaaaaagtggcgcccactactggcgttgttgcgaagcagtcctttttcaagagaactgggaaatttactttgaaggctttattgtattctgccctcgcgggtacggcttacgtttcatactcactttaccgagaagctaacccttctacccaagttcctcaatcggacacttttccaaacggttcaaagaggaagactttggtaattctgggctccggttggggttctgtgtcgcttttgaaaaatttggacaccacgttgtataatgttgttgttgtttctccaagaaattattttctttttactccgctattgccatctaccccagttggtaccatcgaattgaaatctattgttgaacctgtcaggactattgctagaagatcgcacggtgaagtccattactatgaagctgaagcgtacgacgttgatcctgaaaacaaaacaattaaggtcaaatcttccgctaagaataacgactacgacttggacttgaaatacgactatctggttgtcggtgtgggtgctcaaccaaacacttttggtactccgggagtttatgaatattcttctttcttgaaggaaatatccgacgctcaagagatcagattaaaaattatgtccagtattgagaaagctgcctccctatctccaaaagatcctgagagagcaagattgttgagctttgttgtcgttggtggtggtcccaccggtgtcgaatttgccgctgaattgagagattatgttgaccaggacttgagaaaatggatgcccgaattgagtaaagaaattaaagtcactttggtggaggctttgccaaacattttgaacatgtttgacaagtatctcgttgactatgctcaagatttattcaaagaggaaaaaatcgatttaagattgaaaacaatggttaagaaagttgacgctaccactataactgccaaaactggcgatggtgacattgaaaatataccgtatggtgtattagtttgggctacaggtaatgcgccaagagaagtgtctaagaacctaatgactaaattagaggaacaggactcaagacgtggtttgttgatagataacaaacttcaacttttgggtgctaagggatctatttttgctatcggcgattgtaccttccaccctggcttgttccctaccgctcaagttgcccaccaagaaggtgaatacttggctcagtatttcaagaaagcttataaaatcgatcaattgaactggaaaatgacccatgctaaagacgattcagaagtcgctagattaaagaaccaaatagtcaaaacgcaatcgcaaattgaagacttcaagtacaaccataagggtgctctggcttatattggttcagataaagccattgctgatcttgccgttggtgaagccaaatataggttagccggctcattcaccttcctattctggaaatctgcttatttggcaatgtgtctatcctttagaaacagagttcttgtcgctatggattgggctaaagtttatttcttgggtagagattcatctatctag

SEQ ID NO: 8644 - DNA, 1683 bp, Artificial Sequence
  Description of Artificial Sequence: Synthetic polynucleotide
atgattagacaatctttaatgaaaacagtgtgggctaactcctccaggtttagcttacagagcaagagtgggcttgtgaaatatgccaaaaatagatctttccatgcagcaagaaatttgttggaggacaagaaagtcattttgcaaaaagtggcgcccactactggcgttgttgcgaagcagtcctttttcaagagaactgggaaatttactttgaaggctttattgtattctgccctcgcgggtacggcttacgtttcttactctctttacagagaagctaacccttctacccaagttcctcaatctgacacttttccaaacggttccaagaggaagactttggtaattttgggctccggttggggttctgtgtctcttttgaaaaatttggacaccacgttgtataatgttgttgttgtttctccaagaaattattttctttttactccgttattgccatctaccccagttggtaccatcgaattgaaatctattgttgaacctgtcaggactattgctagaagaagtcacggtgaagtccattactatgaagctgaagcgtacgacgttgatcctgaaaacaaaacaattaaggtcaaatcttccgctaagaataacgactacgacttggacttgaaatacgactatttggttgtcggtgtgggtgctcaaccaaacacttttggtactccgggagtttatgaatattcttctttcttgaaggaaatatccgacgctcaagagatcagattaaaaattatgtccagtattgagaaagctgcctccttatctccaaaagatcctgagagagcaagattgttgagctttgttgtcgttggtggtggtcccaccggtgtcgaatttgccgctgaattgagagattatgttgaccaggacttgagaaaatggatgcccgaattgagtaaagaaattaaagtcactttggtggaggctttgccaaacattttgaacatgtttgacaagtatctcgttgactatgctcaagatttattcaaagaggaaaaaatcgatttaagattgaaaacaatggttaagaaagttgacgctaccactataactgccaaaactggcgatggtgacattgaaaatataccgtatggtgtattagtttgggctacaggtaatgcgccaagagaagtgtctaagaacttgatgactaaattagaggaacaggacagtagacgtggtttgttgatagataacaaacttcaacttttgggtgctaagggatctatttttgctatcggcgattgtaccttccaccctggcttgttccctaccgctcaagttgcccaccaagaaggtgaatacttggctcagtatttcaagaaagcttataaaatcgatcaattgaactggaaaatgacccatgctaaagacgattctgaagtcgctagattaaagaaccaaatagtcaaaacgcaatctcaaattgaagacttcaagtacaaccataagggtgctttggcttatattggttctgataaagccattgctgatcttgccgttggtgaagccaaatataggttagccggcagtttcaccttccttttctggaaatctgcttatttggcaatgtgtttatcctttagaaacagagttcttgtcgctatggattgggctaaagtttatttcttgggtagagattcttctatctga

SEQ ID NO: 8645 - DNA, 1044 bp, Saccharomyces cerevisiae
atgaaggctatcaaattaacaggtcatgaacgtccattaactcaagtgaagtacaacaaagaaggtgatttactattttcatgttcgaaagatagctcggccagtgtttggtattcgttgaacggtgaaagattaggtactttggatggtcacaccggtaccatttggtctatcgacgtcgactgtttcaccaagtactgtgttacaggaagtgctgattacagtatcaaattatgggatgtgtcaaacgggcaatgtgttgctacatggaaatcgcctgtccccgttaaaagagttgaattttccccatgcggtaactactttctagctatcttggacaacgtcatgaaaaatccaggttccattaacatatacgaaattgaaagagattccgccactcacgaattaacaaaggtctccgaagagccaatccataaaattatcactcatgaaggtttagacgctgccaccgtggctggatggtcgactaagggcaaatacatcattgcaggccataaagacggtaagatcagcaaatacgatgtgtccaacaactacgaatacgtggattccatcgatttgcacgaaaagtccatcagtgacatgcaattttctcctgatttaacatactttattacatcatccagagatactaactcgttcttggtcgatgtatcgactctacaagttcttaagaaatacgaaacagactgtcctctaaacaccgccgtaatcaccccattgaaggaattcattattcttggtggtggtcaagaggccaaggatgtcaccaccaccagtgccaacgaaggtaagtttgaagctaggttctaccacaagatcttcgaagaagaaatcggcagagtacaaggccattttggtcccttgaacacagttgccattagcccacagggcacaagttatgcctccggtggtgaagatgggttcatacgtctacaccatttcgaaaaatcttactttgatttcaaatacgacgtggagaaggccgccgaagctaaagagcacatgcaagaagctaattaa

SEQ ID NO: 8646 - DNA, 1044 bp, Artificial Sequence
  Description of Artificial Sequence: Synthetic polynucleotide
atgaaggctatcaaattaacaggtcatgaacgtccattaactcaagtgaagtacaacaaagaaggtgatttacttttttcttgttctaaagatagcagtgccagtgtttggtattctttgaacggtgaaagattaggtactttggatggtcacaccggtaccatttggtctatcgacgtcgactgtttcaccaagtactgtgttacaggaagtgctgattacagtatcaaattatgggatgtgtctaacgggcaatgtgttgctacatggaaatctcctgtccccgttaaaagagttgaattttccccatgcggtaactactttttggctatcttggacaacgtcatgaaaaatccaggttccattaacatatacgaaattgaaagagattccgccactcacgaattaacaaaggtctccgaagagccaatccataaaattatcactcatgaaggtttagacgctgccaccgtggctggatggtctactaagggcaaatacatcattgcaggccataaagacggtaagatcagcaaatacgatgtgtccaacaactacgaatacgtggattccatcgatttgcacgaaaagtccatcagtgacatgcaattttctcctgatttaacatactttattacatcttccagagatactaactctttcttggtcgatgtatccactttacaagttcttaagaaatacgaaacagactgtcctttgaacaccgccgtaatcaccccattgaaggaattcattattcttggtggtggtcaagaggccaaggatgtcaccaccaccagtgccaacgaaggtaagtttgaagctaggttctaccacaagatcttcgaagaagaaatcggcagagtacaaggccattttggtcccttgaacacagttgccattagcccacagggcacaagttatgcctccggtggtgaagatgggttcatacgtttgcaccatttcgaaaaatcttactttgatttcaaatacgacgtggagaaggccgccgaagctaaagagcacatgcaagaagctaattga

SEQ ID NO: 8647 - DNA, 1239 bp, Saccharomyces cerevisiae
atggcagccaggaatcgtagaaagaataacaagaaaaagtcccttttggtaacgagtgccgctcaagaaaagaatgcgacgtatgtgctcgttgcagaggaattacataaaaaaacaatcgatctaaacatgggtactgaaacacctttaacggaaaaccacgagaatcctataccagcgaaagaattcaagcaccagcaaaaattagagccaatagacgaacatgatgatggcgaagacgaattatcgataaaatttaagtccatgacaaaaagctcggggcctattactgaggctgaagttcaaaagctgctcctaagctatgccttcacaagtgctgcaatacaggaggacgaaaacgagaaagaatcgcgtcactatcctattaaaccgccttcgccatcagcttcttctttgtccgcctattttcaatccttcgttgaaaaatgcaaacaggttttctacaacttcagtctgcaaacagtagaaaaattaaatgctctacaaaatagcttgtacgaagtattttggattatttttatttatttaaactactggttccccaatgtgggtgactatgtgagcaatacttttggacaacaagatagcattattattaggatttccctatcaaagagtcatttccgtgcacttcgtgaaaaatccagtcagaaagttcagcaagcagtcaagaatatctacttttgtttccaagaaaagccttacctgacagcgttcaaagtctcctttgccattggacttgttattccgtgttccctactttttttgataatggtttctaccgctacatttttcttttttgtttacttaacccttttcgtagtgataggtttcttctcctcattattcataatacccttattgggcatttcctttgtgtttgccattggcgtggtatcatttggcttctgcagcaacatgagtttcaaaatggcccaactcatttatgtccgagctgacgccttcttgaaaaaagtcctcgacaaaatggccctacaaacacagccggcacaactacaggaaccacaggagccactttccacattaaggccagtatctaatccaactattccaagcccattaagacaaacggcgcgcccttctaaattcgtcaccgaagaagatgttattttcgaacctgttagtgctcaaagcgccattgcccgttcattagagactactgctaataaagcgggtaataagttccagctctcttaa

SEQ ID NO: 8648 - DNA, 1239 bp, Artificial Sequence
  Description of Artificial Sequence: Synthetic polynucleotide
atggcagccaggaatcgtagaaagaataacaagaaaaagtcccttttggtaacgagtgccgctcaagaaaagaatgcgacgtatgtgctcgttgcagaggaattacataaaaaaacaatcgatttgaacatgggtactgaaacacctttaacggaaaaccacgagaatcctataccagcgaaagaattcaagcaccagcaaaaattagagccaatagacgaacatgatgatggcgaagacgaattatctataaaatttaagtccatgacaaaaagcagtgggcctattactgaggctgaagttcaaaagttactcttgagctatgccttcacaagtgctgcaatacaggaggacgaaaacgagaaagaatcccgtcactatcctattaaaccgccttctccatctgcttcttctttgtccgcctattttcaatccttcgttgaaaaatgcaaacaggttttctacaacttcagtttacaaacagtagaaaaattaaatgctttacaaaatagcttgtacgaagtattttggattatttttatttatttaaactactggttccccaatgtgggtgactatgtgagcaatacttttggacaacaagatagcattattattaggatttccttatccaagagtcatttccgtgcacttcgtgaaaaatccagtcagaaagttcagcaagcagtcaagaatatctacttttgtttccaagaaaagccttacttgacagcgttcaaagtctcctttgccattggacttgttattccgtgttccttactttttttgataatggtttctaccgctacatttttcttttttgtttacttaacccttttcgtagtgataggtttcttctcctctttattcataatacccttattgggcatttcctttgtgtttgccattggcgtggtatcctttggcttctgcagcaacatgagtttcaaaatggcccaactcatttatgtcagagctgacgccttcttgaaaaaagtcctcgacaaaatggccttgcaaacacagccggcacaattgcaggaaccacaggagccactttccacattaaggccagtatctaatccaactattccaagcccattaagacaaacggcgcgcccttctaaattcgtcaccgaagaagatgttattttcgaacctgttagtgctcaaagcgccattgcccgttccttagagactactgctaataaagcgggtaataagttccagctctcttga

SEQ ID NO: 8649 - DNA, 447 bp, Saccharomyces cerevisiae
atggtttctaccgctacatttttcttttttgtttacttaacccttttcgtagtgataggtttcttctcctcattattcataatacccttattgggcatttcctttgtgtttgccattggcgtggtatcatttggcttctgcagcaacatgagtttcaaaatggcccaactcatttatgtccgagctgacgccttcttgaaaaaagtcctcgacaaaatggccctacaaacacagccggcacaactacaggaaccacaggagccactttccacattaaggccagtatctaatccaactattccaagcccattaagacaaacggcgcgcccttctaaattcgtcaccgaagaagatgttattttcgaacctgttagtgctcaaagcgccattgcccgttcattagagactactgctaataaagcgggtaataagttccagctctcttaa

SEQ ID NO: 8650 - DNA, 447 bp, Artificial Sequence
  Description of Artificial Sequence: Synthetic polynucleotide
atggtttctaccgctacatttttcttttttgtttacttaacccttttcgtagtgataggtttcttctcctctttattcataatacccttattgggcatttcctttgtgtttgccattggcgtggtatcctttggcttctgcagcaacatgagtttcaaaatggcccaactcatttatgtcagagctgacgccttcttgaaaaaagtcctcgacaaaatggccttgcaaacacagccggcacaattgcaggaaccacaggagccactttccacattaaggccagtatctaatccaactattccaagcccattaagacaaacggcgcgcccttctaaattcgtcaccgaagaagatgttattttcgaacctgttagtgctcaaagcgccattgcccgttccttagagactactgctaataaagcgggtaataagttccagctctcttga

SEQ ID NO: 8651 - DNA, 861 bp, Saccharomyces cerevisiae
atgcaattcttcaaaacacttgcggccttggtgtcgtgcatatcgttcgtcctcgcttacgtggcacaagatgttcatgtatcattcccctccaccgcaggaaagtctagggtaatgatcggtaaagttgaacccagaataggaatcgatgaaactgttccgactacaatcacagttgaagaccctaacgaggtgattcaagtaaatttcgccattgagtctaccaacaaacccttccagaacaccttattgataggcttacctaataagaacctagaaatggcttttgaacccgaaattaaggacaatggcaagttgtccatgtataaatacaggatagatttagccaagctggatgctgctttgttgcaagaggcttccagatcaccggaaccaataaaggccactttgattctagcgtcatctaccgccaaaccaaaggaaaacttgttcagggaaattctgcaactcaacctgaacttcgatgtagatcactcagattcatctttagttgacaaattcggcattaagccagaaatccatcatatatttcatgccgagccaaagagagttgccaaaccaattgctgtgatttttgttttaattatcttcattaccattttatctttaatagtcacctggttgaattcttgtgccgccgcattcaataacatcccgaccggtgtcactgctgtatatttcctaggattcatcgccacgattgttgggtttgaagttatcttcgctaggtactacttgggtacaagtatttttgaaactctattttcctctttgtacttgggcgctccaggcttactgacatctaccaagttcctgagatcttttggtcaaacaatctag

SEQ ID NO: 8652 - DNA, 861 bp, Artificial Sequence
  Description of Artificial Sequence: Synthetic polynucleotide
atgcaattcttcaaaacacttgcggccttggtgtcttgcatatctttcgtcctcgcttacgtggcacaagatgttcatgtatctttcccctccaccgcaggaaagtctagggtaatgatcggtaaagttgaacccagaataggaatcgatgaaactgttccgactacaatcacagttgaagaccctaacgaggtgattcaagtaaatttcgccattgagtctaccaacaaacccttccagaacaccttattgataggcttacctaataagaacttggaaatggcttttgaacccgaaattaaggacaatggcaagttgtccatgtataaatacaggatagatttagccaagttggatgctgctttgttgcaagaggcttccagatctccggaaccaataaaggccactttgattttggcgtcttctaccgccaaaccaaaggaaaacttgttcagggaaattttacaactcaacttgaacttcgatgtagatcacagtgattcttctttagttgacaaattcggcattaagccagaaatccatcatatatttcatgccgagccaaagagagttgccaaaccaattgctgtgatttttgttttaattatcttcattaccattttatctttaatagtcacctggttgaattcttgtgccgccgcattcaataacatcccgaccggtgtcactgctgtatatttcttgggattcatcgccacgattgttgggtttgaagttatcttcgctaggtactacttgggtacaagtatttttgaaactttattttcctctttgtacttgggcgctccaggcttattaacatctaccaagttcttaagatcttttggtcaaacaatctga

SEQ ID NO: 8653 - DNA, 573 bp, Saccharomyces cerevisiae
atgacggttggtacacttcccatctggtcaaaaaccttttcttatgcaattaggtcattatgcttcttgcatataatacatatgtatgcatacgaatttactgagacgaggggagaatcaatgttgccaacactgtcagcgaccaatgattatgtgcatgtcttgaaaaatttccaaaatggtagaggcataaaaatgggtgactgcatagtagcactgaaacctactgaccctaatcataggatttgcaaaagggttacgggtatgcctggtgatctcgtgctcgtggatcccagtacgatagttaattatgtcggcgatgtgcttgttgatgaggagaggtttggtacctatattaaagtccctgaaggtcatgtttgggtaaccggagataatttgtcacattcattagattcaagaacatacaatgcattacccatggggctgatcatgggcaagattgtagctgctaacaattttgacaagcccttctgggacggttcgatacgcaatatttggggtttcaaatggatcaataatacatttctagatgtgcaggctaagagcaactga

SEQ ID NO: 8654 - DNA, 573 bp, Artificial Sequence
  Description of Artificial Sequence: Synthetic polynucleotide
atgacggttggtacacttcccatctggtccaaaaccttttcttatgcaattaggtctttatgcttcttgcatataatacatatgtatgcatacgaatttactgagacgaggggagaaagtatgttgccaacattatctgcgaccaatgattatgtgcatgtcttgaaaaatttccaaaatggtagaggcataaaaatgggtgactgcatagtagcattgaaacctactgaccctaatcataggatttgcaaaagggttacgggtatgcctggtgatctcgtgctcgtggatcccagtacgatagttaattatgtcggcgatgtgcttgttgatgaggagaggtttggtacctatattaaagtccctgaaggtcatgtttgggtaaccggagataatttgtctcattctttagattccagaacatacaatgcattacccatggggttgatcatgggcaagattgtagctgctaacaattttgacaagcccttctgggacggttccatacgcaatatttggggtttcaaatggatcaataatacatttttggatgtgcaggctaagagcaactga

SEQ ID NO: 8655 - DNA, 1098 bp, Saccharomyces cerevisiae
atgtcagacgagattgtaaccaacaaatctgttacttatgttaacaatactactccagtcacaattacatcatcggagctggacttgagatcatgttatcaagatgacgaagttgttatagaagtccatgctgctgctttgaatccaattgattttattactcaccagctttgtaactcctacatatttggcaagtatccaaagacttattctagagattacagtggtgtcatcattaaagcgggaaaggatgtcgacaatcgctggaaggttggcgacaaagtgaatggtatgtacagtcatatttatggtgaacgtggtactttaacacactacttgatactcaaccctgccaaagatgtacccatcacacatatggtggaggttccaaaggacgaaaatgacccatatgacgactttgtatatgctgctgcctggcccctaacatttggtacagccttttctacattatacgatttcaagaaagattggacttctgattcgaaagttctggttattggcgcttcaacctctgtgtcatatgcttttgtccatattgcaaaaaactacttcaacatcggcactgttgttggcatttgtagcaagaattccattgaacgcaataagaaattaggatatgactacttggttccctatgacgaaggatccatcgttgagaatgttaagaaattaaagcaaagcgtgttggaaaacgacaaatttgacatgatttttgattcagtgggtaaccatgatttcttccctgtcattgatcaatttctaaaacctaaggcgaaaaattccttttacgttacaattgcaggaaataacaaggccgattataagaatatcagttggagagatttcgtatcattgagttctattttaaaggctataaacccattcaaaaaatacaactggcgctttggacacccttatccccccaacaacttcattgaagttggcaacgaaatgatcaagaagggcacttataagccacctattgattccgtctacgagtttgatcaatataaagaagctattgacagactgatgtccaacagagctaagggtaaagtggttgttaagatgaaatga

SEQ ID NO: 8656 - DNA, 1098 bp, Artificial Sequence
  Description of Artificial Sequence: Synthetic polynucleotide
atgtctgacgagattgtaaccaacaaatctgttacttatgttaacaatactactccagtcacaattacatcttctgagttggacttgagatcttgttatcaagatgacgaagttgttatagaagtccatgctgctgctttgaatccaattgattttattactcaccagctttgtaactcctacatatttggcaagtatccaaagacttattctagagattacagtggtgtcatcattaaagcgggaaaggatgtcgacaatcgctggaaggttggcgacaaagtgaatggtatgtacagtcatatttatggtgaacgtggtactttaacacactacttgatactcaaccctgccaaagatgtacccatcacacatatggtggaggttccaaaggacgaaaatgacccatatgacgactttgtatatgctgctgcctggcccttgacatttggtacagccttttctacattatacgatttcaagaaagattggacttctgattctaaagttttggttattggcgctagcacctctgtgtcttatgcttttgtccatattgcaaaaaactacttcaacatcggcactgttgttggcatttgtagcaagaattccattgaacgcaataagaaattaggatatgactacttggttccctatgacgaaggatccatcgttgagaatgttaagaaattaaagcaaagcgtgttggaaaacgacaaatttgacatgatttttgattctgtgggtaaccatgatttcttccctgtcattgatcaatttttgaaacctaaggcgaaaaattccttttacgttacaattgcaggaaataacaaggccgattataagaatatcagttggagagatttcgtatctttgagttctattttaaaggctataaacccattcaaaaaatacaactggcgctttggacacccttatccccccaacaacttcattgaagttggcaacgaaatgatcaagaagggcacttataagccacctattgattccgtctacgagtttgatcaatataaagaagctattgacagattaatgtccaacagagctaagggtaaagtggttgttaagatgaaatga

SEQ ID NO: 8657 - DNA, 1428 bp, Saccharomyces cerevisiae
atggcagaccttcaaaaacaagagaatagtagcaggttcaccaatgtttctgttatcgcgcccgaatcacagggacaacatgaacaacaaaaacagcaggagcagctggagcagcaaaagcagccaacgggactgttaaaaggtttaaacgggtttccgagtgcaccacaaccgctgttcatggaagatccgccttctactgtctcgggagaactgaatgataatccagcgtggttcaataatccaaggaaaagagccattccaaattcaataataaagagatcaaatggccaatctttaagccccgtacgttctgatagtgcagatgtacctgcgttttccaattccaatggattcaacaatgtcacttttggctctaaaaaagatccacgcatccttaaaaacgtatctccaaatgataataacagtgccaacaacaatgctcatagttcagatttaggtacggtagtttttgattctaatgaggcaccgcccaagacctccttggcagattggcaaaaagaagatggtatattttcaagtaagactgacaatattgaagatcctaatttgtcttccaacataacctttgatggaaagcctacagccacaccttcgcctttccgtccactagaaaagacctccagaatacttaatttcttcgacaaaaacacgaaaacaacgccgaatactgcgtcaagtgaagctagtgcagggagtaaggaaggggcctcgacgaattgggatgatcatgccattattatctttggatatccagaaacgattgcgaattctattatactccattttgctaatttcggtgaaattttagaggattttagagtgataaaagattttaaaaagttgaattcgaaaaacatgtcaaaaagtccgtcattgactgctcaaaaatatcccatatatacaggagatggatgggtcaagttgacttacaaatccgaactttccaaatctcgtgctttacaagaaaatgggattataatgaatggaacattaattggctgtgtttcgtatagtccggctgctctcaaacaattagcttccttgaagaaatcggaggaaattataaacaataaaacaagttcacaaactagtttaagctcaaaagacctcagcaattatagaaaaacagaaggaatttttgagaaagctaaggcaaaagcagttacttcaaaagtgcgcaatgcagaattcaaggtttccaagaattctacttccttcaaaaatccacgcaggcttgaaataaaggatggtcgttcattatttttgagaaacagagggaagatccacagtggtgtcctgagctcgatcgagtctgacttgaagaaaagggaacaagcgagcaagagtaagaaaagttggttaaatagattgaataattggttatttggatggaatgatttgtaa

SEQ ID NO: 8658 - DNA, 1428 bp, Artificial Sequence
  Description of Artificial Sequence: Synthetic polynucleotide
atggcagaccttcaaaaacaagagaatagtagcaggttcaccaatgtttctgttatcgcgcccgaatctcagggacaacatgaacaacaaaaacagcaggagcagttggagcagcaaaagcagccaacgggattattaaaaggtttaaacgggtttccgagtgcaccacaaccgcttttcatggaagatccgccttctactgtcagtggagaattgaatgataatccagcgtggttcaataatccaaggaaaagagccattccaaattctataataaagagatctaatggccaatctttaagccccgtacgttctgatagtgcagatgtacctgcgttttccaattccaatggattcaacaatgtcacttttggctctaaaaaagatccacgcatccttaaaaacgtatctccaaatgataataacagtgccaacaacaatgctcatagttctgatttaggtacggtagtttttgattctaatgaggcaccgcccaagacctccttggcagattggcaaaaagaagatggtatattttctagtaagactgacaatattgaagatcctaatttgtcttccaacataacctttgatggaaagcctacagccacaccttctcctttccgtccattggaaaagacctccagaatacttaatttcttcgacaaaaacacgaaaacaacgccgaatactgcgtccagtgaagctagtgcagggagtaaggaaggggcctctacgaattgggatgatcatgccattattatctttggatatccagaaacgattgcgaattctattatactccattttgctaatttcggtgaaattttagaggattttagagtgataaaagattttaaaaagttgaattctaaaaacatgtccaaaagtccgtctttgactgctcaaaaatatcccatatatacaggagatggatgggtcaagttgacttacaaatccgaactttccaaatctcgtgctttacaagaaaatgggattataatgaatggaacattaattggctgtgtttcttatagtccggctgctctcaaacaattagcttccttgaagaaaagtgaggaaattataaacaataaaacaagttctcaaactagtttaagcagtaaagacctcagcaattatagaaaaacagaaggaatttttgagaaagctaaggcaaaagcagttacttctaaagtgcgcaatgcagaattcaaggtttccaagaattctacttccttcaaaaatccacgcaggcttgaaataaaggatggtcgttccttatttttgagaaacagagggaagatccacagtggtgtcttgagctctatcgagtctgacttgaagaaaagggaacaagcgagcaagagtaagaaaagttggttaaatagattgaataattggttatttggatggaatgatttgtga

SEQ ID NO: 8659 - DNA, 2184 bp, Saccharomyces cerevisiae
atgaatgattggcatgagttcaatgccgcgataaagtcaatatattgtaatgcagaaggtgactcaagcagtataattaatagattggttggcttggcaatgaaaagcgaagattccacttttattgaggccgttttagttttgaaagaaaatgtgtcgaaagtagataaacaattaagatttttatggcttacttcaactattaattcaaggttttatccccctatacctatctcagaagcctcaccggtttcttggaataaaaccgaatattgcgcacctggtactgaagaactacaaaggcgttatccagggagagccaagttacagaatgaagaagactattcaggcggaatagaacaatgccgagatgtgccagattgctcattagttgcttctctaattaatcttaggtctaagaacttgaatctccctctaattaaacaaatatcatcaactaaatatcacgtcaatttaagttttaacggaagcaacaaaaggctagtgacagtagatatttcgcagatcccaacctcagtggatggcaaacaactttctttaaagagtaacgatatttcggacaaaattggagagcttgcattactgcttgtttctaaaggaacatattccacggatggctcaaatattagtatagatacttaccgcttaagtggcttcttaccagagataacacaagtaaacagctatcctttcgaaaaattatggaagtttcacaaatctaatttatgtctgatgggcgctggcaccgggaatcgttccaatgacatgataaagcccctagttgagaaccatgattactctataattgatatcacatatgattctaggctagtaaaattgcgagatccgaggaactcggcactaaatgttgaaatcagctatgaacagtatttaaaaaatttcaaacaactttatcttaattggaaccaagaaaaattattcaaacgttctcaggtacttcattttcggtacgatacttcacgctacaataaattttctatcgttgcagataaacctttatttcacctggtaaacaattctaaagtgacagagacggtatggttattgctagaatcccatttgcaagatgaaggcagccaagaaaatcggtcagtttcctttttgaatgaggctcccgaatgcataatttgtccaattgaacctccagtagaatgcggtggcaatcacattggacttcagctggtaaagttgagattagatgctgagactgagaggttattgtattgttattcaacaacaaacaacaatttcagtattcactctttctcagttgtgaaggaaatatgttttcaaagattgaaagatacaaaaagtctttttgccaaagtccttttctcttttccttatgaaatagagggaaaagcctcatttgatacttgtaatttttttcaaaatccgacttttgagttggaagttcactctgaacaagattatcaagtacttatggacgccgcatgtatctcaactagctcacatgatttaattaacatccaagtatattactttaatgactatgaattgataaagccaataatgtttgataaccactatcagcccgggcagggccttaaacaagacgtgcccatcttaactaatgtcaaatatatgattgtatgctcaacttacggccctccagcctcaacggaatttgaattacttgcctcgatacggttatcctcttcatggaggttaatatctggaataactttacggagtgttaacttgatatacggtacttatccatatcattgtcgcaacaggttccattggaaggaaacttcagacaaacttaaaattcagatgactttgccaaccaaaaagtattctacgaacaaactttttatacgtgtagtacccgtggaatcatcagcacgattaaggatgcgatgtaatattttcgagcctgaatcagctctctgtgtttatgaatgtcaagagtataggacatgtccatctgggggcatcgttatacctgatctggaagtctctcgtactaacattgttgtattgatgatagaaagaagtgtacctatttccagttgtttacctacggaaggacaattggatgaattggagttgtttgttgggtccagtcaaaaaatcagaattgaaaaatactccgatgatgtgataccaaaataa

SEQ ID NO: 8660 - DNA, 2184 bp, Artificial Sequence
  Description of Artificial Sequence: Synthetic polynucleotide
atgaatgattggcatgagttcaatgccgcgataaagagtatatattgtaatgcagaaggtgactccagcagtataattaatagattggttggcttggcaatgaaaagcgaagattccacttttattgaggccgttttagttttgaaagaaaatgtgtctaaagtagataaacaattaagatttttatggcttacttctactattaattctaggttttatccccctatacctatcagtgaagcctctccggtttcttggaataaaaccgaatattgcgcacctggtactgaagaattacaaaggcgttatccagggagagccaagttacagaatgaagaagactattctggcggaatagaacaatgcagagatgtgccagattgctctttagttgcttctttgattaatcttaggtctaagaacttgaatctccctttgattaaacaaatatcttctactaaatatcacgtcaatttaagttttaacggaagcaacaaaaggttggtgacagtagatatttctcagatcccaacctctgtggatggcaaacaactttctttaaagagtaacgatatttctgacaaaattggagagcttgcattattacttgtttctaaaggaacatattccacggatggcagtaatattagtatagatacttaccgcttaagtggcttcttaccagagataacacaagtaaacagctatcctttcgaaaaattatggaagtttcacaaatctaatttatgtttgatgggcgctggcaccgggaatcgttccaatgacatgataaagcccttagttgagaaccatgattactctataattgatatcacatatgattctaggttagtaaaattgagagatccgaggaactctgcattgaatgttgaaatcagctatgaacagtatttaaaaaatttcaaacaactttatcttaattggaaccaagaaaaattattcaaacgttctcaggtacttcattttagatacgatactagccgctacaataaattttctatcgttgcagataaacctttatttcacttggtaaacaattctaaagtgacagagacggtatggttattgttggaatcccatttgcaagatgaaggcagccaagaaaatagatctgtttcctttttgaatgaggctcccgaatgcataatttgtccaattgaacctccagtagaatgcggtggcaatcacattggacttcagttggtaaagttgagattagatgctgagactgagaggttattgtattgttattctacaacaaacaacaatttcagtattcactctttctctgttgtgaaggaaatatgttttcaaagattgaaagatacaaaaagtctttttgccaaagtccttttctcttttccttatgaaatagagggaaaagcctcttttgatacttgtaatttttttcaaaatccgacttttgagttggaagttcactctgaacaagattatcaagtacttatggacgccgcatgtatctctactagctctcatgatttaattaacatccaagtatattactttaatgactatgaattgataaagccaataatgtttgataaccactatcagcccgggcagggccttaaacaagacgtgcccatcttaactaatgtcaaatatatgattgtatgctctacttacggccctccagcctctacggaatttgaattacttgcctctataagattatcctcttcttggaggttaatatctggaataactttaagaagtgttaacttgatatacggtacttatccatatcattgtcgcaacaggttccattggaaggaaacttctgacaaacttaaaattcagatgactttgccaaccaaaaagtattctacgaacaaactttttatacgtgtagtacccgtggaatcttctgcaagattaaggatgagatgtaatattttcgagcctgaatctgctctctgtgtttatgaatgtcaagagtataggacatgtccatctgggggcatcgttatacctgatttggaagtctctcgtactaacattgttgtattgatgatagaaagaagtgtacctatttccagttgtttacctacggaaggacaattggatgaattggagttgtttgttgggtccagtcaaaaaatcagaattgaaaaatactccgatgatgtgataccaaaatga

SEQ ID NO: 8661 - DNA, 1644 bp, Saccharomyces cerevisiae
atggtaaagaaacaccaaaatagtaaaatgggtaatacaaatcactttggacatctcaaaagttttgtgggaggtaacgtggttgcccttggtgctggaacaccttatcttttctcattttatgctcctcagctactgagcaagtgccacatacctgtttctgcctcaagtaagctatccttctctttaacaataggaagctcactgatgggaattttagcaggaatagttgtcgatcgaagtcctaaactgtcctgtctaattggttcaatgtgtgttttcatcgcgtatttgattttgaatttatgctataagcacgaatggtctagtacttttctcatatcgttaagtttggtactcattggatatggttctgtctcaggtttttacgcttctgtgaaatgtgcaaatacaaattttcctcaacacaggggtacagctggggcatttcctgtgtccctatacggtttatcgggcatggtgttctcatatctttgctcaaagctttttggtgagaacatcgagcatgtcttcattttcttgatggttgcgtgtggttgcatgattttagtaggctatttctcattagatatattctctaatgcagaaggagatgatgctagcattaaggaatgggagcttcaaaaaagcagggaaacagacgataatatagtaccgttatatgagaacagtaatgactatataggttcacctgtgcgttcatcatcccctgctacctatgaaacttatgcattgtcagacaattttcaggaaacgtcagaattttttgcacttgaggatagacagttatcaaatcgaccattgttatcaccttcttccccacacacaaagtatgatttcgaggatgagaataccagcaaaaatacagtgggcgagaatagcgcacagaaaagtatgagattacatgtattccaaagcttaaaatcttcaacatttattggttactacatagtattgggtatactacaaggcgtgggtttaatgtacatatattctgtggggtttatggtacaagcccaggtttctactccacccttaaatcaattaccaattaatgcagaaaaaattcaatcattacaagtaactctcctgtctcttctttcattttgcggcagattatcatctgggcctatatcagattttttggtcaagaaattcaaagctcaaagactatggaatattgtcatagcatcgcttttggtatttcttgcatcgaataaaatatcccatgacttcagcagcattgaagatccttctttaagagcctccaaatcattcaagaatatttcggtatgctcagcgatcttcggttattcttttggcgttctatttggtactttcccctccatagtagcagatagatttggcacaaatgggtatagtacgctgtggggtgttttaacgactggtggtgtattttcagtgagtgtttttaccgatatattaggtagagatttcaaggcaaatacaggagatgatgatgggaactgtaaaaagggagtgctttgctacagctatacttttatggttacgaaatattgtgccgcttttaatcttttgttcgttttggggataattggatatacgtactatcgaagaagagcaactgcaaattccctgtag

SEQ ID NO: 8662 - DNA, 1644 bp, Artificial Sequence
  Description of Artificial Sequence: Synthetic polynucleotide
atggtaaagaaacaccaaaatagtaaaatgggtaatacaaatcactttggacatctcaaaagttttgtgggaggtaacgtggttgcccttggtgctggaacaccttatcttttctccttttatgctcctcagttattaagcaagtgccacatacctgtttctgcctccagtaagttatccttctctttaacaataggaagcagtttaatgggaattttagcaggaatagttgtcgatagaagtcctaaactttcctgtttaattggttctatgtgtgttttcatcgcgtatttgattttgaatttatgctataagcacgaatggtctagtacttttctcatatctttaagtttggtactcattggatatggttctgtctctggtttttacgcttctgtgaaatgtgcaaatacaaattttcctcaacacaggggtacagctggggcatttcctgtgtccttgtacggtttaagtggcatggtgttctcttatctttgctctaagctttttggtgagaacatcgagcatgtcttcattttcttgatggttgcgtgtggttgcatgattttagtaggctatttctctttagatatattctctaatgcagaaggagatgatgctagcattaaggaatgggagcttcaaaaaagcagggaaacagacgataatatagtaccgttatatgagaacagtaatgactatataggttctcctgtgcgttcttcttcccctgctacctatgaaacttatgcattgagtgacaattttcaggaaacgagtgaattttttgcacttgaggatagacagttatccaatagaccattgttatctccttcttccccacacacaaagtatgatttcgaggatgagaataccagcaaaaatacagtgggcgagaatagcgcacagaaaagtatgagattacatgtattccaaagcttaaaatcttctacatttattggttactacatagtattgggtatattgcaaggcgtgggtttaatgtacatatattctgtggggtttatggtacaagcccaggtttctactccacccttaaatcaattaccaattaatgcagaaaaaattcaatctttacaagtaactctcttatctcttctttctttttgcggcagattatcttctgggcctatatctgattttttggtcaagaaattcaaagctcaaagattatggaatattgtcatagcatctcttttggtatttcttgcatctaataaaatatcccatgacttcagcagcattgaagatccttctttaagagcctccaaatctttcaagaatattagtgtatgctctgcgatcttcggttattcttttggcgttttatttggtactttcccctccatagtagcagatagatttggcacaaatgggtatagtacgttgtggggtgttttaacgactggtggtgtattttctgtgagtgtttttaccgatatattaggtagagatttcaaggcaaatacaggagatgatgatgggaactgtaaaaagggagtgctttgctacagctatacttttatggttacgaaatattgtgccgcttttaatcttttgttcgttttggggataattggatatacgtactatagaagaagagcaactgcaaattccttgtga

SEQ ID NO: 8663 - DNA, 717 bp, Saccharomyces cerevisiae
atgtcccacaaattaacaatcctgccatttctgattaagttcacgcccaagtttccacaatccattgatcacgacgagcatggtctaaacgtttatgcctttgatctggaccatacaattatcaaaccaaagtcccccaatataagttttagtagaagcgcaagtgattggcagtttattaattttaactccaagaaatccaccctggattacctgtgtaatatcattgataatgatcccacggccgtcatagtcatattttctaaccaaggtggtgtcatcaccgtcccaagaacttctaaaagttgcaccaagtacactaataaaattttgctatttttaaaggcaatcaaaaacgatgagagaggagaaacgttatcacacaggttatggctatatgcagcacctaaaaggccgaaaacttttgcagcaaatcatagtaagatcacattcgcaagcttaggtgaaagttataacaatgatcctaacatattcgaaaaagttcgaaaaccaatgacaggaatggtagagttttttaaaagggacctggaaagtgcatacagggtttcagaacaaatttctcccatcaagttgaattggatatattattgcggtgacgctgctgggaggaaaaaggacttcagtgattctgacataaagtttgctgaaaacttgcacgttgaattcaagtaccctgaggaaatatttcacgggtag

SEQ ID NO: 8664 - DNA, 717 bp, Artificial Sequence
  Description of Artificial Sequence: Synthetic polynucleotide
atgtcccacaaattaacaatcttgccatttttgattaagttcacgcccaagtttccacaatccattgatcacgacgagcatggtttgaacgtttatgcctttgatttggaccatacaattatcaaaccaaagtcccccaatataagttttagtagaagcgcaagtgattggcagtttattaattttaactccaagaaatccaccttggattacttgtgtaatatcattgataatgatcccacggccgtcatagtcatattttctaaccaaggtggtgtcatcaccgtcccaagaacttctaaaagttgcaccaagtacactaataaaattttgttatttttaaaggcaatcaaaaacgatgagagaggagaaacgttatcccacaggttatggttatatgcagcacctaaaaggccgaaaacttttgcagcaaatcatagtaagatcacattcgcaagcttaggtgaaagttataacaatgatcctaacatattcgaaaaagttagaaaaccaatgacaggaatggtagagttttttaaaagggacttggaaagtgcatacagggtttctgaacaaatttctcccatcaagttgaattggatatattattgcggtgacgctgctgggaggaaaaaggacttcagtgattctgacataaagtttgctgaaaacttgcacgttgaattcaagtaccctgaggaaatatttcacgggtga

SEQ ID NO: 8665 - DNA, 768 bp, Saccharomyces cerevisiae
atgttgcgaccactgagaaaaagcgttctagcaagctgccgacattgtttcaaggtgtgcggtgggttgcctcaaaagcaattacccttattttcaccattgctcttgagagcacgatactcatcaactgatagctcaactaaaaggtctaacaaatcagataaaatagatgctccaggatttaagaaaattttccttgttgctattatcggtacagtgatatttgtcaagacagtacagtctttagataagaacaaaccgaagacaacattatcagaagaagaattcgaaaatgtggttaaagggttgaaaagacgtgtggctatcttcccacaaggtgaggtcgatataaagttttccttatcacccagcattgaagaaactagaaaggtactgcagaaatcacaaggcgatgatataaatgagctgcagtttgtcgatccagtcaaggtcatcgattactacagaaccttgagggatgatagatatgaggctttattaaatgaatactacaaaaaatacgggtgtgacacgtacgcttacaatttgccgaccggtatgttggtcatgcttttgggtagatatttcaaagagaacttcaagaccggtgacaagctagtagttgtgaactttcctcattcgattgctgatgcaacaagatttgaaaatgaggtttctatagtgtctaaaatctttgttccgaggaaattgagtggctctgacgtctgtaaatattacgaaactgtaggtaaagctgatatcatctga

SEQ ID NO: 8666 - DNA, 768 bp, Artificial Sequence
  Description of Artificial Sequence: Synthetic polynucleotide
atgttgagaccattgagaaaaagcgttttagcaagctgcaggcattgtttcaaggtgtgcggtgggttgcctcaaaagcaattacccttattttctccattgctcttgagagcaagatactcttctactgatagctctactaaaaggtctaacaaatctgataaaatagatgctccaggatttaagaaaattttccttgttgctattatcggtacagtgatatttgtcaagacagtacagtctttagataagaacaaaccgaagacaacattatctgaagaagaattcgaaaatgtggttaaagggttgaaaagacgtgtggctatcttcccacaaggtgaggtcgatataaagttttccttatctcccagcattgaagaaactagaaaggtattacagaaatctcaaggcgatgatataaatgagttacagtttgtcgatccagtcaaggtcatcgattactacagaaccttgagggatgatagatatgaggctttattaaatgaatactacaaaaaatacgggtgtgacacgtacgcttacaatttgccgaccggtatgttggtcatgcttttgggtagatatttcaaagagaacttcaagaccggtgacaagttggtagttgtgaactttcctcattctattgctgatgcaacaagatttgaaaatgaggtttctatagtgtctaaaatctttgttccgaggaaattgagtggctctgacgtctgtaaatattacgaaactgtaggtaaagctgatatcatctga

SEQ ID NO: 8667 - DNA, 468 bp, Saccharomyces cerevisiae
atgtcgttggtcaaacttgcgaatacgtgtgctcatttacagaactgctcgaaagttagagttgccttaacatcgatcccatatacgaaattgcagctacagtttgcgtataacctttaccaacaagggttcttatcgtctttacagaagggatcgactatgggaccagacaaagattttgttgaagtaacaccagacaatatctctactagaaggctttgggttggattgaagtatagagataacaaacctgtcctcagcagctgcaaattaatttccaaaccaaattcaagaatacacctgccaatggaagacatgaagaaactatgctctggcgtaactattagaaacatcaaaccactacaaccaggagaactgattctagttcgagctcataacaacattatggacattaatgaagccatatccaaaaagttggatggagaagtactatgcagagtaaaatga

SEQ ID NO: 8668 - DNA, 468 bp, Artificial Sequence
  Description of Artificial Sequence: Synthetic polynucleotide
atgtctttggtcaaacttgcgaatacgtgtgctcatttacagaactgctccaaagttagagttgccttaacatctatcccatatacgaaattgcagttacagtttgcgtataacctttaccaacaagggttcttatcttctttacagaagggatctactatgggaccagacaaagattttgttgaagtaacaccagacaatatctctactagaaggctttgggttggattgaagtatagagataacaaacctgtcctcagcagctgcaaattaatttccaaaccaaattctagaatacacttgccaatggaagacatgaagaaattatgctctggcgtaactattagaaacatcaaaccattgcaaccaggagaattgattttggttagagctcataacaacattatggacattaatgaagccatatccaaaaagttggatggagaagtattgtgcagagtaaaatga

SEQ ID NO: 8669 - DNA, 138 bp, Saccharomyces cerevisiae
atgaaaatgaactatcatctatcaactagtagttacactaccagtatgttatcatgtacggtgttagatgatgacataaggtatgagaaactgtcatggaagttagacgaagctgaaatgcaaggattgataatgtaa

SEQ ID NO: 8670 - DNA, 138 bp, Artificial Sequence
  Description of Artificial Sequence: Synthetic polynucleotide
atgaaaatgaactatcatttatctactagtagttacactaccagtatgttaagttgtacggtgttagatgatgacataaggtatgagaaattatcttggaagttagacgaagctgaaatgcaaggattgataatgtga

SEQ ID NO: 8671 - DNA, 453 bp, Saccharomyces cerevisiae
atgggcaatttcattataacagaaaggaagaaagcaaaggaggaaagaagcaatccacaaacagatagcatggatgatttgttaattcgtagactaacagatcgaaacgacaaggaggcccatttaaatgagttgtttcaagataatagtggcgccattggtggcaacattgtcagccatgacgatgctttattgaatacactggcaattctacaaaaagaactgaaaagtaaggagcaagaaatacgaagattgaaagaagttattgcgttgaaaaataagaatacggaaaggttgaatgacgaattgattagtggaaccattgaaaataatgttttacaacaaaaactctcggatctgaaaaaagaacattcccagctagttgcgagatggctaaaaaagacagagaaagagacagaagccatgaacagcgaaatagatggaacgaaatga

SEQ ID NO: 8672 - DNA, 453 bp, Artificial Sequence
  Description of Artificial Sequence: Synthetic polynucleotide
atgggcaatttcattataacagaaaggaagaaagcaaaggaggaaagaagcaatccacaaacagatagcatggatgatttgttaattcgtagattgacagatagaaacgacaaggaggcccatttaaatgagttgtttcaagataatagtggcgccattggtggcaacattgtcagccatgacgatgctttattgaatacattagcaattttacaaaaagaattgaaaagtaaggagcaagaaataagaagattgaaagaagttattgcgttgaaaaataagaatacggaaaggttgaatgacgaattgattagtggaaccattgaaaataatgttttacaacaaaaactctctgatttgaaaaaagaacattcccagttggttgcgagatggttgaaaaagacagagaaagagacagaagccatgaacagcgaaatagatggaacgaaatga

SEQ ID NO: 8673 - DNA, 2451 bp, Saccharomyces cerevisiae
atggatgttgtgcagcagaaacaggataaacagttgcagcatcaaacacaagagcagcagcagatacgagaggaccagcaggaagtcccaccccaacgtccacgacaacaaaacagatggaaaccctggtggaattccactgccgacgatgagccaaacacgggaagaattgcagaatatcctaatggacaaggaaggagtagtccgacaacggattttcaagatagcgtgaactcgaataatgacaataaagggatatggtctaaaatcgcttcttttgcaacatccagatatagaagtgccccaattgttgttgatgataatacccgctactctcaactaaacactgaacaaatcaacttcttggaaaatgaggctaaggatataatttcaaaaaagtcgaaatcatggtgttggtacgaagcaattccacatatatcaaattcatcaaacataattgattccatagataccccaggaataatcagtgtctctggtacaggatcagccaaatgcccattgccattaaacaaatatcctggggagggaggtaaccctgggtataatgtatttattaatgattctttaatcctaccatcagataaccctttgaattttctgcacgtccaaccactaagaactaaggtattgaatactatcaaaaattactataacttccctaatgagcaacatctctatttaagacaaaaaaaaaccgcattactgaaggataagagaattattataatatccgtcgtgggggatttaccagaaaagtatgagcagcgctcattagaatcacaaagatcggcttattatctttctagaaaattgtcacaaaatctagcgcaagaacaacctcaaagagtcttgaccctatcgttccagtgcccactgcataatcaagatttaatacctacatataaagaatgtgtagagttactgaaccactgggctcatcttttcaaagaggtagattcaattttttttgtgggcgtttatcacagcgttcccttaactttgctattagcgaaatatatcgtgcaaaataatgaagttctagagtttgatgaaaacactacagtgagtgtattgagtttccagtcatgtttacaaggctatcgattttgggaccacagcactgactttactagcaatagttataataacttgggttccaattccagtactaacgaaaatgatagtaatgatcatgattcaaataatgatttcacaacgaagagccaacaaatcaaagaaaaacagttatttcagggcattgacaaaaagcaacaagacacattatctaaaatcaaaaattataggcggatagattctagtgaatctaaactagttcaggatgcattggattggctcttgttcaattgggatacgtttcgactgacattttttggtaagctttatgataattttatgacaatttcagaaaaacttgctatagattataatcaccctaaaatcttgagaaatttatggtgcaatgggaagtacatgggcattgatttaaagaatgctaataatttaaaccttgataccgatgatgaagcaactagtaacattaatgacgtccatgtaaggacccctaattttgaatcgagattgaagattcccaccaacagacttttcgaaataaccttatgggatattttgatgataacggagaatttaggatataaacaatttattcccataattaatttactaagtcctttttttatttcaaggtcatttaatgattacacattgcctccaaatattaggaaacagtaccagaacagcaacaaaatctggcttcaagaaatggacagtaagtggaaaatgaatggtcatcaactcaattacgaccaaagggagggtgaaagtctcggttcatcatcggaatcattattgccagagaatatttctacggtaaaggattttttgcagtttgtgcagtatcaaaacgaaaaatcttcggatttcgtaaggatatattcagacatttatgatgacgataaagtctataaatgctttctgtacaatacaatattcacgaaaaacccattaagtcgtaagcatttacgtttaaacatcgacctcgacactcctacaagcatattgaatactgtcaatcaatatgatttggtatggaaaattcatgattccttctccaaattgattcaattgaaaaatttaccgcagcgagagataccacatgcgttgaggctctccatctcattaaactgcttcttggatagtaccacgagtacttctggccctgtttttcagagggacaccgtggaagctttgagaagattaacagagatttggcgaacttaccaggattggtctccaccaacaaggggtttgaaacacctacgtgatatcctgagcgttttagccatgtatgacaaccccaaaaacttgattaatgatgttcgacgtacatag

SEQ ID NO: 8674 - DNA, 2451 bp, Artificial Sequence
  Description of Artificial Sequence: Synthetic polynucleotide
atggatgttgtgcagcagaaacaggataaacagttgcagcatcaaacacaagagcagcagcagataagagaggaccagcaggaagtcccaccccaacgtccaagacaacaaaacagatggaaaccctggtggaattccactgccgacgatgagccaaacacgggaagaattgcagaatatcctaatggacaaggaaggagtagtccgacaacggattttcaagatagcgtgaacagtaataatgacaataaagggatatggtctaaaatcgcttcttttgcaacatccagatatagaagtgccccaattgttgttgatgataatacccgctactctcaattgaacactgaacaaatcaacttcttggaaaatgaggctaaggatataatttccaaaaagagtaaaagttggtgttggtacgaagcaattccacatatatccaattcttccaacataattgattccatagataccccaggaataatcagtgtctctggtacaggatctgccaaatgcccattgccattaaacaaatatcctggggagggaggtaaccctgggtataatgtatttattaatgattctttaatcttgccaagtgataaccctttgaattttttgcacgtccaaccattgagaactaaggtattgaatactatcaaaaattactataacttccctaatgagcaacatctctatttaagacaaaaaaaaaccgcattattgaaggataagagaattattataatatccgtcgtgggggatttaccagaaaagtatgagcagcgctctttagaatctcaaagatctgcttattatctttctagaaaattgtctcaaaatttggcgcaagaacaacctcaaagagtcttgaccttatctttccagtgcccattgcataatcaagatttaatacctacatataaagaatgtgtagagttattaaaccactgggctcatcttttcaaagaggtagattctattttttttgtgggcgtttatcacagcgttcccttaactttgttattagcgaaatatatcgtgcaaaataatgaagttttggagtttgatgaaaacactacagtgagtgtattgagtttccagtcctgtttacaaggctataggttttgggaccacagcactgactttactagcaatagttataataacttgggttccaattccagtactaacgaaaatgatagtaatgatcatgattctaataatgatttcacaacgaagagccaacaaatcaaagaaaaacagttatttcagggcattgacaaaaagcaacaagacacattatctaaaatcaaaaattataggagaatagattctagtgaatctaaattggttcaggatgcattggattggctcttgttcaattgggatacgtttagattgacattttttggtaagctttatgataattttatgacaatttctgaaaaacttgctatagattataatcaccctaaaatcttgagaaatttatggtgcaatgggaagtacatgggcattgatttaaagaatgctaataatttaaaccttgataccgatgatgaagcaactagtaacattaatgacgtccatgtaaggacccctaattttgaatctagattgaagattcccaccaacagacttttcgaaataaccttatgggatattttgatgataacggagaatttaggatataaacaatttattcccataattaatttattaagtcctttttttatttctaggtcttttaatgattacacattgcctccaaatattaggaaacagtaccagaacagcaacaaaatctggcttcaagaaatggacagtaagtggaaaatgaatggtcatcaactcaattacgaccaaagggagggtgaaagtctcggttcttcttctgaatctttattgccagagaatatttctacggtaaaggattttttgcagtttgtgcagtatcaaaacgaaaaatcttctgatttcgtaaggatatattctgacatttatgatgacgataaagtctataaatgctttttgtacaatacaatattcacgaaaaacccattaagtcgtaagcatttacgtttaaacatcgacctcgacactcctacaagcatattgaatactgtcaatcaatatgatttggtatggaaaattcatgattccttctccaaattgattcaattgaaaaatttaccgcagagagagataccacatgcgttgaggctctccatctctttaaactgcttcttggatagtaccacgagtacttctggccctgtttttcagagggacaccgtggaagctttgagaagattaacagagatttggagaacttaccaggattggtctccaccaacaaggggtttgaaacaccttcgtgatatcttaagcgttttagccatgtatgacaaccccaaaaacttgattaatgatgttcgtcgtacatga

SEQ ID NO: 8675 - DNA, 675 bp, Saccharomyces cerevisiae
atgtctttcactgaggatcaagaaaaaatcgcgctagaaatactgtcaaaagacaagcatgagttttacgaaattttgaaggtagataggaaagccacagatagtgagatcaagaaggcatacagaaaactagcaatcaaattgcatcctgataaaaactctcatccaaaagcgggagaagctttcaaagtaattaatagggcatttgaagtactaagcaatgaggaaaagcgcagtatttatgacaggataggtagggatcctgacgatagacaaatgccatccagaggtgctgcttcagggttccgaggaagtgcaggtgggtctccaatgggtggcggatttgaagacatgtttttcaattcacgtttcggtggtcaaagagctggaccaccagaggacatattcgactttttgttcaacgcaggcggcagcccattcggcgcttcaccatttgggccttctgcttccactttttcatttggaggccccggtggtttcagagtttatactaataatcgtggtggctcaccgttcatgcgtcaacaaccccgctcaagacagcagcaacaacaagcagaagaaaatgcagtgaattcgcaattaaaaaatatgctcgttcttttcatcatctttattgttcttcctatgattaaagattacctgtttagttaa

SEQ ID NO: 8676 - DNA, 675 bp, Artificial Sequence
  Description of Artificial Sequence: Synthetic polynucleotide
atgtctttcactgaggatcaagaaaaaatcgcgttagaaatattatccaaagacaagcatgagttttacgaaattttgaaggtagataggaaagccacagatagtgagatcaagaaggcatacagaaaattggcaatcaaattgcatcctgataaaaactctcatccaaaagcgggagaagctttcaaagtaattaatagggcatttgaagtattgagcaatgaggaaaagcgcagtatttatgacaggataggtagggatcctgacgatagacaaatgccatccagaggtgctgcttctgggttcagaggaagtgcaggtgggtctccaatgggtggcggatttgaagacatgtttttcaattctcgtttcggtggtcaaagagctggaccaccagaggacatattcgactttttgttcaacgcaggcggcagcccattcggcgcttctccatttgggccttctgcttccactttttcttttggaggccccggtggtttcagagtttatactaataatcgtggtggctctccgttcatgcgtcaacaaccccgctccagacagcagcaacaacaagcagaagaaaatgcagtgaattctcaattaaaaaatatgctcgttcttttcatcatctttattgttcttcctatgattaaagattacttgtttagttga

SEQ ID NO: 8677 - DNA, 4971 bp, Saccharomyces cerevisiae
atgggcatagctgatgggcaaagaagaagatcttcatcactacgaacgcagatgttcaacaagcatttgtatgataaatatcgcggaagaactgatgatgagatagagttagaagatataaatgagagtaagacgttctccggtagcgataataacgataaagatgacagagatgaaacaagcggcaattatgctgctgaagaggattatgaaatggaagagtatggtagtcctgatgtgtcatatagcattatcactaaaatacttgatactatcctagatcgaaggaggacgttccattcgaaagacggtagacatattccgattatattagatcataatgcaattgaatacaaacaagctgctactaaaagggatggtcatttgatagacgaaaggttcaacaagccttactgcgacaaccgaataacttcatcaagatatacattctattcctttttgcctagacagttgtatgcacaattttcaaagttagccaatacttattttttcattgtcgcagtattacaaatgatacctggatggtctacaactggtacttatacaactattatccccttatgtgtatttatgggtatatccatgacaagagaggcttgggacgatttcaggagacatcgtttagataaggaagagaacaataaaccagtgggagtgttggttaaagatggaaataatgacgcacaagaagtttatacactaccaagtagtgttgtctcatccactgcatatctaactaaatcggccgctgctgaaaataatccacctttaaacgatgatcggaactcctctcaaggacacttcttagacacgcacttcaataactttgaactactcaagaataaatacaatgttcatattcatcaaaagaagtgggaaaaacttcgtgttggagacttcgtacttctcacacaagatgattgggtacctgcagatctgcttttattgacatgtgacggcgaaaatagcgaatgtttcgttgaaacgatggctttagatggcgaaacaaatttgaaaagtaaacaaccccatccagaattaaataagttaaccaaagccgcatcaggtcttgcaaatattaatgctcaagttaccgtggaagatcccaatattgatttatataattttgaaggtaatcttgaattgaaaaaccatcgcaatgataccataatgaaataccctctaggtcctgataatgtcatttatcgtggtagtattttgaggaatactcaaaatgttgttggtatggtcattttcagtggtgaggaaacaaaaatcagaatgaatgctttaaaaaacccaagaacgaaagcccctaagctacaaaggaagataaatatgattatcgtgtttatggtgtttgtcgttgccacaatatctttattttcttatcttggccatgttttgcataagaaaaaatatatcgaccagaacaaagcatggtatctatttcaggcagatgctggcgtagcacccacaataatgtcttttatcatcatgtataacactgtgattcctttgtccctatatgtaacaatggaaattatcaaggtagtccaaagtaaaatgatggaatgggacatagacatgtaccatgcagaaacgaacacgccatgcgaatcgagaactgccaccattctggaggaattggggcaagtatcttatatttttagtgataaaaccggaacgctgacggataataagatgatatttcggaaattttctttatgtggatcatcttggctgcataatgtagatctcggtaattctgaggataactttgaagacaacagagacaatacgaactccttgagactaccaccaaaagctcacaacggctctagtatagacgttgtttccattggagatcaaaatgttcttgatcggttaggattttcggacgcaccaattgaaaaagggcatcgtccatctttggacaactttcctaaatctaggaattctattgaatataagggaaattcatcagcaatttatacaggccgtcccagtatgagatcactttttgggaaagataattcacatctaagtaaacaagcttcggttatttcaccctccgagacattttcggagaacattaaaagttcgtttgatttaattcagtttattcaaagatatccgaccgccctgttttctcaaaaggctaaatttttcttcttatcattagctctttgtcatagctgtcttcccaaaaaaactcataacgaatcaataggagaagactccatagagtatcagtcttcatctccagatgaattagcactagtaaccgctgctagagaccttggttatattgtattgaatagaaatgcacagattttgaccattaaaacttttccagacggttttgacggtgaagcaaaattggaaaattatgaaattttgaactatattgacttcaattctcaaagaaagagaatgtctgttcttgtacgtatgccaaatcaaccaaatcaagttcttttaatttgcaaaggtgctgataacgttattatggagcgtttacatgatcgcgaattggctgccaaaaaaatggcagacatatgcaccagtaccaaagaacgtaaagacgcagaagcagagctggttctccagcaaagaaagtctctggaaagaatggtagatgaagaggctatggccaggacctcattgagaaattctttgtctagcgtaccgagagcaagtttatcattgcaggcagtgagaaaaagtctttcaatgaagaacagcaggacccgtgatccagagaaacaaattgactccattgatcaatttctagaaacggtcaagaaatctgatcaggagattggcagcgttgtaaataaaagcaggaagtcactccataagcaacaaatagaaaaatatgggccgcgaatttcgatagatggaacacattttccgaacaacaatgtcccaatagacacaagaaaagaaggactacagcatgattacgatacagaaattttggagcacattggaagcgatgagttaattttgaatgaagagtatgttattgaaagaactttgcaagccatcgatgagttttcgactgaaggcttaagaactctggtctatgcttacaaatggatcgatattgggcagtatgaaaattggaataaacgctatcaccaagccaaaacctcccttactgatagaaaaatcaaagtcgatgaggcaggtgcagaaatcgaggatggtttaaatctgttaggggtaactgcaatcgaagacaagttacaagacggcgtttcagaagctatagaaaagatcagaagagccggtataaaaatgtggatgctaacaggggataaaagggaaacggctataaatatagggtattcgtgtatgttaatcaaagattattctacggtagtcattttaactactactgatgaaaatattatatcaaagatgaatgcggtttctcaagaagttgattccggaaacatagcacactgcgttgttgtaattgacggtgccacgatggccatgtttgaaggaaatcctacatacatgtctgtatttgttgagctttgcactaaaacagactcggtaatatgttgccgtgcttcaccttctcaaaaagcccttatggtttccaacataagaaataccgatccaaacttagtcacgttggcaataggtgatggtgcgaatgatattgccatgatacaatctgccgatataggtgttggaatagccggtaaggagggattgcaagcatctagagtatctgattattctattggccaatttcggtttctcttgaaattgttatttgttcatgggcgttataactatattcgcacctccaagtttatgctttgcacgttttacaaagaaattacgttttactttacgcagttgatatatcaaagatatacaatgttttcaggctcctctctatatgagccatggtcattgtccatgttcaatactctattcacatcactaccggttctatgtattggtatgtttgagaaagacttgaaaccaatgactctactaacagtccctgaattatattcgtacgggcgcctttcacaaggttttaattggttaatattcatggagtgggttatcttggcaactacgaattctcttatcattacatttttaaatgttgtaatgtggggtatgagttctctttcagataacactatgtatcctctaggtctcatcaatttcacagccattgttgccttaattaacgttaaatcccaatttgttgaaatgcacaataggaattggctggcttttacttctgtagttctatcctgtggaggttggttagtgtggtgttgtgcccttcctattttgaataatactgaccaaatatatgatgtagcatatggcttttacaatcattttggtaaagacattacattctggtgtactagcttggtgttggcactgttacctatcactttagatatagtttacaaaacattcaaagttatgatatggccatcagattctgatatttttgctgagctggaacaaaaaagtgatatcagaaagaagctggaactaggagcctatagcgaaatgaggcaaggatggacgtgggataaagatcccagtactttcacaaggtacacagacaaagttctttcaaggccaagaactaattcacgtgcaagtgcaaaaactcataacagcagcatatattcaatgtcaaatgggaatgtagaccattcctcaaaaaaaaatttctttggaaactcttctaaaaagagctctgaacgatacgaggtattacctagtggcaagttaatcaagcgaccatccttgaaaacacaaagcagtaaagacagtattggcggcaatataactactaaactgacgaagaaactgaagcttccatcgaggaatgtggaagatgaagatgtgaaccagattattcaggcaaggctaaaggatctggagtaa

SEQ ID NO: 8678 - DNA, 4971 bp, Artificial Sequence
  Description of Artificial Sequence: Synthetic polynucleotide
atgggcatagctgatgggcaaagaagaagatcttcttctttaagaacgcagatgttcaacaagcatttgtatgataaatatcgcggaagaactgatgatgagatagagttagaagatataaatgagagtaagacgttctccggtagcgataataacgataaagatgacagagatgaaacaagcggcaattatgctgctgaagaggattatgaaatggaagagtatggtagtcctgatgtgtcttatagcattatcactaaaatacttgatactatcttagatagaaggaggacgttccattctaaagacggtagacatattccgattatattagatcataatgcaattgaatacaaacaagctgctactaaaagggatggtcatttgatagacgaaaggttcaacaagccttactgcgacaacagaataacttcttctagatatacattctattcctttttgcctagacagttgtatgcacaattttccaagttagccaatacttattttttcattgtcgcagtattacaaatgatacctggatggtctacaactggtacttatacaactattatccccttatgtgtatttatgggtatatccatgacaagagaggcttgggacgatttcaggagacatcgtttagataaggaagagaacaataaaccagtgggagtgttggttaaagatggaaataatgacgcacaagaagtttatacattaccaagtagtgttgtctcttccactgcatatttgactaaaagtgccgctgctgaaaataatccacctttaaacgatgatagaaactcctctcaaggacacttcttagacacgcacttcaataactttgaattactcaagaataaatacaatgttcatattcatcaaaagaagtgggaaaaacttcgtgttggagacttcgtacttctcacacaagatgattgggtacctgcagatttacttttattgacatgtgacggcgaaaatagcgaatgtttcgttgaaacgatggctttagatggcgaaacaaatttgaaaagtaaacaaccccatccagaattaaataagttaaccaaagccgcatctggtcttgcaaatattaatgctcaagttaccgtggaagatcccaatattgatttatataattttgaaggtaatcttgaattgaaaaaccatcgcaatgataccataatgaaataccctttaggtcctgataatgtcatttatcgtggtagtattttgaggaatactcaaaatgttgttggtatggtcattttcagtggtgaggaaacaaaaatcagaatgaatgctttaaaaaacccaagaacgaaagcccctaagttacaaaggaagataaatatgattatcgtgtttatggtgtttgtcgttgccacaatatctttattttcttatcttggccatgttttgcataagaaaaaatatatcgaccagaacaaagcatggtatttatttcaggcagatgctggcgtagcacccacaataatgtcttttatcatcatgtataacactgtgattcctttgtccttatatgtaacaatggaaattatcaaggtagtccaaagtaaaatgatggaatgggacatagacatgtaccatgcagaaacgaacacgccatgcgaatctagaactgccaccattttagaggaattggggcaagtatcttatatttttagtgataaaaccggaacgttaacggataataagatgatatttagaaaattttctttatgtggatcttcttggttacataatgtagatctcggtaattctgaggataactttgaagacaacagagacaatacgaactccttgagattaccaccaaaagctcacaacggctctagtatagacgttgtttccattggagatcaaaatgttcttgatagattaggattttctgacgcaccaattgaaaaagggcatcgtccatctttggacaactttcctaaatctaggaattctattgaatataagggaaattcttctgcaatttatacaggccgtcccagtatgagatctctttttgggaaagataattctcatttgagtaaacaagcttctgttatttctccctccgagacattttctgagaacattaaaagttcttttgatttaattcagtttattcaaagatatccgaccgccttattttctcaaaaggctaaatttttcttcttatctttagctctttgtcatagctgtcttcccaaaaaaactcataacgaaagtataggagaagactccatagagtatcagtcttcttctccagatgaattagcattggtaaccgctgctagagaccttggttatattgtattgaatagaaatgcacagattttgaccattaaaacttttccagacggttttgacggtgaagcaaaattggaaaattatgaaattttgaactatattgacttcaattctcaaagaaagagaatgtctgttcttgtacgtatgccaaatcaaccaaatcaagttcttttaatttgcaaaggtgctgataacgttattatggagcgtttacatgatcgcgaattggctgccaaaaaaatggcagacatatgcaccagtaccaaagaacgtaaagacgcagaagcagagttagttctccagcaaagaaagtctttggaaagaatggtagatgaagaggctatggccaggacctctttgagaaattctttgtctagcgtaccgagagcaagtttatctttgcaggcagtgagaaaaagtctttctatgaagaacagcaggacccgtgatccagagaaacaaattgactccattgatcaatttttggaaacggtcaagaaatctgatcaggagattggcagcgttgtaaataaaagcaggaagtctctccataagcaacaaatagaaaaatatgggccgagaatttctatagatggaacacattttccgaacaacaatgtcccaatagacacaagaaaagaaggattacagcatgattacgatacagaaattttggagcacattggaagcgatgagttaattttgaatgaagagtatgttattgaaagaactttgcaagccatcgatgagttttccactgaaggcttaagaactttggtctatgcttacaaatggatcgatattgggcagtatgaaaattggaataaacgctatcaccaagccaaaacctcccttactgatagaaaaatcaaagtcgatgaggcaggtgcagaaatcgaggatggtttaaatttattaggggtaactgcaatcgaagacaagttacaagacggcgtttctgaagctatagaaaagatcagaagagccggtataaaaatgtggatgttaacaggggataaaagggaaacggctataaatatagggtattcttgtatgttaatcaaagattattctacggtagtcattttaactactactgatgaaaatattatatccaagatgaatgcggtttctcaagaagttgattccggaaacatagcacactgcgttgttgtaattgacggtgccacgatggccatgtttgaaggaaatcctacatacatgtctgtatttgttgagctttgcactaaaacagactctgtaatatgttgccgtgcttccccttctcaaaaagcccttatggtttccaacataagaaataccgatccaaacttagtcacgttggcaataggtgatggtgcgaatgatattgccatgatacaatctgccgatataggtgttggaatagccggtaaggagggattgcaagcatctagagtatctgattattctattggccaatttagatttctcttgaaattgttatttgttcatgggcgttataactatattcgcacctccaagtttatgctttgcacgttttacaaagaaattacgttttactttacgcagttgatatatcaaagatatacaatgttttctggctcctctttgtatgagccatggtctttgtccatgttcaatactttattcacatctttaccggttttatgtattggtatgtttgagaaagacttgaaaccaatgactttattaacagtccctgaattatattcttacgggcgcctttctcaaggttttaattggttaatattcatggagtgggttatcttggcaactacgaattctcttatcattacatttttaaatgttgtaatgtggggtatgagttctctttctgataacactatgtatcctttaggtctcatcaatttcacagccattgttgccttaattaacgttaaatcccaatttgttgaaatgcacaataggaattggttggcttttacttctgtagttttatcctgtggaggttggttagtgtggtgttgtgcccttcctattttgaataatactgaccaaatatatgatgtagcatatggcttttacaatcattttggtaaagacattacattctggtgtactagcttggtgttggcattattacctatcactttagatatagtttacaaaacattcaaagttatgatatggccaagtgattctgatatttttgctgagttagaacaaaaaagtgatatcagaaagaagttggaattaggagcctatagcgaaatgaggcaaggatggacgtgggataaagatcccagtactttcacaaggtacacagacaaagttctttctaggccaagaactaattctcgtgcaagtgcaaaaactcataacagcagcatatattccatgagtaatgggaatgtagaccattcctctaaaaaaaatttctttggaaactcttctaaaaagagctctgaaagatacgaggtattacctagtggcaagttaatcaagagaccatccttgaaaacacaaagcagtaaagacagtattggcggcaatataactactaaattaacgaagaaattgaagcttccatctaggaatgtggaagatgaagatgtgaaccagattattcaggcaaggttaaaggatttagagtga

SEQ ID NO: 8679 - DNA, 2118 bp, Saccharomyces cerevisiae
atgacaacaaactcacgtccatccgccttgcaggctcccggtttacagattttttccatgctgaaatcaagcgaagaggatggattcatgagttctagtctaacccttgatagtgataacataataggtgtcaccgagaacaatcgtcaagaattttactctacgtggcgaaaaccgtccctattaagcagccgcagcgtattacatgaatactcccctacaattgtgggatctaatgactgtactttttcacctataaccgtaggaaaaacaacgaagttttttaattgggatgatattatttcaagaattttcatgcaacagccattcggtgtaacacaccaattctttgaagaatttcggtattcaatcattacttctcattttttgaatgatatgaatcattacaggttatcactacatcttgatcaatctattatgaactttcataaaagctcaactttgttaaagaatgtacctcccaaatctgtaccatttatggcgacaaaatatggtaaattggcggtagcagaggacaaaaaattatatttcagacaaaatttcaactacctttcgatgattataacctcttatcgagtacttacacagttgaaaaaatactgtagaaaaaaaaatagtccaggtctgaagagagttgtaattttaatactcgtagcagtgtatttatcaattcagcaagaatactttcgaagacatttgatttgctataaaaccttattaaaggtacggaaagtgctcgaatcattacaacaagtggatgtaatgattcataaatatcatcttcgatttaaagaaataaaaaatcatagttttatatcaagagtgtctcttatttcaattgctgacgagcactcatctgtgataaaagagctcctagtattctcaagtgatgcactgttttataaactcaaatcaatcattccagatattgtcatctttagcgatacaagtgagctatcgaaatactgtgaattatacggtatcgatgtaccaaatctttactataataatactaccacagtaaaagaccttgatggtaagctttatcgtctcaaactgctaaagaaatttatgctctgttgtttgctgtctttagatatgacaggaaacgaaaatctttcaaatgtaaacatgagaaacgcactaaacaaaatctttccagattacatggcaagggtgcaactcaaaaaaaaatataatccaataggtacattccaaaatatagttagtctattaagaggattacattcactactctccactgtcctggtgtctttgaatgaccataagcaaatattgtatgcatttcctgaagaaacatcaactaatactggttgtgaaagagcaaatgtatgttcattttcaaagaatgataaattgtttcaggcacttaattacttaaaaatgatcgagaacaatctattagctattgacattcgaaatggcataacagagaatgataggaacatcattgaggataagttggaggagctcattactttctggaaaacctcgaaaatttgtggcaatatttctaggatacaaaaggtatccccaaccaatacaatcaaccatggtttccatctggatatcctcaaaggcagaaagtcaccccgttcttcgtcagtacaaggtcttagcttagagaggaaagttgacttcattgatgttgctgaatcggtgaatgactcttttgaaaacgacaccgaactagaggaatatgaagactacgactgtcaggaggaatgttctgccggttcacgccaaaatcaccgcgtagattttatcggaaaggatagttgtaggaaaccagatttcaagcaactttctgacaacgaattacgacgcaagttagatgaaagaattttgaaattggctcaagaaaaccgtgaaggcagggaaaggctaagaactgcaaagtcctttgaattgctaagaaaagctcaggcttccatgtccgtaaagtttggctttcaaaaaccattaagagacgatgcctttcttgagagcaggcctctcagcaaatgcaaagtatcttcggaagaaactatcccatttttgtatgaattaaaaggattactaggaaatgattcatga

SEQ ID NO: 8680 - DNA, 2118 bp, Artificial Sequence
  Description of Artificial Sequence: Synthetic polynucleotide
atgacaacaaactctcgtccatccgccttgcaggctcccggtttacagattttttccatgttgaaaagtagcgaagaggatggattcatgagttctagtttaacccttgatagtgataacataataggtgtcaccgagaacaatcgtcaagaattttactctacgtggagaaaaccgtccttattaagcagccgcagcgtattacatgaatactcccctacaattgtgggatctaatgactgtactttttctcctataaccgtaggaaaaacaacgaagttttttaattgggatgatattatttctagaattttcatgcaacagccattcggtgtaacacaccaattctttgaagaatttagatattctatcattacttctcattttttgaatgatatgaatcattacaggttaagtttgcatcttgatcaatctattatgaactttcataaaagctctactttgttaaagaatgtacctcccaaatctgtaccatttatggcgacaaaatatggtaaattggcggtagcagaggacaaaaaattatatttcagacaaaatttcaactacctttctatgattataacctcttatagagtacttacacagttgaaaaaatactgtagaaaaaaaaatagtccaggtttgaagagagttgtaattttaatactcgtagcagtgtatttatccattcagcaagaatactttagaagacatttgatttgctataaaaccttattaaaggtaagaaaagtgctcgaatctttacaacaagtggatgtaatgattcataaatatcatcttagatttaaagaaataaaaaatcatagttttatatctagagtgtctcttatttccattgctgacgagcactcttctgtgataaaagagctcttagtattctctagtgatgcattattttataaactcaaatctatcattccagatattgtcatctttagcgatacaagtgagttatccaaatactgtgaattatacggtatcgatgtaccaaatctttactataataatactaccacagtaaaagaccttgatggtaagctttatcgtctcaaattattgaagaaatttatgctctgttgtttgttatctttagatatgacaggaaacgaaaatctttctaatgtaaacatgagaaacgcattgaacaaaatctttccagattacatggcaagggtgcaactcaaaaaaaaatataatccaataggtacattccaaaatatagttagtttgttaagaggattacattctttactctccactgtcttggtgtctttgaatgaccataagcaaatattgtatgcatttcctgaagaaacatctactaatactggttgtgaaagagcaaatgtatgttccttttccaagaatgataaattgtttcaggcacttaattacttaaaaatgatcgagaacaatttattagctattgacattagaaatggcataacagagaatgataggaacatcattgaggataagttggaggagctcattactttctggaaaacctccaaaatttgtggcaatatttctaggatacaaaaggtatccccaaccaatacaatcaaccatggtttccatttggatatcctcaaaggcagaaagtctccccgttcttcttctgtacaaggtcttagcttagagaggaaagttgacttcattgatgttgctgaatctgtgaatgactcttttgaaaacgacaccgaattagaggaatatgaagactacgactgtcaggaggaatgttctgccggtagtcgccaaaatcaccgcgtagattttatcggaaaggatagttgtaggaaaccagatttcaagcaactttctgacaacgaattaaggcgcaagttagatgaaagaattttgaaattggctcaagaaaaccgtgaaggcagggaaaggttaagaactgcaaagtcctttgaattgttaagaaaagctcaggcttccatgtccgtaaagtttggctttcaaaaaccattaagagacgatgcctttcttgagagcaggcctctcagcaaatgcaaagtatcttctgaagaaactatcccatttttgtatgaattaaaaggattattaggaaatgattcttga

SEQ ID NO: 8681 - DNA, 2277 bp, Saccharomyces cerevisiae
atggataacacgaccaatattaatacaaatgagcgctctagtaacacggattttagctcagctcccaatatcaaaggtttgaatagccatactcagttgcagtttgatgcggattctcgagttttcgtttcggatgtaatggctaagaactctaagcaattattgtacgcccatatttataactatttaatcaaaaacaattactggaactctgccgcaaaatttttaagcgaagctgaccttcctttatctagaataaacggatctgcttcgggtgggaaaactagcttgaacgccagcctgaagcagggattaatggatattgcatctaagggtgacattgttagtgaagatgggctattaccttcgaaaatgctgatggacgctaatgacacgtttttactggaatggtgggaaatttttcaatcattgttcaatggagacctagaatctgggtaccaacaggatcataatcctttaagagagagaataataccaattttgccagctaattctaaatctaatatgccttcccatttctctaatctcccaccaaatgtgattccaccaactcaaaatagttttccagtttcagaggagagttttaggcccaatggtgacggaagtaactttaatttaaacgatccaaccaatcgaaacgtctccgaaagatttctatcgagaacttccggtgtctacgacaaacagaatagcgctaattttgcacctgatactgctataaacagtgatattgctgggcagcagtacgcaactataaatctacataaacacttcaatgatttgcaatcaccagcacagccccagcaatcatctcaacagcagatccagcagcctcagcatcaaccccagcatcaaccgcaacagcaacagcaacagcaacaacaacaacaacaacagcaacagcaacagcaacagcaacagcagcaacagcaacagcaacagcaacaacatcaacagcagcaacagacaccgtatcctattgtcaacccacaaatggtccctcatattccatcggaaaattctcattcaaccggacttatgccttcagtgcctcctacaaatcaacaatttaatgcacaaacccaatcttcaatgttttcagaccagcagcgcttctttcaatatcaattacaccaccaaaatcaaggacaggcgccatcttttcagcaaagccaatctggcaggtttgatgacatgaacgctatgaaaatgttttttcagcagcaagcactacagcaaaattcactacagcaaaatcttggaaatcaaaattatcaatctaatacacgtaacaatactgcggaagaaactacgcccacaaatgacaataacgcaaatggcaatagtttattgcaagaacacatacgagcccgcttcaataagatgaaaacaattcctcaacaaatgaaaaatcaaagcactgtcgcaaatccggttgttagtgatataacatctcaacagcagtacatgcatatgatgatgcaaagaatggcggctaaccagcaattacaaaatagtgcctttcctccagacactaatcgtatagcgccagctaacaacactatgccattacaaccaggaaatatggggtctcctgtcattgaaaatccaggtatgaggcagactaatccatccggacaaaaccctatgatcaatatgcagcccttatatcaaaatgtttcttccgcaatgcatgcgttcgctccgcaacaacaatttcatctaccacaacattataaaaccaatacttcagtaccacaaaatgattctacctccgtctttcctttgcctaacaataacaataacaataacaacaacaacaataataataataataataatagtaataatagtaataataataataataataataataataataataatagtaataatacacccacagtatcacaaccatcatcaaaatgtacttctagctccagcacaactcctaatataactacaacaattcaacccaagcggaaacagagagtgggtaaaacaaagaccaaggaatcaagaaaagttgctgcagctcagaaagttatgaaatctaagaaactggaacaaaatggtgattcagctgctacaaacttcatcaatgtcactccaaaggacagtggcggtaagggtaccgtaaaagttcaaaacagtaactcgcagcaacaactaaatggctctttttctatggatacagaaacattcgacatatttaacattggtgacttttctcctgatctaatggatagctaa

SEQ ID NO: 8682 - DNA, 2277 bp, Artificial Sequence
  Description of Artificial Sequence: Synthetic polynucleotide
atggataacacgaccaatattaatacaaatgagcgctctagtaacacggattttagcagtgctcccaatatcaaaggtttgaatagccatactcagttgcagtttgatgcggattctagagttttcgtttctgatgtaatggctaagaactctaagcaattattgtacgcccatatttataactatttaatcaaaaacaattactggaactctgccgcaaaatttttaagcgaagctgaccttcctttatctagaataaacggatctgcttctggtgggaaaactagcttgaacgccagcttgaagcagggattaatggatattgcatctaagggtgacattgttagtgaagatgggttattaccttccaaaatgttaatggacgctaatgacacgtttttattggaatggtgggaaatttttcaatctttgttcaatggagacttggaatctgggtaccaacaggatcataatcctttaagagagagaataataccaattttgccagctaattctaaatctaatatgccttcccatttctctaatctcccaccaaatgtgattccaccaactcaaaatagttttccagtttctgaggagagttttaggcccaatggtgacggaagtaactttaatttaaacgatccaaccaatagaaacgtctccgaaagatttttatctagaacttccggtgtctacgacaaacagaatagcgctaattttgcacctgatactgctataaacagtgatattgctgggcagcagtacgcaactataaatttacataaacacttcaatgatttgcaatctccagcacagccccagcaatcttctcaacagcagatccagcagcctcagcatcaaccccagcatcaaccgcaacagcaacagcaacagcaacaacaacaacaacaacagcaacagcaacagcaacagcaacagcagcaacagcaacagcaacagcaacaacatcaacagcagcaacagacaccgtatcctattgtcaacccacaaatggtccctcatattccatctgaaaattctcattctaccggacttatgccttctgtgcctcctacaaatcaacaatttaatgcacaaacccaatcttctatgttttctgaccagcagcgcttctttcaatatcaattacaccaccaaaatcaaggacaggcgccatcttttcagcaaagccaatctggcaggtttgatgacatgaacgctatgaaaatgttttttcagcagcaagcattacagcaaaattctttgcagcaaaatcttggaaatcaaaattatcaatctaatacacgtaacaatactgcggaagaaactacgcccacaaatgacaataacgcaaatggcaatagtttattgcaagaacacataagagcccgcttcaataagatgaaaacaattcctcaacaaatgaaaaatcaaagcactgtcgcaaatccggttgttagtgatataacatctcaacagcagtacatgcatatgatgatgcaaagaatggcggctaaccagcaattacaaaatagtgcctttcctccagacactaatcgtatagcgccagctaacaacactatgccattacaaccaggaaatatggggtctcctgtcattgaaaatccaggtatgaggcagactaatccatccggacaaaaccctatgatcaatatgcagcccttatatcaaaatgtttcttccgcaatgcatgcgttcgctccgcaacaacaatttcatttaccacaacattataaaaccaatacttctgtaccacaaaatgattctacctccgtctttcctttgcctaacaataacaataacaataacaacaacaacaataataataataataataatagtaataatagtaataataataataataataataataataataataatagtaataatacacccacagtatctcaaccatcttctaaatgtacttctagctccagcacaactcctaatataactacaacaattcaacccaagagaaaacagagagtgggtaaaacaaagaccaaggaatctagaaaagttgctgcagctcagaaagttatgaaatctaagaaattagaacaaaatggtgattctgctgctacaaacttcatcaatgtcactccaaaggacagtggcggtaagggtaccgtaaaagttcaaaacagtaactctcagcaacaattgaatggctctttttctatggatacagaaacattcgacatatttaacattggtgacttttctcctgatttgatggatagctga

SEQ ID NO: 8683 - DNA, 2589 bp, Saccharomyces cerevisiae
atgcagtacgtaggcagagctcttgggtctgtgtctaaaacatggtcttctatcaatccggctacgctatcaggtgctatagatgtcattgtagtggagcatccagacggaaggctatcatgttctccctttcatgtgaggttcggcaaatttcaaattctaaagccatctcaaaagaaagtccaagtgtttataaatgagaaactgagtaatatgccaatgaaactgagtgattctggagaagcctatttcgttttcgagatgggtgaccaggtcactgatgtccctgacgaattgcttgtgtcgcccgtgatgagcgccacatcaagcccccctcaatcacctgaaacatccatcttagaaggaggaaccgagggtgaaggtgaaggtgaaaatgaaaataagaagaaggaaaagaaagtgctagaggaaccagattttttagatatcaatgacactggagattcaggcagtaaaaatagtgaaactacagggtcgctttctcctactgaatcctctacaacgacaccaccagattcagttgaagagaggaagcttgttgagcagcgtacaaagaactttcagcaaaaactaaacaaaaaactcactgaaatccatatacccagtaaacttgataacaatggcgacttactactagacactgaaggttacaagccaaacaagaatatgatgcatgacacagacatacaactgaagcagttgttaaaggacgaattcggtaatgattcagatatttccagttttatcaaggaggacaaaaatggcaacatcaagatcgtaaatccttacgagcaccttactgatttatctcctccaggtacgcctccaacaatggccacaagcggatcagttttaggcttagatgcaatggaatcaggaagtactttgaattcgttatcttcttcaccttctggttccgatactgaggacgaaacatcatttagcaaagaacaaagcagtaaaagtgaaaaaactagcaagaaaggaacagcagggagcggtgagaccgagaaaagatacatacgaacgataagattgactaatgaccagttaaagtgcctaaatttaacttatggtgaaaatgatctgaaattttccgtagatcacggaaaagctattgttacgtcaaaattattcgtttggaggtgggatgttccaattgttatcagtgatattgatggcaccatcacaaaatcggacgctttaggccatgttctggcaatgataggaaaagactggacgcacttgggtgtagccaagttatttagcgagatctccaggaatggctataatatactctatctaactgcaagaagtgctggacaagctgattccacgaggagttatttgcgatcaattgaacagaatggcagcaaactaccaaatgggcctgtgattttatcacccgatagaacgatggctgcgttaaggcgggaagtaatactaaaaaaacctgaagtctttaaaatcgcgtgtctaaacgacataagatccttgtattttgaagacagtgataacgaagtggatacagaggaaaaatcaacaccattttttgccggctttggtaataggattactgatgctttatcttacagaactgtggggatacctagttcaagaattttcacaataaatacagagggtgaggttcatatggaattattggagttagcaggttacagaagctcctatattcatatcaatgagcttgtcgatcatttctttccaccagtcagccttgatagtgtcgatctaagaactaatacttccatggttcctggctccccccctaatagaacgttggataactttgactcagaaattacttcaggtcgcaaaacgctatttagaggcaatcaggaagagaaattcacagacgtaaatttttggagagacccgttagtcgacatcgacaacttatcggatattagcaatgatgattctgataacatcgatgaagatactgacgtatcacaacaaagcaacattagtagaaatagggcaaattcagtcaaaaccgccaaggtcactaaagccccgcaaagaaatgtgagcggcagcacaaataacaacgaagttttagccgcttcgtctgatgtagaaaatgcgtctgacctggtgagttcccatagtagctcaggatccacgcccaataaatctacaatgtccaaaggggacattggaaaacaaatatatttggagctaggttctccacttgcatcgccaaaactaagatatttagacgatatggatgatgaagactccaattacaatagaactaaatcaaggagagcatcttctgcagccgcgactagtatcgataaagagttcaaaaagctctctgtgtcaaaggccggcgctccaacaagaattgtttcaaagatcaacgtttcaaatgacgtacattcacttgggaattcagataccgaatcacgaagggagcaaagtgttaatgaaacagggcgcaatcagctaccccacaactcaatggacgataaagatttggattcaagagtaagcgatgaattcgatgacgatgaattcgacgaagatgaattcgaagattaa

SEQ ID NO: 8684 - DNA, 2589 bp, Artificial Sequence
  Description of Artificial Sequence: Synthetic polynucleotide
atgcagtacgtaggcagagctcttgggtctgtgtctaaaacatggtcttctatcaatccggctacgttatctggtgctatagatgtcattgtagtggagcatccagacggaaggttaagttgttctccctttcatgtgaggttcggcaaatttcaaattttgaagccatctcaaaagaaagtccaagtgtttataaatgagaaattaagtaatatgccaatgaaattaagtgattctggagaagcctatttcgttttcgagatgggtgaccaggtcactgatgtccctgacgaattgcttgtgtctcccgtgatgagcgccacatctagcccccctcaaagtcctgaaacatccatcttagaaggaggaaccgagggtgaaggtgaaggtgaaaatgaaaataagaagaaggaaaagaaagtgttggaggaaccagattttttagatatcaatgacactggagattctggcagtaaaaatagtgaaactacagggtctctttctcctactgaatcctctacaacgacaccaccagattctgttgaagagaggaagcttgttgagcagcgtacaaagaactttcagcaaaaattgaacaaaaaactcactgaaatccatatacccagtaaacttgataacaatggcgacttattattagacactgaaggttacaagccaaacaagaatatgatgcatgacacagacatacaattgaagcagttgttaaaggacgaattcggtaatgattctgatatttccagttttatcaaggaggacaaaaatggcaacatcaagatcgtaaatccttacgagcaccttactgatttatctcctccaggtacgcctccaacaatggccacaagcggatctgttttaggcttagatgcaatggaatctggaagtactttgaattctttatcttcttctccttctggttccgatactgaggacgaaacatcttttagcaaagaacaaagcagtaaaagtgaaaaaactagcaagaaaggaacagcagggagcggtgagaccgagaaaagatacataagaacgataagattgactaatgaccagttaaagtgcttgaatttaacttatggtgaaaatgatttgaaattttccgtagatcacggaaaagctattgttacgtccaaattattcgtttggaggtgggatgttccaattgttatcagtgatattgatggcaccatcacaaaaagtgacgctttaggccatgttttagcaatgataggaaaagactggacgcacttgggtgtagccaagttatttagcgagatctccaggaatggctataatatactctatttgactgcaagaagtgctggacaagctgattccacgaggagttatttgagatctattgaacagaatggcagcaaattaccaaatgggcctgtgattttatctcccgatagaacgatggctgcgttaaggagagaagtaatattgaaaaaacctgaagtctttaaaatcgcgtgtttgaacgacataagatccttgtattttgaagacagtgataacgaagtggatacagaggaaaaatctacaccattttttgccggctttggtaataggattactgatgctttatcttacagaactgtggggatacctagtagtagaattttcacaataaatacagagggtgaggttcatatggaattattggagttagcaggttacagaagctcctatattcatatcaatgagcttgtcgatcatttctttccaccagtcagccttgatagtgtcgatttgagaactaatacttccatggttcctggctccccccctaatagaacgttggataactttgactctgaaattacttctggtcgcaaaacgttgtttagaggcaatcaggaagagaaattcacagacgtaaatttttggagagacccgttagtcgacatcgacaacttaagtgatattagcaatgatgattctgataacatcgatgaagatactgacgtatctcaacaaagcaacattagtagaaatagggcaaattctgtcaaaaccgccaaggtcactaaagccccgcaaagaaatgtgagcggcagcacaaataacaacgaagttttagccgcttcttctgatgtagaaaatgcgtctgacttggtgagttcccatagtagcagtggatccacgcccaataaatctacaatgtccaaaggggacattggaaaacaaatatatttggagttaggttctccacttgcatctccaaaattgagatatttagacgatatggatgatgaagactccaattacaatagaactaaatctaggagagcatcttctgcagccgcgactagtatcgataaagagttcaaaaagctctctgtgagcaaggccggcgctccaacaagaattgtttccaagatcaacgtttctaatgacgtacattctcttgggaattctgataccgaatctagaagggagcaaagtgttaatgaaacagggcgcaatcagttgccccacaactccatggacgataaagatttggattccagagtaagcgatgaattcgatgacgatgaattcgacgaagatgaattcgaagattga

SEQ ID NO: 8685 - DNA, 1107 bp, Saccharomyces cerevisiae
atgaactcatggaacctgagttcttcaataccgataatacatacgcctcatgaccatcccccgacatcagaaggaactccagatcaaccaaataataaccgaaaagatgataaactgcacaaaaaaagaggcgattcagatgaggacttaagccctatatggcattgtgtcgtctccggtgggattggtggaaaaataggagattctgcgatgcattcattggatactgttaagacaagacaacagggcgcacccaatgtcaaaaaatacaggaacatgatctctgcatatcgtaccatttggctagaagaaggcgtgagaagggggctatacggcggttacatggctgccatgttaggctccttcccgtcagcggcaatcttctttgggacctatgaatatactaagagaacaatgatagaagattggcagattaacgataccatcacacatttgagcgctggatttcttggcgattttatctccagttttgtttatgttccatcagaggtcctaaagacaaggctacaattgcaaggaaggttcaataatcctttctttcaatctggctataattattcgaatttaagaaatgccataaagacagttataaaagaagaagggtttcgctcactattttttggatacaaagccactttagccagagatttgccatttagtgcattgcagtttgccttctacgaaaagtttaggcaattggctttcaagattgaacagaaagatggtagggatggtgagttgtctatacctaatgaaatattgactggtgcctgtgcaggtggactggcgggaatcattaccacaccaatggatgttgttaagactagagtccaaactcaacagccgcccagccaaagcaacaaatcatactcagtaacacatccacatgtaacaaacggcagaccggcagcactttccaactcgatttcgctcagccttcggacggtctaccaatctgaaggtgtgttaggtttctttagtggcgttggccctagattcgtctggacaagtgttcagagcagtataatgttgcttctgtatcaaatgaccctacgcggattaagtaacgcatttccaacggactaa

SEQ ID NO: 8686 - DNA, 1107 bp, Artificial Sequence
  Description of Artificial Sequence: Synthetic polynucleotide
atgaacagttggaacttgagttcttctataccgataatacatacgcctcatgaccatcccccgacaagtgaaggaactccagatcaaccaaataataacagaaaagatgataaattacacaaaaaaagaggcgattctgatgaggacttaagccctatatggcattgtgtcgtctccggtgggattggtggaaaaataggagattctgcgatgcattctttggatactgttaagacaagacaacagggcgcacccaatgtcaaaaaatacaggaacatgatctctgcatatcgtaccatttggttagaagaaggcgtgagaagggggttatacggcggttacatggctgccatgttaggctccttcccgtctgcggcaatcttctttgggacctatgaatatactaagagaacaatgatagaagattggcagattaacgataccatcacacatttgagcgctggatttcttggcgattttatctccagttttgtttatgttccaagtgaggtcttgaagacaaggttacaattgcaaggaaggttcaataatcctttctttcaatctggctataattattctaatttaagaaatgccataaagacagttataaaagaagaagggtttcgctctttattttttggatacaaagccactttagccagagatttgccatttagtgcattgcagtttgccttctacgaaaagtttaggcaattggctttcaagattgaacagaaagatggtagggatggtgagttgtctatacctaatgaaatattgactggtgcctgtgcaggtggattagcgggaatcattaccacaccaatggatgttgttaagactagagtccaaactcaacagccgcccagccaaagcaacaaatcttacagtgtaacacatccacatgtaacaaacggcagaccggcagcactttccaactctatttctctcagccttagaacggtctaccaatctgaaggtgtgttaggtttctttagtggcgttggccctagattcgtctggacaagtgttcagagcagtataatgttgcttttatatcaaatgaccttacgcggattaagtaacgcatttccaacggactga

SEQ ID NO: 8687 - DNA, 2310 bp, Saccharomyces cerevisiae
atgtctctcagaataaaagcacttgatgcatcagtggttaacaaaattgctgcaggtgagatcataatatcccccgtaaatgctctcaaagaaatgatggagaattccatcgatgcgaatgctacaatgattgatattctagtcaaggaaggaggaattaaggtacttcaaataacagataacggatctggaattaataaagcagacctgccaatcttatgtgagcgattcacgacgtccaaattacaaaaattcgaagatttgagtcagattcaaacgtatggattccgaggagaagctttagccagtatctcacatgtggcaagagtcacagtaacgacaaaagttaaagaagacagatgtgcatggagagtttcatatgcagaaggtaagatgttggaaagccccaaacctgttgctggaaaagacggtaccacgatcctagttgaagacctttttttcaatattccttctagattaagggccttgaggtcccataatgatgaatactctaaaatattagatgttgtcgggcgatacgccattcattccaaggacattggcttttcttgtaaaaagttcggagactctaattattctttatcagttaaaccttcatataccgtccaggataggattaggactgtgttcaataaatctgtggcttcgaatttaattacttttcatatcagcaaagtagaagatttaaacctggaaagcgttgatggaaaggtgtgtaatttgaatttcatatccaaaaagtccatttcaccaatttttttcattaataatagactagtgacatgtgatcttctaagaagagctttgaacagcgtttactccaattatctgccaaagggcaacagaccttttatttatttgggaattgttatagatccggcggctgttgatgttaacgttcacccgacaaagagagaggttcgtttcctgagccaagatgagatcatagagaaaatcgccaatcaattgcacgccgaattatctgccattgatacttcacgtactttcaaggcttcttcaatttcaacaaacaagccagagtcattgataccatttaatgacaccatagaaagtgataggaataggaagagtctccgacaagcccaagtggtagagaattcatatacgacagccaatagtcaactaaggaaagcgaaaagacaagagaataaactagtcagaatagatgcttcacaagctaaaattacgtcatttttatcctcaagtcaacagttcaactttgaaggatcgtctacaaagcgacaactgagtgaacccaaggtaacaaatgtaagccactcccaagaggcagaaaagctgacactaaatgaaagcgaacaaccgcgtgatgccaatacaatcaatgataatgacttgaaggatcaacctaagaagaaacaaaagttgggggattataaagttccaagcattgccgatgacgaaaagaatgcactcccgatttcaaaagacgggtatattagagtacctaaggagcgagttaatgttaatcttacgagtatcaagaaattgcgtgaaaaagtagatgattcgatacatcgagaactaacagacatttttgcaaatttgaattacgttggggttgtagatgaggaaagaagattagccgctattcagcatgacttaaagctttttttaatagattacggatctgtgtgctatgagctattctatcagattggtttgacagacttcgcaaactttggtaagataaacctacagagtacaaatgtgtcagatgatatagttttgtataatctcctatcagaatttgacgagttaaatgacgatgcttccaaagaaaaaataattagtaaaatatgggacatgagcagtatgctaaatgagtactattccatagaattggtgaatgatggtctagataatgacttaaagtctgtgaagctaaaatctctaccactacttttaaaaggctacattccatctctggtcaagttaccattttttatatatcgcctgggtaaagaagttgattgggaggatgaacaagagtgtctagatggtattttaagagagattgcattactctatatacctgatatggttccgaaagtcgatacatctgatgcatcgttgtcagaagacgaaaaagcccagtttataaatagaaaggaacacatatcctcattactagaacacgttctcttcccttgtatcaaacgaaggttcctggcccctagacacattctcaaggatgtcgtggaaatagccaaccttccagatctatacaaagtttttgagaggtgttaa

SEQ ID NO: 8688 - DNA, 2310 bp, Artificial Sequence
  Description of Artificial Sequence: Synthetic polynucleotide
atgtctctcagaataaaagcacttgatgcatctgtggttaacaaaattgctgcaggtgagatcataatatcccccgtaaatgctctcaaagaaatgatggagaattccatcgatgcgaatgctacaatgattgatattttagtcaaggaaggaggaattaaggtacttcaaataacagataacggatctggaattaataaagcagacttaccaatcttatgtgagagattcacgacgtccaaattacaaaaattcgaagatttgagtcagattcaaacgtatggattcagaggagaagctttagccagtatctctcatgtggcaagagtcacagtaacgacaaaagttaaagaagacagatgtgcatggagagtttcttatgcagaaggtaagatgttggaaagccccaaacctgttgctggaaaagacggtaccacgatcttggttgaagacctttttttcaatattccttctagattaagggccttgaggtcccataatgatgaatactctaaaatattagatgttgtcgggcgttacgccattcattccaaggacattggcttttcttgtaaaaagttcggagactctaattattctttaagtgttaaaccttcttataccgtccaggataggattaggactgtgttcaataaatctgtggcttctaatttaattacttttcatatcagcaaagtagaagatttaaacttggaaagcgttgatggaaaggtgtgtaatttgaatttcatatccaaaaagtccatttctccaatttttttcattaataatagattagtgacatgtgatcttttgagaagagctttgaacagcgtttactccaattatttaccaaagggcaacagaccttttatttatttgggaattgttatagatccggcggctgttgatgttaacgttcacccgacaaagagagaggttcgtttcttgagccaagatgagatcatagagaaaatcgccaatcaattgcacgccgaattatctgccattgatacttctcgtactttcaaggcttcttccatttctacaaacaagccagagtctttgataccatttaatgacaccatagaaagtgataggaataggaagagtctcagacaagcccaagtggtagagaattcttatacgacagccaatagtcaattaaggaaagcgaaaagacaagagaataaattggtcagaatagatgcttctcaagctaaaattacgtcttttttatcctccagtcaacagttcaactttgaaggatcttctacaaagagacaattgagtgaacccaaggtaacaaatgtaagccactcccaagaggcagaaaagttaacattaaatgaaagcgaacaaccgcgtgatgccaatacaatcaatgataatgacttgaaggatcaacctaagaagaaacaaaagttgggggattataaagttccaagcattgccgatgacgaaaagaatgcactcccgatttccaaagacgggtatattagagtacctaaggagagagttaatgttaatcttacgagtatcaagaaattgcgtgaaaaagtagatgattctatacatagagaattaacagacatttttgcaaatttgaattacgttggggttgtagatgaggaaagaagattagccgctattcagcatgacttaaagctttttttaatagattacggatctgtgtgctatgagcttttctatcagattggtttgacagacttcgcaaactttggtaagataaacttacagagtacaaatgtgtctgatgatatagttttgtataatctcttgagtgaatttgacgagttaaatgacgatgcttccaaagaaaaaataattagtaaaatatgggacatgagcagtatgttgaatgagtactattccatagaattggtgaatgatggtttggataatgacttaaagtctgtgaagttgaaatctttaccattacttttaaaaggctacattccatctttggtcaagttaccattttttatatatcgcttgggtaaagaagttgattgggaggatgaacaagagtgtttggatggtattttaagagagattgcattactctatatacctgatatggttccgaaagtcgatacatctgatgcaagtttgagtgaagacgaaaaagcccagtttataaatagaaaggaacacatatcctctttattggaacacgttctcttcccttgtatcaaaagaaggttcttggcccctagacacattctcaaggatgtcgtggaaatagccaaccttccagatttatacaaagtttttgagaggtgttga

SEQ ID NO: 8689 - DNA, 1827 bp, Saccharomyces cerevisiae
atgtttaaccgtaccactcaactgaaatccaagcatccctgttccgtgtgtacgaggcgaaaagtcaaatgtgatcgtatgataccgtgtggaaactgcaggaagagaggacaggactccgaatgtatgaaatcaacaaaactaataacggcttcatcttccaaggaatatctccctgacctattgttattctggcaaaattatgaatattggataacgaatattgggctgtacaaaacaaaacaaagagatcttactagaacaccagctaatttggatactgatactgaagaatgtatgttttggatgaattatcttcaaaaagaccaatcattccaattgatgaactttgctatggaaaacttaggtgctttgtattttggttccattggagatatcagtgaattatatttgagggtggaacagtactgggatagaagggcagacaagaatcacagtgtagacggcaaatactgggacgcactaatatggtctgtctttaccatgtgcatttattatatgccagtcgagaagttagcagaaatattttcagtatatcctctccatgaatatttgggtagcaacaaaaggctcaattgggaagatggtatgcaattagtcatgtgccaaaattttgcacgctgctcattattccaattgaaacaatgtgatttcatggcgcatcccgatataaggctcgttcaagcatatctgattttagccactacaactttcccctacgatgaaccgttgttggcaaattcgctcctaacacagtgcatccatacctttaaaaattttcatgtggatgactttagacctttacttaatgatgaccccgttgaaagcatcgctaaagtaaccttgggaagaatattctatcgcctgtgtggatgcgattatcttcaatcggggccacgcaaaccaattgcacttcatacagaagtatcctccctattacaacatgcagcatatttgcaggatttgcctaacgttgatgtttacagggaagaaaacagcacagaggtcttgtattggaaaatcatctcattagacagagatttagatcaatacttgaacaagagttctaaacctcccttaaaaacattggatgctataaggagggagctcgatatttttcaatacaaagtagattcgttggaagaagattttagatcaaataacagcagatttcaaaaatttattgcactttttcaaatatctactgtttcctggaaattgtttaagatgtatctcatttattatgataccgcagattcactactaaaggttatacattattctaaggtaatcattagtcttattgttaataacttccatgcaaaaagtgagtttttcaacagacatccgatggtgatgcaaaccattacgcgcgtggtctctttcatctccttttaccaaatttttgtggaatcggctgctgtcaaacaacttttagtagatctaactgaacttactgcaaatctgcccacaatattcggttcaaaactagataaactagtttacttgaccgaaaggctcagtaaattaaaacttttatgggacaaggtacagcttctagattcaggtgattcgttttaccatcctgttttcaaaatactacaaaatgatattaagataattgagttgaaaaatgatgaaatgttttctctcataaaaggactcgggtctttggtaccgttgaataagcttagacaagaatcgttgcttgaggaagaggacgaaaacaatacggaaccaagtgacttcagaactattgtagaagagtttcaatccgaatataacatttctgacatactttcctaa

SEQ ID NO: 8690 - DNA, 1827 bp, Artificial Sequence
  Description of Artificial Sequence: Synthetic polynucleotide
atgtttaaccgtaccactcaattgaaatccaagcatccctgttccgtgtgtacgaggagaaaagtcaaatgtgatcgtatgataccgtgtggaaactgcaggaagagaggacaggactccgaatgtatgaaatctacaaaattgataacggcttcttcttccaaggaatatctccctgacttgttgttattctggcaaaattatgaatattggataacgaatattgggttatacaaaacaaaacaaagagatcttactagaacaccagctaatttggatactgatactgaagaatgtatgttttggatgaattatcttcaaaaagaccaaagtttccaattgatgaactttgctatggaaaacttaggtgctttgtattttggttccattggagatatcagtgaattatatttgagggtggaacagtactgggatagaagggcagacaagaatcacagtgtagacggcaaatactgggacgcattaatatggtctgtctttaccatgtgcatttattatatgccagtcgagaagttagcagaaatatttagcgtatatcctctccatgaatatttgggtagcaacaaaaggctcaattgggaagatggtatgcaattagtcatgtgccaaaattttgcacgctgctctttattccaattgaaacaatgtgatttcatggcgcatcccgatataaggctcgttcaagcatatttgattttagccactacaactttcccctacgatgaaccgttgttggcaaatagtctccttacacagtgcatccatacctttaaaaattttcatgtggatgactttagacctttacttaatgatgaccccgttgaaagcatcgctaaagtaaccttgggaagaatattctatcgcttatgtggatgcgattatcttcaaagtgggccacgcaaaccaattgcacttcatacagaagtatcctccttattacaacatgcagcatatttgcaggatttgcctaacgttgatgtttacagggaagaaaacagcacagaggtcttgtattggaaaatcatctctttagacagagatttagatcaatacttgaacaagagttctaaacctcccttaaaaacattggatgctataaggagggagctcgatatttttcaatacaaagtagattctttggaagaagattttagatctaataacagcagatttcaaaaatttattgcactttttcaaatatctactgtttcctggaaattgtttaagatgtatctcatttattatgataccgcagattctttattgaaggttatacattattctaaggtaatcattagtcttattgttaataacttccatgcaaaaagtgagtttttcaacagacatccgatggtgatgcaaaccattacgcgcgtggtctctttcatctccttttaccaaatttttgtggaatctgctgctgtcaaacaacttttagtagatttgactgaacttactgcaaatttgcccacaatattcggttccaaattggataaattggtttacttgaccgaaaggctcagtaaattaaaacttttatgggacaaggtacagcttttagattctggtgattctttttaccatcctgttttcaaaatattgcaaaatgatattaagataattgagttgaaaaatgatgaaatgttttctctcataaaaggactcgggtctttggtaccgttgaataagcttagacaagaatctttgcttgaggaagaggacgaaaacaatacggaaccaagtgacttcagaactattgtagaagagtttcaatccgaatataacatttctgacatactttcctga

SEQ ID NO: 8691 - DNA, 1521 bp, Saccharomyces cerevisiae
atgcctaccttgtatactgatatcgaaatcccacaattgaaaatctctttaaagcaaccgctagggttgtttatcaacaatgagttttgtccatcatcagatggaaagaccatcgaaactgtgaacccagctactggcgaaccgataacatccttccaagcagctaacgaaaaggatgtagacaaagctgtgaaagctgccagggctgcttttgataacgtttggtcgaagacatcttctgagcaacgtggtatttatctttcaaacttattaaaacttattgaggaggagcaagacacacttgccgcattagagactttagacgctggtaagcctttccattccaatgctaaacaagacttagcccagattatagaacttacaagatactatgcgggggcggtcgacaagttcaatatgggtgaaaccattccattgacttttaacaagtttgcatatactctaaaagttccttttggcgttgttgctcaaatcgttccatggaattatcctctagctatggcttgtagaaaaatgcaaggtgccttagcggccggtaacacggttatcatcaaacctgctgaaaatacctctctatctctactttattttgctactttaattaaaaaagcaggttttccacctggtgttgtcaatgtcattcctggttatggttccgttgtggggaaagctttaggaacccacatggatatcgacaaaatatcttttacgggaagtactaaggttggcggctcagtattggaagcttccggccaatcgaaccttaaggatatcacactagaatgcggtggtaagtctcctgctcttgtatttgaagatgcagaccttgataaggctatagaatgggtagcaaatggtattttttttaattcgggacagatctgcactgcaaactcaagagtttatgttcaaagttcgatctacgacaagtttgttgaaaagtttaaagaaactgcaaagaaggagtgggatgttgcaggaaaatttgatccgtttgatgagaaatgcatcgttggtccagttatatcaagtacacagtatgaccgcatcaaaagttacatagaacgtggtaaaaaggaggaaaagttggacatgttccagacctctgaatttcctattggtggagctaaaggctacttcattcccccaaccatcttcactgatgtaccagaaacatctaagttgctgcgtgatgaaatatttggcccggttgtggttgttagcaagttcacaaattatgatgacgctctgaagctggctaatgatacttgctacgggctcgcctctgcggtcttcaccaaagatgtcaagaaagcgcacatgtttgctcgcgatattaaagcaggaactgtttggatcaatcaaaccaatcaagaagaagctaaagttccttttggcggatttaagatgagtggtattggtagagaatcaggcgacaccggcgttgataactatttacaaataaaatcagtccatgtggatctttcattggataaataa

SEQ ID NO: 8692 - DNA, 1521 bp, Artificial Sequence
  Description of Artificial Sequence: Synthetic polynucleotide
atgcctaccttgtatactgatatcgaaatcccacaattgaaaatctctttaaagcaaccgttagggttgtttatcaacaatgagttttgtccatcttctgatggaaagaccatcgaaactgtgaacccagctactggcgaaccgataacatccttccaagcagctaacgaaaaggatgtagacaaagctgtgaaagctgccagggctgcttttgataacgtttggtccaagacatcttctgagcaacgtggtatttatctttccaacttattaaaacttattgaggaggagcaagacacacttgccgcattagagactttagacgctggtaagcctttccattccaatgctaaacaagacttagcccagattatagaacttacaagatactatgcgggggcggtcgacaagttcaatatgggtgaaaccattccattgacttttaacaagtttgcatatactttgaaagttccttttggcgttgttgctcaaatcgttccatggaattatcctttggctatggcttgtagaaaaatgcaaggtgccttagcggccggtaacacggttatcatcaaacctgctgaaaatacctctttatctttactttattttgctactttaattaaaaaagcaggttttccacctggtgttgtcaatgtcattcctggttatggttccgttgtggggaaagctttaggaacccacatggatatcgacaaaatatcttttacgggaagtactaaggttggcggctctgtattggaagcttccggccaaagtaaccttaaggatatcacattagaatgcggtggtaagtctcctgctcttgtatttgaagatgcagaccttgataaggctatagaatgggtagcaaatggtattttttttaattctggacagatctgcactgcaaactctagagtttatgttcaaagttctatctacgacaagtttgttgaaaagtttaaagaaactgcaaagaaggagtgggatgttgcaggaaaatttgatccgtttgatgagaaatgcatcgttggtccagttatatctagtacacagtatgaccgcatcaaaagttacatagaacgtggtaaaaaggaggaaaagttggacatgttccagacctctgaatttcctattggtggagctaaaggctacttcattcccccaaccatcttcactgatgtaccagaaacatctaagttgttacgtgatgaaatatttggcccggttgtggttgttagcaagttcacaaattatgatgacgctttgaagttggctaatgatacttgctacgggctcgcctctgcggtcttcaccaaagatgtcaagaaagcgcacatgtttgctcgcgatattaaagcaggaactgtttggatcaatcaaaccaatcaagaagaagctaaagttccttttggcggatttaagatgagtggtattggtagagaaagtggcgacaccggcgttgataactatttacaaataaaatctgtccatgtggatctttctttggataaatga

SEQ ID NO: 8693 - DNA, 1521 bp, Saccharomyces cerevisiae
atgcctaccttgtatactgatatcgaaatcccacaattgaaaatctctttaaagcaaccgctagggttgtttatcaacaatgagttttgtccatcatcagatggaaagaccatcgaaactgtgaacccagctactggcgaaccgataacatccttccaagcagctaacgaaaaggatgtagacaaagctgtgaaagctgccagggctgcttttgataacgtttggtcgaagacatcttctgagcaacgtggtatttatctttcaaacttattaaaacttattgaggaggagcaagacacacttgccgcattagagactttagacgctggaaagccttaccattcaaatgccaaaggtgatttggcacaaattttacagcttaccagatattttgctgggtccgctgataagtttgacaaaggtgcaaccataccattgacttttaacaagtttgcatatactctaaaagttccttttggcgttgttgctcaaatcgttccatggaattatcctctagctatggcttgttggaaattgcaaggtgccttagcagccggtaacacggttatcatcaaacctgctgagaatacctctctatctctactttattttgctactttaattaaaaaagcaggttttccacctggtgttgtcaatatcgttcctggttatggatcacttgtaggccaagccctagcatctcacatggatatcgacaaaatatcttttacgggaagcaccaaggtcggtggatttgtgttggaagcttccggccaatcgaaccttaaagacgttacactagaatgcggtggtaagtctcctgctctcgtatttgaagatgcagaccttgataaggctatcgattggatagcagctggcattttctacaattcaggacagaattgtaccgcaaactcaagagtttatgttcaaagttcgatctacgacaagtttgttgaaaagtttaaagaaactgcaaagaaggagtgggatgttgcaggaaaatttgatccgtttgatgagaaatgcatcgttggtccagttatatcaagtacacagtatgaccgcatcaaaagttacatagaacgtggtaaaagggaggaaaagttggacatgttccagacctctgaatttcctattggtggagctaaaggctacttcattcccccaaccatcttcactgatgtcccgcaaacatcgaaactgttacaggatgagatatttggcccggttgtggttgttagcaagttcacaaattatgatgacgctctgaagctggctaatgatacttgctacgggctcgcctctgcggtcttcacaaaagatgtcaagaaagcgcacatgtttgctcgcgatattaaagcaggaactgtttggatcaactcatctaacgatgaagatgttaccgttccttttggcgggtttaaaatgagtggtattggtagagaactggggcaaagtggtgttgatacctatcttcaaacaaaagcagttcacataaatctctctttggacaactaa

SEQ ID NO: 8694 - DNA, 1521 bp, Artificial Sequence
  Description of Artificial Sequence: Synthetic polynucleotide
atgcctaccttgtatactgatatcgaaatcccacaattgaaaatctctttaaagcaaccgttagggttgtttatcaacaatgagttttgtccatcttctgatggaaagaccatcgaaactgtgaacccagctactggcgaaccgataacatccttccaagcagctaacgaaaaggatgtagacaaagctgtgaaagctgccagggctgcttttgataacgtttggtccaagacatcttctgagcaacgtggtatttatctttccaacttattaaaacttattgaggaggagcaagacacacttgccgcattagagactttagacgctggaaagccttaccattctaatgccaaaggtgatttggcacaaattttacagcttaccagatattttgctgggtccgctgataagtttgacaaaggtgcaaccataccattgacttttaacaagtttgcatatactttgaaagttccttttggcgttgttgctcaaatcgttccatggaattatcctttggctatggcttgttggaaattgcaaggtgccttagcagccggtaacacggttatcatcaaacctgctgagaatacctctttatctttactttattttgctactttaattaaaaaagcaggttttccacctggtgttgtcaatatcgttcctggttatggatctcttgtaggccaagccttggcatctcacatggatatcgacaaaatatcttttacgggaagcaccaaggtcggtggatttgtgttggaagcttccggccaaagtaaccttaaagacgttacattagaatgcggtggtaagtctcctgctctcgtatttgaagatgcagaccttgataaggctatcgattggatagcagctggcattttctacaattctggacagaattgtaccgcaaactctagagtttatgttcaaagttctatctacgacaagtttgttgaaaagtttaaagaaactgcaaagaaggagtgggatgttgcaggaaaatttgatccgtttgatgagaaatgcatcgttggtccagttatatctagtacacagtatgaccgcatcaaaagttacatagaacgtggtaaaagggaggaaaagttggacatgttccagacctctgaatttcctattggtggagctaaaggctacttcattcccccaaccatcttcactgatgtcccgcaaacaagtaaattattacaggatgagatatttggcccggttgtggttgttagcaagttcacaaattatgatgacgctttgaagttggctaatgatacttgctacgggctcgcctctgcggtcttcacaaaagatgtcaagaaagcgcacatgtttgctcgcgatattaaagcaggaactgtttggatcaactcttctaacgatgaagatgttaccgttccttttggcgggtttaaaatgagtggtattggtagagaattggggcaaagtggtgttgatacctatcttcaaacaaaagcagttcacataaatctctctttggacaactga

SEQ ID NO: 8695 - DNA, 1653 bp, Saccharomyces cerevisiae
atgtcattcaagtttctgatagaatcgctgcttctcggttcgataagcggacaaatacggtgtggtagatcttcggtgatcccccgtggcgatgtatcttatgggggagacgatactgacgaacttaacatggatataatgttgtttgcgtttggaaccttaatcgtggtctacatcgtcatctgtatcgtttatttttttacaaaacagatagctacgcggcttataactgcatattataatgagcatggccctggccaaagaatatctttattcagcgattatgacgaaaataatgcacacgttcatagcagaagattaatggaaaacatgagtttaaggtggcccaacaatcttgacgatgctgatgaagtaagagataagctggcacagttgtcacctgaagagcagttttattataagcaaggtgaggagtatatcaagcagaacccaccatttctgcttaaccagggacttttacaacagtccgaagatagcaatccagacaccacccgtgaagaccctattatgaacgagcaaacaaggcaatatattcaagaagagggggcttatgcatgggagtttagcccaaatcctgatatgccaaaccatactgtcatagtggaaaataaaacagaggtttcttttctaaattataattatgatgcttctatatccacaaatctacccattccgtgtataaataaagtatattattgtgaattcaagatatttgaaacggatggcccactaaacagtgatgaaaatgtatcgaaaggtgtcatctcatttggtctttccacacagccttatccatatttcaggttaccgggaagacaccaccattcgatagcatacgattctaacggcgccagaagatttaatgactccttcaaactaaatgagcaattaagaacgttatttccacagtgtgaaaagggagacattgttggcattggctataggtcacgtagtggaacagtatttttcaccaggaacggaaaaaaactaaatgaaaaatctgttggtggtcatatccgcggctggaaattccaatacctatacccgatcattggctccaacgtaccttgtcaaattcatgtgaatttcggcacttatggctttgtttatatagaagcaaacgttaaaaaatggggatacgcaaagtcaaacggcattaaattacctcctccttcttacgaagactacggtaaagataccctattagaaagcggtggtgaagacaatgatttcgacgaagatttttcagacggtgatagcgacaatattgcggctggtagtactacaaatctcaatgatgatataattataagaaacggtgaaatattaccgccaccacctggatttgaattcactatgtcccctcccactggaaagaagatcatcaatgaggaaattaatctagattccttacctatgctaccaccaagttactcggacgatgaacatcattcgaaaaatgataaatcagcaataagcggacgaattattggaacgagcagaaatttaattactgatgaagcatctttcgatagtgttgataatgataacgaagatgaaaatgatcacgagagagatcccgaacaattttcagaatttgatgattacgaaagcaggatgcatggcatataa

SEQ ID NO: 8696 - DNA, 1653 bp, Artificial Sequence
  Description of Artificial Sequence: Synthetic polynucleotide
atgagtttcaagtttttaatagaatctttacttctcggttccataagcggacaaataagatgtggtagatcttctgtgatcccccgtggcgatgtatcttatgggggagacgatactgacgaacttaacatggatataatgttgtttgcgtttggaaccttaatcgtggtctacatcgtcatctgtatcgtttatttttttacaaaacagatagctacgagacttataactgcatattataatgagcatggccctggccaaagaatatctttattcagcgattatgacgaaaataatgcacacgttcatagcagaagattaatggaaaacatgagtttaaggtggcccaacaatcttgacgatgctgatgaagtaagagataagttagcacagttgtctcctgaagagcagttttattataagcaaggtgaggagtatatcaagcagaacccaccatttttacttaaccagggacttttacaacagtccgaagatagcaatccagacaccacccgtgaagaccctattatgaacgagcaaacaaggcaatatattcaagaagagggggcttatgcatgggagtttagcccaaatcctgatatgccaaaccatactgtcatagtggaaaataaaacagaggtttcttttttgaattataattatgatgcttctatatccacaaatttgcccattccgtgtataaataaagtatattattgtgaattcaagatatttgaaacggatggcccattgaacagtgatgaaaatgtatccaaaggtgtcatctcttttggtctttccacacagccttatccatatttcaggttaccgggaagacaccaccattccatagcatacgattctaacggcgccagaagatttaatgactccttcaaattgaatgagcaattaagaacgttatttccacagtgtgaaaagggagacattgttggcattggctataggtctcgtagtggaacagtatttttcaccaggaacggaaaaaaattgaatgaaaaatctgttggtggtcatatccgcggctggaaattccaatacttgtacccgatcattggctccaacgtaccttgtcaaattcatgtgaatttcggcacttatggctttgtttatatagaagcaaacgttaaaaaatggggatacgcaaagtctaacggcattaaattacctcctccttcttacgaagactacggtaaagataccttattagaaagcggtggtgaagacaatgatttcgacgaagatttttctgacggtgatagcgacaatattgcggctggtagtactacaaatctcaatgatgatataattataagaaacggtgaaatattaccgccaccacctggatttgaattcactatgtcccctcccactggaaagaagatcatcaatgaggaaattaatttggattccttacctatgcttccaccaagttacagtgacgatgaacatcattctaaaaatgataaatctgcaataagcggaagaattattggaacgagcagaaatttaattactgatgaagcatctttcgatagtgttgataatgataacgaagatgaaaatgatcacgagagagatcccgaacaattttctgaatttgatgattacgaaagcaggatgcatggcatatga

SEQ ID NO: 8697 - DNA, 2160 bp, Saccharomyces cerevisiae
atgtctggaatgggtattgcgattctttgcatcgtacgtacaaagatttataggataaccatcagcttcgattattctacactgatgagccctttcttcttattcttaatgatgcccactacattaaaggatgggtacaggatgaatagtcaagtaaatgaagatgctataggtatcaatcttgacctctcactgcccactcacatttcgcctacgactggttcagagagcgccagtggcagtaacgccagtacacttcgcaacgatggaaatgcactagatggaggtcttttgaggacttcagcagcgatttcagcacccacaggtaccagtcaaccaacagaaactattggtgaaaaactgagtaatgaagagcgggtgaactcgaatgtttccgcttcgaactcgacaacggcgggtacagggcgtatgttaagccaatccttgactaatgattcaccgtcgaacgaaatatcgacggatcagttgaagatttttcaaagaatggacgaaatgagtgcccgaatgattgagatggaggaaagcttcaacaagttatctaataagatcgcggaacagaatacaatggttttaaacctaaaacaagataactataaagttatgaacaaattgaatatattacttaagttggttgcgcagccaagcgcgcgcccaagcacaaacaatgcccaaaataagcttgctatcgaattgctaaattcgatatcagccgttagtagtgcttacttgcagaaaatgcagaataatggctctggtagacagcatactgctgatttatgtacaggagattccaacacccattctggtatcaaccagcatcggactacgaatggaaccatagatgtgaatacgaatactgcacagctaaacaaccaattttctaacgcactaaatactatcttacctgatcagcagcataatcgaaataatgtttcccaaaatataaaccaatcgctccctaaccgacaacttggtcctgttataaacacacaagccaatcagaaccagtcgcaggttttaattcataacacaaatacacatcagcaggtaaatcgctcgcctattagtttcccgaacgcttcaactgacaagccattcaagttgaacccaaatgggattaaacggcgcagaagaaatacgcaaagtaacaacaatgcgagcacaaatgaccatgctagtgctgcacaaaagcccatatcagccctatctccattaacgaattctcataattctacaactagcatgaattataccaattcttccattcattcaggcgtcaccagtgcttcaaattcatttcatgacttaaattcattgaataactttggcacgacaacagctttaagtttgcccagcttagccctagataacgcttcttttcccccaaatcaaaatgttataccccctattataaataatacccagcagcctctatcattttcccaattgatcaatcaggatagcacgacatctgaattgttaccgagtggtaagtcaggggtgaacacgaatattgtaaatagaaacagagcttctactctaccgtcgtacccaaaaccaatgacagtgaaaagtaatgtcgacgatgatggctatcaagaggatgatgatgatgacggtgatgacgaaggtgatggaagggataatgaagaagacagcactgctgaggaagatgaagtagatgatgaaatcgaaacagatatgaagaacgcttcgattaacaagcggaggaggagcttgcatcataaaaaaagtaactctttaaacggtagaagaaagcttcacggcgagtcggctactaagcccaacataaactctgatttacattataggatattgaaggctcccactgacgtaaagactatatgggaagagtatgatactggaataagaggaaagccatcgatcaagcatcttgaggccaagtatggtaacaagtggaggctcaataaaaataagaagaccttttcaaggcgaaaaagattgtacaagttcattctgaacggtatggagagaggtaaaacggcacaagagatgatagaaaccttagagaacaaaaggctatataaagatgatgaggatggcgaagtaaagaaaagaaccattggctggttgcaagagagccttgctggaatatag

SEQ ID NO: 8698 - DNA, 2160 bp, Artificial Sequence
  Description of Artificial Sequence: Synthetic polynucleotide
atgtctggaatgggtattgcgattctttgcatcgtacgtacaaagatttataggataaccatcagcttcgattattctacattgatgagccctttcttcttattcttaatgatgcccactacattaaaggatgggtacaggatgaatagtcaagtaaatgaagatgctataggtatcaatcttgacctctctttacccactcacatttctcctacgactggttctgagagcgccagtggcagtaacgccagtacacttcgcaacgatggaaatgcattggatggaggtcttttgaggacttctgcagcgatttctgcacccacaggtaccagtcaaccaacagaaactattggtgaaaaattaagtaatgaagagagagtgaacagtaatgtttccgcttctaactccacaacggcgggtacagggcgtatgttaagccaatccttgactaatgattctccgtctaacgaaatatctacggatcagttgaagatttttcaaagaatggacgaaatgagtgccagaatgattgagatggaggaaagcttcaacaagttatctaataagatcgcggaacagaatacaatggttttaaacttgaaacaagataactataaagttatgaacaaattgaatatattacttaagttggttgcgcagccaagcgcgcgcccaagcacaaacaatgcccaaaataagcttgctatcgaattgttgaattctatatctgccgttagtagtgcttacttgcagaaaatgcagaataatggctctggtagacagcatactgctgatttatgtacaggagattccaacacccattctggtatcaaccagcatagaactacgaatggaaccatagatgtgaatacgaatactgcacagttgaacaaccaattttctaacgcattgaatactatcttacctgatcagcagcataatagaaataatgtttcccaaaatataaaccaatctctccctaacagacaacttggtcctgttataaacacacaagccaatcagaaccagtctcaggttttaattcataacacaaatacacatcagcaggtaaatcgcagtcctattagtttcccgaacgcttccactgacaagccattcaagttgaacccaaatgggattaaaagacgcagaagaaatacgcaaagtaacaacaatgcgagcacaaatgaccatgctagtgctgcacaaaagcccatatctgccttatctccattaacgaattctcataattctacaactagcatgaattataccaattcttccattcattctggcgtcaccagtgcttctaattcttttcatgacttaaattctttgaataactttggcacgacaacagctttaagtttgcccagcttagccttggataacgcttcttttcccccaaatcaaaatgttataccccctattataaataatacccagcagcctttatctttttcccaattgatcaatcaggatagcacgacatctgaattgttaccgagtggtaagagtggggtgaacacgaatattgtaaatagaaacagagcttctactttaccgagctacccaaaaccaatgacagtgaaaagtaatgtcgacgatgatggctatcaagaggatgatgatgatgacggtgatgacgaaggtgatggaagggataatgaagaagacagcactgctgaggaagatgaagtagatgatgaaatcgaaacagatatgaagaacgcttccattaacaagagaaggaggagcttgcatcataaaaaaagtaactctttaaacggtagaagaaagcttcacggcgagtctgctactaagcccaacataaactctgatttacattataggatattgaaggctcccactgacgtaaagactatatgggaagagtatgatactggaataagaggaaagccatccatcaagcatcttgaggccaagtatggtaacaagtggaggctcaataaaaataagaagacctttagcaggagaaaaagattgtacaagttcattttgaacggtatggagagaggtaaaacggcacaagagatgatagaaaccttagagaacaaaaggttatataaagatgatgaggatggcgaagtaaagaaaagaaccattggctggttgcaagagagccttgctggaatatga

SEQ ID NO: 8699 - DNA, 1293 bp, Saccharomyces cerevisiae
atgggtttatttgataaagtgaagcaatttgctaacagcaataataacaacaatgattctggcaataacaatcaaggcgattatgttaccaaagctgagaatatgatcggcgaagatagagtcaatcaattcaaaagcaaaatcggagaggacagatttgataagatggagtccaaggttcgtcaacaattttctaatacctctataaatgacaacgactccaacaacaacgactcatatggttctaataacaacgattcatatggttctaacaacaatgattcatatggctctaacaacaatgattcatatggctccaacaacaatgattcatatggctctaacaacgatgattcctacggttcttccaacaagaagaagagctcttatggttctaacaatgacgattcgtacggctccagcaacaacaatgactcttacggttccaacaacaatgactcttacggttccaacaacaatgactcttacggttccaacaatgacgactcttacggttcgtcaaacaagaataagagctcttacggttccaacaatgacgattcttatggctctaacaatgatgattcatatggttcttccaacaagaagaagagttcttatggttccagcaacaacgattcgtatggttctaacaacgatgattcatatggttctaacaacaatgattcatatggctctaacaacgatgattcctacggttcttccaacaagaagaagagctcttatggttctaacaatgacgattcgtacggctccagcaacaacaatgactcttacggttccaacaatgacgactcttacggttcgtcaaacaagaataagagctcttacggttcttctagcaacgatgattcttacggatcttccaataacgacgactcttacggttcttccaacaagaagaagagttcttatggttccaacaatgacgattcttatggctctaacaatgatgattcatatggttcttccaacaagaagaagagttcttatggttccagcaacaacgattcgtatggttctaacaacgatgattcctacggttcttctaacaaaaagaagagttcttatggttccaacaacgatgattcatacggctccagcaacaacaatgactcttacggttccaacaatgacgactcttacggttcctctaatagaaacaagaactcctatgggtcttccaactacggttcatccaacaatgatgactcttatggttcatctaatagaggcggtcgtaatcaatacggtggtgacgacgattactaa

SEQ ID NO: 8700 - DNA, 1293 bp, Artificial Sequence
  Description of Artificial Sequence: Synthetic polynucleotide
atgggtttatttgataaagtgaagcaatttgctaacagcaataataacaacaatgattctggcaataacaatcaaggcgattatgttaccaaagctgagaatatgatcggcgaagatagagtcaatcaattcaaaagcaaaatcggagaggacagatttgataagatggagtccaaggttcgtcaacaattttctaatacctctataaatgacaacgactccaacaacaacgactcttatggttctaataacaacgattcttatggttctaacaacaatgattcttatggctctaacaacaatgattcttatggctccaacaacaatgattcttatggctctaacaacgatgattcctacggttcttccaacaagaagaagagctcttatggttctaacaatgacgattcttacggctccagcaacaacaatgactcttacggttccaacaacaatgactcttacggttccaacaacaatgactcttacggttccaacaatgacgactcttacggttcttccaacaagaataagagctcttacggttccaacaatgacgattcttatggctctaacaatgatgattcttatggttcttccaacaagaagaagagttcttatggttccagcaacaacgattcttatggttctaacaacgatgattcttatggttctaacaacaatgattcttatggctctaacaacgatgattcctacggttcttccaacaagaagaagagctcttatggttctaacaatgacgattcttacggctccagcaacaacaatgactcttacggttccaacaatgacgactcttacggttcttccaacaagaataagagctcttacggttcttctagcaacgatgattcttacggatcttccaataacgacgactcttacggttcttccaacaagaagaagagttcttatggttccaacaatgacgattcttatggctctaacaatgatgattcttatggttcttccaacaagaagaagagttcttatggttccagcaacaacgattcttatggttctaacaacgatgattcctacggttcttctaacaaaaagaagagttcttatggttccaacaacgatgattcttacggctccagcaacaacaatgactcttacggttccaacaatgacgactcttacggttcctctaatagaaacaagaactcctatgggtcttccaactacggttcttccaacaatgatgactcttatggttcttctaatagaggcggtcgtaatcaatacggtggtgacgacgattactga

SEQ ID NO: 8701 - DNA, 207 bp, Saccharomyces cerevisiae
atgaatacagaccaacaaaaagtgagcgaaatatttcagagctcaaaggaaaaattgcagggcgatgcaaaggtagtgagtgacgcttttaagaaaatggctagtcaagacaaggacggcaagactaccgatgctgatgaaagtgaaaaacacaactatcaagagcaatacaacaagctcaaaggggcggggcataagaaggagtag

SEQ ID NO: 8702 - DNA, 207 bp, Artificial Sequence
  Description of Artificial Sequence: Synthetic polynucleotide
atgaatacagaccaacaaaaagtgagcgaaatatttcagagctctaaggaaaaattgcagggcgatgcaaaggtagtgagtgacgcttttaagaaaatggctagtcaagacaaggacggcaagactaccgatgctgatgaaagtgaaaaacacaactatcaagagcaatacaacaagctcaaaggggcggggcataagaaggagtga

SEQ ID NO: 8703 - DNA, 240 bp, Saccharomyces cerevisiae
atgtctaacatgatgaataagttcgctgaaaaattacaaggtaacgatgattcccatcagaagggaaagaacgccaaatcctccaacaaggaaagggatgatatgaacatggacatgggtatgggtcatgatcagtccgaagggggaatgaagatgggccatgatcaatctggaacaaagatgaacgctggcagaggaattgcgaacgattggaagacttacgaaaacatgaaaaaataa

SEQ ID NO: 8704 - DNA, 240 bp, Artificial Sequence
  Description of Artificial Sequence: Synthetic polynucleotide
atgtctaacatgatgaataagttcgctgaaaaattacaaggtaacgatgattcccatcagaagggaaagaacgccaaatcctccaacaaggaaagggatgatatgaacatggacatgggtatgggtcatgatcagtccgaagggggaatgaagatgggccatgatcaatctggaacaaagatgaacgctggcagaggaattgcgaacgattggaagacttacgaaaacatgaaaaaatga

SEQ ID NO: 8705 - DNA, 195 bp, Saccharomyces cerevisiae
atgaattgtttatgtttatgttctttatactcaaaatcaataagtgcttattttagcgaattttcttctacgaatatatataagtcatatctaagacttccatccgtgctttattacgtttgtatgatgcatacaatgatgccaaatcagcttgatgctgttggtattcagtcgtccgaaagcctgttgatgtga

SEQ ID NO: 8706 - DNA, 195 bp, Artificial Sequence
  Description of Artificial Sequence: Synthetic polynucleotide
atgaattgtttatgtttatgttctttatactctaaatctataagtgcttattttagcgaattttcttctacgaatatatataagagttatttaagacttccatccgtgctttattacgtttgtatgatgcatacaatgatgccaaatcagcttgatgctgttggtattcagtcttccgaaagccttttgatgtga

SEQ ID NO: 8707 - DNA, 4236 bp, Saccharomyces cerevisiae
atgagtgggcatgattctgttacaaaaatatctcatatcctgaatgaaccggttaacgaaaaggtaatggtacaaaacgggttccatgaaagctctaaaattgcagacatcgaattagagatacaggagcgaccttcgattaaacaatgggaatcgccgcggagtgctgtaattcctacttcaaatcataattttagcccatttctctatacgcaatttaaatctcgtggtgcagcaccgtttgcacctgaaacaataaaatctgtagatttagttgagctaccggagggtgtacccgcaagagtgtttcatgaaaagacgggtttattttatcaaatatctccacactctattccaacatttattttagccaaaaaagaactcccggaccccataaaattttatgagttagtggaagacttagggtcagtttatggatgtgttaagttgaaaattataccagatgctgacaaatttactcaactaaatgttgatgtagatcgcctctggtttaaagcaagaaaacaatttttcaattcgaatgaatttcaaagaaccaagatagttgatttttatgcgaagttgtataattttcacaataaaatcaaaaagagtactctcacaaggatcccaagtatcgataaacgcaccttggatttatatagactgaggagttgtgtgaagttgaggggaggcttcaatgctgtttgcgaaaaaaaattatgggcgcaaattggaagagaattaggttactcgggcaggattatgagttcgttatcaacttctttaagatctgcctatgcaaaaattttattagactttgacatatatgaagaagaagagcaagctgctcgtaataacgaaaaaaatgaagacatggtggaatctgaaatatttcgtcactcaaatagcagaagtagggacgaagaggagccacttcataaaaaagctaaaatacaccgcgatgtctttagagccggatcgattaatcatgaatttaaaagaatgcgggacataaagcacataaaagggtttccgacttattttaactcgttaactgagtttaaactaggctatacacagtcaacagagaccacattaccgggctatgattttactttttgggagaatggtatggaaatatacgataaaagcaaatacgaaaccaaaacctctccagtatacaatttgagacagtattacgaaaaaagtctggctgttttcactgctattgtagcgaaatttgggagtagctatcctgatttgtttgcgaaacacacaacattacctcaaaaggaattcgagaggttatactttcatttgctatcggagcactttatagatttcgaaattgacaccggtcttggactaccctgttccatgagatcaccaggaaacaactcgtccaatgaaaagtttgccattaagaatattctagaccagtggaatttagacaacattcctctcaatgaactatcgcttttacaacaccttgatctggatatggccaattttacgagaaccacttatgatattggaatgttgttttcttgtcaaggttggtctgtttcggatcattttttaccttcaattgatttcaatcatttaggttctaccaagttggtgtacagtattgcgccgaaagatatggaaaaattcgaagctttaattgctcgaggaaaaagtgaatgggatactatccaatcaaggccgcgctactccacctccgatgacgaattaaagagctttatagaaacagatttctacaagtcatttttggatgcagaacaatctgctgactattcaaacactggagataattcaaaaaattcatttccagaagataagatagcaggaaacactctacatgatggttcacaaagcgacttcatatttgagcctaatttcatcttagccaatggcataaaactttataagacgacacaggagcagggctcatacatttttaagtttccgaaagccttcacatgttctattggatcaggtttctatctatcacagaatgcaaaatttgcgccaagctcctggttgagattcagttccgaggcagcaaaatggacatctaagatggggtttcttcccggtttagatgtaaatcaattacttatcaatgccctactaaactccaataacccagttttaaggaaaaaatgccgtgatttaataagtaactacgtcgttgaggaagcggaaaacagcaaaaaattaggggagttgattggcactgtagatgtcgtttataataaattgaattatatttcagatattagtttagagtcaactggtctttcaaaaatcgttgttacacacggtgcattgcaacgtaatttatctctgaaggaattcgtggtattgctagaaaaaccagaaaacggtgctcatagtatatgtggcatcccaatacgtgatcaatctggtaatctcaatgtttgtttgcactcatactttgatagcgcaagcctaggaattgctctcgatggcttggacaagcctccgacttcttatctgcttgttcacaatgaagattttgaaaaaaagtgggacgtgttaatgacttctacttttagaaatagaactgtgccattaaatataatacagtatttgatctctcatactgatagtaatactgagtttaatcgaatgttacgctccaattttgatgattcattactacttattgagaaatgtaaaaagtttattaagaccttcgtggatgtttcctgttctgttaaagatgtagatttcggaaacggtttcaatttacgtcatctaccgcttaagttttctgacaacatggctgataatttggagagcttgtatgaaagtgtgcggaagtgctcaattgaattttcagaaaagccgacaattatcagactgtatcacgtatctcggcagtttcctatcgataatagagatattattgatggcaataatctagatttgcttaaggaattatatcagaaatcgttaaccatcccgttgaaggtttcttattggactaagttgaccagaaaaatatgtaggcttgaatggttatccgtttatgaacatatattcattgagcgatgtgatattaagaatgaagaccctgcgaaatattcacttccactgttatattcttacttcgaatttggtttgaaatattgtgattcggaagatatagataagttaggggaagtgagaaagctgattttaaaatatcaggacatgatgcagaaagttcgagtttttctaaaaaaggatccaccctcaaaaatatcgctaagtgatttagaagacgttttattagatatagaagaatatcggttacccatacaaagtagttttttcagtgagcttgattatgttattagagaaattgaaaatgcaaaaaaaatgaacgatgtgaatattctttataacactgataatattgataaaatagacgaactcatcaggaaaaatgatcctaaatttgtgaagtttgcgaaccagtttaatggttcgagattagataagagaccgctggccagtgataattcaggatcagtgaaagccaaacaggagttaaaagttttcaaattatggaaccagcacttggatcaaataatgcaaaaaaataaatttattgagatactgccgtcgatttttagatgtttagatttgaagtcagacaaatacattcctttggaaagttgttctaagcgccaaacgaaatattgcttttgtagaagggttgaagaaggtactgcaatggtcgaatgtgaaatatgcaaggagtggtatcatgtggattgtattagcaacggtgagttggttccacctgatgatccaaacgttttatttgtttgctcgatatgtacaccaccctgtatggccgttgacaatatcgaaggtgtgacttttgagcttgacgacttgaagaggatcttagtagaatctttgaagctaagtttaattccagatccccctatcttgaagaatctctttgacgtttttgcgtttgctttgaacttcaaaaatgaaatggaaaaagaactatttactaacggttatgtaaatcaattgtcctctacgcacaagatcaagtattacttgagaaagttaaaagggtcacaatgcggctttactaatctgacggatcccttaaggaaacattgtcaggtgaaagatgcagaagcaattaaatggctcacagataatggaagaatcataatcacaggaattccaaattga

SEQ ID NO: 8708 - DNA, 4236 bp, Artificial Sequence
  Description of Artificial Sequence: Synthetic polynucleotide
atgagtgggcatgattctgttacaaaaatatctcatatcttgaatgaaccggttaacgaaaaggtaatggtacaaaacgggttccatgaaagctctaaaattgcagacatcgaattagagatacaggagagaccttctattaaacaatgggaatctccgaggagtgctgtaattcctacttccaatcataattttagcccatttctctatacgcaatttaaatctcgtggtgcagcaccgtttgcacctgaaacaataaaatctgtagatttagttgagttaccggagggtgtacccgcaagagtgtttcatgaaaagacgggtttattttatcaaatatctccacactctattccaacatttattttagccaaaaaagaactcccggaccccataaaattttatgagttagtggaagacttagggtctgtttatggatgtgttaagttgaaaattataccagatgctgacaaatttactcaattgaatgttgatgtagatcgcctctggtttaaagcaagaaaacaatttttcaatagtaatgaatttcaaagaaccaagatagttgatttttatgcgaagttgtataattttcacaataaaatcaaaaagagtactctcacaaggatcccaagtatcgataaacgcaccttggatttatatagattaaggagttgtgtgaagttgaggggaggcttcaatgctgtttgcgaaaaaaaattatgggcgcaaattggaagagaattaggttactctggcaggattatgagttctttatctacttctttaagatctgcctatgcaaaaattttattagactttgacatatatgaagaagaagagcaagctgctcgtaataacgaaaaaaatgaagacatggtggaatctgaaatatttcgtcactctaatagcagaagtagggacgaagaggagccacttcataaaaaagctaaaatacaccgcgatgtctttagagccggatctattaatcatgaatttaaaagaatgagagacataaagcacataaaagggtttccgacttattttaactctttaactgagtttaaattgggctatacacagagtacagagaccacattaccgggctatgattttactttttgggagaatggtatggaaatatacgataaaagcaaatacgaaaccaaaacctctccagtatacaatttgagacagtattacgaaaaaagtttggctgttttcactgctattgtagcgaaatttgggagtagctatcctgatttgtttgcgaaacacacaacattacctcaaaaggaattcgagaggttatactttcatttgctttctgagcactttatagatttcgaaattgacaccggtcttggattgccctgttccatgagatctccaggaaacaactcttccaatgaaaagtttgccattaagaatattttggaccagtggaatttagacaacattcctctcaatgaattatctcttttacaacaccttgatttggatatggccaattttacgagaaccacttatgatattggaatgttgttttcttgtcaaggttggtctgtttctgatcattttttaccttctattgatttcaatcatttaggttctaccaagttggtgtacagtattgcgccgaaagatatggaaaaattcgaagctttaattgctagaggaaaaagtgaatgggatactatccaatccaggccgcgctactccacctccgatgacgaattaaagagctttatagaaacagatttctacaagagctttttggatgcagaacaatctgctgactattccaacactggagataattctaaaaattcttttccagaagataagatagcaggaaacactttacatgatggttctcaaagcgacttcatatttgagcctaatttcatcttagccaatggcataaaactttataagacgacacaggagcagggctcttacatttttaagtttccgaaagccttcacatgttctattggatctggtttctatttatctcagaatgcaaaatttgcgccaagctcctggttgagattcagttccgaggcagcaaaatggacatctaagatggggtttcttcccggtttagatgtaaatcaattacttatcaatgccttgttgaactccaataacccagttttaaggaaaaaatgccgtgatttaataagtaactacgtcgttgaggaagcggaaaacagcaaaaaattaggggagttgattggcactgtagatgtcgtttataataaattgaattatatttctgatattagtttagagtctactggtctttctaaaatcgttgttacacacggtgcattgcaacgtaatttatctttgaaggaattcgtggtattgttggaaaaaccagaaaacggtgctcatagtatatgtggcatcccaatacgtgatcaatctggtaatctcaatgtttgtttgcactcttactttgatagcgcaagcttgggaattgctctcgatggcttggacaagcctccgacttcttatttacttgttcacaatgaagattttgaaaaaaagtgggacgtgttaatgacttctacttttagaaatagaactgtgccattaaatataatacagtatttgatctctcatactgatagtaatactgagtttaatagaatgttacgctccaattttgatgattctttattacttattgagaaatgtaaaaagtttattaagaccttcgtggatgtttcctgttctgttaaagatgtagatttcggaaacggtttcaatttacgtcatttaccgcttaagttttctgacaacatggctgataatttggagagcttgtatgaaagtgtgagaaagtgctccattgaattttctgaaaagccgacaattatcagattatatcacgtatctagacagtttcctatcgataatagagatattattgatggcaataatttggatttgcttaaggaattatatcagaaatctttaaccatcccgttgaaggtttcttattggactaagttgaccagaaaaatatgtaggcttgaatggttatccgtttatgaacatatattcattgagagatgtgatattaagaatgaagaccctgcgaaatattctcttccattattatattcttacttcgaatttggtttgaaatattgtgattctgaagatatagataagttaggggaagtgagaaagttgattttaaaatatcaggacatgatgcagaaagttcgtgtttttttgaaaaaggatccaccctctaaaatatctttgagtgatttagaagacgttttattagatatagaagaatatagattacccatacaaagtagttttttcagtgagcttgattatgttattagagaaattgaaaatgcaaaaaaaatgaacgatgtgaatattctttataacactgataatattgataaaatagacgaactcatcaggaaaaatgatcctaaatttgtgaagtttgcgaaccagtttaatggttccagattagataagagaccgttagccagtgataattctggatctgtgaaagccaaacaggagttaaaagttttcaaattatggaaccagcacttggatcaaataatgcaaaaaaataaatttattgagatattaccgtctatttttagatgtttagatttgaagagtgacaaatacattcctttggaaagttgttctaagcgccaaacgaaatattgcttttgtagaagggttgaagaaggtactgcaatggtcgaatgtgaaatatgcaaggagtggtatcatgtggattgtattagcaacggtgagttggttccacctgatgatccaaacgttttatttgtttgctctatatgtacaccaccctgtatggccgttgacaatatcgaaggtgtgacttttgagcttgacgacttgaagaggatcttagtagaatctttgaagttgagtttaattccagatccccctatcttgaagaatctctttgacgtttttgcgtttgctttgaacttcaaaaatgaaatggaaaaagaattatttactaacggttatgtaaatcaattgtcctctacgcacaagatcaagtattacttgagaaagttaaaagggagccaatgcggctttactaatttaacggatcccttaaggaaacattgtcaggtgaaagatgcagaagcaattaaatggctcacagataatggaagaatcataatcacaggaattccaaattga

SEQ ID NO: 8709 - DNA, 1533 bp, Saccharomyces cerevisiae
atgttaagaatctgcgtaaaaaggccctgtataaagatcgttctttcacaagtacgtccagcattactagtaaggaaggagaatctccacataagtactggagtaaaagttgaaaagagcagtataataaaccaaaaggaccctaataaagtacgcgttgagataaacgagttaaagagacaagctgaaattgaaaaggctgcaataaaggaattggagaaaaatcctcaataccaaaaattagctgaagcattcaacagtcatgatcatgttcatttacgtgaatcagagaccgagcaaaacgacataatttcattgggcacgatacgagactacaaaagcagtaaatgtgagcaagctgataagccttcgtcgttgaatctgcattcgcatacacattctcatggacatacgcattctcatgctgctcacaatccattattagtacttagtactgagcaaattaggaaaaatgcaggcgtaagaatcacatgggtcggcttaggtgtaaacgttggtattgctataggtaaattttttggaggtatcgtatttcattcacaagcgttgtttgcggatgctatccacgcaataagtgacatggtttctgacttgttgactttgctttcggtagggctagcagccaacaagccaaccgctgattatccatatgggtatggcaaaattgaaactgttggttccttggcagtttcaacaatattagccatggctggtatatcaataggttggagttccctttgtgcactcgtagggcctgttatcccacatacaatcattgacaccataggaaacttaggtcatgctcatacttattctgaagacattattgaagacgttactgatatcaacgcagcctggattgccgccgcttccattgcagctaaagaatggatatttagagccacaagaaagattgctatcaacactaattcaaatgtactaatggcaaatgcttggcatcaccgtgttgattcattaacttctcttgttgctctggttgcaatcagtactggttatttggttaatatacaatcattagacacgattggtggtttaattgtttctggtttaattatcaaggctggtggcgagggtatgtgcatcgcaataaaggagttaatcgatcagtcagtttctcgtgatgatccacgctacctagagatagaaactttggttaaagatacgttgaacaaactgatctctaataataattctcagaaaccctatggattgaaagaactgacgttactgtcctcaggaccgaatttacgcggacatttaaccttggaagttcctttacaaaaatggggcaatattttaggtgttaacgagtttgaaattgtgacacatcatttacgtaatgtgttaaccaatgaagtatcgaatttgagaagactggatattgaatacgtggaagaaaaaaatggtgaggaaaatgagcatatcaagggacaacaaaactacaaagaagatgttcttattaagcacgaccatacgaatactcatatttga

SEQ ID NO: 8710 - DNA, 1533 bp, Artificial Sequence
  Description of Artificial Sequence: Synthetic polynucleotide
atgttaagaatctgcgtaaaaaggccctgtataaagatcgttctttctcaagtacgtccagcattattggtaaggaaggagaatctccacataagtactggagtaaaagttgaaaagagcagtataataaaccaaaaggaccctaataaagtacgcgttgagataaacgagttaaagagacaagctgaaattgaaaaggctgcaataaaggaattggagaaaaatcctcaataccaaaaattagctgaagcattcaacagtcatgatcatgttcatttacgtgaaagtgagaccgagcaaaacgacataatttctttgggcacgataagagactacaaaagcagtaaatgtgagcaagctgataagccttcttctttgaatttacattctcatacacattctcatggacatacgcattctcatgctgctcacaatccattattagtacttagtactgagcaaattaggaaaaatgcaggcgtaagaatcacatgggtcggcttaggtgtaaacgttggtattgctataggtaaattttttggaggtatcgtatttcattctcaagcgttgtttgcggatgctatccacgcaataagtgacatggtttctgacttgttgactttgctttctgtagggttagcagccaacaagccaaccgctgattatccatatgggtatggcaaaattgaaactgttggttccttggcagtttctacaatattagccatggctggtatatccataggttggagttccctttgtgcactcgtagggcctgttatcccacatacaatcattgacaccataggaaacttaggtcatgctcatacttattctgaagacattattgaagacgttactgatatcaacgcagcctggattgccgccgcttccattgcagctaaagaatggatatttagagccacaagaaagattgctatcaacactaatagtaatgtattaatggcaaatgcttggcatcaccgtgttgattctttaacttctcttgttgctttggttgcaatcagtactggttatttggttaatatacaatctttagacacgattggtggtttaattgtttctggtttaattatcaaggctggtggcgagggtatgtgcatcgcaataaaggagttaatcgatcagtctgtttctcgtgatgatccacgctacttggagatagaaactttggttaaagatacgttgaacaaattaatctctaataataattctcagaaaccctatggattgaaagaattgacgttattatccagtggaccgaatttacgcggacatttaaccttggaagttcctttacaaaaatggggcaatattttaggtgttaacgagtttgaaattgtgacacatcatttacgtaatgtgttaaccaatgaagtatctaatttgagaagattagatattgaatacgtggaagaaaaaaatggtgaggaaaatgagcatatcaagggacaacaaaactacaaagaagatgttcttattaagcacgaccatacgaatactcatatttga

SEQ ID NO: 8711 - DNA, 825 bp, Saccharomyces cerevisiae
atggtgaaagtaactgcagcttgtatcataattggtgatgaagtgctgaatggaaaagtagttgatacaaattccactttttttgcgaagtattgctttgatcatggaattcaattaaaagaaattgcaactataggggatgatgaaacccagatcgtagatactgtgagaagattagtcaaaaattatgattttatcatcagtacaggtggaatcggccccactcatgacgacatcacttacgaatgtatggcgaaaagctttaatttgccttgtgaactagatgaagaatgcaaagaacgaatgaggcataaatctgaccctgaagcaaggcttgatgcagatgctctaaaggcgcattaccaaatggcaaccatgccaaaaggcacaaacgtcaaaaattattatgtgtgtgatgacttgtgggtacctatttgttctatatctcacaaaatgtatatactacccggtatccctcaactatttgcaaggatgctgaaagcgttcactcccacgttgaaaaaaatatataatttggacaaggatccacgtgagtatgttcgttattttgtcagaacacacctaactgagtctcaaatttctaaagagctaaagttgattcaggatgaatcaacaaaagtttcagaagccattaaaataggctcatacccacattttggtatgggattcaatacagttagtattttgggtgaaaagaaagacgattcatatctgaagagtattgtcaatagagttgttaataacctcgagggagaagtaatttcttctgaacttgaaaacaagttctcgaaccaggagagctga

SEQ ID NO: 8712 - DNA, 825 bp, Artificial Sequence
  Description of Artificial Sequence: Synthetic polynucleotide
atggtgaaagtaactgcagcttgtatcataattggtgatgaagtgttgaatggaaaagtagttgatacaaattccactttttttgcgaagtattgctttgatcatggaattcaattaaaagaaattgcaactataggggatgatgaaacccagatcgtagatactgtgagaagattagtcaaaaattatgattttatcatcagtacaggtggaatcggccccactcatgacgacatcacttacgaatgtatggcgaaaagctttaatttgccttgtgaattagatgaagaatgcaaagaaagaatgaggcataaatctgaccctgaagcaaggcttgatgcagatgctttgaaggcgcattaccaaatggcaaccatgccaaaaggcacaaacgtcaaaaattattatgtgtgtgatgacttgtgggtacctatttgttctatatctcacaaaatgtatatattgcccggtatccctcaattatttgcaaggatgttgaaagcgttcactcccacgttgaaaaaaatatataatttggacaaggatccacgtgagtatgttcgttattttgtcagaacacacttgactgagtctcaaatttctaaagagttgaagttgattcaggatgaatctacaaaagtttctgaagccattaaaataggctcttacccacattttggtatgggattcaatacagttagtattttgggtgaaaagaaagacgattcttatttgaagagtattgtcaatagagttgttaataacctcgagggagaagtaatttcttctgaacttgaaaacaagttcagtaaccaggagagctga

SEQ ID NO: 8713 - DNA, 2277 bp, Saccharomyces cerevisiae
atgtctgaactctctcaaatgacattgaagatcctttacacattggataatggatccaatggtagttatttagcccgctcaagggctccaaaacaggtaagagttgctaatattcctagtccattcccgacagattcgaatgagcaaacggagttgcgaattggcgccatccatttgaagactatactgcatgaaatatacttaaattcacctgaagtgttagaccatgacactttaaaagatggatatgattataacttgtattatcgtgacatatgtgaagtggatgagccattagtaagccttggtcttctttccgggcttcgaaaaaagtttcataagaatagcccctaccagtatacagaaaacaatattggtgaagaagaaagtgaagagagagatgaggtaactgaagaagagtatgaagatgaatcttttatagttactggaagggtatgctcgaatgtttccgctttactacgaagatcatatagcaacatctcgaataaaaagggaagggtcgtaaacaaccaaattccggaagaaactttggaggttaaactaagattcacaaaagttataaccaatttaaggacgtctggtaacaatactacaaattctcggatatcgtgtcttcaaatgccgtcttctttaccatcagcaacacttccgtttaccccaaaatcgcaatctcttttcaagacaaaccaaataaaaaattcaaggaatgcaaggaccacgataacaataaataatactaatagcgggactgtgggaagaagacagacgaatcctatgcctgctccaaaagctgtcagaactcagtctttacccatctggaatcttaaaccaaatatagcgaatactggtttcccaagaaattcaattgcgcacaaaatctacttagcagatagaaaaacagaagccaatcaacaaaacaaccagcatcaaaacatagcttacgaaataaatactttgcaaaacgataatactattcagaggaccaagatcgatgattcggtaagcaagaggttcgattttatgctcaacaaaagaaagtctacgaaaaaagtgtcacctggtatagcaacgatagcaaaaaaaccagcttcaataaacataaatccaaagcaaccgccgaagactagtggtgaaaaaaaagcaaatgataagcaaacgattgtcaaagttaagaattcgaattccaaaaattcggctaagtctacacaagcaggatgtaggcgatcatcagtgatagaacatttaaatgatcatgacgattcaattttaagtgacattctatcggaaccaggcattgaagggcagaaattgcagcaaaaacaaaaggggcgtaagatatctttaactagtgaaaatgataaagaaaatattccaccccaaagcataactagtaaagagaacaagcttgaaggtgacttggattttaacgctgagttccccatgagtgacttttcggatgtagtatttaaagatgagatgggatggttttccaatttcaattgcaatttttttgaatcaccaacttctgcaagtgcatcacaactcaatcagcaaaatttgaagccttctataacactcaacgatccaaacacctgtaacaccattgctctcgaaaatgaagatgtcagtgaattggaaacagcgcaaaataataaaatatctttgcctagcgatgttgacaaaacctccccaatagactcgttgtctatacctttaattgaacttacacattcaagctcgacaacaaacatgcagcgtatatccattaaagaaggatcgacactaaatataacagatagtaataatgccaccccatgtgataatgatataaaagatagaaaggcatctgtaatagattcggacaatacaaaacctcaggcagggcttataaatttctctactccagctgaccagccagcttctgataataatgttacagcttcgaaaaagcttactagcatgctggaaactcagcaaagtaagagatctcatgaagaagttttggatgaagaggaagaggaggaagccctcaaaaagcaaaaggcaataccgtcttcaccatgtgggatgttcaattatcatcaacccatggaattatctgaggacatagttgaagaagagcaaggacacaatatcggcgatgataatgaaagcgataagaccaacgatttattctcaacattcatccattcaggaataagagtaagtcaggtagtaacaagtcccatcggtgaatttcagtcaataaaacactga

SEQ ID NO: 8714 - DNA, 2277 bp, Artificial Sequence
  Description of Artificial Sequence: Synthetic polynucleotide
atgtctgaactctctcaaatgacattgaagatcctttacacattggataatggatccaatggtagttatttagcccgcagcagggctccaaaacaggtaagagttgctaatattcctagtccattcccgacagattctaatgagcaaacggagttgagaattggcgccatccatttgaagactatattacatgaaatatacttaaattctcctgaagtgttagaccatgacactttaaaagatggatatgattataacttgtattatcgtgacatatgtgaagtggatgagccattagtaagccttggtcttctttccgggcttagaaaaaagtttcataagaatagcccctaccagtatacagaaaacaatattggtgaagaagaaagtgaagagagagatgaggtaactgaagaagagtatgaagatgaatcttttatagttactggaagggtatgctccaatgtttccgctttacttagaagatcttatagcaacatctctaataaaaagggaagggtcgtaaacaaccaaattccggaagaaactttggaggttaaattgagattcacaaaagttataaccaatttaaggacgtctggtaacaatactacaaattctagaatatcttgtcttcaaatgccgtcttctttaccatctgcaacacttccgtttaccccaaaatctcaatctcttttcaagacaaaccaaataaaaaattctaggaatgcaaggaccacgataacaataaataatactaatagcgggactgtgggaagaagacagacgaatcctatgcctgctccaaaagctgtcagaactcagtctttacccatctggaatcttaaaccaaatatagcgaatactggtttcccaagaaattctattgcgcacaaaatctacttagcagatagaaaaacagaagccaatcaacaaaacaaccagcatcaaaacatagcttacgaaataaatactttgcaaaacgataatactattcagaggaccaagatcgatgattctgtaagcaagaggttcgattttatgctcaacaaaagaaagtctacgaaaaaagtgtctcctggtatagcaacgatagcaaaaaaaccagcttctataaacataaatccaaagcaaccgccgaagactagtggtgaaaaaaaagcaaatgataagcaaacgattgtcaaagttaagaatagtaattccaaaaattctgctaagtctacacaagcaggatgtaggagaagttctgtgatagaacatttaaatgatcatgacgattctattttaagtgacattttatctgaaccaggcattgaagggcagaaattgcagcaaaaacaaaaggggcgtaagatatctttaactagtgaaaatgataaagaaaatattccaccccaaagcataactagtaaagagaacaagcttgaaggtgacttggattttaacgctgagttccccatgagtgacttttctgatgtagtatttaaagatgagatgggatggttttccaatttcaattgcaatttttttgaatctccaacttctgcaagtgcatctcaactcaatcagcaaaatttgaagccttctataacactcaacgatccaaacacctgtaacaccattgctctcgaaaatgaagatgtcagtgaattggaaacagcgcaaaataataaaatatctttgcctagcgatgttgacaaaacctccccaatagactctttgtctatacctttaattgaacttacacattctagctctacaacaaacatgcagcgtatatccattaaagaaggaagtacattaaatataacagatagtaataatgccaccccatgtgataatgatataaaagatagaaaggcatctgtaatagattctgacaatacaaaacctcaggcagggcttataaatttctctactccagctgaccagccagcttctgataataatgttacagcttccaaaaagcttactagcatgttggaaactcagcaaagtaagagatctcatgaagaagttttggatgaagaggaagaggaggaagccctcaaaaagcaaaaggcaataccgtcttctccatgtgggatgttcaattatcatcaacccatggaattatctgaggacatagttgaagaagagcaaggacacaatatcggcgatgataatgaaagcgataagaccaacgatttattcagtacattcatccattctggaataagagtaagtcaggtagtaacaagtcccatcggtgaatttcagagtataaaacactga

SEQ ID NO: 8715 - DNA, 963 bp, Saccharomyces cerevisiae
atgtctgaccaacccgagactccttccaatagtagaaattctcatgaaaatgttggcgcaaagaaagctgacgctaatgttgcctcgaaattcagaagcttgcatatctctgaaaccactaagccattaacatcaactagagctttatacaaaaccacaagaaacaattcaagaggtgcgacagaattccataaacatgtttgtaagttagcatggaaatatcttgcttgtattgataaatcgtcgatatcacacattgaaatcgaaatgaaatttggtgttataacagacaaaaggacacatcgcaggatgacaccacacaacaagccctttattgttcaaaacagaaatggccgcttagtgtctaacgttcctgagcaaatgttctcgagtttccaggagctactccgctcaaaatcggagaatccaagtaaatgtgccccaagagtagtaaaacaggtacaaaagtatacgaaagattctatatataactgcaacaatgcctcgaaagttggcaaattaacttcatggcgttgttcggaagaccttagaaacaaagaacttaaacttacttacatcaaaaaggtccgggtcaaggattttctcattcgctatcctcaaagttcattagacgctaaaattagcatcagccttgaagtgcctgaatacgaaacttctgccgctttcaggaatggctttattttacaaagaaccaaaagccgttccacctacacctttaatgataaaatgcctttacacttggatttgacaaaggttactaccacgcgaaggaactcccatcaatacacgtcccatgaagtggaggtagaaatggatcctatattcaaggagacaatttccgctaatgatagggagaagtttaatgagtatatgtgctcgtttttgaatgccagcgaccttatacgtaaggctgcagaacgcgataacatgttaacgacatga

SEQ ID NO: 8716 - DNA, 963 bp, Artificial Sequence
  Description of Artificial Sequence: Synthetic polynucleotide
atgtctgaccaacccgagactccttccaatagtagaaattctcatgaaaatgttggcgcaaagaaagctgacgctaatgttgcctccaaattcagaagcttgcatatctctgaaaccactaagccattaacatctactagagctttatacaaaaccacaagaaacaattctagaggtgcgacagaattccataaacatgtttgtaagttagcatggaaatatcttgcttgtattgataaaagcagtatatctcacattgaaatcgaaatgaaatttggtgttataacagacaaaaggacacatcgcaggatgacaccacacaacaagccctttattgttcaaaacagaaatggccgcttagtgtctaacgttcctgagcaaatgttctctagtttccaggagttactccgctctaaaagtgagaatccaagtaaatgtgccccaagagtagtaaaacaggtacaaaagtatacgaaagattctatatataactgcaacaatgcctccaaagttggcaaattaacttcttggcgttgttctgaagaccttagaaacaaagaacttaaacttacttacatcaaaaaggtcagagtcaaggattttctcattcgctatcctcaaagttctttagacgctaaaattagcatcagccttgaagtgcctgaatacgaaacttctgccgctttcaggaatggctttattttacaaagaaccaaaagccgttccacctacacctttaatgataaaatgcctttacacttggatttgacaaaggttactaccacgagaaggaactcccatcaatacacgtcccatgaagtggaggtagaaatggatcctatattcaaggagacaatttccgctaatgatagggagaagtttaatgagtatatgtgctcttttttgaatgccagcgaccttatacgtaaggctgcagaacgcgataacatgttaacgacatga

SEQ ID NO: 8717 - DNA, 465 bp, Saccharomyces cerevisiae
atgactccacttttgcaggcggaagcaaaaatgaacacaagcctctaccttacggaaagcatccaacaacatgaattcaacctcaccagccctcagtcattctattcttctccctcggtacccaatagtaaaaataactcgggcattttcagctataacactgccaacaacagtagggtgagttctagtgatgaattcactacccaacaagacggcatgaacaccataatgtacaaaaacaacatcagtaaaactttcgaagacgacatcttttattgtccaagaagtttgctcaccccagaagaacaagtggtataccaggaaattgacaagtattacatggaacaagcactattgacccagttacaaatctcccaaacgtattcctccactcctaaagaggaaaagatagttaagttcaatccctacacttcgaagagtttcagtccagcttcttctgaataa

SEQ ID NO: 8718 - DNA, 465 bp, Artificial Sequence
  Description of Artificial Sequence: Synthetic polynucleotide
atgactccacttttgcaggcggaagcaaaaatgaacacaagcctctaccttacggaaagcatccaacaacatgaattcaacctcaccagccctcagtctttctattcttctccctctgtacccaatagtaaaaataacagtggcattttcagctataacactgccaacaacagtagggtgagttctagtgatgaattcactacccaacaagacggcatgaacaccataatgtacaaaaacaacatcagtaaaactttcgaagacgacatcttttattgtccaagaagtttgctcaccccagaagaacaagtggtataccaggaaattgacaagtattacatggaacaagcattattgacccagttacaaatctcccaaacgtattcctccactcctaaagaggaaaagatagttaagttcaatccctacacttctaagagtttcagtccagcttcttctgaatga

SEQ ID NO: 8719 - DNA, 636 bp, Saccharomyces cerevisiae
atgagaggaaaacaaccgaaaaggaacaaagacaacgcttctgtcaagagaaattatagatgcgtgggatatcctgattgtaacatgagtttcaataggaccgaacatttggctagacatatcaggaaacacacaggggagaaaccattccaatgcaatatctgccttaaattcttcagtagaatcgataacttaagacaacatcaatcttctgttcattcggacgttgatttgatgtccttacgtagactgcagcagtccgcaaatagcactgcgaacgaccctaacgcaacaagaatgttcccgcaattacgcccatatggaattgttgtccagcccgcgcctgttccatacaatctgcccatatcaactcctgctagcccacaagacactatatctctttacgcaccaccatacttccctcatcctatgccatctgctcccataccattgccgcatcagcctcctccactaccaatatacagctatatgcaaccactcttcctgaaccacactcccatacaaaaccacaacattgtagagctccctccagatagcagtgacactccagcatcgccgtctaaggtgcaaagttttgaccaggccaaggacgcttcaccaaacgcaaaaaaataa

SEQ ID NO: 8720 - DNA, 636 bp, Artificial Sequence
  Description of Artificial Sequence: Synthetic polynucleotide
atgagaggaaaacaaccgaaaaggaacaaagacaacgcttctgtcaagagaaattatagatgcgtgggatatcctgattgtaacatgagtttcaataggaccgaacatttggctagacatatcaggaaacacacaggggagaaaccattccaatgcaatatctgccttaaattcttcagtagaatcgataacttaagacaacatcaatcttctgttcattctgacgttgatttgatgtccttacgtagattacagcagtccgcaaatagcactgcgaacgaccctaacgcaacaagaatgttcccgcaattacgcccatatggaattgttgtccagcccgcgcctgttccatacaatttgcccatatctactcctgctagcccacaagacactatatctctttacgcaccaccatacttccctcatcctatgccatctgctcccataccattgccgcatcagcctcctccattaccaatatacagctatatgcaaccactcttcttgaaccacactcccatacaaaaccacaacattgtagagctccctccagatagcagtgacactccagcaagtccgtctaaggtgcaaagttttgaccaggccaaggacgcttctccaaacgcaaaaaaatga

SEQ ID NO: 8721 - DNA, 87 bp, Saccharomyces cerevisiae
atgagaaaaccgagtgcgtttcatgcatgtaacataatatttcttcccctcgttaagtgtgcatcagcaaccataatgctgaattaa

SEQ ID NO: 8722 - DNA, 87 bp, Artificial Sequence
  Description of Artificial Sequence: Synthetic oligonucleotide
atgagaaaaccgagtgcgtttcatgcatgtaacataatatttcttcccctcgttaagtgtgcatctgcaaccataatgttgaattga

SEQ ID NO: 8723 - DNA, 888 bp, Saccharomyces cerevisiae
atgagcaacgctaatccttatgagaataacaatccgtacgctgaaaactatgaaatgcaagaggacttgaacaatgctcctactggtcactcagatggtagcgacgatttcgtagcttttatgaacaagatcaactcaataaatgctaacttgtccaggtacgaaaacattatcaaccaaattgatgcgcaacacaaagacctacttactcaagtgagtgaggaacaggagatggaattgagacgttctttggacgattacatctctcaggccacagatttgcagtatcaattgaaagcggatatcaaagatgcccagagagacggattgcacgactctaataaacaggcacaagctgaaaattgcagacagaaattcttaaaattaattcaagactacagaattatcgattctaactacaaagaagaaagcaaagagcaggcgaagagacagtacacaattatccaaccggaagccactgacgaagaagtggaagccgccatcaacgatgtcaatggccagcagatcttttcccaagcgttgctaaacgccaatagacgtggtgaggccaagacagcattggccgaagtacaggctagacatcaagagttgttgaagttggaaaaaacaatggctgaacttacccaattgttcaatgacatggaagagttggtcatcgaacaacaagaaaatgtggatgtcattgacaaaaacgtcgaagacgctcagcaagatgtagagcaaggtgtgggtcacaccaacaaggccgttaagagtgccagaaaagcaagaaaaaacaaaataagatgtttgatcatctgctttattatctttgctattgttgttgtcgttgtggttgttccatccgttgtggaaacaagaaagtaa

SEQ ID NO: 8724 - DNA, 888 bp, Artificial Sequence
  Description of Artificial Sequence: Synthetic polynucleotide
atgagcaacgctaatccttatgagaataacaatccgtacgctgaaaactatgaaatgcaagaggacttgaacaatgctcctactggtcacagtgatggtagcgacgatttcgtagcttttatgaacaagatcaacagcataaatgctaacttgtccaggtacgaaaacattatcaaccaaattgatgcgcaacacaaagacttacttactcaagtgagtgaggaacaggagatggaattgagacgttctttggacgattacatctctcaggccacagatttgcagtatcaattgaaagcggatatcaaagatgcccagagagacggattgcacgactctaataaacaggcacaagctgaaaattgcagacagaaattcttaaaattaattcaagactacagaattatcgattctaactacaaagaagaaagcaaagagcaggcgaagagacagtacacaattatccaaccggaagccactgacgaagaagtggaagccgccatcaacgatgtcaatggccagcagatcttttcccaagcgttgttgaacgccaatagacgtggtgaggccaagacagcattggccgaagtacaggctagacatcaagagttgttgaagttggaaaaaacaatggctgaacttacccaattgttcaatgacatggaagagttggtcatcgaacaacaagaaaatgtggatgtcattgacaaaaacgtcgaagacgctcagcaagatgtagagcaaggtgtgggtcacaccaacaaggccgttaagagtgccagaaaagcaagaaaaaacaaaataagatgtttgatcatctgctttattatctttgctattgttgttgtcgttgtggttgttccatccgttgtggaaacaagaaagtga

SEQ ID NO: 8725 - DNA, 597 bp, Saccharomyces cerevisiae
atggctattaaaccaaccaaaagttttcagaattgtctagaagctgaagtgcctggttataacgactgtccgacagttttgttttctatcgaccctaatagcggacctagatccaaatctaaacaaagaacgaaatcgaaaagatgtgttagcggcagacttgccacagaagtgttagatctttatgggaacactaaaacagctactacgccgccaccagttttgaggaggccatctgtaactgctgctcaacaagaatctgcctgtgaaggtgtgctcgtaaaagaccaaggcgatagacagctccagccgatattatgcagtaaagaagaattagtggctaagatcaacgacctctgtgtgtgtggctcgaagctctcttcgaaggagttggaattttacaagaaaaaattagattcaaacattaccaagattttacaaaacgagcacaccaaaacagtactatcccagattttcaatgaaaaagacaaaaatatggccgtgaaaaccattaaacattggatggttactgacacaacaatctcaaattggtgtcccgcattcttaaaaatttttgaaaatgcgatgcctaattaa

SEQ ID NO: 8726 - DNA, 597 bp, Artificial Sequence
  Description of Artificial Sequence: Synthetic polynucleotide
atggctattaaaccaaccaaaagttttcagaattgtttagaagctgaagtgcctggttataacgactgtccgacagttttgttttctatcgaccctaatagcggacctagatccaaatctaaacaaagaacgaaatctaaaagatgtgttagcggcagacttgccacagaagtgttagatctttatgggaacactaaaacagctactacgccgccaccagttttgaggaggccatctgtaactgctgctcaacaagaatctgcctgtgaaggtgtgctcgtaaaagaccaaggcgatagacagctccagccgatattatgcagtaaagaagaattagtggctaagatcaacgacctctgtgtgtgtggctccaagctctcttccaaggagttggaattttacaagaaaaaattagattccaacattaccaagattttacaaaacgagcacaccaaaacagtattgtcccagattttcaatgaaaaagacaaaaatatggccgtgaaaaccattaaacattggatggttactgacacaacaatctctaattggtgtcccgcattcttaaaaatttttgaaaatgcgatgcctaattga

SEQ ID NO: 8727 - DNA, 2946 bp, Saccharomyces cerevisiae
atgaatgaggataaagagcaaaagatcaacatacacgatatattgaatacaagaccgaagctcaccaaaaagacagccctagatgttttcttcgaagatctggatgacaatgtaattactcccataaacgaatatgttcttgattcaggctcatcatcatcctcttccatttatcaggcgttgaagtgctcaaataacaatgagtttgttgcagtacttttacagaaattccagaatttgcacattcacgtactagaacagcaacggaggctcatcgaaagtaaaagtgacttattgcctatctcattgcatgatatgaaatacgtagacgaactgataaatcttttgattattcatggtatagatgctaatttgtctcctacgatgaaaattccattcgattcgaaaagaataaatactttcaagaagggccaaaaaagcgcagaatatgaaacgcctcgatggcacaccataaataacgatactttatctcaagtcataactgtcttttataatgttctaactagtgagaggtcttctgactacctgagagaaataatatcaaaaggcagtgcttacgcaaacattttattaggtttgattgtgttacatttgcagttgcctaataggtactcttcacaaatgattacaaatctagaagatactcaagaaacttatactttgtttggggtttacactctactagtagaaacaattcaagacgaaaaggttagggagccaatcctttcgaagttaacaacgttaactctacgaagaccggaaaatggtctgatcagcttgattgatttcgttttgggtgtgagagatgctgaagatatagatattgaaaagtttaaccgtatctaccaaattttgatgagtaagccaaaaacaatgacaaatttgcaatacttgacggaactattcaagcaaatttatgatggtctcacctttgtgaacaggcctatcctggtcacttgtttgaacggactaatccttaaattttacctgaggaataagaggattgttaacgattttttgtttaagaaggtccgctccattatctttaattccccgttaactgatcatacagcaaaggaactgaacgatgttataaacgttcttatatctttatccaaaaattcttcatcggatttgctgaatgatttagttactagttgccctgatgaagacggtactacgcctggacagttctttttatatgtatggatatatgctctttttttgaagaaaaaccaaaaactagacccattagaaataaacaaattgtctatttcagataataaaagcacagacagcatacattttccagagcaatcttcctcaaagtattacgaggttgtattatcattattaaaatctctaatagtcataacagaaaattttcaatatctaaatgtactgagccttaacttactgaattttgagcacgagaaatggaagtatttaattgatcttgatactcagctaccctacatatcggttaaaaacacagatatggcagagttgtttttcgaaaaaggatccaaaaactctcaaatttctgagtttcttcaagatatggacctttcgatagaattatttatggaatttttagtgctgctaaatgatgaggaacaatcaaagactttatttttagatattctgaaaagatgggtccatcatacaaaaaaaagtgaaaaaagatcttccgataatcatagcgggatgccaagcgttacagataacgcgttaatactcatggacttgaaacttttggaatgtatgaacaaccgatttaaaaccaagattgttaataaacctaaggacgttcttattgttattgatcaattgatagatgttgttcaggaaaaagatgaaacaatacaggaagtagaagcagattctgacgacgaagttgaagaaggagaagaaacagaagaattggatccaaatgaaaattcttcctacaaaattatcttgcagttattatcaaccgtcctttcagaatcgtccagtagtatattattgcaaaacagttatatattgaaatccatttctagaaaattacaatctttcaacactaatgcttccgaaatagatgcattattggcatcaatagataatatattgattaacggacatactacggaaaggaacgacaacatagaaattgagatggatgaggaaaggcttgacaaagcgataactagtctacatgatcctttagtgcccataaaatcttatggtttaacagaactacgtcatctagctgaaaagaagtctccagtaatttcactggaaaaggtgttgcaaatacatttagattatttaaagaatatggaccctttcatttatctcaacgttattaaaggacttacaacgctatgtgaattagagccagaaaccatattgcctctacttgcagaattttatgctaacaaaaaaaagaaaaacagattagatgatgtgctgaaagttggagaagtgttcatcaattacattcaacgtcagaacgaattgttccagggtaaattggcttatctgattatagatacctgtcttagtattgtgaggccaaatgatagtaaaccattggacaatagatggcgtatgtcatccatgtcaatcttaggtatgtgccttcaaatcaacgccaggggtgtctcggatagaattcgcgatatgctggattgtgtatttggaatattgcaattagaacaaccacaaaatcatttgaaggacaaggatgattcttttttgatgagaagaagtgccgtacacttgatacatgatttgttgtacagtacaggatttgatttacttccctttgagtacaactacgataagctaaaaacactattatcttacgttcgtgatcaagatgaagattacatggtttgtgaacagattgacaagcttttaaccgtactagatagtttataa

SEQ ID NO: 8728 - DNA, 2946 bp, Artificial Sequence
  Description of Artificial Sequence: Synthetic polynucleotide
atgaatgaggataaagagcaaaagatcaacatacacgatatattgaatacaagaccgaagctcaccaaaaagacagccttggatgttttcttcgaagatttggatgacaatgtaattactcccataaacgaatatgttcttgattctggctcttcttcttcctcttccatttatcaggcgttgaagtgctccaataacaatgagtttgttgcagtacttttacagaaattccagaatttgcacattcacgtattggaacagcaaagaaggctcatcgaaagtaaaagtgacttattgcctatctctttgcatgatatgaaatacgtagacgaattgataaatcttttgattattcatggtatagatgctaatttgtctcctacgatgaaaattccattcgattctaaaagaataaatactttcaagaagggccaaaaaagcgcagaatatgaaacgcctcgttggcacaccataaataacgatactttatctcaagtcataactgtcttttataatgttttaactagtgagaggtcttctgactacttgagagaaataatatccaaaggcagtgcttacgcaaacattttattaggtttgattgtgttacatttgcagttgcctaataggtactcttctcaaatgattacaaatttggaagatactcaagaaacttatactttgtttggggtttacactttattggtagaaacaattcaagacgaaaaggttagggagccaatcctttccaagttaacaacgttaactttaagaagaccggaaaatggtttgatcagcttgattgatttcgttttgggtgtgagagatgctgaagatatagatattgaaaagtttaaccgtatctaccaaattttgatgagtaagccaaaaacaatgacaaatttgcaatacttgacggaattattcaagcaaatttatgatggtctcacctttgtgaacaggcctatcctcgtcacttgtttgaacggattgatccttaaattttacttgaggaataagaggattgttaacgattttttgtttaagaaggtccgctccattatctttaattccccgttaactgatcatacagcaaaggaattgaacgatgttataaacgttcttatatctttatccaaaaattcttcttctgatttgttgaatgatttagttactagttgccctgatgaagacggtactacgcctggacagttctttttatatgtatggatatatgctctttttttgaagaaaaaccaaaaattagacccattagaaataaacaaattgtctatttctgataataaaagcacagacagcatacattttccagagcaatcttcctccaagtattacgaggttgtattatctttattaaaatctttgatagtcataacagaaaattttcaatatttgaatgtattgagccttaacttattgaattttgagcacgagaaatggaagtatttaattgatcttgatactcagttgccctacatatctgttaaaaacacagatatggcagagttgtttttcgaaaaaggatccaaaaactctcaaatttctgagtttcttcaagatatggacctttccatagaattatttatggaatttttagtgcttttgaatgatgaggaacaatccaagactttatttttagatattttgaaaagatgggtccatcatacaaaaaaaagtgaaaaaagatcttccgataatcatagcgggatgccaagcgttacagataacgcgttaatactcatggacttgaaacttttggaatgtatgaacaacagatttaaaaccaagattgttaataaacctaaggacgttcttattgttattgatcaattgatagatgttgttcaggaaaaagatgaaacaatacaggaagtagaagcagattctgacgacgaagttgaagaaggagaagaaacagaagaattggatccaaatgaaaattcttcctacaaaattatcttgcagttattatctaccgtcctttctgaatcttccagtagtatattattgcaaaacagttatatattgaaatccatttctagaaaattacaatctttcaacactaatgcttccgaaatagatgcattattggcatctatagataatatattgattaacggacatactacggaaaggaacgacaacatagaaattgagatggatgaggaaaggcttgacaaagcgataactagtttgcatgatcctttagtgcccataaaatcttatggtttaacagaattgcgtcatttggctgaaaagaagtctccagtaatttctttggaaaaggtgttgcaaatacatttagattatttaaagaatatggaccctttcatttatctcaacgttattaaaggacttacaacgttgtgtgaattagagccagaaaccatattgcctttacttgcagaattttatgctaacaaaaaaaagaaaaacagattagatgatgtgttgaaagttggagaagtgttcatcaattacattcaacgtcagaacgaattgttccagggtaaattggcttatttgattatagatacctgtcttagtattgtgaggccaaatgatagtaaaccattggacaatagatggcgtatgtcttccatgtccatcttaggtatgtgccttcaaatcaacgccaggggtgtctctgatagaattcgcgatatgcttgattgtgtatttggaatattgcaattagaacaaccacaaaatcatttgaaggacaaggatgattcttttttgatgagaagaagtgccgtacacttgatacatgatttgttgtacagtacaggatttgatttacttccctttgagtacaactacgataagttgaaaacattattatcttacgttcgtgatcaagatgaagattacatggtttgtgaacagattgacaagcttttaaccgtattggatagtttatga

SEQ ID NO: 8729 - DNA, 2118 bp, Saccharomyces cerevisiae
atggctggtgaaacttttgaatttcaagctgaaatcactcagttgatgagtttgatcatcaacactgtctattctaacaaggaaattttcttgagagaactgatctctaacgcctccgatgctttagacaaaattagataccaagctttgtctgatccaaagcaattggaaaccgaaccagatttgttcattagaatcaccccaaaaccagaagaaaaagttttggaaatcagagattctggtattggtatgaccaaggctgaattgattaacaatttgggtaccattgctaagtctggtactaaagctttcatggaagctctatctgctggtgccgatgtatccatgattggtcaattcggtgttggtttttactctttattcttagtcgccgacagagttcaagttatttccaagaacaatgaggacgaacaatatatttgggaatctaatgccggtggttctttcaccgttactttggacgaagttaacgaaagaattggtagaggtaccgtcttgagattattcttgaaagatgaccaattggagtacttggaagaaaagagaattaaagaagtcatcaagagacattctgaattcgttgcttaccctatccaacttctagtcaccaaggaagtcgaaaaggaagttccaattccagaagaagaaaagaaagacgaggaaaagaaggatgaagatgacaagaaaccaaaattggaagaagtcgatgaagaagaagaagaaaagaagccaaaaaccaaaaaagttaaagaagaggttcaagaattagaagagttgaacaagactaagccattatggactagaaacccatctgatatcactcaagaggaatacaatgctttctataagtctatttctaacgactgggaagacccattgtacgttaagcatttctctgttgaaggtcaattggaatttagagctatcttgttcattccaaagagagcaccattcgacttatttgagagtaagaagaagaagaacaatatcaagttgtacgttcgtcgtgtcttcatcactgatgaagctgaagacttgattccagagtggttatctttcgtcaagggtgttgttgactctgaagatttaccattgaatttgtccagagaaatgttacaacaaaataagattatgaaggttattagaaagaatattgtcaagaaattgattgaagccttcaacgaaatcgctgaagactccgagcaatttgacaaattttactctgccttcgctaagaacattaagctgggtgtacatgaggacactcaaaacagagctgctttagctaagttgctacgttacaattctactaaatctgtcgatgaattgacttccttgactgattacgttactagaatgccagaacaccaaaagaacatctattacatcaccggtgaatctctaaaggcagtcgaaaagtctccattcttggacgccttgaaggctaagaactttgaagttttgttcttgaccgacccaattgatgaatacgctttcactcaattgaaggaattcgagggtaaaactttggttgacattactaaagatttcgaattggaagaaacagacgaagaaaaagctgaaagagagaaggagatcaaagaatacgaaccattgaccaaggccttgaaggatatcttgggtgaccaagtggagaaggttgttgtttcttacaaattgctagatgctccagctgccatcagaactggtcaattcggctggtctgctaacatggaaagaatcatgaaggctcaagccttgagagactcttccatgtcctcctacatgtcttccaagaagactttcgaaatttctccaaaatctccaattattaaggaattgaaaaagagagttgatgagggtggtgcacaagataagaccgtcaaagatttgactaacttattattcgagaccgctttgttgacttctggtttcagtttggaagaaccaacttcttttgcatcaagaataaatagattgatttctttaggtttgaacattgatgaggatgaagaaacagaaaccgctccagaagcttctaccgaagctccagttgaagaggttccagctgacaccgagatggaagaagttgattaa

SEQ ID NO: 8730 - DNA, 2118 bp, Artificial Sequence
  Description of Artificial Sequence: Synthetic polynucleotide
atggctggtgaaacttttgaatttcaagctgaaatcactcagttgatgagtttgatcatcaacactgtctattctaacaaggaaattttcttgagagaattgatctctaacgcctccgatgctttagacaaaattagataccaagctttgtctgatccaaagcaattggaaaccgaaccagatttgttcattagaatcaccccaaaaccagaagaaaaagttttggaaatcagagattctggtattggtatgaccaaggctgaattgattaacaatttgggtaccattgctaagtctggtactaaagctttcatggaagctttatctgctggtgccgatgtatccatgattggtcaattcggtgttggtttttactctttattcttagtcgccgacagagttcaagttatttccaagaacaatgaggacgaacaatatatttgggaatctaatgccggtggttctttcaccgttactttggacgaagttaacgaaagaattggtagaggtaccgtcttgagattattcttgaaagatgaccaattggagtacttggaagaaaagagaattaaagaagtcatcaagagacattctgaattcgttgcttaccctatccaacttttggtcaccaaggaagtcgaaaaggaagttccaattccagaagaagaaaagaaagacgaggaaaagaaggatgaagatgacaagaaaccaaaattggaagaagtcgatgaagaagaagaagaaaagaagccaaaaaccaaaaaagttaaagaagaggttcaagaattagaagagttgaacaagactaagccattatggactagaaacccatctgatatcactcaagaggaatacaatgctttctataagtctatttctaacgactgggaagacccattgtacgttaagcatttctctgttgaaggtcaattggaatttagagctatcttgttcattccaaagagagcaccattcgacttatttgagagtaagaagaagaagaacaatatcaagttgtacgttcgtcgtgtcttcatcactgatgaagctgaagacttgattccagagtggttatctttcgtcaagggtgttgttgactctgaagatttaccattgaatttgtccagagaaatgttacaacaaaataagattatgaaggttattagaaagaatattgtcaagaaattgattgaagccttcaacgaaatcgctgaagactccgagcaatttgacaaattttactctgccttcgctaagaacattaagttgggtgtacatgaggacactcaaaacagagctgctttagctaagttgttacgttacaattctactaaatctgtcgatgaattgacttccttgactgattacgttactagaatgccagaacaccaaaagaacatctattacatcaccggtgaatctttgaaggcagtcgaaaagtctccattcttggacgccttgaaggctaagaactttgaagttttgttcttgaccgacccaattgatgaatacgctttcactcaattgaaggaattcgagggtaaaactttggttgacattactaaagatttcgaattggaagaaacagacgaagaaaaagctgaaagagagaaggagatcaaagaatacgaaccattgaccaaggccttgaaggatatcttgggtgaccaagtggagaaggttgttgtttcttacaaattgttggatgctccagctgccatcagaactggtcaattcggctggtctgctaacatggaaagaatcatgaaggctcaagccttgagagactcttccatgtcctcctacatgtcttccaagaagactttcgaaatttctccaaaatctccaattattaaggaattgaaaaagagagttgatgagggtggtgcacaagataagaccgtcaaagatttgactaacttattattcgagaccgctttgttgacttctggtttcagtttggaagaaccaacttcttttgcatctagaataaatagattgatttctttaggtttgaacattgatgaggatgaagaaacagaaaccgctccagaagcttctaccgaagctccagttgaagaggttccagctgacaccgagatggaagaagttgattga

SEQ ID NO: 8731 - DNA, 1296 bp, Saccharomyces cerevisiae
atgaccccacctcatttttttttatctctcataaaaaaaagatgcatatgctggatatgtttggaagaatccacatatgactctacatggctacagcacacgtgcggttgcaacttacaaattcataaacgctgctatataagatggctctatcaaatgcatgttgaactttttcttccgaacacagtggacctaccaaaggatgctgatttacctataatcacctgtttaaaatgtctcgttgatgggcaccatgattttatgacgactttctctcttacagaaatatgggaaactcgtcccatttgggggcaaaaatcagtaccgtttcaaaatgactacgtgttcaatctaatgtctctttataccaaacgggataatcatccaccttatgtgttagtgaaatttggcgaatgtcctcaatgcaagaaaacaaatttcataaaaagacctacagtaaccatccagtcttctgtactatccctgttttatcagtggcaaaaaattacacgatacgtgataccattagggataactagtttatttcttttaaaccctgaaaagacaagttttgacattggattatggcaactacgctgccttttccctgagaatgttctacgaaatatgttaaacatcagcactacaaaggcattggacgtatatgcgcaaactgaacgtggcttattaagcattcctttaacctcctcgatcataatatatgggttcatacattatcttagcaacatttctaacgtcagtgctaatgcaatactctttaagtgggtgtatctcagtattgtaaaaactgctggaaacaaatattacaagggtataggtttacctaaaataattttgtattctaacttggctacattttgctataattttacctttaaaagattggttgacttaatttacaggaggctgatcaataaaggaggtaagtatttgtatcacggaaattttgaaaactctagtaatagcgttccagctgaggaattttttatcaggcggaattggtatgctattcttgcagaaaagatactatggccctttgttggtaaatgtacaggaggtcttctattgaatgcttttctatggatacagagaaagtttaaaattgaatggacgccgaattgctccccttcggaatttagaatgattttcaatattataggttgtggtactgctgctataggctggtcaagtctgaagctctatgccagttacaaaagatgtcaggaacttgaaaagatcaatgaatttattgaacaaagttgcaaaggtgagtaa

SEQ ID NO: 8732 - DNA, 1296 bp, Artificial Sequence
  Description of Artificial Sequence: Synthetic polynucleotide
atgaccccacctcatttttttttatctctcataaaaaaaagatgcatatgctggatatgtttggaagaatccacatatgactctacatggttacagcacacgtgcggttgcaacttacaaattcataaacgctgctatataagatggctctatcaaatgcatgttgaactttttcttccgaacacagtggacttaccaaaggatgctgatttacctataatcacctgtttaaaatgtctcgttgatgggcaccatgattttatgacgactttctctcttacagaaatatgggaaactcgtcccatttgggggcaaaaatctgtaccgtttcaaaatgactacgtgttcaatttaatgtctctttataccaaaagagataatcatccaccttatgtgttagtgaaatttggcgaatgtcctcaatgcaagaaaacaaatttcataaaaagacctacagtaaccatccagtcttctgtattgtccttattttatcagtggcaaaaaattacaagatacgtgataccattagggataactagtttatttcttttaaaccctgaaaagacaagttttgacattggattatggcaattgcgctgccttttccctgagaatgttttaagaaatatgttaaacatcagcactacaaaggcattggacgtatatgcgcaaactgaacgtggcttattaagcattcctttaacctcctctatcataatatatgggttcatacattatcttagcaacatttctaacgtcagtgctaatgcaatactctttaagtgggtgtatctcagtattgtaaaaactgctggaaacaaatattacaagggtataggtttacctaaaataattttgtattctaacttggctacattttgctataattttacctttaaaagattggttgacttaatttacaggaggttgatcaataaaggaggtaagtatttgtatcacggaaattttgaaaactctagtaatagcgttccagctgaggaattttttatcaggagaaattggtatgctattcttgcagaaaagatattatggccctttgttggtaaatgtacaggaggtcttttattgaatgcttttttatggatacagagaaagtttaaaattgaatggacgccgaattgctccccttctgaatttagaatgattttcaatattataggttgtggtactgctgctataggctggtctagtttgaagctctatgccagttacaaaagatgtcaggaacttgaaaagatcaatgaatttattgaacaaagttgcaaaggtgagtga

SEQ ID NO: 8733 - DNA, 714 bp, Saccharomyces cerevisiae
atggctcgccaaaattttttaggcttggtcgtctcccaagggaagatgcaaaagacggttaaagtacgtgtagaaacaaaagtctttaataagaaaatcaacaaggagttatttcatagaagagattatttagtgcatgatgaaggtgaaatatcaagggagggtgatttagtaaggatagaagcgacgaggccgctttcaaagaggaagttttttgccattgcagaaattattagaaacaagggtcaacaatttgcattatacgaatcagaagctcagttaagcgttgcaaaagaagaagcccaaaaggcaaaagaatttttggataaaagatcagtgagggagaataaactaaatgaaaaaacaacccttttacgtgatattaggaccatccaagatgctttatctagcgggtcaacgccgaaagagttattggagattaaacaaaggtacggcattcaagatttttcacaagaaacagtgaggcaacttttacagttagacatctctggattggaggttaatttggagaaacaaagaagtctcattgatcgtattcaaacgcgattatccgaattgttgtcgaatgatctaaaatgtgatcaatttttgaaggatcatggtgttgaggatcctttgaccttgaaaaaaaacatcaaaaaaaatttgttaagaaagcacgtcatgatggatatgcaacaaccaagccagtaa

SEQ ID NO: 8734 - DNA, 714 bp, Artificial Sequence
  Description of Artificial Sequence: Synthetic polynucleotide
atggctcgccaaaattttttaggcttggtcgtctcccaagggaagatgcaaaagacggttaaagtacgtgtagaaacaaaagtctttaataagaaaatcaacaaggagttatttcatagaagagattatttagtgcatgatgaaggtgaaatatctagggagggtgatttagtaaggatagaagcgacgaggccgctttccaagaggaagttttttgccattgcagaaattattagaaacaagggtcaacaatttgcattatacgaaagtgaagctcagttaagcgttgcaaaagaagaagcccaaaaggcaaaagaatttttggataaaagatctgtgagggagaataaattgaatgaaaaaacaacccttttacgtgatattaggaccatccaagatgctttatctagcgggtccacgccgaaagagttattggagattaaacaaaggtacggcattcaagatttttctcaagaaacagtgaggcaacttttacagttagacatctctggattggaggttaatttggagaaacaaagaagtctcattgatcgtattcaaacgagattatccgaattgttgagcaatgatttgaaatgtgatcaatttttgaaggatcatggtgttgaggatcctttgaccttgaaaaaaaacatcaaaaaaaatttgttaagaaagcacgtcatgatggatatgcaacaaccaagccagtga

SEQ ID NO: 8735 - DNA, 3105 bp, Saccharomyces cerevisiae
atgcttaggacaagagtgactgctctcctttgtagggctactgtcaggtcaagcaccaattatgtttcattagcgaggactagatcattccattctcaatctattttgctcaaaacagccgctacagacataacgtctacacagtacagcaggattttcaatcctgacttgaaaaacattgatagaccgctagatacttttgctagacgtcatttaggtccttctcctagcgacgttaagaaaatgttaaaaacaatgggttatagcgatttaaacgcatttatagaagagctcgttcctcccaatattttgaagagaagacccttgaaactagaagctcctagtaagggattctgtgaacaagaaatgcttcaacatctagaaaagattgccaataagaaccactataaagttaaaaatttcataggtaagggttactacggtacgattttaccaccggttatacaaagaaacctgctagaaagtccagaatggtatacttcttatacgccctatcaacccgaaatttctcaaggtaggctagaagcgctattaaactttcaaacggttgtttcagatttgactggtttgcctgtggcgaacgcctcattgttggatgagggtacagcggctggagaagctatgctcttgtcattcaatatttccagaaaaaagaaactaaaatacgtaatagataaaaaattacaccagcaaacaaagagtgtccttcacaccagagccaagccgttcaatattgaaattattgaagttgactgttcggatatcaagaaagctgtggatgttttaaagaaccccgacgtatctggttgtttggttcaatatccagcgacagatggttcaatcttaccgcctgactcgatgaaacagttatctgatgcgttacactctcacaagtctttgctctctgtggcctcagatttaatggctttgacacttctaaaaccacctgctcattacggtgctgatatcgtcctgggttcctctcaacgatttggtgtcccaatgggttatggtggtcctcatgctgcttttttcgctgttattgataaattaaacagaaaaattccaggtagaattgtcggtatctctaaagaccgcttaggcaagacggccttgcggttggccctccaaacaagagaacaacatatcaagcgtgataaggcaacttcaaatatatgtaccgctcaagctttactggctaatgttgcttcgagctactgtgtttatcacggtcctaagggcctacagaatatttccaggaggatatttagcttaacatcaatattggcaaatgccatcgaaaatgacagttgccctcacgaactaattaataaaacatggtttgatactttgactataaagttaggtaatggcatatcctccgagcagttattggacaaggccttgaaagaatttaatatcaatttgtttgccgtggacaccaccactatttccttggctcttgatgaaacaactacaaaagctgatgttgaaaatctactaaaagtgtttgacattgaaaattcttcgcagtttctttctgaggactattctaacagtttcccaagggaatttcagcgtactgatgaaatattgaggaacgaagtctttcacatgcaccatagcgaaacagcaatgttgagatatttacataggttgcaatctcgtgatttatctcttgctaattctatgattcctttaggttcctgtactatgaaattgaacagtactgttgaaatgatgccaatcacttggccccaattttcgaatatccatccgttccagccatcaaaccaagtccaaggatacaaggaactaattacttcgttggagaaagatttatgcagcattacaggtttcgatggtatttctttacaaccaaattcaggtgctcaaggtgaatatactggtctgagagtaatcagatcctacctggaaagcaaaggtgaaaatcatcgtaacgtgtgtttaatccctgtatccgctcatggtacaaatccggcttctgccgctatggcgggtttaaaagttgttcctgtcaactgtttgcaggatggctcattagatctggttgacttaaagaataaggctgaacaacattctaaagaactagccgccgtaatgatcacctatccttccacttacggtttatttgaaccaggcatccaacatgctattgatatcgtacattcttttggtggacaagtctatttggatggtgctaatatgaatgcgcaggttgggctaacttcacccggagatcttggtgcagatgtttgccacttgaatttacataagacattttccattcctcatggtggtggtggtccagctggagctcccatttgcgtcaaatctcatttaataccccatttacctaaacatgacgttgttgatatgatcactggaatcggcggtagcaaatccatcgattcggtctcctctgctccatatggtaatgctttagtgttaccaatttcttatgcctatatcaaaatgatgggtaatgagggattaccattttctagtgtgatagcaatgctaaattcaaattatatgatgacaagattaaaagatcattataaaattcttttcgtcaatgaaatgagcacactaaaacactgcgctcatgaatttatagttgatctaagagaatacaaagctaaaggtgttgaagctatcgatgttgccaagagattgcaagactacggattccatgccccaacgttggccttccctgttcccggaactttgatgatagaaccaacagaatcggaaaacttggaagaattggatagattctgtgatgccatgatatccatcaaagaagaaataaatgccttagtagcaggtcaaccaaaaggacagattttgaaaaatgcccctcattcattggaagatcttattacttcctccaattgggatacgagaggttatacccgtgaagaagccgcttacccattaccctttttgagatacaataaattctggcctactgtcgctagactggatgacacttatggtgacatgaatttaatatgtacatgcccttctgtagaagaaattgcgaacgaaactgaatga

SEQ ID NO: 8736 - DNA, 3105 bp, Artificial Sequence
  Description of Artificial Sequence: Synthetic polynucleotide
atgcttaggacaagagtgactgctctcctttgtagggctactgtcaggagcagcaccaattatgtttctttagcgaggactagatctttccattctcaatctattttgctcaaaacagccgctacagacataacgtctacacagtacagcaggattttcaatcctgacttgaaaaacattgatagaccgttagatacttttgctagacgtcatttaggtccttctcctagcgacgttaagaaaatgttaaaaacaatgggttatagcgatttaaacgcatttatagaagagctcgttcctcccaatattttgaagagaagacccttgaaattagaagctcctagtaagggattctgtgaacaagaaatgcttcaacatttggaaaagattgccaataagaaccactataaagttaaaaatttcataggtaagggttactacggtacgattttaccaccggttatacaaagaaacttattggaaagtccagaatggtatacttcttatacgccctatcaacccgaaatttctcaaggtaggttagaagcgttattaaactttcaaacggttgtttctgatttgactggtttgcctgtggcgaacgcctctttgttggatgagggtacagcggctggagaagctatgctcttgagtttcaatatttccagaaaaaagaaattgaaatacgtaatagataaaaaattacaccagcaaacaaagagtgtccttcacaccagagccaagccgttcaatattgaaattattgaagttgactgttctgatatcaagaaagctgtggatgttttaaagaaccccgacgtatctggttgtttggttcaatatccagcgacagatggttctatcttaccgcctgactccatgaaacagttatctgatgcgttacactctcacaagtctttgctctctgtggcctctgatttaatggctttgacacttttgaaaccacctgctcattacggtgctgatatcgtcttgggttcctctcaaagatttggtgtcccaatgggttatggtggtcctcatgctgcttttttcgctgttattgataaattaaacagaaaaattccaggtagaattgtcggtatctctaaagaccgcttaggcaagacggccttgagattggccctccaaacaagagaacaacatatcaagcgtgataaggcaacttccaatatatgtaccgctcaagctttattagctaatgttgcttctagctactgtgtttatcacggtcctaagggcttgcagaatatttccaggaggatatttagcttaacatctatattggcaaatgccatcgaaaatgacagttgccctcacgaattgattaataaaacatggtttgatactttgactataaagttaggtaatggcatatcctccgagcagttattggacaaggccttgaaagaatttaatatcaatttgtttgccgtggacaccaccactatttccttggctcttgatgaaacaactacaaaagctgatgttgaaaatttattgaaagtgtttgacattgaaaattcttctcagtttctttctgaggactattctaacagtttcccaagggaatttcagcgtactgatgaaatattgaggaacgaagtctttcacatgcaccatagcgaaacagcaatgttgagatatttacataggttgcaatctcgtgatttatctcttgctaattctatgattcctttaggttcctgtactatgaaattgaacagtactgttgaaatgatgccaatcacttggccccaattttctaatatccatccgttccagccatctaaccaagtccaaggatacaaggaattgattacttctttggagaaagatttatgcagcattacaggtttcgatggtatttctttacaaccaaattctggtgctcaaggtgaatatactggtttaagagtaatcagatcctacttggaaagcaaaggtgaaaatcatcgtaacgtgtgtttaatccctgtatccgctcatggtacaaatccggcttctgccgctatggcgggtttaaaagttgttcctgtcaactgtttgcaggatggctctttagatttggttgacttaaagaataaggctgaacaacattctaaagaattggccgccgtaatgatcacctatccttccacttacggtttatttgaaccaggcatccaacatgctattgatatcgtacattcttttggtggacaagtctatttggatggtgctaatatgaatgcgcaggttgggttgacttctcccggagatcttggtgcagatgtttgccacttgaatttacataagacattttccattcctcatggtggtggtggtccagctggagctcccatttgcgtcaaatctcatttaataccccatttacctaaacatgacgttgttgatatgatcactggaatcggcggtagcaaatccatcgattctgtctcctctgctccatatggtaatgctttagtgttaccaatttcttatgcctatatcaaaatgatgggtaatgagggattaccattttctagtgtgatagcaatgttgaatagtaattatatgatgacaagattaaaagatcattataaaattcttttcgtcaatgaaatgagcacattaaaacactgcgctcatgaatttatagttgatttgagagaatacaaagctaaaggtgttgaagctatcgatgttgccaagagattgcaagactacggattccatgccccaacgttggccttccctgttcccggaactttgatgatagaaccaacagaaagtgaaaacttggaagaattggatagattctgtgatgccatgatatccatcaaagaagaaataaatgccttagtagcaggtcaaccaaaaggacagattttgaaaaatgcccctcattctttggaagatcttattacttcctccaattgggatacgagaggttatacccgtgaagaagccgcttacccattaccctttttgagatacaataaattctggcctactgtcgctagattagatgacacttatggtgacatgaatttaatatgtacatgcccttctgtagaagaaattgcgaacgaaactgaatga

SEQ ID NO: 8737 - DNA, 4344 bp, Saccharomyces cerevisiae
atggtgacgaagccgtcacataacttaagaagggagcacaaatggttaaaggaaacggcgactttacaggaagacaaagatttcgtattccaggctatccaaaagcacatcgcgaacaaaaggcctaagacaaattcgccaccaacaacgccatccaaagatgaatgtggaccaggaacaacaaactttataaccagcattcctgcatctggaccaacgaatactgctacgaaacaacatgaagtcatgcaaactttgtcgaacgatacagaatggctctcgtacactgccacatcgaatcaatatgctgacgtacccatggttgatataccagccagcacaagtgttgtatcgaacccgaggacgcccaatggctcgaaaactcacaatttcaatacttttcgaccgcacatggctagttctcttgtcgaaaatgacagtagcagaaatctaggtagtagaaataacaataaaagcgtaatcgataattcaagtataggcaaacagctcgaaaatgatataaaattagaggtgatccgccttcaaggctccctaattatggcattgaaagagcaatcgaaattattgctacagaagtgtagtattatcgaatccacatcattgtcagaggacgctaaaaggctacagttaagtagggatatacggcctcagttatcaaatatgtcgatacgaatagatagtctggaaaaggagatcataaaagccaaaaaagatggaatgtcaaaagatcaaagtaaaggtcgcagtcaagtttcttcacaagatgataatatcatatcaagcattctgcccagccccttggaatacaatacatcttccaggaattcaaacctgacaagtactactgcgactaccgtcactaaggcattagccatcactggtgcgaagcaaaatattactaataacaccggtaagaatagcaataatgatagtaataacgatgatttgattcaagtcctggatgatgaggatgatatagactgtgaccctcctgtaatattgaaggagggggctccacattctcccgcattcccgcatctccacatgacgtcagaagaacaagatgaacttacaagaaggagaaatatgcgttcaagagaaccagtcaactacagaatacctgatagggatgatccttttgactatgttatgggtaaatctttgagggacgattatccggatgtcgaaagagaagaagatgagttaacaatggaggcagaagatgatgcccattccagctacatgactactagagatgaagaaaaagaagaaaacgaattactaaatcaaagcgattttgattttgtggtaaacgacgacctagacccaactcaagacacagattatcatgataatatggatgttagtgcaaatattcaggaaagttctcaagaaggtgacactaggtccacaattaccttgtcgcaaaataaaaatgttcaagttattttatcatctcccacagcacagagcgttccctcaaatggccaaaatcaaataggcgtggagcatattgacttgttggaagatgatctggaaaaggacgcaattttggatgatagcatgagtttctcctttggccgtcaacacatgcccatgtctcattctgatctagagttgatagacagcgaaaaagaaaatgaggattttgaagaagataataacaataacggtatcgagtacctatcagatagcgatttagaaagatttgacgaagaaagagagaatagaacccaagtagcagatatccaggaactagacaatgacctgaaaataataacagaaaggaagcttacaggtgacaatgaacacccaccaccatcttggtctcccaaaataaaaagggagaaatccagtgttagtcaaaaggatgaggaagacgattttgatgacgatttttcattaagtgatatagtgagtaaatccaatttatcttctaagacgaatggtccaacctatccttggtctgatgaagttttatatcgtttacatgaagtctttaaactgcctggttttagacctaaccaactagaggctgtaaatgcaactttgcaaggtaaggatgtttttgttcttatgccaacagggggtggtaaatctctttgctatcaacttcctgcagtggtgaaatcgggtaaaacacatggtactactattgtcatctctccgctaatttccctgatgcaagatcaagtggaacatttattgaataaaaatattaaggcgagcatgttcagttcgaggggtactgccgagcaaagacgacaaactttcaatttatttattaatggattattggatttagtttacatatctcctgagatgatcagtgcctcagaacaatgcaagagagctatcagtagattatacgcagacggtaagttggctcgtattgttgtagatgaagcacattgtgtttctaactggggccacgatttcaggcctgattataaagaattaaaatttttcaaaagagaataccctgatattccaatgattgctttaactgcaactgcaagtgaacaagtcagaatggacatcattcacaatttagaactaaaggaacctgttttcctaaaacaaagttttaatagaacaaatttgtattacgaagtaaacaagaagaccaaaaataccatttttgaaatctgtgatgcggttaaatctaggttcaaaaatcaaacgggtataatatattgccactccaagaaatcatgcgagcaaacatcagcccaaatgcaaagaaatggcatcaagtgtgcatattaccatgcaggcatggagcctgatgaaagattaagtgtacagaaggcatggcaggcggatgagatacaagtcatttgtgctactgttgctttcggaatgggtattgataaacctgatgtgagatttgtttaccactttaccgttccccgaacattagaaggctattatcaagaaaccggccgtgctggaagagatgggaactattcatattgtattacctacttttcattcagggacattagaaccatgcagacaatgatccagaaggataagaacttagacagagagaataaggaaaaacatctgaataaattacagcaagtaatggcatactgtgacaacgttactgactgcagaagaaagttagttttatcttatttcaatgaggattttgactccaaactgtgtcataaaaactgtgataattgtagaaatagcgccaacgtgataaacgaggaaagggatgttacagaacctgccaagaagattgtaaaattagtggaaagtatccaaaatgaaagagtcacaataatttattgccaagatgtctttaaaggttcgagaagctccaaaattgttcaggctaaccatgacaccttagaggagcatggtattggtaaatccatgcaaaaatcagaaatcgaaaggattttcttccatttgattacgatccgagttttacaagagtattcaataatgaacaatagcggttttgcttcaagctatgtgaaagttggtcccaatgctaagaaattgctgactggaaaaatggagataaagatgcaatttacaatatcagcaccaaactcccgtccctcgacatcttctagctttcaagcaaatgaagataatataccagttatcgcgcagaaatcaacaaccattggaggaaatgtggctgctaatccaccgcgctttataagtgcgaaggaacacctaagatcgtatacatacggcggttcgaccatgggtagctcacatccgatcactttgaaaaacacaagcgatttacgctcgacacaagaacttaataatctgcgaatgacatacgaacgtctgagggaattatctttaaatttaggaaatagaatggttcctccagttgggaactttatgcctgacagtattttaaaaaagatggcagcaatattaccaatgaatgattcggcttttgcaactttaggcacagtggaggacaaatatcgccgaaggttcaagtactttaaagccacgatagcagatcttagcaaaaagagatcaagcgaggatcatgaaaaatacgacacaatactaaatgatgaatttgtgaacagggccgcggcttccagcaatgggattgcccaaagtactggaacaaaatctaagttttttggcgccaatttaaacgaagccaaagaaaatgaacaaattatcaatcaaatcagacaaagccaattacccaaaaataccacaagcagcaaatcaggtacaaggtccatcagtaagtcgtccaagaagtctgctaatgggagacgaggttttagaaattaccgaggtcactacagaggaagaaagtga

SEQ ID NO: 8738 - DNA, 4344 bp, Artificial Sequence
  Description of Artificial Sequence: Synthetic polynucleotide
atggtgacgaagccgtctcataacttaagaagggagcacaaatggttaaaggaaacggcgactttacaggaagacaaagatttcgtattccaggctatccaaaagcacatcgcgaacaaaaggcctaagacaaattctccaccaacaacgccatccaaagatgaatgtggaccaggaacaacaaactttataaccagcattcctgcatctggaccaacgaatactgctacgaaacaacatgaagtcatgcaaactttgtctaacgatacagaatggctctcttacactgccacaagtaatcaatatgctgacgtacccatggttgatataccagccagcacaagtgttgtatccaacccgaggacgcccaatggctctaaaactcacaatttcaatacttttagaccgcacatggctagttctcttgtcgaaaatgacagtagcagaaatttgggtagtagaaataacaataaaagcgtaatcgataatagtagtataggcaaacagctcgaaaatgatataaaattagaggtgatccgccttcaaggctccttgattatggcattgaaagagcaaagtaaattattgttacagaagtgtagtattatcgaatccacatctttgagtgaggacgctaaaaggttacagttaagtagggatataaggcctcagttatccaatatgagtataagaatagatagtttagaaaaggagatcataaaagccaaaaaagatggaatgtccaaagatcaaagtaaaggtcgcagtcaagtttcttctcaagatgataatatcatatctagcattttgcccagccccttggaatacaatacatcttccaggaatagcaacttaacaagtactactgcgactaccgtcactaaggcattagccatcactggtgcgaagcaaaatattactaataacaccggtaagaatagcaataatgatagtaataacgatgatttgattcaagtcttggatgatgaggatgatatagactgtgaccctcctgtaatattgaaggagggggctccacattctcccgcattcccgcatctccacatgacgagtgaagaacaagatgaacttacaagaaggagaaatatgcgttccagagaaccagtcaactacagaatacctgatagggatgatccttttgactatgttatgggtaaatctttgagggacgattatccggatgtcgaaagagaagaagatgagttaacaatggaggcagaagatgatgcccattccagctacatgactactagagatgaagaaaaagaagaaaacgaattattgaatcaaagcgattttgattttgtggtaaacgacgacttggacccaactcaagacacagattatcatgataatatggatgttagtgcaaatattcaggaaagttctcaagaaggtgacactaggtccacaattaccttgtctcaaaataaaaatgttcaagttattttatcttctcccacagcacagagcgttccctccaatggccaaaatcaaataggcgtggagcatattgacttgttggaagatgatttggaaaaggacgcaattttggatgatagcatgagtttctcctttggccgtcaacacatgcccatgtctcattctgatttagagttgatagacagcgaaaaagaaaatgaggattttgaagaagataataacaataacggtatcgagtacctttctgatagcgatttagaaagatttgacgaagaaagagagaatagaacccaagtagcagatatccaggaattagacaatgacttgaaaataataacagaaaggaagcttacaggtgacaatgaacacccaccaccatcttggtctcccaaaataaaaagggagaaatccagtgttagtcaaaaggatgaggaagacgattttgatgacgatttttctttaagtgatatagtgagtaaatccaatttatcttctaagacgaatggtccaacctatccttggtctgatgaagttttatatcgtttacatgaagtctttaaattacctggttttagacctaaccaattggaggctgtaaatgcaactttgcaaggtaaggatgtttttgttcttatgccaacagggggtggtaaatctctttgctatcaacttcctgcagtggtgaaatctggtaaaacacatggtactactattgtcatctctccgttgatttccttgatgcaagatcaagtggaacatttattgaataaaaatattaaggcgagcatgttcagttctaggggtactgccgagcaaagaagacaaactttcaatttatttattaatggattattggatttagtttacatatctcctgagatgatcagtgccagtgaacaatgcaagagagctatcagtagattatacgcagacggtaagttggctcgtattgttgtagatgaagcacattgtgtttctaactggggccacgatttcaggcctgattataaagaattaaaatttttcaaaagagaataccctgatattccaatgattgctttaactgcaactgcaagtgaacaagtcagaatggacatcattcacaatttagaattgaaggaacctgttttcttgaaacaaagttttaatagaacaaatttgtattacgaagtaaacaagaagaccaaaaataccatttttgaaatctgtgatgcggttaaatctaggttcaaaaatcaaacgggtataatatattgccactccaagaaaagttgcgagcaaacatctgcccaaatgcaaagaaatggcatcaagtgtgcatattaccatgcaggcatggagcctgatgaaagattaagtgtacagaaggcatggcaggcggatgagatacaagtcatttgtgctactgttgctttcggaatgggtattgataaacctgatgtgagatttgtttaccactttaccgttcccagaacattagaaggctattatcaagaaaccggccgtgctggaagagatgggaactattcttattgtattacctacttttctttcagggacattagaaccatgcagacaatgatccagaaggataagaacttagacagagagaataaggaaaaacatttgaataaattacagcaagtaatggcatactgtgacaacgttactgactgcagaagaaagttagttttatcttatttcaatgaggattttgactccaaattatgtcataaaaactgtgataattgtagaaatagcgccaacgtgataaacgaggaaagggatgttacagaacctgccaagaagattgtaaaattagtggaaagtatccaaaatgaaagagtcacaataatttattgccaagatgtctttaaaggttccagaagctccaaaattgttcaggctaaccatgacaccttagaggagcatggtattggtaaatccatgcaaaaaagtgaaatcgaaaggattttcttccatttgattacgatcagagttttacaagagtattctataatgaacaatagcggttttgcttctagctatgtgaaagttggtcccaatgctaagaaattgttgactggaaaaatggagataaagatgcaatttacaatatctgcaccaaactcccgtccctccacatcttctagctttcaagcaaatgaagataatataccagttatcgcgcagaaatctacaaccattggaggaaatgtggctgctaatccaccgcgctttataagtgcgaaggaacacttgagatcttatacatacggcggttctaccatgggtagctctcatccgatcactttgaaaaacacaagcgatttacgctctacacaagaacttaataatttaagaatgacatacgaacgtttaagggaattatctttaaatttaggaaatagaatggttcctccagttgggaactttatgcctgacagtattttaaaaaagatggcagcaatattaccaatgaatgattctgcttttgcaactttaggcacagtggaggacaaatatcgcagaaggttcaagtactttaaagccacgatagcagatcttagcaaaaagagaagcagcgaggatcatgaaaaatacgacacaatattgaatgatgaatttgtgaacagggccgcggcttccagcaatgggattgcccaaagtactggaacaaaatctaagttttttggcgccaatttaaacgaagccaaagaaaatgaacaaattatcaatcaaatcagacaaagccaattacccaaaaataccacaagcagcaaatctggtacaaggtccatcagtaagtcttccaagaagtctgctaatgggagaagaggttttagaaattacagaggtcactacagaggaagaaagtga

SEQ ID NO: 8739 - DNA, 1122 bp, Saccharomyces cerevisiae
atggctgtcggtggtaataactggagcatgtggctgcgaatgtcacgggtccacctcaggcagatcacgaagtctctggaccgaacgctgatcagtttgagccatgggaatttttcccaccaatataatcgcaatatttttgtcacttggtggaagagcctatttgaggcttctacagcttttaggagggcaagtggtttaacggtatctcctctcacgaggagaggaatcgcaaggtttgaccatttcagacctgttcccaatgtcagtaaatttgcttcttttcccagagtgcccaaaggagccccaaggggcctttttaccaactggaatatgactacatcaaagagattattagggcagagagcttattcgacttccagtatcaaatttacccaagaagccgtgaataacatgactatatctttgaggtgttttttcaactcactaggcggattaaatcagtgctcccactctaattcctgcaaagcttatcagaatgcgtctaatgttacctctaaacaggatcacgtccaaccagttgcccttaagaagttatctcaaaaggatatcaatttcattcgtaatttagaactatttaagataatgaagacccagaatgaagtcgttgatgaaacaagcgcatattacatggaaaaaccaggttcctatattgaatttaccatttcagaatttaacgttaatgggacattctccgcacctttgtcatttttagatccttctttgttagcggatttggatgaaatgattagaaattacaaatacgaattaaaatcaatatacagtagtgttgacatgatcttgcagaattatggatcattgccgataacttttcatcgaaataagattcgaatacattttccaaactcaactgtggtggaaacagaaaaactaattgcaggtctgaatattgctacgggtgttatttacgcagatacgtctcccgatatcagtctagaaggtacaaatttgaatgctctggttaatgttgacaattcaggaagcgtatggtcttttgttaaggagccctcgtttccctctaggagcgctttttcacctattttatcagatgcatcctatgatacttatgaattggtctag

SEQ ID NO: 8740 - DNA, 1122 bp, Artificial Sequence
  Description of Artificial Sequence: Synthetic polynucleotide
atggctgtcggtggtaataactggagcatgtggttaagaatgtctcgtgtccacctcaggcagatcacgaagtctttggacagaacgttgatcagtttgagccatgggaatttttcccaccaatataatcgcaatatttttgtcacttggtggaagagcttgtttgaggcttctacagcttttaggagggcaagtggtttaacggtatctcctctcacgaggagaggaatcgcaaggtttgaccatttcagacctgttcccaatgtcagtaaatttgcttcttttcccagagtgcccaaaggagccccaaggggcctttttaccaactggaatatgactacatccaagagattattagggcagagagcttattctacttccagtatcaaatttacccaagaagccgtgaataacatgactatatctttgaggtgttttttcaactctttaggcggattaaatcagtgctcccactctaattcctgcaaagcttatcagaatgcgtctaatgttacctctaaacaggatcacgtccaaccagttgcccttaagaagttatctcaaaaggatatcaatttcattcgtaatttagaattatttaagataatgaagacccagaatgaagtcgttgatgaaacaagcgcatattacatggaaaaaccaggttcctatattgaatttaccatttctgaatttaacgttaatgggacattctccgcacctttgagttttttagatccttctttgttagcggatttggatgaaatgattagaaattacaaatacgaattaaaatctatatacagtagtgttgacatgatcttgcagaattatggatctttgccgataacttttcatagaaataagattagaatacattttccaaactctactgtggtggaaacagaaaaattgattgcaggtttgaatattgctacgggtgttatttacgcagatacgtctcccgatatcagtttagaaggtacaaatttgaatgctttggttaatgttgacaattctggaagcgtatggtcttttgttaaggagcccagttttccctctaggagcgctttttctcctattttaagtgatgcatcctatgatacttatgaattggtctga

SEQ ID NO: 8741 - DNA, 2163 bp, Saccharomyces cerevisiae
atgaattcgaatgaagatatacatgaagaacgcattgaagttccacgaactccccatcaaacccagccagagaaagactctgatcgcatcgctctcagggatgaaatatcagtaccagaaggcgatgaaaaagcatattcggatgagaaagtagaaatggcaaccacaaatgcatccagtaactttggctcaaatgaaagtgcaaaagacggcgaatcaatcggcgccttttcaaatccccatgaggctctgatgcagtcaaaattgagagaagaatcccagagtaaaaccatactaccatccgatgacctcagccagcaattagaaaccgaagaatccaaagttgaagaggctctaaaaagaataacctcacccccattaccaccgagggctgactgcatagaagaatctgcatctgctcttaaatcctcattgcctccagtgctagcaggaaataaaaatgatcaagccccccttgaccgaccacagttacctccgaggcaggtagttaatgcggaaactcttcatttgaaggcgccccatggtaatgcgactccctccaaatcaccaacgagtgctgtaggtaattcttcttcatcgacccctccaaccttaccaccacgccgtatagaagatcctttagacttggctgctcaaaaacatttcctagcgagtacatttaagagaaatatgctcttttataaaagtgaagataactctatcaaatgtgatttggataaaaatatactaaatttaaaagaagattcaaaaaaaattaacaacaatgaaattcctgaagaggttagttcattttggttaaaggttatcggcgactatcaaaatatcttaataaacgatatcgaaaccttacatttccaactatctcgaggtataccagccgcttatcgattggtagtctggcagttagtaagttatgcaaaatcgaaatcctttgaccctatatatgaaacgtatctaacggaaatggcaccttttgacgtccaggaatttgaaaatcagctaaaaatgatggacgaagttccctctgaatacgtaaaacgcataagtaatgtgttaaaggcttatttactttttgacccagagtgtgagttttctaccgacattgcttatattatcaatatgattcttgacgtttgcgaggaggaggcaaatgcatttggtctacttgtacgcctaatgaaagtttacggtttaagactcttgttcttaccaagtgcttctgagatcgatattctttgctataaatttgatagacttgtagaagaattttatcctgaaattcacaaccacatggttgaaaaaggcgtccgttcttccatgtttttgcccggtttcttcacgacactgtttcaaaagaaacttcccactgaaattcaaccacgtatcggtgatatggtatttttagaaggtattgactctattatgagaattttagccacacttttatctaattcccgagaccatctgttaaaaatgggttttgatgatatgctggagctattgaaatcaggtctgttagatgcttatattaagcagaatgatggtacacgcggtgacactcttctctcaaatgaatgtatggataaattactacaagactctatgatgaaagtagcaataaccccaaagactatgaagaaatattcttctgaatatgaggaaattcacagattggacaatgaaaaagaagtgcaatataagtctatcacggaaaaaaatttacatttacaaaagcatgttcgtaaattagaaaacgactacacatctttaaatagagagcatgtgacaattgcgaacgagttagtgaaaaatcggcttaatatcgagtctgtattaaatgaaaataatggttacaaacttcaaattttagatttgaagaaaaagttggattcagaaaaaaagaagcaagttttaggtgtatatgtgcccaatgatttaaagaaagatttggaagagacaatgaaaaagaatacccaagtaatggacgaaaatttgaaattgcaggataggatttcagaactagaaaggcttattgaagaaataaaaactgcaaacaaaaatggtacgttattcgaatattctaattctaaaaataatcctttgggagccggctggtcaggatttaaaaaggtttttaaatag

SEQ ID NO: 8742 - DNA, 2163 bp, Artificial Sequence
  Description of Artificial Sequence: Synthetic polynucleotide
atgaatagtaatgaagatatacatgaagaacgcattgaagttccaagaactccccatcaaacccagccagagaaagactctgatcgcatcgctctcagggatgaaatatctgtaccagaaggcgatgaaaaagcatattctgatgagaaagtagaaatggcaaccacaaatgcatccagtaactttggcagtaatgaaagtgcaaaagacggcgaaagtatcggcgccttttctaatccccatgaggctttgatgcagtccaaattgagagaagaatcccagagtaaaaccatattgccatccgatgacctcagccagcaattagaaaccgaagaatccaaagttgaagaggctttgaaaagaataaccagccccccattaccaccgagggctgactgcatagaagaatctgcatctgctcttaaatcctctttgcctccagtgttggcaggaaataaaaatgatcaagccccccttgacagaccacagttacctccgaggcaggtagttaatgcggaaactcttcatttgaaggcgccccatggtaatgcgactccctccaaatctccaacgagtgctgtaggtaattcttcttcttccacccctccaaccttaccaccacgccgtatagaagatcctttagacttggctgctcaaaaacatttcttggcgagtacatttaagagaaatatgctcttttataaaagtgaagataactctatcaaatgtgatttggataaaaatatattgaatttaaaagaagattctaaaaaaattaacaacaatgaaattcctgaagaggttagttctttttggttaaaggttatcggcgactatcaaaatatcttaataaacgatatcgaaaccttacatttccaattatctcgtggtataccagccgcttatagattggtagtctggcagttagtaagttatgcaaaatctaaatcctttgaccctatatatgaaacgtatttgacggaaatggcaccttttgacgtccaggaatttgaaaatcagttgaaaatgatggacgaagttccctctgaatacgtaaaacgcataagtaatgtgttaaaggcttatttactttttgacccagagtgtgagttttctaccgacattgcttatattatcaatatgattcttgacgtttgcgaggaggaggcaaatgcatttggtttacttgtacgcttaatgaaagtttacggtttaagactcttgttcttaccaagtgcttctgagatcgatattctttgctataaatttgatagacttgtagaagaattttatcctgaaattcacaaccacatggttgaaaaaggcgtccgttcttccatgtttttgcccggtttcttcacgacattatttcaaaagaaacttcccactgaaattcaaccacgtatcggtgatatggtatttttagaaggtattgactctattatgagaattttagccacacttttatctaattccagagaccatcttttaaaaatgggttttgatgatatgttagagttattgaaatctggtttattagatgcttatattaagcagaatgatggtacacgcggtgacactcttctctctaatgaatgtatggataaattattacaagactctatgatgaaagtagcaataaccccaaagactatgaagaaatattcttctgaatatgaggaaattcacagattggacaatgaaaaagaagtgcaatataagtctatcacggaaaaaaatttacatttacaaaagcatgttcgtaaattagaaaacgactacacatctttaaatagagagcatgtgacaattgcgaacgagttagtgaaaaatagacttaatatcgagtctgtattaaatgaaaataatggttacaaacttcaaattttagatttgaagaaaaagttggattctgaaaaaaagaagcaagttttaggtgtatatgtgcccaatgatttaaagaaagatttggaagagacaatgaaaaagaatacccaagtaatggacgaaaatttgaaattgcaggataggatttctgaattggaaaggcttattgaagaaataaaaactgcaaacaaaaatggtacgttattcgaatattctaattctaaaaataatcctttgggagccggctggtctggatttaaaaaggtttttaaatga

SEQ ID NO: 8743 - DNA, 777 bp, Saccharomyces cerevisiae
atgcaaaaaattttcagaccattccaattaacgagaggctttacctcttccgtaaaaaacttcaggcaatggagactgattgaaacaaggaagattgccaaacaaccgaactaccaagttggtgatgctaaacctttacatatgccaaaagaaagaaagaaatttccagattacaagtatggggaatctaatatcttcaaacagagtaacaaaggtctatatggtggatctttcgttcagtttggtaacaatatttctgaaagtaaagccaaaacgaggaagaagtggttgccaaatgttgtcaaaaaaggtctctggagtgagactctgaacagaaaaatcagtatcaaaatgaccgctaaagttttaaaaacaatcagtaaagaaggagggattgacaactatttaacaaaggaaaaatctgcaagaataaaagaattagggccgaccggatggaagcttcgttatagggttttaaaaagaaaagatgaaatagagaatcccccacataaggatgcacctatcatagaaatggctggtggtaaaaaggccaaaatttactatgatgaaatagtaaacggctcaccaagaaaaatatcagttggaagaagaagattgatgtcatttttatatcctttagagaaattggaatataggtcagtagggaaggacctgaactacaaaaaatttgtcgagttatttgccgacgttccagtcaaggatatcctagctagattagaggatcataaattcgacttatccaccatcaccgtataa

SEQ ID NO: 8744 - DNA, 777 bp, Artificial Sequence
  Description of Artificial Sequence: Synthetic polynucleotide
atgcaaaaaattttcagaccattccaattaacgagaggctttacctcttccgtaaaaaacttcaggcaatggagattgattgaaacaaggaagattgccaaacaaccgaactaccaagttggtgatgctaaacctttacatatgccaaaagaaagaaagaaatttccagattacaagtatggggaatctaatatcttcaaacagagtaacaaaggtttatatggtggatctttcgttcagtttggtaacaatatttctgaaagtaaagccaaaacgaggaagaagtggttgccaaatgttgtcaaaaaaggtctctggagtgagactttgaacagaaaaatcagtatcaaaatgaccgctaaagttttaaaaacaatcagtaaagaaggagggattgacaactatttaacaaaggaaaaatctgcaagaataaaagaattagggccgaccggatggaagcttcgttatagggttttaaaaagaaaagatgaaatagagaatcccccacataaggatgcacctatcatagaaatggctggtggtaaaaaggccaaaatttactatgatgaaatagtaaacggctctccaagaaaaatatctgttggaagaagaagattgatgagttttttatatcctttagagaaattggaatataggtctgtagggaaggacttgaactacaaaaaatttgtcgagttatttgccgacgttccagtcaaggatatcttggctagattagaggatcataaattcgacttatccaccatcaccgtatga

SEQ ID NO: 8745 - DNA, 303 bp, Saccharomyces cerevisiae
atgaccgttaagacaggaattgctattggtttaaacaaaggtaagaaggtcactagcatgaccccagctccaaaaatctcttacaagaaaggtgctgcttccaacagaaccaagttcgtaagatctttggtcagagaaatcgctggtttgtctccatacgaaagaagattgattgatctaataagaaactctggtgaaaagagagctagaaaggtcgccaagaagagattgggttctttcaccagagccaaggctaaggtcgaagaaatgaacaacatcattgctgcttctcgtcgtcactaa

SEQ ID NO: 8746 - DNA, 303 bp, Artificial Sequence
  Description of Artificial Sequence: Synthetic polynucleotide
atgaccgttaagacaggaattgctattggtttaaacaaaggtaagaaggtcactagcatgaccccagctccaaaaatctcttacaagaaaggtgctgcttccaacagaaccaagttcgtaagatctttggtcagagaaatcgctggtttgtctccatacgaaagaagattgattgatttgataagaaactctggtgaaaagagagctagaaaggtcgccaagaagagattgggttctttcaccagagccaaggctaaggtcgaagaaatgaacaacatcattgctgcttctcgtcgtcactga

SEQ ID NO: 8747 - DNA, 222 bp, Saccharomyces cerevisiae
atgtctaatccatgccagaaggaggcctgcgccatccaagattgccttctatcacatcagtacgatgatgctaaatgcgctaaagttatagatcagctgtacatctgctgctcaaaattttacaatgacaatggaaaagattcacggtcaccctgctgtccgctaccttcgcttcttgagttgaagatgaaacagcgaaagcttacaccaggggacagttga

SEQ ID NO: 8748 - DNA, 222 bp, Artificial Sequence
  Description of Artificial Sequence: Synthetic polynucleotide
atgtctaatccatgccagaaggaggcctgcgccatccaagattgccttttatctcatcagtacgatgatgctaaatgcgctaaagttatagatcagttatacatctgctgctccaaattttacaatgacaatggaaaagattctagatctccctgctgtccgttgccttctcttcttgagttgaagatgaaacagagaaagcttacaccaggggacagttga

SEQ ID NO: 8749 - DNA, 384 bp, Saccharomyces cerevisiae
atgtcttcaaactatgccactcctttagacgatgaggtgtttcccttatcttttgccaattatcaatttaccgagcatgtgtcacttggtgagcattattcactcaatacttcggaagatgccaaatataataatttgaatggtcctttcgtggtaccgagagacaccgggaagttcgatttgaacacaagttctgcctcggacgagactgtgttctcgttagataaccctcaagaaaacaactacaaacaccaagccatgaataacgtccaggattgtcgcatggccgtcgcggccaaaactacccagtcgtgtgataaattgaccgatctttatgccaatgccgcccaacaaaactacagattgtggctgtcttcattttag

SEQ ID NO: 8750 - DNA, 384 bp, Artificial Sequence
  Description of Artificial Sequence: Synthetic polynucleotide
atgtcttccaactatgccactcctttagacgatgaggtgtttcccttatcttttgccaattatcaatttaccgagcatgtgtctcttggtgagcattattccctcaatacttctgaagatgccaaatataataatttgaatggtcctttcgtggtaccgagagacaccgggaagttcgatttgaacacaagttctgccagtgacgagactgtgttctctttagataaccctcaagaaaacaactacaaacaccaagccatgaataacgtccaggattgtcgcatggccgtcgcggccaaaactacccagtcctgtgataaattgaccgatctttatgccaatgccgcccaacaaaactacagattgtggttatcttctttttga

SEQ ID NO: 8751 - DNA, 3267 bp, Saccharomyces cerevisiae
atgaacaagctaagagacaaatttgtagattctacagtagaagaagaaagattgcgtgaaaatcgaaatcatgagaaatactggtatcgttggggtccctacttgagtgaaagaagctgggcgacagtccgtgaagattattctttaaacggtgatgcttggagcaattttcctttcgaacatgccaatgcaagagtattccgttggggtgaagatggattatttggtgtctcagataacaaacaattggtgtgtatgaatgtcgctctgtggaacggtaaagatgaaagattgaaggaaaggttgttcgggttgactgggccacaagggaaccatggtgaggatgttaaggaattgtacttttacctggacaatactcccactcattcatatatgaaagctttatacaagtatccctttaaaaaggcctttccatacaaagaattggtgcaaaagaatggtgaaaggggatacgaggataaagaattcgaagtttacgatatagatgggctataccgtgatagtgaaaccggtgacaacccttatttcgatgttttttttgaaatggcaaaggatgacgaaaaccctagtgaactgaactttcggctaactatacataatcgaagtaaaatcgactctggtgagctctacatagctccccaacttttcttcagaaatacttgggcttttgacggtactagaacaaaggacaagcccttgcttgaaagagatgcagaagcagcgaacttaatcaatatgactcacaagaaatatggtaattgccaaatggtctttcagccatctccaggtgggttctcttccggtacaaacgaggaagaggaagataaagaggtagaagatatagatcctctgctgctatttaccgataatgagtccaatttagtaaaactatttaacgaagaaaagaatccttccgagtacacaaaggatgcttttgaagaatatcttgttcaaggcaaaaccgatgctgtaaatcctgaaaataaaggaacaaaggcctgcgcagtatatcacttcaaaaatattccgcccggagagtatgttactgtgagatacaaatttacaaatgacccaaaaaactctatctttaaggcacaaaacctggctgtcgtagatgaagatgagtttgatttgattttcgataacagagaggaggaagctgataacttctactggaggattacacctttgccaatcagtgatgaattaagaaaccttcaaagacaagctttttctggtttgctatggactaaacagttctacaattttacatatgatgcttggtataatggtgacgccaatgttaagcctcgccctccccctaatagagctaatggcaggaacaagaactggaagcacctttacatcgaagatatcttatcaatgcccgacaaatgggagtatccattttttgcttcatgggatactgcgtttcactgcattcctttagctatgattgatccagaatttgcaaaacggcaattggatttattaaccagagagtggtacatgcatcctaacggtcaaattccggcatacgaatggaacttcaatgacgtaaatccaccagtccatgcatgggctgtgtatcgtgttttcaagatcgaaagaaacatgtacaaccgtgaagatcgtacatttttagaacgagttttccagaagcttttgttaaattttacatggtgggtcaacagaaaggatactgaaggtaaaaatgtttttgagggcggatttttgggtcttgataatattggcgttttcaacagatcagaaccactacccactggcggtacgcttgaacaggctgattctacaggttggatggcctttttcagccttcaaatgctaaatattgcattagagctcgccaaagaaaacccggtttatgaagatattgcctctaaattttttgaacattttatcttaatcagtgactctatgtcctttgaatacgctactgatattacgggagagaaatgtaaagaagttatcaaacaaaacctatggaatgaagcagacaaattttattacgatgccatctcttggggtgaccacaaggtgcaactaccaataagatctctcgtgggattgatcccactatatgcttctatgactttagagcctagtatcataaaacaattccgcggtttcaagaagagggttgattggtttgtgaacaaccgtccagaaatctttgatagaaacattgcgtccatgtcaaaaaaaggagtgggagaaagactacttttatccctagttactaaggaaagattaacagccatactgtcacgtttgctggatgaaactgagtttttgtcaccatatggtattagatctctttccaaatatcatgagaagcacccattcgaaatgaatgtaaatggtgtcgaatatatggtcaaatatttgccgggcgaatcagactcgggtatgttcggcggtaattctaactggagagggcccatttggtttcctaccagctttttaataatggaagcattacaaaggttttacctgtactacggttccgacttcaaagtagagtgtcccgtaggttcaggagattatttgaatcttgctgaagttgccgaagaacttggatatcgtatgattcacttatttgttccagacgaaaacggggagcgcgccattcattatggtgatcactctaagtttctgtcttctgatccatatttcagggattatgtgccattttttgaatactttgacggtgatactggaagagggcttggcgcttcacaccaatgtggttggactgctcttgtggccaaatggataagtgatgtaggtatatcctgtgtaagactacctcgtacgccaagatcatctgtggcaacgaccgcttcaacagagagctctgagcaaggtcccaaaatgaagagaatggcaagacgtaagagtgcaaagtctttggtaaactacactgccaccattttggacttaaccgaagaagaaaagcgccatcataggatagggggcacccattctgggttgacaccacaaagcagcatttcaagtgacaaggctagacatttgatggaggaaatgaatgaagaggaaggtattcacgaaactgtggtacctgaagatcgtcacaactttgaaaccaagcttataggcaagctaaaagataaggtgaaaaatatgaaagtaactgacaaggctaaagatgaggatatagacccaatggacccaatgagtccgttgaataaggatgtgtcttga

SEQ ID NO: 8752 - DNA, 3267 bp, Artificial Sequence
  Description of Artificial Sequence: Synthetic polynucleotide
atgaacaagttgagagacaaatttgtagattctacagtagaagaagaaagattgcgtgaaaatagaaatcatgagaaatactggtatcgttggggtccctacttgagtgaaagaagctgggcgacagtccgtgaagattattctttaaacggtgatgcttggagcaattttcctttcgaacatgccaatgcaagagtattccgttggggtgaagatggattatttggtgtctctgataacaaacaattggtgtgtatgaatgtcgctttatggaacggtaaagatgaaagattgaaggaaaggttgttcgggttgactgggccacaagggaaccatggtgaggatgttaaggaattgtacttttacttggacaatactcccactcattcttatatgaaagctttatacaagtatccctttaaaaaggcctttccatacaaagaattggtgcaaaagaatggtgaaaggggatacgaggataaagaattcgaagtttacgatatagatgggttataccgtgatagtgaaaccggtgacaacccttatttcgatgttttttttgaaatggcaaaggatgacgaaaaccctagtgaattgaactttagattaactatacataatagaagtaaaatcgactctggtgagctctacatagctccccaacttttcttcagaaatacttgggcttttgacggtactagaacaaaggacaagcccttgcttgaaagagatgcagaagcagcgaacttaatcaatatgactcacaagaaatatggtaattgccaaatggtctttcagccatctccaggtgggttctcttccggtacaaacgaggaagaggaagataaagaggtagaagatatagatcctttattactttttaccgataatgagtccaatttagtaaaattatttaacgaagaaaagaatccttccgagtacacaaaggatgcttttgaagaatatcttgttcaaggcaaaaccgatgctgtaaatcctgaaaataaaggaacaaaggcctgcgcagtatatcacttcaaaaatattccgcccggagagtatgttactgtgagatacaaatttacaaatgacccaaaaaactctatctttaaggcacaaaacttggctgtcgtagatgaagatgagtttgatttgattttcgataacagagaggaggaagctgataacttctactggaggattacacctttgccaatcagtgatgaattaagaaaccttcaaagacaagctttttctggtttgttatggactaaacagttctacaattttacatatgatgcttggtataatggtgacgccaatgttaagcctcgccctccccctaatagagctaatggcaggaacaagaactggaagcacctttacatcgaagatatcttatctatgcccgacaaatgggagtatccattttttgcttcttgggatactgcgtttcactgcattcctttagctatgattgatccagaatttgcaaaaagacaattggatttattaaccagagagtggtacatgcatcctaacggtcaaattccggcatacgaatggaacttcaatgacgtaaatccaccagtccatgcatgggctgtgtatcgtgttttcaagatcgaaagaaacatgtacaaccgtgaagatcgtacatttttagaaagagttttccagaagcttttgttaaattttacatggtgggtcaacagaaaggatactgaaggtaaaaatgtttttgagggcggatttttgggtcttgataatattggcgttttcaacagaagtgaaccattgcccactggcggtacgcttgaacaggctgattctacaggttggatggcctttttcagccttcaaatgttgaatattgcattagagctcgccaaagaaaacccggtttatgaagatattgcctctaaattttttgaacattttatcttaatcagtgactctatgtcctttgaatacgctactgatattacgggagagaaatgtaaagaagttatcaaacaaaacctttggaatgaagcagacaaattttattacgatgccatctcttggggtgaccacaaggtgcaattaccaataagatctctcgtgggattgatcccattgtatgcttctatgactttagagcctagtatcataaaacaattccgcggtttcaagaagagggttgattggtttgtgaacaaccgtccagaaatctttgatagaaacattgcgtccatgtccaaaaaaggagtgggagaaagattacttttatccttggttactaaggaaagattaacagccatattatctcgtttgttggatgaaactgagtttttgtctccatatggtattagatctctttccaaatatcatgagaagcacccattcgaaatgaatgtaaatggtgtcgaatatatggtcaaatatttgccgggcgaaagtgactctggtatgttcggcggtaattctaactggagagggcccatttggtttcctaccagctttttaataatggaagcattacaaaggttttacttgtactacggttccgacttcaaagtagagtgtcccgtaggttctggagattatttgaatcttgctgaagttgccgaagaacttggatatcgtatgattcacttatttgttccagacgaaaacggggagcgcgccattcattatggtgatcactctaagtttttatcttctgatccatatttcagggattatgtgccattttttgaatactttgacggtgatactggaagagggcttggcgcttctcaccaatgtggttggactgctcttgtggccaaatggataagtgatgtaggtatatcctgtgtaagattacctcgtacgccaagatcttctgtggcaacgaccgcttctacagagagctctgagcaaggtcccaaaatgaagagaatggcaagacgtaagagtgcaaagtctttggtaaactacactgccaccattttggacttaaccgaagaagaaaagcgccatcataggatagggggcacccattctgggttgacaccacaaagcagcatttccagtgacaaggctagacatttgatggaggaaatgaatgaagaggaaggtattcacgaaactgtggtacctgaagatcgtcacaactttgaaaccaagcttataggcaagttgaaagataaggtgaaaaatatgaaagtaactgacaaggctaaagatgaggatatagacccaatggacccaatgagtccgttgaataaggatgtgtcttga

SEQ ID NO: 8753 - DNA, 654 bp, Saccharomyces cerevisiae
atgagttccctattaatatcatacgaatctgacttcaaaacaaccttagaacaagccaaagcgagcttagcagaggccccctcacaaccgttatcacagagaaatactacactgaagcacgtagaacagcaacaagatgagttgtttgacctgctagatcagatggatgtagaagttaataacagcataggcgatgcctcagaacgtgctacgtacaaggcgaagttaagagaatggaagaagactatacagagcgatatcaaacgaccactgcaatccttagtagactcaggcgatcgtgatagactttttggagatcttaacgcatctaatattgacgatgaccaaaggcaacagttgttgagcaaccatgcaatcttacagaaatcgggagatagactaaaagatgccagtagaatagcaaatgaaactgaaggaatagggtcacaaataatgatggatttaaggtcacagagagaaactttggaaaatgcaagacagaccttgtttcaagcggattcatatgtggataaaagtataaagacactaaaaacaatgactagaaggctagttgctaataaattcataagctatgccattatcgcagtccttatattattgattttgctagttttgttctcaaagtttaaataa

SEQ ID NO: 8754 - DNA, 654 bp, Artificial Sequence
  Description of Artificial Sequence: Synthetic polynucleotide
atgagttccttattaatatcttacgaatctgacttcaaaacaaccttagaacaagccaaagcgagcttagcagaggccccctctcaaccgttatctcagagaaatactacattgaagcacgtagaacagcaacaagatgagttgtttgacttattagatcagatggatgtagaagttaataacagcataggcgatgccagtgaacgtgctacgtacaaggcgaagttaagagaatggaagaagactatacagagcgatatcaaaaggccattgcaatccttagtagacagtggcgatcgtgatagactttttggagatcttaacgcatctaatattgacgatgaccaaaggcaacagttgttgagcaaccatgcaatcttacagaaaagtggagatagattgaaagatgccagtagaatagcaaatgaaactgaaggaatagggagccaaataatgatggatttaaggagccagagagaaactttggaaaatgcaagacagaccttgtttcaagcggattcttatgtggataaaagtataaagacattaaaaacaatgactagaaggttggttgctaataaattcataagctatgccattatcgcagtccttatattattgattttgttggttttgttctccaagtttaaatga

SEQ ID NO: 8755 - DNA, 1785 bp, Saccharomyces cerevisiae
atgaataactccaaaattcctaaactttcctttcatagtgatccaaacaacgtcactcgagactttccaaagacaaaacgacagaaggttcagaaaagagaaatggatatgatactaactcctaataacaacaagctaaatatattgcacagctctggatctggtatacggcgctgctacactgatgacacctccgctacgtatactaagaaactaacctttgggggggaccccaagattattgaaagggttaagaacaatgaacgtaaggttagaaaagacatagattcactactgaatgctatttctgaaattgaaaaggaatctgttcgtattcatgccagggaactacctgcaataacattagaattagatgcaaaagtcaaagcgtgcagggagctacaaaatgagattgatggactatcaacggagatggacttgaaggataatcaatgtgatcttcaaagaaagaatgttgagctatcatcaaaaaatatagtgtctatgcatgcagtaaaagtacaagagttcgaaaacgatttagaggaagagctatcgaatgccaaaagggagtggacgtataaattaatggaagtagaaaatttgaaacctgacgaaaggttaactgacgaaatgcgacagcttaaaacagaattcgaggaggtcaataggaaactattcattctacagaatgaaaatgagaacgagtgtaaaaactacaaaaaagaattggacaagaaattcgagatattcaagaaagttaagaacgatgctagaattgaattagatggggagcaagaaagactttcgaaagttttaaaagacctacaagacacccatggtgaactgaaagaaaatattaagacgtgtagagatgagtttaacgattttgaaaaaaggattggagaggcagaagtgaacttccatagcatggaacttgccgttgttcctctcaaaaagaagcttgcttctacatcacaagcattgacgcaagtgcaggaggagaagaagcaagtcgaaggagaagcaaacaattggaagaagaagtacgttaatgaactagaaaaggttcaacaggaattatacacacgacaaaatctggccacttcaattgaagaaatcaaaggatacacccgatgctttgcgtatgccaatgaacgacaaatgcctgatgaattccatatcaactatgtggatcggtgcatttgcgagaatagtggagaaaaacgggtacaagtatttgatagagtagttctcgaagaaatccataaggatcacaaacgcttatataacgaatgcattccgttcctggaaaaatacatcagcaagttaattaactgcagcattatagtggtttcgcagcaacccacagcaccaatgaaaaagactttgctaaaacagttaattgagcagtacggtgagaattataagatgacattgaacattttgcatcttgacggaagtattaaacacagtgacgttggattagataacccaacagaaattagagatctgtcacaagatgaagaatgcatgaacattttaactttagataccaagttgggaaaagatgaagagtcccattcaatgaatatatatatcggtagtatgtccacggtacagctgaatagagagcttgatgatgctccctcagtcctttcgcatattctcactaaaacaaagcagtgctttgtcttcaagattaacgctggtgaaaacatcgagaaggctctagccttagcgggaaagctgaaaagaacaataacattacctcagctagattaa

SEQ ID NO: 8756 - DNA, 1785 bp, Artificial Sequence
  Description of Artificial Sequence: Synthetic polynucleotide
atgaataactccaaaattcctaaactttcctttcatagtgatccaaacaacgtcactagagactttccaaagacaaaaagacagaaggttcagaaaagagaaatggatatgatattgactcctaataacaacaagttgaatatattgcacagctctggatctggtataaggcgctgctacactgatgacacctccgctacgtatactaagaaattgacctttgggggggaccccaagattattgaaagggttaagaacaatgaacgtaaggttagaaaagacatagattctttattgaatgctatttctgaaattgaaaaggaatctgttcgtattcatgccagggaattacctgcaataacattagaattagatgcaaaagtcaaagcgtgcagggagttacaaaatgagattgatggattatctacggagatggacttgaaggataatcaatgtgatcttcaaagaaagaatgttgagttatcttctaaaaatatagtgtctatgcatgcagtaaaagtacaagagttcgaaaacgatttagaggaagagttatccaatgccaaaagggagtggacgtataaattaatggaagtagaaaatttgaaacctgacgaaaggttaactgacgaaatgaggcagcttaaaacagaattcgaggaggtcaataggaaattattcattttacagaatgaaaatgagaacgagtgtaaaaactacaaaaaagaattggacaagaaattcgagatattcaagaaagttaagaacgatgctagaattgaattagatggggagcaagaaagactttctaaagttttaaaagacttgcaagacacccatggtgaattgaaagaaaatattaagacgtgtagagatgagtttaacgattttgaaaaaaggattggagaggcagaagtgaacttccatagcatggaacttgccgttgttcctctcaaaaagaagcttgcttctacatctcaagcattgacgcaagtgcaggaggagaagaagcaagtcgaaggagaagcaaacaattggaagaagaagtacgttaatgaattggaaaaggttcaacaggaattatacacaagacaaaatttggccacttctattgaagaaatcaaaggatacaccagatgctttgcgtatgccaatgaaagacaaatgcctgatgaattccatatcaactatgtggatcgttgcatttgcgagaatagtggagaaaaaagagtacaagtatttgatagagtagttctcgaagaaatccataaggatcacaaacgcttatataacgaatgcattccgttcttggaaaaatacatcagcaagttaattaactgcagcattatagtggtttctcagcaacccacagcaccaatgaaaaagactttgttgaaacagttaattgagcagtacggtgagaattataagatgacattgaacattttgcatcttgacggaagtattaaacacagtgacgttggattagataacccaacagaaattagagatttatctcaagatgaagaatgcatgaacattttaactttagataccaagttgggaaaagatgaagagtcccattctatgaatatatatatcggtagtatgtccacggtacagttgaatagagagcttgatgatgctccctctgtcctttctcatattctcactaaaacaaagcagtgctttgtcttcaagattaacgctggtgaaaacatcgagaaggctttggccttagcgggaaagttgaaaagaacaataacattacctcagttagattga

SEQ ID NO: 8757 - DNA, 1641 bp, Saccharomyces cerevisiae
atgaaccactcagaagtgaaaactgggttaattgtcactgcaaagcagacatattacccaattgaattgtccaatgcagaactactaactcattacgaaaccatacaggaatatcacgaggaaatctctcaaaatgtgctggtccaatcttccaagacaaaaccagacataaaattgatcgatcagcaaccggagatgaatcctcatcaaactagagaagccatagtaacatttttgtatcaactttcagtgatgactagagtaagtaatggtatcttcttccacgctgtcaggttctacgatcgctattgctctaagagagtagtgttaaaggaccaagctaaactagttgtaggcacctgcctttggttagcggccaaaacttggggagggtgcaaccatattataaacaacgtctccatccccacaggtggtaggttttatggtcccaatcctagagctcgtattccacgcctttctgaattggttcattattgcggcgggtccgatttattcgatgaatcaatgttcattcaaatggaaagacatatcttggatactctgaactgggacgtttatgagcccatgattaatgactacattttaaacgttgacgaaaattgtttgatacaatatgaactttacaaaaaccagttacaaaataacaatagcaacggcaaagaatggtcctgtaagagaaagtcacaatcttctgacgacagtgatgccacagtggaagaacatatcagtagttcaccgcaaagtactggactagatggcgatacaactaccatggatgaagatgaagaactaaattccaaaattaaattgataaatttgaaaagattcttaattgatctgagctgttggcaatacaacttgcttaaattcgaattatacgaaatatgcaatggtatgttttctataataaacaaattcactaatcaagatcaaggcccttttctctctatgcccattggtaatgatataaactcaaacactcaaacgcaggtattcagcattatcatcaatggcatagtcaattctcccccatctttagtcgaagtttataaggagcaatatggtatagtacctttcatattacaagtaaaagattataacttggaattacaaaagaaactgcaactggcctctacaatagacctaaccagaaaaattgctgtcaattctcgttactttgaccaaaatgcctcttcatcatcagtttcttctccaagcacatattcttcgggaaccaattatactccaatgcgaaacttcagtgcacaatcagacaacagtgttttcagtactaccaacattgaccattcatcgccgatcacccctcacatgtacacttttaatcagtttaaaaacgaaagtgcttgtgacagtgccataagcgtaagcagtctacctaatcaaacccaaaatggtaacatgccattatcaagcaattatcagaatatgatgctagaagaaaggaataaagagaatagaattcccaactcatcatccgctgaaataccacaacgtgccaaatttatgacgactggtatattccagaacacaggagaacttactaatagagcgtcttcgatatcgctatcgttaaggaaccacaatagctctcaactgtga

SEQ ID NO: 8758 - DNA, 1641 bp, Artificial Sequence
  Description of Artificial Sequence: Synthetic polynucleotide
atgaaccacagtgaagtgaaaactgggttaattgtcactgcaaagcagacatattacccaattgaattgtccaatgcagaattattaactcattacgaaaccatacaggaatatcacgaggaaatctctcaaaatgtgttggtccaatcttccaagacaaaaccagacataaaattgatcgatcagcaaccggagatgaatcctcatcaaactagagaagccatagtaacatttttgtatcaactttctgtgatgactagagtaagtaatggtatcttcttccacgctgtcaggttctacgatcgctattgctctaagagagtagtgttaaaggaccaagctaaattggttgtaggcacctgcctttggttagcggccaaaacttggggagggtgcaaccatattataaacaacgtctccatccccacaggtggtaggttttatggtcccaatcctagagctcgtattccacgcctttctgaattggttcattattgcggcgggtccgatttattcgatgaaagtatgttcattcaaatggaaagacatatcttggatactttgaactgggacgtttatgagcccatgattaatgactacattttaaacgttgacgaaaattgtttgatacaatatgaactttacaaaaaccagttacaaaataacaatagcaacggcaaagaatggtcctgtaagagaaagtctcaatcttctgacgacagtgatgccacagtggaagaacatatcagtagttctccgcaaagtactggattagatggcgatacaactaccatggatgaagatgaagaattgaattccaaaattaaattgataaatttgaaaagattcttaattgatttgagctgttggcaatacaacttgcttaaattcgaattatacgaaatatgcaatggtatgttttctataataaacaaattcactaatcaagatcaaggcccttttctctctatgcccattggtaatgatataaactccaacactcaaacgcaggtattcagcattatcatcaatggcatagtcaattctcccccatctttagtcgaagtttataaggagcaatatggtatagtacctttcatattacaagtaaaagattataacttggaattacaaaagaaattacaattggcctctacaatagacttgaccagaaaaattgctgtcaattctcgttactttgaccaaaatgcctcttcttcttctgtttcttctccaagcacatattcttctggaaccaattatactccaatgagaaacttcagtgcacaatctgacaacagtgttttcagtactaccaacattgaccattcttctccgatcacccctcacatgtacacttttaatcagtttaaaaacgaaagtgcttgtgacagtgccataagcgtaagcagtttacctaatcaaacccaaaatggtaacatgccattatccagcaattatcagaatatgatgttggaagaaaggaataaagagaatagaattcccaactcttcttccgctgaaataccacaacgtgccaaatttatgacgactggtatattccagaacacaggagaacttactaatagagcgtcttctatatctttatctttaaggaaccacaatagctctcaattgtga

SEQ ID NO: 8759 - DNA, 771 bp, Saccharomyces cerevisiae
atgtggtcgaaaaagtttacattaaaaaagctaatcttaggcgggtatttgtttgctcaaaaggtctattgtgaagacgaaagtaactctatatacggtacctggtcatctaaatcaaatcaagtgttcacgggaccggggttttatgatcccgtagatgaactattgatagaaccttcattgcccgggcttagctattcgttcactgaagatggttggtacgaagaagctacttaccaggtaagtggcaatcctcgtaacccaacttgccccatggcttcgttgatttatcagcatggtacatataacatttcagaaaacggtacgttagttctgaatcctattgaagttgacggtagacaactattcagcgacccatgcaatgatgacggagtttcgacttattctagatataaccaaacagaaactttcaaggaatatgccgtaggtatagatccttaccatggtatttacaccctgcaattgtaccaatatgatggtactccaatgcaaccactatatttggcttatagaccaccaatgatgcttccaacagaaactttgaacccaacatcgtcagcgaccagcactgacgacccatcctctaataagaaaagatcactgagaagtttagtgaggaggagcctggaaaacagacacaagacgaatgccattaaaagacaaaatacctcatttttaacctccaatgccatttggtatatttctgcgggtatgctaggtgtaggttcattattatttttagcattttag

SEQ ID NO: 8760 - DNA, 771 bp, Artificial Sequence
  Description of Artificial Sequence: Synthetic polynucleotide
atgtggtccaaaaagtttacattaaaaaagttaatcttaggcgggtatttgtttgctcaaaaggtctattgtgaagacgaaagtaactctatatacggtacctggtcttctaaatctaatcaagtgttcacgggaccggggttttatgatcccgtagatgaattattgatagaaccttctttgcccgggcttagctattctttcactgaagatggttggtacgaagaagctacttaccaggtaagtggcaatcctcgtaacccaacttgccccatggcttctttgatttatcagcatggtacatataacatttctgaaaacggtacgttagttttgaatcctattgaagttgacggtagacaattattcagcgacccatgcaatgatgacggagtttccacttattctagatataaccaaacagaaactttcaaggaatatgccgtaggtatagatccttaccatggtatttacaccttacaattgtaccaatatgatggtactccaatgcaaccattgtatttggcttatagaccaccaatgatgcttccaacagaaactttgaacccaacatcttctgcgaccagcactgacgacccatcctctaataagaaaagatctttgagaagtttagtgaggaggagcttggaaaacagacacaagacgaatgccattaaaagacaaaatacctcttttttaacctccaatgccatttggtatatttctgcgggtatgttgggtgtaggttctttattatttttagcattttga

SEQ ID NO: 8761 - DNA, 1116 bp, Saccharomyces cerevisiae
atgactcccgaacaaaaggccaaactagaggctaacaggaaattagcaatagaacggttaagaaaaaggggaatactgagtagcgaccaattgaatcgaatagaaagtaggaatgaacctttaaaaacccggcctctcgcagttactagtggcagcaatcgggatgataatgcagcagccgcagtacatgtgccaaatcataatggacaaccgtctgcgcttgctaacactaacactaacactacttcactttatggtagcggagtagttgatggaagtaaaagggatgcgtcggtactcgacaaaaggccaacggatagaatcagacctagcataaggaaacaagattacattgagtacgattttgccaccatgcagaacttgaatggtggttatatcaaccctaaggacaagcttccaaattctgactttaccgatgaccaagaatttgaatctgagtttggatctaaaaagcagaagacactacaggactggaaaaaggaacaacttgaacggaaaatgctgtacgaaaatgcacctcctccagagcatatttcaaaggcgccgaaatgtattgaatgtcatattaatattgagatggatcctgtgctacatgatgtgttcaagttacaagtttgtaaacagtgttctaaggagcatccagaaaagtatgcactactgacgaaaacagaatgtaaggaagattactttttaacagaccccgaattgaatgatgaggatctctttcatagactagaaaagccgaaccctcattcggggacatttgcaagaatgcaactatttgttagatgtgaagtggaagcctttgcgttcaagaaatggggtggagaagaaggtttagatgaggaatggcaacgtcgtgaagaaggaaaggctcacagaagggagaaaaaatacgaaaagaaaatcaaggaaatgcgactgaaaacaagagctcaagaatatactaatagattaagagaaaagaagcatgggaaagcccatattcatcattttagtgatccagttgatggaggtattgatgaagacggttatcaaattcaaagaagaagatgtacagactgcgggctagaaactgaagaaattgacatttaa

SEQ ID NO: 8762 - DNA, 1116 bp, Artificial Sequence
  Description of Artificial Sequence: Synthetic polynucleotide
atgactcccgaacaaaaggccaaattagaggctaacaggaaattagcaatagaaagattaagaaaaaggggaatattgagtagcgaccaattgaatagaatagaaagtaggaatgaacctttaaaaaccaggcctctcgcagttactagtggcagcaatagagatgataatgcagcagccgcagtacatgtgccaaatcataatggacaaccgtctgcgcttgctaacactaacactaacactacttctctttatggtagcggagtagttgatggaagtaaaagggatgcgagtgtactcgacaaaaggccaacggatagaatcagacctagcataaggaaacaagattacattgagtacgattttgccaccatgcagaacttgaatggtggttatatcaaccctaaggacaagcttccaaattctgactttaccgatgaccaagaatttgaatctgagtttggatctaaaaagcagaagacattacaggactggaaaaaggaacaacttgaaagaaaaatgctttacgaaaatgcacctcctccagagcatatttccaaggcgccgaaatgtattgaatgtcatattaatattgagatggatcctgtgttacatgatgtgttcaagttacaagtttgtaaacagtgttctaaggagcatccagaaaagtatgcattattgacgaaaacagaatgtaaggaagattactttttaacagaccccgaattgaatgatgaggatctctttcatagattagaaaagccgaaccctcattctgggacatttgcaagaatgcaattatttgttagatgtgaagtggaagcctttgcgttcaagaaatggggtggagaagaaggtttagatgaggaatggcaacgtcgtgaagaaggaaaggctcacagaagggagaaaaaatacgaaaagaaaatcaaggaaatgagattgaaaacaagagctcaagaatatactaatagattaagagaaaagaagcatgggaaagcccatattcatcattttagtgatccagttgatggaggtattgatgaagacggttatcaaattcaaagaagaagatgtacagactgcgggttggaaactgaagaaattgacatttga

SEQ ID NO: 8763 - DNA, 669 bp, Saccharomyces cerevisiae
atgaagtttttcccactccttttgttgattggtgttgtaggctacattatgaacgtattgttcactacctggttgccaaccaattacatgttcgatccaaaaactttgaacgaaatatgtaactcggtgattagcaaacacaacgcagcagaaggtttatccactgaagacctgttacaggatgtcagagacgcacttgcctctcattacggggacgaatacatcaacaggtacgtcaaagaagaatgggtcttcaacaatgctggtggtgcgatgggccaaatgatcatcctacacgcttccgtatccgagtacttaattctattcggaaccgctgttggtactgaagggcacacaggtgttcactttgctgacgactattttaccatcttacatggtacgcaaatcgcagcattgccatatgccactgaagccgaagtttacactcctggtatgactcatcacttgaagaagggatacgccaagcaatacagcatgccaggtggttcctttgcccttgaattggctcaaggctggattccatgtatgttgccattcgggtttttggacactttctccagtactcttgatttatacactctatatagaactgtctacctgactgccagggacatgggtaagaacttgttgcaaaacaaaaagttctaa

SEQ ID NO: 8764 - DNA, 669 bp, Artificial Sequence
  Description of Artificial Sequence: Synthetic polynucleotide
atgaagtttttcccactccttttgttgattggtgttgtaggctacattatgaacgtattgttcactacctggttgccaaccaattacatgttcgatccaaaaactttgaacgaaatatgtaactctgtgattagcaaacacaacgcagcagaaggtttatccactgaagacttattacaggatgtcagagacgcacttgcctctcattacggggacgaatacatcaacaggtacgtcaaagaagaatgggtcttcaacaatgctggtggtgcgatgggccaaatgatcatcttgcacgcttccgtatccgagtacttaattcttttcggaaccgctgttggtactgaagggcacacaggtgttcactttgctgacgactattttaccatcttacatggtacgcaaatcgcagcattgccatatgccactgaagccgaagtttacactcctggtatgactcatcacttgaagaagggatacgccaagcaatacagcatgccaggtggttcctttgcccttgaattggctcaaggctggattccatgtatgttgccattcgggtttttggacactttctccagtactcttgatttatacactttatatagaactgtctacttgactgccagggacatgggtaagaacttgttgcaaaacaaaaagttctga

SEQ ID NO: 8765 - DNA, 1164 bp, Saccharomyces cerevisiae
atgtctgcaccaactccattagcagaggcctctcaaattcccactatcccggccctttctcctttgactgcgaagcaatccaaggggaatttcttctcctcaaacccaatatctagctttgttgtggatacgtacaaacaattgcattctcacagacaatctttggagctggtcaatcccggtaccgtggaaaacctgaataaggaagtctcccgtgacgtgtttttgtctcagtattttttcaccgggctaagagctgatttgaataaggcattttccatgaatcctgcttttcaaacctcacacactttctctataggttcccaagcattgcctaagtacgcattctccgcattgtttgccaacgataacctatttgctcaaggtaatatcgacaacgatttatctgtttccggtagattaaactatggttgggataagaaaaacatttctaaggtcaacctacagatatcagatggccaaccaacaatgtgtcagttagaacaagactatcaggcttccgatttttctgtgaacgtaaagacattgaacccttcgttctctgagaagggcgaattcacaggtgttgctgttgcatcttttctacaaagtgttactcctcaattagctttaggtttagaaactttatactccagaactgacggtagcgctccaggtgatgctggtgtttcatacttgactcgttatgtctccaagaagcaagattggattttttcgggccaattgcaagccaacggtgctttaattgcatcgctatggagaaaagtagcacaaaatgtcgaggcaggtatcgaaactacattacaagctggtatggttcctattactgatccattgatgggcactccaattggtattcaacctactgtcgagggttctaccactattggtgctaagtatgaatacagacaatctgtatatcgtggtacattagattccaatggtaaggttgcatgttttctagaaagaaaagttctgccaactctgtccgttttattttgcggtgaaatcgatcatttcaagaacgataccaagattggttgcggtctacaatttgaaactgctggtaatcaagaattactaatgttacaacaaggtttagacgcagatggtaacccattgcaagctcttcctcaattgtga

SEQ ID NO: 8766 - DNA, 1164 bp, Artificial Sequence
  Description of Artificial Sequence: Synthetic polynucleotide
atgtctgcaccaactccattagcagaggcctctcaaattcccactatcccggccctttctcctttgactgcgaagcaatccaaggggaatttcttctccagtaacccaatatctagctttgttgtggatacgtacaaacaattgcattctcacagacaatctttggagttggtcaatcccggtaccgtggaaaacttgaataaggaagtctcccgtgacgtgtttttgtctcagtattttttcaccgggttgagagctgatttgaataaggcattttccatgaatcctgcttttcaaacctctcacactttctctataggttcccaagcattgcctaagtacgcattctccgcattgtttgccaacgataacttgtttgctcaaggtaatatcgacaacgatttatctgtttccggtagattaaactatggttgggataagaaaaacatttctaaggtcaacttacagatatctgatggccaaccaacaatgtgtcagttagaacaagactatcaggcttccgatttttctgtgaacgtaaagacattgaacccttctttctctgagaagggcgaattcacaggtgttgctgttgcatcttttttgcaaagtgttactcctcaattagctttaggtttagaaactttatactccagaactgacggtagcgctccaggtgatgctggtgtttcttacttgactcgttatgtctccaagaagcaagattggattttttctggccaattgcaagccaacggtgctttaattgcatctctttggagaaaagtagcacaaaatgtcgaggcaggtatcgaaactacattacaagctggtatggttcctattactgatccattgatgggcactccaattggtattcaacctactgtcgagggttctaccactattggtgctaagtatgaatacagacaatctgtatatcgtggtacattagattccaatggtaaggttgcatgttttttggaaagaaaagttttgccaactttatccgttttattttgcggtgaaatcgatcatttcaagaacgataccaagattggttgcggtttacaatttgaaactgctggtaatcaagaattattgatgttacaacaaggtttagacgcagatggtaacccattgcaagctcttcctcaattgtga

SEQ ID NO: 8767 - DNA, 1263 bp, Saccharomyces cerevisiae
atggttttatcaaggggagaaacaaagaaaaatagcgtgagattaacggcaaaacaagaaaagaaacctcaatctacgtttcaaactttaaaacagtcacttaaacttagcaacaataaaaagttgaaacaggattcgacccaacactcaaacgatacaaataaatctgttaaagccaaaaaaaatggcacgtcctcgaagaaaaccggaacacaaaggaaaagaatatcaactcagagattttcattgtttacctatggcaatgttcaggttatgaattcattcgttcccattcataatgatattccgaatagcagttgcattcgtagaaattcccaagtatccgcaaataatgtcactgaaagtagtggagtattcttcaatgatacgcaaagtcaagacagtcaaaacactattaagttaaaacctacatctttaatggcaaaaggacctattgaaatatatcagatatgtacagggtttgataagttaaaggaaaatatagcgccctttcaaaaatctagtaaagctagtagtcatgatgggcatgtagtaaactatttatcgataggacgacatggtgatattgtgcatccagtactacccaaactacaaataacaaggctaaatggcgcaggtttcaaatactttattagcttttataatccggaacggtactgggaaatcgaatttctacctttgattagtcaatcccaatcagagttggaaaatagtgtgaaagcttttgaaaacgtcattagcaaaatttgccaattttcgcatattaatgaaggagctactattgggaataatgagtctttgagcgataaattcaaactgccgcctacttcggacatagagccccccaatactgaaataattaataatgatgatgataacgatgatgatgatgataattatgatgatgacgaccttaattacttgctggatgaagaatacgaacaaggatgtacagataatagcttctccgtgatatcgaacacttgctctaatctaaatgcaagctttctctatccgagcgaccctaccgatgccgtgtcaatctccataaatgaagctttcaaaaatgctatcagacgaaccgctcctgtactgaatattccaatagcagccccaagtattcattcgaaacagcaaaacaaaagatatagttcatacccttttatcgactctcccccgtatctgcaggacaggcatagaagatttcagaggagatccatatctggtcttggcgacctttga

SEQ ID NO: 8768 - DNA, 1263 bp, Artificial Sequence
  Description of Artificial Sequence: Synthetic polynucleotide
atggttttatctaggggagaaacaaagaaaaatagcgtgagattaacggcaaaacaagaaaagaaacctcaatctacgtttcaaactttaaaacagtctcttaaacttagcaacaataaaaagttgaaacaggattctacccaacactccaacgatacaaataaatctgttaaagccaaaaaaaatggcacgtcctccaagaaaaccggaacacaaaggaaaagaatatctactcagagattttctttgtttacctatggcaatgttcaggttatgaattctttcgttcccattcataatgatattccgaatagcagttgcattcgtagaaattcccaagtatccgcaaataatgtcactgaaagtagtggagtattcttcaatgatacgcaaagtcaagacagtcaaaacactattaagttaaaacctacatctttaatggcaaaaggacctattgaaatatatcagatatgtacagggtttgataagttaaaggaaaatatagcgccctttcaaaaatctagtaaagctagtagtcatgatgggcatgtagtaaactatttatctataggaagacatggtgatattgtgcatccagtattgcccaaattacaaataacaaggttgaatggcgcaggtttcaaatactttattagcttttataatccggaaagatactgggaaatcgaatttttacctttgattagtcaatcccaaagtgagttggaaaatagtgtgaaagcttttgaaaacgtcattagcaaaatttgccaattttctcatattaatgaaggagctactattgggaataatgagtctttgagcgataaattcaaattaccgcctacttctgacatagagccccccaatactgaaataattaataatgatgatgataacgatgatgatgatgataattatgatgatgacgaccttaattacttgttggatgaagaatacgaacaaggatgtacagataatagcttctccgtgataagcaacacttgctctaatttgaatgcaagctttctctatccgagcgaccctaccgatgccgtgtccatctccataaatgaagctttcaaaaatgctatcagaagaaccgctcctgtattgaatattccaatagcagccccaagtattcattctaaacagcaaaacaaaagatatagtagttacccttttatcgactctcccccgtatttacaggacaggcatagaagatttcagaggagatccatatctggtcttggcgacctttga

SEQ ID NO: 8769 - DNA, 2880 bp, Saccharomyces cerevisiae
atgactgttactactccttttgtgaatggtacttcttattgtaccgtcactgcatattccgttcaatcttataaagctgccatagatttttacaccaagtttttgtcattagaaaaccgctcttctccagatgaaaactccactttattgtctaacgattccatctctttgaagatccttctacgtcctgatgaaaaaatcaataaaaatgttgaggctcatttgaaggaattgaacagtattaccaagactcaagactggagatcacatgccacccaatccttggtatttaacacttccgacatcttggcagtcaaggacactctaaatgctatgaacgctcctcttcaaggctacccaacagaactatttccaatgcagttgtacactttggacccattaggtaacgttgttggtgttacttctactaagaacgcagtttcaaccaagccaactccaccaccagcaccagaagcttctgctgagtctggtctttcctctaaagttcactcttacactgatttggcttaccgtatgaaaaccaccgacacctatccatctctgccaaagccattgaacaggcctcaaaaggcaattgccgtcatgacttccggtggtgatgctccaggtatgaactctaacgttagagccatcgtgcgttccgctatcttcaaaggttgtcgtgcctttgttgtcatggaaggttatgaaggtttggttcgtggtggtccagaatacatcaaggaattccactgggaagacgtccgtggttggtctgctgaaggtggtaccaacattggtactgcccgttgtatggaattcaagaagcgcgaaggtagattattgggtgcccaacatttgattgaggccggtgtcgatgctttgatcgtttgtggtggtgacggttctttgactggtgctgatctgtttagatcagaatggccttctttgatcgaggaattgttgaaaacaaacagaatttccaacgaacaatacgaaagaatgaagcatttgaatatttgcggtactgtcggttctattgataacgatatgtccaccacggatgctactattggtgcttactctgccttggacagaatctgtaaggccatcgattacgttgaagccactgccaactctcactcaagagctttcgttgttgaagttatgggtagaaactgtggttggttagctttattagctggtatcgccacttccgctgactatatctttattccagagaagccagccacttccagcgaatggcaagatcaaatgtgtgacattgtctccaagcacagatcaaggggtaagagaaccaccattgttgttgttgcagaaggtgctatcgctgctgacttgaccccaatttctccaagcgacgtccacaaagttctagttgacagattaggtttggatacaagaattactaccttaggtcacgttcaaagaggtggtactgctgttgcttacgaccgtatcttggctactttacaaggtcttgaggccgttaatgccgttttggaatccactccagacaccccatcaccattgattgctgttaacgaaaacaaaattgttcgtaaaccattaatggaatccgtcaagttgaccaaagcagttgcagaagccattcaagctaaggatttcaagagagctatgtctttaagagacactgagttcattgaacatttaaacaatttcatggctatcaactctgctgaccacaacgaaccaaagctaccaaaggacaagagactgaagattgccattgttaatgtcggtgctccagctggtggtatcaactctgccgtctactcgatggctacttactgtatgtcccaaggtcacagaccatacgctatctacaatggttggtctggtttggcaagacatgaaagtgttcgttctttgaactggaaggatatgttgggttggcaatcccgtggtggttctgaaatcggtactaacagagtcactccagaagaagcagatctaggtatgattgcttactatttccaaaagtacgaatttgatggtttgatcatcgttggtggtttcgaagcttttgaatctttacatcaattagagagagcaagagaaagttatccagctttcagaatcccaatggtcttgataccagctactttgtctaacaatgttccaggtactgaatactctttgggttctgataccgctttgaatgctctaatggaatactgtgatgttgttaaacaatccgcttcttcaaccagaggtagagccttcgttgtcgattgtcaaggtggtaactcaggctatttggccacttacgcttctttggctgttggtgctcaagtctcttatgtcccagaagaaggtatttctttggagcaattgtccgaggatattgaatacttagctcaatcttttgaaaaggcagaaggtagaggtagatttggtaaattgattttgaagagtacaaacgcttctaaggctttatcagccactaaattggctgaagttattactgctgaagccgatggcagatttgacgctaagccagcttatccaggtcatgtacaacaaggtggtttgccatctccaattgatagaacaagagccactagaatggccattaaagctgtcggcttcatcaaagacaaccaagctgccattgctgaagctcgtgctgccgaagaaaacttcaacgctgatgacaagaccatttctgacactgctgctgtcgttggtgttaagggttcacatgtcgtttacaactccattagacaattgtatgactatgaaactgaagtttccatgagaatgccaaaggtcattcactggcaagctaccagactcattgctgaccatttggttggaagaaagagagttgattaa

SEQ ID NO: 8770 - DNA, 2880 bp, Artificial Sequence
  Description of Artificial Sequence: Synthetic polynucleotide
atgactgttactactccttttgtgaatggtacttcttattgtaccgtcactgcatattccgttcaatcttataaagctgccatagatttttacaccaagtttttgtctttagaaaaccgctcttctccagatgaaaactccactttattgtctaacgattccatctctttgaagatccttttgcgtcctgatgaaaaaatcaataaaaatgttgaggctcatttgaaggaattgaacagtattaccaagactcaagactggagaagccatgccacccaatccttggtatttaacacttccgacatcttggcagtcaaggacactttgaatgctatgaacgctcctcttcaaggctacccaacagaattatttccaatgcagttgtacactttggacccattaggtaacgttgttggtgttacttctactaagaacgcagtttctaccaagccaactccaccaccagcaccagaagcttctgctgagtctggtctttcctctaaagttcactcttacactgatttggcttaccgtatgaaaaccaccgacacctatccatctttaccaaagccattgaacaggcctcaaaaggcaattgccgtcatgacttccggtggtgatgctccaggtatgaactctaacgttagagccatcgtgcgttccgctatcttcaaaggttgtcgtgcctttgttgtcatggaaggttatgaaggtttggttcgtggtggtccagaatacatcaaggaattccactgggaagacgtccgtggttggtctgctgaaggtggtaccaacattggtactgcccgttgtatggaattcaagaagcgcgaaggtagattattgggtgcccaacatttgattgaggccggtgtcgatgctttgatcgtttgtggtggtgacggttctttgactggtgctgatttatttagaagtgaatggccttctttgatcgaggaattgttgaaaacaaacagaatttccaacgaacaatacgaaagaatgaagcatttgaatatttgcggtactgtcggttctattgataacgatatgtccaccacggatgctactattggtgcttactctgccttggacagaatctgtaaggccatcgattacgttgaagccactgccaactctcactccagagctttcgttgttgaagttatgggtagaaactgtggttggttagctttattagctggtatcgccacttccgctgactatatctttattccagagaagccagccacttccagcgaatggcaagatcaaatgtgtgacattgtctccaagcacagaagtaggggtaagagaaccaccattgttgttgttgcagaaggtgctatcgctgctgacttgaccccaatttctccaagcgacgtccacaaagttttggttgacagattaggtttggatacaagaattactaccttaggtcacgttcaaagaggtggtactgctgttgcttacgaccgtatcttggctactttacaaggtcttgaggccgttaatgccgttttggaatccactccagacaccccatctccattgattgctgttaacgaaaacaaaattgttcgtaaaccattaatggaatccgtcaagttgaccaaagcagttgcagaagccattcaagctaaggatttcaagagagctatgtctttaagagacactgagttcattgaacatttaaacaatttcatggctatcaactctgctgaccacaacgaaccaaagttaccaaaggacaagagattaaagattgccattgttaatgtcggtgctccagctggtggtatcaactctgccgtctactccatggctacttactgtatgtcccaaggtcacagaccatacgctatctacaatggttggtctggtttggcaagacatgaaagtgttcgttctttgaactggaaggatatgttgggttggcaatcccgtggtggttctgaaatcggtactaacagagtcactccagaagaagcagatttaggtatgattgcttactatttccaaaagtacgaatttgatggtttgatcatcgttggtggtttcgaagcttttgaatctttacatcaattagagagagcaagagaaagttatccagctttcagaatcccaatggtcttgataccagctactttgtctaacaatgttccaggtactgaatactctttgggttctgataccgctttgaatgctttgatggaatactgtgatgttgttaaacaatccgcttcttccaccagaggtagagccttcgttgtcgattgtcaaggtggtaacagtggctatttggccacttacgcttctttggctgttggtgctcaagtctcttatgtcccagaagaaggtatttctttggagcaattgtccgaggatattgaatacttagctcaatcttttgaaaaggcagaaggtagaggtagatttggtaaattgattttgaagagtacaaacgcttctaaggctttatctgccactaaattggctgaagttattactgctgaagccgatggcagatttgacgctaagccagcttatccaggtcatgtacaacaaggtggtttgccatctccaattgatagaacaagagccactagaatggccattaaagctgtcggcttcatcaaagacaaccaagctgccattgctgaagctcgtgctgccgaagaaaacttcaacgctgatgacaagaccatttctgacactgctgctgtcgttggtgttaagggttctcatgtcgtttacaactccattagacaattgtatgactatgaaactgaagtttccatgagaatgccaaaggtcattcactggcaagctaccagactcattgctgaccatttggttggaagaaagagagttgattga

SEQ ID NO: 8771 - DNA, 942 bp, Saccharomyces cerevisiae
atgctgagtagcagtagcaatagacccatatctgcccatctaaccatccattacaaggctattcaggaggaagagggggaggatatgagaagcggtgccggaagtggtggccatcatgacgactattttctggagagtaacagatctcccactcctaataagaaacatgagttcattaaaacggtgctcaatatcaacgataacgactctgaattttcggaatcgtgctcaccaagagagaagttacataacgagggggcttgtaatacagacctgttcggggacttcatgtctaaaagacaacagaggctgtctaattctatgaacatttacgacctttatcagtgtgtacataacctgtcgcctagcaacaacaaccatcagttcatagcaagaaggttcagcgattctcatattccctccttgcatcaccgccagcagcaacagaaggtaacaacaaaaaactttgtacagcccacgaaggacattcaaaggatcgcctcgtacgctgcggattcagaccagagagtcaagtatttaccaaactatcatcagtctgctccttctactgcactgtctgcggctgaatcgaaagcggctgtaccaagaaagctccctgacagagacagtacacaaaattacgtactaaaattgcaactctcgtcacccaactctcaaccaatgtcaccaaggactcgcccgggctaccgcccctcttgctcttcttccaattgctcgtcatcttcctcatcatcagcatgttcatccgtttccatctcagatccgaacaacataacagcatacgaaacgaataatgtcaaccctcagttccccagtaaccagccattagatatttctagtccttgtgcaaggcatcaccatagaagaaattctattgctgtaaaatttgacaaggctttatataagaaaacaacaggatag

SEQ ID NO: 8772 - DNA, 942 bp, Artificial Sequence
  Description of Artificial Sequence: Synthetic polynucleotide
atgttaagtagcagtagcaatagacccatatctgcccatttgaccatccattacaaggctattcaggaggaagagggggaggatatgagaagcggtgccggaagtggtggccatcatgacgactattttttggagagtaacagatctcccactcctaataagaaacatgagttcattaaaacggtgctcaatatcaacgataacgactctgaattttctgaaagttgctctccaagagagaagttacataacgagggggcttgtaatacagaccttttcggggacttcatgtctaaaagacaacagaggttatctaattctatgaacatttacgacctttatcagtgtgtacataacttatctcctagcaacaacaaccatcagttcatagcaagaaggttcagcgattctcatattccctccttgcatcaccgccagcagcaacagaaggtaacaacaaaaaactttgtacagcccacgaaggacattcaaaggatcgcctcttacgctgcggattctgaccagagagtcaagtatttaccaaactatcatcagtctgctccttctactgcattatctgcggctgaaagtaaagcggctgtaccaagaaagctccctgacagagacagtacacaaaattacgtattgaaattgcaactctcttctcccaactctcaaccaatgtctccaaggactcgcccgggctaccgcccctcttgctcttcttccaattgctcttcttcttcctcttcttctgcatgttcttccgtttccatcagtgatccgaacaacataacagcatacgaaacgaataatgtcaaccctcagttccccagtaaccagccattagatatttctagtccttgtgcaaggcatcaccatagaagaaattctattgctgtaaaatttgacaaggctttatataagaaaacaacaggatga

SEQ ID NO: 8773 - DNA, 6372 bp, Saccharomyces cerevisiae
atgagatctataagaaaatgggcgtacgagacgttcaatgatgaaaaaatcattcaattcgtggtaatggcgacacctgatgatttacacgcaaattcggagtatattagaatggcagaccaatatgtgcaggtaccagggggtaccaacaacaacaattacgccaacatagacttaatactggacgtggcagagcaaacggatgtggatgcggtctgggctggatggggccatgcttctgaaaatccgtgtcttcctgagctgttagctagttcacaaaggaaaatactattcattggtcctcctggacgcgctatgagatcattgggtgacaagatttcttccactattgtagcacaaagcgctaaaatcccgtgtatcccttggtctggttcacatatagacactatccatatcgataacaagacgaactttgtatctgtgccggatgatgtatatgtaaggggatgttgttcctcacctgaagatgctttagaaaaggctaaattaataggatttcctgtaatgattaaggcatccgaaggtggtggaggtaagggcattaggcgagtagataatgaggatgattttattgcattatatcgccaagcagtgaatgagacacctgggtcgcctatgtttgttatgaaagttgtcactgatgctcgtcacttagaggtacagttattagctgaccaatatggcactaacattacattgtttgggagagactgttccatacaaaggcggcaccaaaagattatagaagaggcaccagtgacaataaccaagcctgaaacgtttcaaaggatggaacgcgcagcaattcgtctaggtgaattggtaggttatgtttctgcgggcactgtcgaatacttatattcaccaaaagatgataaattttactttttagaactgaatccgagactacaagtagagcatccaacgacagaaatgatatctggcgtaaaccttcctgccactcaactgcaaatcgccatgggcattcctatgcacatgataagtgatatcagaaaactttatggtttagatccaacgggaacttcgtatattgattttaaaaatttaaagagaccctcgccaaaaggccattgtatttcatgcaggatcacttcagaagatcctaatgaaggtttcaagccctccactgggaaaatacatgagctcaattttcgttcttcttccaatgtttggggttacttctcagtaggaaataatggtgctattcactcattttcagattcccaatttgggcacatttttgctgtaggaaacgataggcaagatgcaaagcaaaacatggttttagctctaaaagatttttccatccgaggagaattcaaaacccccatagagtacctgatagagctattagaaactcgggactttgagagtaataacatatcgactggttggttagatgatttgattttgaaaaatttatcttccgatagcaaactagatccaacgctcgctattatctgtggtgccgcaatgaaagcatacgttttcacagaaaaggtgaggaataagtatttggaattattgcggaggggccaagttccacctaaagattttcttaaaacgaagtttcctgttgacttcattttcgataataatagatacttgttcaatgttgctcaatcatctgaagaacaatttattctttctatcaataagtctcaatgtgaagttaatgttcaaaaattgtccagtgactgcttgttgatctccgttgacggtaaatgccatacagtttattggaaggacgatatcagaggtacaagactttcgatagactccaataccatatttttagaagctgaactcaatcccactcaagtgatctctccaactccggggaaattggtgaaatatttggtccgaagtggtgatcacgtttttgctggacagcaatatgcagaaatagaaataatgaaaatgcagatgccactagtagcgaaaagtgatggtgtaattgagttactaagacagcccggttccataattgaggctggtgatgtcatcgcaaaattgactttggattcgccgtccaaagctaacgaatcgtctttataccgcggagaattacctgttttaggtccaccgctaatagagggtagccgaccaaaccataagctcagagtcttaataaataggttagaaaatattctcaatggatatcatgaaaactctggaatagaaactactctaaaagagttgataaaaatattgagagatggtaggcttccttattcagaatgggattcccaaatttctacggtacgcaatagactaccaaggcaattgaatgaggggctgggaaatctagtcaagaaatctgtttcttttcctgcaaaggaactgcacaaattaatgaagcgctacttggaagaaaatacaaatgatcatgtagtttatgttgccttacagccacttcttaaaattagtgaaaggtatagcgaaggtttagctaatcacgaatgtgaaatttttttaaagttgattaaaaagtactatgctgttgagaaaatttttgaaaatcatgatatacatgaagaaagaaacttactaaatctgcggaggaaagaccttacaaacttgaaaaaaattttgtgcataagtttatcgcatgctaacgtagtcgcaaagaacaagttagtaactgcaatattgcatgaatacgagccattgtgccaggattcctctaagatgtctttaaaattcagggctgttatacatgatttggcaagtttggaatctaagtgggctaaagaggttgctgtaaaggcaagatcagtgctactcagagggattttccctcccataaagaaaagaaaagagcatattaaaactctcctgcaattgcacataaaggatactggtgccgaaaacattcacagcaggaacatatattcctgtatgagggattttggtaatttaatacattcaaatctgatacaacttcaggatttgttctttttttttggccatcaagatacggctctttccagtatagcatctgaaatttatgcaaggtatgcctacggcaattatcaattaaaaagtattaagattcataaaggagcgcctgatttactaatgtcatggcaattcagctcattaagaaattatttagtcaattctgatggtgagagtgatgagtttacaaaactttctaaacctccctcaacatcaggtaagagctcagcaaatagttttggtcttcttgtcaacatgcgtgcgcttgaatctctggaaaagacattagacgaggtatacgaacaaattcatattcctgaggaaagactttccagcggagagaactctcttattgttaatattttatctcctattcgttacagaagtgaaaatgatctaattaaaactttaaaaattaaacttcatgaaaatgagagaggtctatccaagctcaaggttaatcgtattacatttgcatttatcgccgcgaatgcgcccgctgttaaattttactcctttgatggaactacgtacgatgaaatctctcaaataagaaatatggatccatcctatgaagcaccgttagagttaggaaaaatgtcgaactataaaatcagatcactacctacatacgatagtagtatacgcatttttgaaggtattagcaaatttacgccgctagataaaaggttctttgtcaggaaaatcataaattccttcatgtataatgatcaaaaaacaaccgaagaaaacttgaaagcggaaatcaatgctcaagtggtttatatgttagaacatctaggagcagttgacatctcaaattcagacttgaatcatatttttttaagtttcaatacagttcttaacataccagtacatcgtctcgaggaaattgtgagtacaattctaaagactcacgaaaccagattgtttcaagaaagaatcacagatgtagaaatttgcatctctgttgagtgcctagaaacaaagaagccagccccgcttagattacttatttctaataaatctgggtatgtggtaaaaattgagacatattacgaaaagatagggaaaaatgggaatctgattttggaaccgtgtagtgagcagagccattatagccagaaatctctctctcttccttactcggtcaaggattggctacaacctaaaaggtacaaagctcaattcatgggtacaacatatgtgtacgatttcccaggtctgtttcatcaagctgcaatccaacagtggaaaaggtattttccaaaacataagctgaatgacagtttttttagttgggttgaattgatagaacaaaacggtaatttaataaaagtaaacagggagccaggccttaataatatagggatggttgcttttgagattatggttcagacacctgaatatcctgaagggcgtaacatgatcgtgatttctaatgatattacctacaatattggatcttttggaccgagagaagatttgttttttgatagggtcacaaattatgcaagagagagagggatcccgaggatatacttggcggcgaattcaggagctaaattgggtatagccgaagagctgatccctctatttcgtgtagcatggaatgacccctctgatccaacaaagggtttccagtacttatacttagctccaaaagacatgcagctactgaaagattctgggaaaggaaattcggttgttgttgaacacaagatggtatacggtgaagagagatatattattaaagcaatagtcggattcgaagagggtttaggtgttgaatgtttacagggctcgggtttaattgctggtgccacttcgaaagcgtatagagacattttcactattactgctgttacttgtcggtccgttggtataggttcctatctggtcagactaggacaacgtactattcaggtggaggataagcctatcatactgacgggtgcatcggcgattaataaagttttgggtaccgatatctatacatctaacctacaaattggcggaacccaaatcatgtataaaaacggaatagcgcatttaacagccagtaatgatatgaaagccatcgaaaaaataatgacatggttatcatatgtcccggcgaaaagagatatgagtcctccacttcttgaaactatggatagatgggatagggatgtagacttcaaacctgccaagcaagtgccatatgaggcaaggtggttgatagagggtaaatgggactcaaataacaacttccagtcaggcctatttgataaggattcgttttttgagacattatctggatgggccaaaggtgtaatagttggaagagcacgtcttggaggtattcccgtgggtgttattgcggtagaaactaagactatcgaagaaataatccccgctgacccagctaatctggattcttcagagttttccgttaaagaagcaggacaggtgtggtatccaaattccgcgttcaaaacagctcaaactataaatgattttaactatggtgagcaattaccattgattatcttagccaattggaggggattttctggcggtcaaagggatatgtacaatgaagtactaaagtacgggtcttttattgttgacgctctggttgactacaaacaacccatactgatatacattccgccctttggtgaattaaggggcggatcatgggttgttatagatccaactattaatcctgaacaaatggaaatgtatgccgatgttgaatctaggggaggtgtgttagaacctgacggagtagttagcataaaataccgtaaggagaaaatgatagagacgatgattcgattagactccacatatggacatttgagaagaacgttgacagaaaaaaagttatctttggaaaaacaaaatgatcttacgaagagattgaaaataagagagagacagttgataccaatttacaatcaaatcagcatacagtttgcagatttacatgatagatcgactaggatgctagttaaaggagtaatccgaaatgagttggaatggaaaaagtcacgcagatttttatattggagactgagaaggaggttgaacgagggacaagtgatcaaaagactgcaaaaaaaaacatgtgataacaaaacgaaaatgaagtacgacgacctgttgaaaatagttcagtcatggtataacgatctggatgttaatgatgacagagcagtagtggagttcatagaaagaaattcgaaaaaaattgacaagaacattgaagagtttgagatctcgctgttgatcgatgagcttaagaaaaaatttgaagacagaaggggaaacattgtccttgaagagctaactaggttggtggacagtaagcgaaagagatag

SEQ ID NO: 8774 - DNA, 6372 bp, Artificial Sequence
  Description of Artificial Sequence: Synthetic polynucleotide
atgagatctataagaaaatgggcgtacgagacgttcaatgatgaaaaaatcattcaattcgtggtaatggcgacacctgatgatttacacgcaaattctgagtatattagaatggcagaccaatatgtgcaggtaccagggggtaccaacaacaacaattacgccaacatagacttaatattggacgtggcagagcaaacggatgtggatgcggtctgggctggatggggccatgcttctgaaaatccgtgtcttcctgagttattagctagttctcaaaggaaaatattattcattggtcctcctggacgcgctatgagaagtttgggtgacaagatttcttccactattgtagcacaaagcgctaaaatcccgtgtatcccttggtctggttctcatatagacactatccatatcgataacaagacgaactttgtatctgtgccggatgatgtatatgtaaggggatgttgttcctcccctgaagatgctttagaaaaggctaaattaataggatttcctgtaatgattaaggcatccgaaggtggtggaggtaagggcattaggcgtgtagataatgaggatgattttattgcattatatcgccaagcagtgaatgagacacctgggagccctatgtttgttatgaaagttgtcactgatgctcgtcacttagaggtacagttattagctgaccaatatggcactaacattacattgtttgggagagactgttccatacaaaggaggcaccaaaagattatagaagaggcaccagtgacaataaccaagcctgaaacgtttcaaaggatggaacgcgcagcaattcgtttgggtgaattggtaggttatgtttctgcgggcactgtcgaatacttatattctccaaaagatgataaattttactttttagaattgaatccgagattacaagtagagcatccaacgacagaaatgatatctggcgtaaaccttcctgccactcaattacaaatcgccatgggcattcctatgcacatgataagtgatatcagaaaactttatggtttagatccaacgggaacttcttatattgattttaaaaatttaaagagaccctctccaaaaggccattgtatttcttgcaggatcacttctgaagatcctaatgaaggtttcaagccctccactgggaaaatacatgagctcaattttcgttcttcttccaatgtttggggttacttcagtgtaggaaataatggtgctattcacagtttttctgattcccaatttgggcacatttttgctgtaggaaacgataggcaagatgcaaagcaaaacatggttttagctttgaaagatttttccatcagaggagaattcaaaacccccatagagtacttgatagagttattagaaactagagactttgagagtaataacatatctactggttggttagatgatttgattttgaaaaatttatcttccgatagcaaattggatccaacgctcgctattatctgtggtgccgcaatgaaagcatacgttttcacagaaaaggtgaggaataagtatttggaattattgagaaggggccaagttccacctaaagattttcttaaaacgaagtttcctgttgacttcattttcgataataatagatacttgttcaatgttgctcaatcttctgaagaacaatttattctttctatcaataagtctcaatgtgaagttaatgttcaaaaattgtccagtgactgcttgttgatctccgttgacggtaaatgccatacagtttattggaaggacgatatcagaggtacaagactttccatagactccaataccatatttttagaagctgaactcaatcccactcaagtgatctctccaactccggggaaattggtgaaatatttggtcagaagtggtgatcacgtttttgctggacagcaatatgcagaaatagaaataatgaaaatgcagatgccattagtagcgaaaagtgatggtgtaattgagttattaagacagcccggttccataattgaggctggtgatgtcatcgcaaaattgactttggattctccgtccaaagctaacgaaagctctttataccgcggagaattacctgttttaggtccaccgttgatagagggtagcagaccaaaccataagctcagagtcttaataaataggttagaaaatattctcaatggatatcatgaaaactctggaatagaaactactttgaaagagttgataaaaatattgagagatggtaggcttccttattctgaatgggattcccaaatttctacggtacgcaatagattaccaaggcaattgaatgaggggttgggaaatttggtcaagaaatctgtttcttttcctgcaaaggaattgcacaaattaatgaagcgctacttggaagaaaatacaaatgatcatgtagtttatgttgccttacagccacttcttaaaattagtgaaaggtatagcgaaggtttagctaatcacgaatgtgaaatttttttaaagttgattaaaaagtactatgctgttgagaaaatttttgaaaatcatgatatacatgaagaaagaaacttattgaatttaagaaggaaagaccttacaaacttgaaaaaaattttgtgcataagtttatctcatgctaacgtagtcgcaaagaacaagttagtaactgcaatattgcatgaatacgagccattgtgccaggattcctctaagatgtctttaaaattcagggctgttatacatgatttggcaagtttggaatctaagtgggctaaagaggttgctgtaaaggcaagatctgtgcttctcagagggattttccctcccataaagaaaagaaaagagcatattaaaactctcttacaattgcacataaaggatactggtgccgaaaacattcacagcaggaacatatattcctgtatgagggattttggtaatttaatacattctaatttgatacaacttcaggatttgttctttttttttggccatcaagatacggctctttccagtatagcatctgaaatttatgcaaggtatgcctacggcaattatcaattaaaaagtattaagattcataaaggagcgcctgatttattgatgtcttggcaattcagctctttaagaaattatttagtcaattctgatggtgagagtgatgagtttacaaaactttctaaacctccctccacatctggtaagagcagcgcaaatagttttggtcttcttgtcaacatgcgtgcgcttgaatctttggaaaagacattagacgaggtatacgaacaaattcatattcctgaggaaagactttccagcggagagaactctcttattgttaatattttatctcctattcgttacagaagtgaaaatgatttgattaaaactttaaaaattaaacttcatgaaaatgagagaggtttatccaagctcaaggttaatcgtattacatttgcatttatcgccgcgaatgcgcccgctgttaaattttactcctttgatggaactacgtacgatgaaatctctcaaataagaaatatggatccatcctatgaagcaccgttagagttaggaaaaatgtccaactataaaatcagatccttacctacatacgatagtagtatacgcatttttgaaggtattagcaaatttacgccgttagataaaaggttctttgtcaggaaaatcataaattccttcatgtataatgatcaaaaaacaaccgaagaaaacttgaaagcggaaatcaatgctcaagtggtttatatgttagaacatttaggagcagttgacatctctaatagtgacttgaatcatatttttttaagtttcaatacagttcttaacataccagtacatcgtctcgaggaaattgtgagtacaattttgaagactcacgaaaccagattgtttcaagaaagaatcacagatgtagaaatttgcatctctgttgagtgcttagaaacaaagaagccagccccgcttagattacttatttctaataaatctgggtatgtggtaaaaattgagacatattacgaaaagatagggaaaaatgggaatttaattttggaaccgtgtagtgagcagagccattatagccagaaatctctctctcttccttactctgtcaaggattggttacaacctaaaaggtacaaagctcaattcatgggtacaacatatgtgtacgatttcccaggtttatttcatcaagctgcaatccaacagtggaaaaggtattttccaaaacataagttgaatgacagtttttttagttgggttgaattgatagaacaaaacggtaatttaataaaagtaaacagggagccaggccttaataatatagggatggttgcttttgagattatggttcagacacctgaatatcctgaagggcgtaacatgatcgtgatttctaatgatattacctacaatattggatcttttggaccgagagaagatttgttttttgatagggtcacaaattatgcaagagagagagggatcccgaggatatacttggcggcgaattctggagctaaattgggtatagccgaagagttgatccctttatttcgtgtagcatggaatgacccctctgatccaacaaagggtttccagtacttatacttagctccaaaagacatgcagttattgaaagattctgggaaaggaaattctgttgttgttgaacacaagatggtatacggtgaagagagatatattattaaagcaatagtcggattcgaagagggtttaggtgttgaatgtttacagggcagtggtttaattgctggtgccacttctaaagcgtatagagacattttcactattactgctgttacttgtagatccgttggtataggttcctatttagtcagattaggacaacgtactattcaggtggaggataagcctatcatattaacgggtgcaagtgcgattaataaagttttgggtaccgatatctatacatctaacttacaaattggcggaacccaaatcatgtataaaaacggaatagcgcatttaacagccagtaatgatatgaaagccatcgaaaaaataatgacatggttatcttatgtcccggcgaaaagagatatgagtcctccacttcttgaaactatggatagatgggatagggatgtagacttcaaacctgccaagcaagtgccatatgaggcaaggtggttgatagagggtaaatgggactctaataacaacttccagtctggcttatttgataaggattctttttttgagacattatctggatgggccaaaggtgtaatagttggaagagcacgtcttggaggtattcccgtgggtgttattgcggtagaaactaagactatcgaagaaataatccccgctgacccagctaatttggattcttctgagttttccgttaaagaagcaggacaggtgtggtatccaaattccgcgttcaaaacagctcaaactataaatgattttaactatggtgagcaattaccattgattatcttagccaattggaggggattttctggcggtcaaagggatatgtacaatgaagtattgaagtacgggtcttttattgttgacgctttggttgactacaaacaacccatattaatatacattccgccctttggtgaattaaggggcggatcttgggttgttatagatccaactattaatcctgaacaaatggaaatgtatgccgatgttgaatctaggggaggtgtgttagaacctgacggagtagttagcataaaataccgtaaggagaaaatgatagagacgatgattagattagactccacatatggacatttgagaagaacgttgacagaaaaaaagttatctttggaaaaacaaaatgatcttacgaagagattgaaaataagagagagacagttgataccaatttacaatcaaatcagcatacagtttgcagatttacatgatagatctactaggatgcttgttaaaggagtaatcagaaatgagttggaatggaaaaagagtcgcagatttttatattggagattgagaaggaggttgaacgagggacaagtgatcaaaagattacaaaaaaaaacatgtgataacaaaacgaaaatgaagtacgacgacttgttgaaaatagttcagagttggtataacgatttggatgttaatgatgacagagcagtagtggagttcatagaaagaaattctaaaaaaattgacaagaacattgaagagtttgagatctctttgttgatcgatgagcttaagaaaaaatttgaagacagaaggggaaacattgtccttgaagagttaactaggttggtggacagtaagagaaagagatga

SEQ ID NO: 8775 - DNA, 1332 bp, Saccharomyces cerevisiae
atgtcattaccgttcttaacttctgcaccgggaaaggttattatttttggtgaacactctgctgtgtacaacaagcctgccgtcgctgctagtgtgtctgcgttgagaacctacctgctaataagcgagtcatctgcaccagatactattgaattggacttcccggacattagctttaatcataagtggtccatcaatgatttcaatgccatcaccgaggatcaagtaaactcccaaaaattggccaaggctcaacaagccaccgatggcttgtctcaggaactcgttagtcttttggatccgttgttagctcaactatccgaatccttccactaccatgcagcgttttgtttcctgtatatgtttgtttgcctatgcccccatgccaagaatattaagttttctttaaagtctactttacccatcggtgctgggttgggctcaagcgcctctatttctgtatcactggccttagctatggcctacttgggggggttaataggatctaatgacttggaaaagctgtcagaaaacgataagcatatagtgaatcaatgggccttcataggtgaaaagtgtattcacggtaccccttcaggaatagataacgctgtggccacttatggtaatgccctgctatttgaaaaagactcacataatggaacaataaacacaaacaattttaagttcttagatgatttcccagccattccaatgatcctaacctatactagaattccaaggtctacaaaagatcttgttgctcgcgttcgtgtgttggtcaccgagaaatttcctgaagttatgaagccaattctagatgccatgggtgaatgtgccctacaaggcttagagatcatgactaagttaagtaaatgtaaaggcaccgatgacgaggctgtagaaactaataatgaactgtatgaacaactattggaattgataagaataaatcatggactgcttgtctcaatcggtgtttctcatcctggattagaacttattaaaaatctgagcgatgatttgagaattggctccacaaaacttaccggtgctggtggcggcggttgctctttgactttgttacgaagagacattactcaagagcaaattgacagcttcaaaaagaaattgcaagatgattttagttacgagacatttgaaacagacttgggtgggactggctgctgtttgttaagcgcaaaaaatttgaataaagatcttaaaatcaaatccctagtattccaattatttgaaaataaaactaccacaaagcaacaaattgacgatctattattgccaggaaacacgaatttaccatggacttcataa

SEQ ID NO: 8776 - DNA, 1332 bp, Artificial Sequence
  Description of Artificial Sequence: Synthetic polynucleotide
atgtctttaccgttcttaacttctgcaccgggaaaggttattatttttggtgaacactctgctgtgtacaacaagcctgccgtcgctgctagtgtgtctgcgttgagaacctacttgttaataagcgagtcttctgcaccagatactattgaattggacttcccggacattagctttaatcataagtggtccatcaatgatttcaatgccatcaccgaggatcaagtaaactcccaaaaattggccaaggctcaacaagccaccgatggcttgtctcaggaactcgttagtcttttggatccgttgttagctcaattatccgaatccttccactaccatgcagcgttttgtttcctctatatgtttgtttgcttgtgcccccatgccaagaatattaagttttctttaaagtctactttacccatcggtgctgggttgggcagtagcgcctctatttctgtatctttggccttagctatggcctacttgggggggttaataggatctaatgacttggaaaagttatctgaaaacgataagcatatagtgaatcaatgggccttcataggtgaaaagtgtattcacggtaccccttctggaatagataacgctgtggccacttatggtaatgccttgttatttgaaaaagactctcataatggaacaataaacacaaacaattttaagttcttagatgatttcccagccattccaatgatcttgacctatactagaattccaaggtctacaaaagatcttgttgctcgcgttcgtgtgttggtcaccgagaaatttcctgaagttatgaagccaattttagatgccatgggtgaatgtgccttgcaaggcttagagatcatgactaagttaagtaaatgtaaaggcaccgatgacgaggctgtagaaactaataatgaattgtatgaacaattattggaattgataagaataaatcatggattgcttgtctccatcggtgtttctcatcctggattagaacttattaaaaatttgagcgatgatttgagaattggctccacaaaacttaccggtgctggtggcggcggttgctctttgactttgttaagaagagacattactcaagagcaaattgacagcttcaaaaagaaattgcaagatgattttagttacgagacatttgaaacagacttgggtgggactggctgctgtttgttaagcgcaaaaaatttgaataaagatcttaaaatcaaatccttagtattccaattatttgaaaataaaactaccacaaagcaacaaattgacgatttattattgccaggaaacacgaatttaccatggactagctga

SEQ ID NO: 8777 - DNA, 1374 bp, Saccharomyces cerevisiae
atggttagctcactggcatcaaatataattctagcccttgtggtagtcctgatgacactgctaaggcaaaataagccgttgcagaggtggtttgtatcatatgttgaaaagctattatcaagaaaatcaaatctggcccaaaaagtcagcgttttatcgccctccttaaaattggttgatgttgagaaatcaatatctgccgatcaatcgaatctttctaaaattaattatcagattcccactcttcctgatcttacggggaatttaatccgtttacatgagtatcgagcaagaggagaaggctataatggccttttatttcggagagcaagacaattaaatggaatttcagaagatcagttgcaaaaattaggctacttcaccaaattaatgaaaaataatgagggtatccgagaaaacgcaagagttattgacaagataattgagttcactttagggaaattgattcattccaacgaacacgatgaagaatttacagaggaaattgaaaagatatgcgcggaacacggctataagattaaagatggtcaccttattcaattgaatcctgacttcgtatttccaatagtttcgtctcgaggcagccaaagtgtggtccatgaagcattagcacatttgtgtcgtgatttcagctcttactatagtgtggaaagagatcctttacaaaattttatcattagtagaatcaaccatcatgtgattagtgccggggacatgaaagagaaaattcttatcgtgaccccaggggctggtgtgggtggcctatcccatactcttgccaccactttccccaaaatacaggtggactccatcgaattatcagccttgatgtacatatgtaacctatttgcactcgaatataagcatgacgttaagatacgtccttttgtacaacaatattcatgccagacagtgtttgataatcagttgagaagtttatcggcagatttgagcaaagttggccaccgcagtaatctggacccactatggggggacttcacacgatattctcccatttccaaagactatgataaaattatcatttgtagcgcatatttcatagataccgcggaaaatatgtttgaatatctatccagtattgaagcactaaagaaatactgtaaagagctgcattgggtcaatgtaggtccattaaagtatggcaccaaacccttggtccaatttacaggagatgaattaagtcggctgcgtaaaattcgcgggtggaaggaccttgtggaggaatatgaagttgatagctcaaagggattgaatggctatttaactgattatgagtcaatgtatcaaggatactatggtctgcttaaatttcattctgtcttcgaaagctga

SEQ ID NO: 8778 - DNA, 1374 bp, Artificial Sequence
  Description of Artificial Sequence: Synthetic polynucleotide
atggttagcagtttagcatctaatataattttagcccttgtggtagtcttgatgacattgttgaggcaaaataagccgttgcagaggtggtttgtatcttatgttgaaaagcttttatctagaaaatctaatttggcccaaaaagtcagcgttttatctccctccttaaaattggttgatgttgagaaatctatatctgccgatcaaagcaatctttctaaaattaattatcagattcccactcttcctgatcttacggggaatttaatccgtttacatgagtatagagcaagaggagaaggctataatggccttttatttagaagagcaagacaattaaatggaatttctgaagatcagttgcaaaaattaggctacttcaccaaattaatgaaaaataatgagggtatcagagaaaacgcaagagttattgacaagataattgagttcactttagggaaattgattcattccaacgaacacgatgaagaatttacagaggaaattgaaaagatatgcgcggaacacggctataagattaaagatggtcaccttattcaattgaatcctgacttcgtatttccaatagtttcttctcgtggcagccaaagtgtggtccatgaagcattagcacatttgtgtcgtgatttcagctcttactatagtgtggaaagagatcctttacaaaattttatcattagtagaatcaaccatcatgtgattagtgccggggacatgaaagagaaaattcttatcgtgaccccaggggctggtgtgggtggcttatcccatactcttgccaccactttccccaaaatacaggtggactccatcgaattatctgccttgatgtacatatgtaacttgtttgcactcgaatataagcatgacgttaagatacgtccttttgtacaacaatattcttgccagacagtgtttgataatcagttgagaagtttaagtgcagatttgagcaaagttggccaccgcagtaatttggacccattatggggggacttcacaagatattctcccatttccaaagactatgataaaattatcatttgtagcgcatatttcatagataccgcggaaaatatgtttgaatatttatccagtattgaagcattgaagaaatactgtaaagagttacattgggtcaatgtaggtccattaaagtatggcaccaaacccttggtccaatttacaggagatgaattaagtaggttacgtaaaattcgcgggtggaaggaccttgtggaggaatatgaagttgatagctctaagggattgaatggctatttaactgattatgagtccatgtatcaaggatactatggtttacttaaatttcattctgtcttcgaaagctga

SEQ ID NO: 8779 - DNA, 1350 bp, Saccharomyces cerevisiae
atgcgtctaaaagaattgttacctaattttttgattgttcatcaagaggtccctgaggatcctattgcattcaagtccaccgataaacgagagaatgaaaataaagagatcaccatccctgagctaatagatactaaagttcctgaattagctgacggtgctactgacactttatatggtttactggtcaatggccatttacaaactgcatatggttcctttagacactttgacaatatatacaaagttcaatataaaagaatgataatcaaatacccacatgggggagaagggactgtggattttgctgtaaatggtagaagtaccaaaagaagaaaagtggaaaaagaatacgtgccgacaagtcaaccggtatttaacggaaacttgaaacgaagatattcgtactattcccctgatgatcctaaattgaactcagacgatgctaagcctatgcttattattctccatggattaacagggggttcgagggaaagctacgtgagggcaattgttcatgaaatcaccacgaagtatgactttgaagcatgcgtgtttaatgctagaggatgttgttattctgcaattacaacgccgctattatacaacggtggttggaccaatgatataagatattgtgttaatgacttgaggaaaagatttccgaatagaaagttttatatgatgggattttcgttaggcgcatctataatgacaaattacttgggagaagagtcagatcgtactaaaatcgaatgtgctatttccgtgagtaatccatttgacctgtacaactctgcatattttattaacagtacaccaatggggtcacgattttattcacctgctttgggtcacaacttactacgcatggttcgaaaccatctctctactctggaagaaaaccctgatttcaaagatgttatcgagaagcatttaaaaaagattcgcactgtgaggcaatttgataacttgttgacaggcccaatgtttggatataaaaatgcagaggagtattacaagaatgcttcatcatataaaagaatacccgggatcagaactccttttatagctttgcatgctcaggatgacccaattgtcggaggtgatcttcctatagaccaaataaaatccaatccatacactttgcttctagaaacttcgacgggggggcatgttggatggttcaaagacagatccggcagaaggtggtacgcagaacccttatgcagatttttgaaaatatttcacgacgaaattactgtaaagggcttaaaacctgacttggaaaatgttcaactcccagatcctaattgcgaacccatagccacaacctttcgcgcgaattag

SEQ ID NO: 8780 - DNA, 1350 bp, Artificial Sequence
  Description of Artificial Sequence: Synthetic polynucleotide
atgcgtttgaaagaattgttacctaattttttgattgttcatcaagaggtccctgaggatcctattgcattcaagtccaccgataaaagagagaatgaaaataaagagatcaccatccctgagttgatagatactaaagttcctgaattagctgacggtgctactgacactttatatggtttattggtcaatggccatttacaaactgcatatggttcctttagacactttgacaatatatacaaagttcaatataaaagaatgataatcaaatacccacatgggggagaagggactgtggattttgctgtaaatggtagaagtaccaaaagaagaaaagtggaaaaagaatacgtgccgacaagtcaaccggtatttaacggaaacttgaaaagaagatattcttactattcccctgatgatcctaaattgaacagcgacgatgctaagcctatgcttattattctccatggattaacagggggttctagggaaagctacgtgagggcaattgttcatgaaatcaccacgaagtatgactttgaagcatgcgtgtttaatgctagaggatgttgttattctgcaattacaacgccgttgttatacaacggtggttggaccaatgatataagatattgtgttaatgacttgaggaaaagatttccgaatagaaagttttatatgatgggattttctttaggcgcatctataatgacaaattacttgggagaagagtctgatcgtactaaaatcgaatgtgctatttccgtgagtaatccatttgacttgtacaactctgcatattttattaacagtacaccaatggggtctagattttattctcctgctttgggtcacaacttacttcgcatggttagaaaccatctctctactttggaagaaaaccctgatttcaaagatgttatcgagaagcatttaaaaaagattcgcactgtgaggcaatttgataacttgttgacaggcccaatgtttggatataaaaatgcagaggagtattacaagaatgcttcttcttataaaagaatacccgggatcagaactccttttatagctttgcatgctcaggatgacccaattgtcggaggtgatcttcctatagaccaaataaaatccaatccatacactttgcttttagaaacttccacgggggggcatgttggatggttcaaagacagatccggcagaaggtggtacgcagaacccttatgcagatttttgaaaatatttcacgacgaaattactgtaaagggcttaaaacctgacttggaaaatgttcaactcccagatcctaattgcgaacccatagccacaacctttcgcgcgaattga

SEQ ID NO: 8781 - DNA, 1428 bp, Saccharomyces cerevisiae
atgcatgaagtagtaacgatatcggtttcgcagagagcaaaccatttgactactcaattcttcaatatacaagagggctatttacaattgtctaaagaacaacaagtcaatgactccaaaatttttctgaattcggttgtagataaagtttcaaaaacaatttcatatgcaccacgtgccttactttgggatgcccgtacaggtaatggttcactaggaacatatcaatattcagaaagccaagactatcatttcggcaatgaagacaaattcaaggagcaaacagttataaagactcatccaagaatacctaaatccgaatatcagagttctctagatgcaggagcaccgctgccttgtttgaacagagaaaatacgatgtattggtctgactattctaaacttatctatggtccttcaagtttcaatattttgagaaattggtaccatgacactgaaaatccaaaccaacctgactttcaaaacttgggggagcgaaagtttgacaggtattccattggttatgacgaatttaccgaaaattacttgcaagagttttttgatggaaatttgcatagagaattggaaaaatgtgacaccctgcaaggcttcaatcttgtaagtgatatggagagtggatggggcgggttttctagtgctctactggtggaattaaggaatgaattacctaaaaaggcggtcttttcatggggacacaatgaagatgatccattcacagatgacttccctatgaaaagactttcaaagaaatggctcccgatcatttcgaacaaattaagaagcacaataaatatgatgcaagaatccgatctttacttcccattgtatgctgctcctggactaactaattgggaaactgctggaaagagctgtaggatatttgattctataaatgcgacaatttcccaaagcaatcttgaacaaagaaagacaatggattatctaacaactgccattaccttaggatattcgtcgcgaaatatggtcactggcatggttatcggtgacaccgattactcattctgttctcgagtacttcctttcaagaatagccacaaaccaaattctactcacatattttcaaaaagtttcattgatagaggaaatcaaacgcataaacatcattccgaacctgattcacggagtaagatgattgaaatgtatacacacaggtattttccatctgatacgataccgacagaattttccaatgatcgtgaatttgttttggaattagaatcatctgaaaaaaatcgagatatattcaaacattggaatgagtttgtggtaaggtacttcaaaaatgatagtgacagagaagaattgaaaaatgaactttccgattacgcctcagcgtacgaatctgggtggtatgaagacgaagattctggtgatgacgatatgtga

SEQ ID NO: 8782 - DNA, 1428 bp, Artificial Sequence
  Description of Artificial Sequence: Synthetic polynucleotide
atgcatgaagtagtaacgatatctgtttctcagagagcaaaccatttgactactcaattcttcaatatacaagagggctatttacaattgtctaaagaacaacaagtcaatgactccaaaatttttttgaattctgttgtagataaagtttccaaaacaatttcttatgcaccacgtgccttactttgggatgcccgtacaggtaatggttctttgggaacatatcaatattctgaaagccaagactatcatttcggcaatgaagacaaattcaaggagcaaacagttataaagactcatccaagaatacctaaatccgaatatcagagttctttagatgcaggagcaccgttgccttgtttgaacagagaaaatacgatgtattggtctgactattctaaacttatctatggtccttctagtttcaatattttgagaaattggtaccatgacactgaaaatccaaaccaacctgactttcaaaacttgggggagagaaagtttgacaggtattccattggttatgacgaatttaccgaaaattacttgcaagagttttttgatggaaatttgcatagagaattggaaaaatgtgacaccttacaaggcttcaatcttgtaagtgatatggagagtggatggggcgggttttctagtgctttattggtggaattaaggaatgaattacctaaaaaggcggtcttttcttggggacacaatgaagatgatccattcacagatgacttccctatgaaaagactttccaagaaatggctcccgatcatttccaacaaattaagaagcacaataaatatgatgcaagaatccgatctttacttcccattgtatgctgctcctggattaactaattgggaaactgctggaaagagctgtaggatatttgattctataaatgcgacaatttcccaaagcaatcttgaacaaagaaagacaatggattatttgacaactgccattaccttaggatattcttctagaaatatggtcactggcatggttatcggtgacaccgattactctttctgttctagagtacttcctttcaagaatagccacaaaccaaattctactcacatattttccaaaagtttcattgatagaggaaatcaaacgcataaacatcattccgaacctgattctagaagtaagatgattgaaatgtatacacacaggtattttccatctgatacgataccgacagaattttccaatgatcgtgaatttgttttggaattagaaagctctgaaaaaaatagagatatattcaaacattggaatgagtttgtggtaaggtacttcaaaaatgatagtgacagagaagaattgaaaaatgaactttccgattacgcctctgcgtacgaatctgggtggtatgaagacgaagattctggtgatgacgatatgtga

SEQ ID NO: 8783 - DNA, 2349 bp, Saccharomyces cerevisiae
atgcagttgtctatgcggatgatgttcacaccaaaacatcagaaactggtcaatcaatgttatcctacgggaaggaccacagataagaagcctaaatcttcggaaacttcatatttgctatattacgttaactcgaggcgtagtaaattggagaaagttagcacttacctgattaagcgttccacttccgacttgaaccatcggcgcatagggaacatagccgttacattggatttaatgaacaaaattgtgttgcattgtaaggagaatttgaatgtatttgttaaagattttttgtacattatgaacaaagttctttccaacaacaattttaacaatgatgtatctgttgttgaattaatagaactggcatttagtagtatatgccagaacttggacgacgtcttgtgtaacggtgacatggaattcgtccagttataccagaactttgttgatcttttttttaaaatagttactgaaagaattcataatgatgacatgcttctgaaatgctgtattgatatatcaaacacaaatagtgtttcaagcaacccacaactaaaccactttgtttccaagtctgttgcctatactatttcaaagttccaagagagaaatccgaaatttaaaactttgtcgctggaagcagctctggagagcaatttaggaaaaaggctaagtcgaacacaaactcgtacaattgggttagataaggccgccgaagataatcatgacctttcagtaaaagcattgcaatcctattttaacacaactgagacagacaaattgaatttgtctattcgtactctgttgcgctgtctgcaaagtacacctaataaggaactgctagagtttgtatgcaatggtatacctgttcagttacgatatattgttatacttcttttggtcagacaactaagcgacaaggataaaaatgtaaatccaattgtttccttgaaattgatgtcgtcattacttgtttcagatgtcagtatagtggggttgagtgttcttgatataatgagaaagcttttaaatttccagttgaaaaatgcaactaataaagaagttgtggcacagtcttgtatcaccatgacagaccttaaccataaaacttattacgctgaacagacctcagatatgttatatgaactactattgaaattgaaaagtgacaccgtcaaggatgttgaaaagaatgcagttgtggaagatattgatttcctcgttgaacatattacgcagccaagtatcagtttggaattattcatcgacttggcgcattacatgaaaaaccacattatatgtttatttaacattgttgaaactgaggttccaagcagcattctcttttcaaaactgtactcattattacgtgaactggattcacatggtgtgcaaaaagaaatgatggaagagatctttgacaagtatggaaaaatggcactattatccggtttgaattattttctagagaacgtttctgagcctgagtatacctattattcgtaccatttacaagcagctaactttttaaaactcaatgactacaagtcacaaactgagtacaaaatgcaaactagaactttgtttaccaaggaagatttattgtcatactattctgatactggatcaaataaatacagcaagaagggggcgcagattttattgtctcgtgataatcaaatttctacttctgatttactgtcggactctcaagttcgtactacacctctggagtacaagaatgtccctaatgctattttttcaaatgggaaagcagtgtatgataacaacgattttgcggccaagcaaaataaattcgacaacagcatagatgacaatatagaagaagctaacgatactgtaatttctgatgctaatgcaaaaggtagtatctataggtttgttgctgaggacgcaagatcatggaaaacaatgagagccaccgcaccaaaagttagcgatttgaaaaaaactatgaatgaaaagaatattccaaataatatgaaaagagatggctcttttcggggttctcaatcagtgaaatctcgtgtcactaatatcacatttttattaaatgaattgaaaactttttcagatgacgcgaataaaatcaaagatcctgatgaggagaatattgttggcttggataaaatcgacgttgctagatcaaattctctgcgacttgcaccaatatctagtctttctgatcgcagtagcattggaaatagaaaatcctttttgcaaaaaacagcaactggtgaaaatcaaaacgatgactttaaagacgcaaatgaagatttacattctttaagttcaagaggtaaaattttctcctccacttga

SEQ ID NO: 8784 - DNA, 2349 bp, Artificial Sequence
  Description of Artificial Sequence: Synthetic polynucleotide
atgcagttgtctatgagaatgatgttcacaccaaaacatcagaaattggtcaatcaatgttatcctacgggaaggaccacagataagaagcctaaatcttctgaaacttcttatttgttatattacgttaacagcaggcgtagtaaattggagaaagttagcacttacttgattaagcgttccacttccgacttgaaccatcgtcgcatagggaacatagccgttacattggatttaatgaacaaaattgtgttgcattgtaaggagaatttgaatgtatttgttaaagattttttgtacattatgaacaaagttctttccaacaacaattttaacaatgatgtatctgttgttgaattaatagaattggcatttagtagtatatgccagaacttggacgacgtcttgtgtaacggtgacatggaattcgtccagttataccagaactttgttgatcttttttttaaaatagttactgaaagaattcataatgatgacatgcttttgaaatgctgtattgatataagcaacacaaatagtgtttccagcaacccacaattgaaccactttgtttccaagtctgttgcctatactatttccaagttccaagagagaaatccgaaatttaaaactttgtctttggaagcagctttggagagcaatttaggaaaaaggttgagtaggacacaaactcgtacaattgggttagataaggccgccgaagataatcatgacctttctgtaaaagcattgcaatcctattttaacacaactgagacagacaaattgaatttgtctattcgtactttattgcgctgtttgcaaagtacacctaataaggaattattggagtttgtatgcaatggtatacctgttcagttaagatatattgttatacttcttttggtcagacaattgagcgacaaggataaaaatgtaaatccaattgtttccttgaaattgatgtcttctttacttgtttctgatgtcagtatagtggggttgagtgttcttgatataatgagaaagcttttaaatttccagttgaaaaatgcaactaataaagaagttgtggcacagtcttgtatcaccatgacagaccttaaccataaaacttattacgctgaacagacctctgatatgttatatgaattattattgaaattgaaaagtgacaccgtcaaggatgttgaaaagaatgcagttgtggaagatattgatttcctcgttgaacatattacgcagccaagtatcagtttggaattattcatcgacttggcgcattacatgaaaaaccacattatatgtttatttaacattgttgaaactgaggttccaagcagcattctcttttccaaactttactctttattacgtgaattagattctcatggtgtgcaaaaagaaatgatggaagagatctttgacaagtatggaaaaatggcattattatccggtttgaattattttttggagaacgtttctgagcctgagtatacctattattcttaccatttacaagcagctaactttttaaaactcaatgactacaagtctcaaactgagtacaaaatgcaaactagaactttgtttaccaaggaagatttattgagttactattctgatactggaagtaataaatacagcaagaagggggcgcagattttattgtctcgtgataatcaaatttctacttctgatttattaagtgactctcaagttcgtactacacctttagagtacaagaatgtccctaatgctattttttctaatgggaaagcagtgtatgataacaacgattttgcggccaagcaaaataaattcgacaacagcatagatgacaatatagaagaagctaacgatactgtaatttctgatgctaatgcaaaaggtagtatctataggtttgttgctgaggacgcaagaagttggaaaacaatgagagccaccgcaccaaaagttagcgatttgaaaaaaactatgaatgaaaagaatattccaaataatatgaaaagagatggctcttttagaggttctcaatctgtgaaatctcgtgtcactaatatcacatttttattaaatgaattgaaaactttttctgatgacgcgaataaaatcaaagatcctgatgaggagaatattgttggcttggataaaatcgacgttgctagatctaattctttaagacttgcaccaatatctagtctttctgatcgcagtagcattggaaatagaaaatcctttttgcaaaaaacagcaactggtgaaaatcaaaacgatgactttaaagacgcaaatgaagatttacattctttaagtagtagaggtaaaattttctcctccacttga

SEQ ID NO: 8785 - DNA, 1773 bp, Saccharomyces cerevisiae
atgccccccgtaccaatatacgtgaaaggcggtgtatggaccaatgtggaggatcagattcttaaagcggctgtacaaaaatacggaactcatcagtggagcaaagtagcatcccttttgcagaaaaagactgccaggcagagtgaattaaggtggaatgaatatttaaatccaaagttgaattttacagagttctcgaaggaggaggatgcccaacttctagatcttgcaagagagctgcctaatcagtggaggaccatagctgatatgatggccaggcctgcacaggtctgcgtcgaaagatataataggctattagaaagtgaagacagtggaggggctgcgttaagtacaggagttactgacttgaaagccggggatattaatcctaacgctgaaactcaaatggctagaccagataatggtgatttggaagatgaggaaaaggaaatgcttgctgaagctagggctcgtctgttaaatacccaaggtaagaaggctacaagaaagattagagagcggatgctcgaagaatcaaaacgcattgctgaactacaaaagaggcgtgagctaaagcaagcaggaattaatgttgccattaagaaaccgaaaaaaaaatacggcaccgacattgattacaatgaagatatagtatatgaacaagctcccatgccaggtatatatgacacgtccactgaagaccgccagataaaaaagaagtttgagcagtttgagagaaaagtcaacagaaaaggtttggatggtaataaggataagccaagtaaaaaaaataaggacaaaaaaagaaaacacgatgagaacgaacacgttgagaaagcagcactgggtgaatctactacattgacggatgagtataaaaaaccaaaacttatactatctgcaccaggaacgaaacagggaaaagtcacctataaaaaaaagctagaaagcaaaagacaaaaactaatcgaggcacaagcaactggcactgtgttgacaccaaaagaactactaccccacgactccggccaagaagataatgaacgcagtaatataaagagtggtaaacagctaaaatcacgcatacgaaaatttttagtgcaaatgttcgcatctttgcctagtcccaagaacgatttcgaaattgtattaagtgaagacgagaaagaagaagatgcagagatagcggaatacgagaaagaatttgaaaatgaaagagcgatgaatgaagaggacaacttcatagaaccaccatctcaaaatgatgcgccacgcgtctcattagtagccgttccattagcttactcaacgctacccataccagaattcaaaaacaatccgcagtccgcgattgacaataagtacaacttgctagtcgcgaacgccataaacaaagaacctcacatggtaccagaagatacggtagattttctcaaagaggtggagtcgcgtatgcagcatataacccaagggcgcacttccatgaaaatacaattcaaaacagcaatgcccccaactgaggttcttctggaatcgatccaatcaaaagtggagtctattgaacagttacagcgtaaactacaacatgtgcaaccactggaacaacagaataacgagatgtgcagtaccctctgccatcacagcctgcccgctttgattgaagggcaacgcaagtactacgctgattactacgcctaccgacaagagatacgatcgcttgagggtcgtagaaagcgtcttcaagccatgctaaattcttcttcttccatatag

SEQ ID NO: 8786 - DNA, 1773 bp, Artificial Sequence
  Description of Artificial Sequence: Synthetic polynucleotide
atgccccccgtaccaatatacgtgaaaggcggtgtatggaccaatgtggaggatcagattcttaaagcggctgtacaaaaatacggaactcatcagtggagcaaagtagcatcccttttgcagaaaaagactgccaggcagagtgaattaaggtggaatgaatatttaaatccaaagttgaattttacagagttctccaaggaggaggatgcccaacttttagatcttgcaagagagcttcctaatcagtggaggaccatagctgatatgatggccaggcctgcacaggtctgcgtcgaaagatataataggttattagaaagtgaagacagtggaggggctgcgttaagtacaggagttactgacttgaaagccggggatattaatcctaacgctgaaactcaaatggctagaccagataatggtgatttggaagatgaggaaaaggaaatgcttgctgaagctagggctcgtttattaaatacccaaggtaagaaggctacaagaaagattagagagagaatgctcgaagaaagtaaacgcattgctgaattacaaaagaggcgtgagttgaagcaagcaggaattaatgttgccattaagaaaccgaaaaaaaaatacggcaccgacattgattacaatgaagatatagtatatgaacaagctcccatgccaggtatatatgacacgtccactgaagaccgccagataaaaaagaagtttgagcagtttgagagaaaagtcaacagaaaaggtttggatggtaataaggataagccaagtaaaaaaaataaggacaaaaaaagaaaacacgatgagaacgaacacgttgagaaagcagcattgggtgaatctactacattgacggatgagtataaaaaaccaaaacttatattatctgcaccaggaacgaaacagggaaaagtcacctataaaaaaaagttggaaagcaaaagacaaaaattaatcgaggcacaagcaactggcactgtgttgacaccaaaagaattattgccccacgactccggccaagaagataatgaacgcagtaatataaagagtggtaaacagttgaaaagccgcataagaaaatttttagtgcaaatgttcgcatctttgcctagtcccaagaacgatttcgaaattgtattaagtgaagacgagaaagaagaagatgcagagatagcggaatacgagaaagaatttgaaaatgaaagagcgatgaatgaagaggacaacttcatagaaccaccatctcaaaatgatgcgccacgcgtctctttagtagccgttccattagcttactctacgttacccataccagaattcaaaaacaatccgcagtccgcgattgacaataagtacaacttgttggtcgcgaacgccataaacaaagaacctcacatggtaccagaagatacggtagattttctcaaagaggtggagtctcgtatgcagcatataacccaagggcgcacttccatgaaaatacaattcaaaacagcaatgcccccaactgaggttcttttagaaagtatccaaagtaaagtggagtctattgaacagttacagcgtaaattacaacatgtgcaaccattggaacaacagaataacgagatgtgcagtaccctctgccatcacagcttgcccgctttgattgaagggcaacgcaagtactacgctgattactacgcctacagacaagagataaggagtcttgagggtcgtagaaagcgtcttcaagccatgttgaattcttcttcttccatatga

SEQ ID NO: 8787 - DNA, 1134 bp, Saccharomyces cerevisiae
atgattccaaaattatatatacatttgatactatctttattgttgttgccgctaattttggcgcaggattattatgcaatactagagatagacaaagatgccactgagaaggaaatcaaatcagcgtacagacaattgtctaagaagtaccatccggataaaaatgctgggagcgaagaagcccatcaaaaattcattgaagtcggcgaggcatacgatgtattgagcgatcctgaaaagaaaaagatttatgaccagtttggtgcagatgctgtaaagaatggcggtggcggtggcggtccaggaggccctggcgcaggtggattccacgatccgtttgacatattcgaacggatgtttcaaggaggtcatggaggtcctggcggcggatttggccagagacagaggcagcgtggtccaatgatcaaggtccaggaaaaactatctttaaagcagttttattccgggtcctcgatagaatttactttaaacctaaacgatgaatgtgatgcatgccatggtagtggctctgcagatggtaagctggcccaatgtcccgattgtcaaggtcgtggggttataatacaagtgctgcgcatgggtattatgacgcagcagattcaacagatgtgtggtaggtgtggtggtacgggacaaattatcaaaaatgaatgcaaaacatgtcacggcaaaaaagttaccaaaaagaacaagttcttccacgttgacgttccaccaggcgcaccaagaaactacatggacacaagagtcggcgaggctgaaaaagggcctgactttgacgccggtgacttggtcatagaattcaaggaaaaggatactgagaacatgggttacagaagaagaggcgacaatctgtacagaacagaagttctttctgctgcggaagcgctatacggcggatggcaaagaacgatagaattccttgatgagaacaagcccgttaagttatctagacccgctcatgtagttgtctccaatggcgaagttgaagtcgtgaagggattcggcatgcccaagggtagcaagggttacggtgatttgtacatagactacgtcgttgtcatgccaaagactttcaaatctgggcaaaatatgctcaaagatgagttgtag

SEQ ID NO: 8788 - DNA, 1134 bp, Artificial Sequence
  Description of Artificial Sequence: Synthetic polynucleotide
atgattccaaaattatatatacatttgatattatctttattgttgttgccgttgattttggcgcaggattattatgcaatattggagatagacaaagatgccactgagaaggaaatcaaatctgcgtacagacaattgtctaagaagtaccatccggataaaaatgctgggagcgaagaagcccatcaaaaattcattgaagtcggcgaggcatacgatgtattgagcgatcctgaaaagaaaaagatttatgaccagtttggtgcagatgctgtaaagaatggcggtggcggtggcggtccaggaggccctggcgcaggtggattccacgatccgtttgacatattcgaaagaatgtttcaaggaggtcatggaggtcctggcggcggatttggccagagacagaggcagcgtggtccaatgatcaaggtccaggaaaaattatctttaaagcagttttattccgggtcctccatagaatttactttaaacttgaacgatgaatgtgatgcatgccatggtagtggctctgcagatggtaagttggcccaatgtcccgattgtcaaggtcgtggggttataatacaagtgttgcgcatgggtattatgacgcagcagattcaacagatgtgtggtaggtgtggtggtacgggacaaattatcaaaaatgaatgcaaaacatgtcacggcaaaaaagttaccaaaaagaacaagttcttccacgttgacgttccaccaggcgcaccaagaaactacatggacacaagagtcggcgaggctgaaaaagggcctgactttgacgccggtgacttggtcatagaattcaaggaaaaggatactgagaacatgggttacagaagaagaggcgacaatctttacagaacagaagttctttctgctgcggaagcgttgtacggcggatggcaaagaacgatagaattccttgatgagaacaagcccgttaagttatctagacccgctcatgtagttgtctccaatggcgaagttgaagtcgtgaagggattcggcatgcccaagggtagcaagggttacggtgatttgtacatagactacgtcgttgtcatgccaaagactttcaaatctgggcaaaatatgctcaaagatgagttgtga

SEQ ID NO: 8789 - DNA, 1575 bp, Saccharomyces cerevisiae
atgcaactatctaaaagtatactactggcagcattagctgctacaccatctctggtgaatgccatgctccccatccatatcaagaattataggttcattaagccatcctctgccacaaatagcgaatccgataacgaagttttttttgtgaaaggtgtcgattatcagcctggtgggtcgtctggttacgatgctgactctgatacagatattctttctgaccctgaagtgtgtgccagagacgcctacgctttccaacaacttggtgtcaacacagtgagaatttactccctgaaccctgacctaaatcatgacaagtgcatgactatcttcaacaatgctggtatctacgccattttggatgttaatagtggtaattacggggagagtttgaaccgtgctgacccatctggaacatatgactctttgtatttgtcaagagtcttcaaatttattgacgctttcaagaactaccctaacgtgctaggattcttttctggcaacgaagtcataaatgatcaaagcgactatgcaaaaattgatcctccatacatccgcgctgttcaaagagatatgaaacagtatatttcaaaacatgcgaacagaagcatcccagtcggatattctgctgctgacaatactgatttgaggttagcaaccttcaagtacttgcagtgtaattcgttggatggaaacaaagtcaatgatgatttggacatatctaaatctgatttctttggcctaaatacttatgaatggtgctctggcacttctagttgggaatcttctggctatgacaagttaaactcaactttcgaagatgctgttattccgttgatattttctgagtatggttgcaacaaaaatacaccaagaacttttgacgaagtctctgagggtttgtatggtggtttaaagaacgtcttctctggtgggttggtatacgaatacactgaagaagctaataattacggtttggttaagcttgatgatagcggttctttaacttataaggatgattttgttaatttagaatcacaattgaagaacgtttcattgccaacaacaaaagaaagcgaaatatcttctgactctatctacaagtgcgataacagtgccatcaccaatatttattctggctttggaacgaacaatttcactttgccttctcaaccagcagaaattgccaatatgattgaatacggtgttaatggcaccaacaccggtaagatattgactgattatgctgttccaactacttttaactatacaattaaaaacaataaagatgataccatttcagctactatttcatacgacaaagctaactcactgaacgaactagacgtcacagccacaacggtcgcaaagtcagcttccacatcacaatcatcttctcgctccttaacttcaagcaccagtccatcttcaagcactggctcatcttcaagcaccggttcatcttcagcttcaagcagctccaaaagtaaaggcgtcggaaatattgttaatgtttcctttagtcagtctggataccttgcattatttgcaggtctgatttctgctctactctga

SEQ ID NO: 8790 - DNA, 1575 bp, Artificial Sequence
  Description of Artificial Sequence: Synthetic polynucleotide
atgcaattatctaaaagtatattattggcagcattagctgctacaccatctttggtgaatgccatgctccccatccatatcaagaattataggttcattaagccatcctctgccacaaatagcgaatccgataacgaagttttttttgtgaaaggtgtcgattatcagcctggtgggagttctggttacgatgctgactctgatacagatattctttctgaccctgaagtgtgtgccagagacgcctacgctttccaacaacttggtgtcaacacagtgagaatttactccttgaaccctgacttgaatcatgacaagtgcatgactatcttcaacaatgctggtatctacgccattttggatgttaatagtggtaattacggggagagtttgaaccgtgctgacccatctggaacatatgactctttgtatttgtccagagtcttcaaatttattgacgctttcaagaactaccctaacgtgttgggattcttttctggcaacgaagtcataaatgatcaaagcgactatgcaaaaattgatcctccatacatccgcgctgttcaaagagatatgaaacagtatatttccaaacatgcgaacagaagcatcccagtcggatattctgctgctgacaatactgatttgaggttagcaaccttcaagtacttgcagtgtaattctttggatggaaacaaagtcaatgatgatttggacatatctaaatctgatttctttggcttgaatacttatgaatggtgctctggcacttctagttgggaatcttctggctatgacaagttaaactctactttcgaagatgctgttattccgttgatattttctgagtatggttgcaacaaaaatacaccaagaacttttgacgaagtctctgagggtttgtatggtggtttaaagaacgtcttctctggtgggttggtatacgaatacactgaagaagctaataattacggtttggttaagcttgatgatagcggttctttaacttataaggatgattttgttaatttagaatctcaattgaagaacgtttctttgccaacaacaaaagaaagcgaaatatcttctgactctatctacaagtgcgataacagtgccatcaccaatatttattctggctttggaacgaacaatttcactttgccttctcaaccagcagaaattgccaatatgattgaatacggtgttaatggcaccaacaccggtaagatattgactgattatgctgttccaactacttttaactatacaattaaaaacaataaagatgataccatttctgctactatttcttacgacaaagctaactctttgaacgaattagacgtcacagccacaacggtcgcaaagtctgcttccacatctcaatcttcttctcgctccttaacttccagcaccagtccatcttctagcactggctcttcttctagcaccggttcttcttctgcttctagcagctccaaaagtaaaggcgtcggaaatattgttaatgtttcctttagtcagtctggataccttgcattatttgcaggtttgatttctgctttactctga

SEQ ID NO: 8791 - DNA, 2229 bp, Saccharomyces cerevisiae
atgggttcatcaattaactatcctgggtttgtgactaaaagcgctcatttggctgacactagtacggatgcgagcatttcatgtgaggaagcaacaagctcgcaggaagcgaagaagaatttctttcaaagggattataacatgatgaagaaggcgcctgctccaacgaagtctaaactgtctttggccttgcagacttccaagtcatcctctagtgccaacggtactgtacaagaggatacttcctcgaagacagaagatttttctacaaagagcattaagaaaaaaccagatagcggcgttgaatcgcatgtgtccatccaatcggattcggggccacaatcagactcagatttggattcagattcctctatctcatcatgtgacgaaaggaacgaagagtctttgaaagattacaggccgggtgggtaccaccctgcctttaagggcgagccctataaggatgcacgctacattttagtaagaaagctgggatggggccacttctccaccgtttggttggcaaaggatatggtaaacaacactcacgttgctatgaagattgttcggggcgacaaagtttacacagaagctgctgaagacgaaattaagcttttgcaaagagtgaatgacgccgataatacaaaggaggattccatgggggctaatcatattttgaaattgctagatcatttcaaccataagggccccaatggcgtccatgtggttatggtatttgaagtcctcggcgagaacttactggctttgataaagaagtatgaacataggggcattccattgatttatgtcaagcaaatatcgaagcagttactgcttggtcttgattacatgcataggcggtgtggtattatacacacagatattaaaccagaaaacgtgttgatggagattggagatgttgagggtatcgttcaaatggtcgaggcactggataaacagaagagagaggcaaaaaggttgcagaggcacgtttcgcggtcttctgatattaccgcgaacgatagcagtgatgagaaatgggcagaatgccaaacaagtatgccctgcggctcaagctcaaattccaaatctcgttctatagagaaggacttgtcaaaaagatgctttagaagacctagacgtcatacaattatcacagggtcgcaaccattaccttccccaattagttcatcaaatttctttgaaatgagggcgcacttttgtggtagtagtcacaatagcttttcctccgtatctgggaataggaacattccatcttccatcaataataacagtattaataatggcataggcattaagaatagcaacaatagtttcttaaattcagtaccacattctgtgaccaggatgttcataaatgaagacagtaatgataacaacaataatgataatagtaaaaataaaaataacaacaataacaacagtaacaacaataataacgaggacataatgaacacacctttgcatgaagagcagctggcagactctttatctacatttgatatttccaatatatcacaaagctccgatacaaatggtccatatatttctaatactatggattcaaattcaaacgtcagtaccgatatcaactccccagaaaatttgattcagatcaagattgctgatttaggtaatgcttgttggtatgacgaacattacacgaattctatacagacaagagaatacagatcaccagaggtgttactaggcgccccttggggttgtggtgcagatatatggtctactgcttgtctaatttttgaattgattaccggagattttcttttcgaaccggacgaaggtcattcctacactaaggatgatgaccatattgcacaaatcatcgagttattgggagaattaccatcataccttttgaggaacggcaaatatacaagaactttcttcaattcaagagggcttttaagaaatatctcgaaattgaaattttggcccttagaagatgttttaactgaaaaatataagttttctaaggacgaagccaaggaaatatctgattttttgtcgcctatgttacagctagacccaaggaaaagagctgatgcaggtggcttggttaaccatccatggctcaaggataccttgggtatggaagagattcgggtacctgatagagagttgtacgggagtggttccgatatccccggatggtttgaagaagtccgcgatcataaaagacattga

SEQ ID NO: 8792 - DNA, 2229 bp, Artificial Sequence
  Description of Artificial Sequence: Synthetic polynucleotide
atgggttcttccattaactatcctgggtttgtgactaaaagcgctcatttggctgacactagtacggatgcgagcattagttgtgaggaagcaacaagctctcaggaagcgaagaagaatttctttcaaagggattataacatgatgaagaaggcgcctgctccaacgaagtctaaattatctttggccttgcagacttccaagtcttcctctagtgccaacggtactgtacaagaggatacttcctccaagacagaagatttttctacaaagagcattaagaaaaaaccagatagcggcgttgaaagtcatgtgtccatccaatctgattctgggccacaatctgacagtgatttggattctgattcctctatctcttcttgtgacgaaaggaacgaagagtctttgaaagattacaggccgggtgggtaccaccctgcctttaagggcgagccctataaggatgcacgctacattttagtaagaaagttgggatggggccacttctccaccgtttggttggcaaaggatatggtaaacaacactcacgttgctatgaagattgttagaggcgacaaagtttacacagaagctgctgaagacgaaattaagcttttgcaaagagtgaatgacgccgataatacaaaggaggattccatgggggctaatcatattttgaaattgttggatcatttcaaccataagggccccaatggcgtccatgtggttatggtatttgaagtcctcggcgagaacttattagctttgataaagaagtatgaacataggggcattccattgatttatgtcaagcaaatatccaagcagttattacttggtcttgattacatgcataggagatgtggtattatacacacagatattaaaccagaaaacgtgttgatggagattggagatgttgagggtatcgttcaaatggtcgaggcattggataaacagaagagagaggcaaaaaggttgcagaggcacgtttctcgttcttctgatattaccgcgaacgatagcagtgatgagaaatgggcagaatgccaaacaagtatgccctgcggcagtagcagtaattccaaatctcgttctatagagaaggacttgagtaaaagatgctttagaagacctagacgtcatacaattatcacagggagccaaccattaccttccccaattagttcttccaatttctttgaaatgagggcgcacttttgtggtagtagtcacaatagcttttcctccgtatctgggaataggaacattccatcttccatcaataataacagtattaataatggcataggcattaagaatagcaacaatagtttcttaaattctgtaccacattctgtgaccaggatgttcataaatgaagacagtaatgataacaacaataatgataatagtaaaaataaaaataacaacaataacaacagtaacaacaataataacgaggacataatgaacacacctttgcatgaagagcagttagcagactctttatctacatttgatatttccaatatatctcaaagctccgatacaaatggtccatatatttctaatactatggattctaatagcaacgtcagtaccgatatcaactccccagaaaatttgattcagatcaagattgctgatttaggtaatgcttgttggtatgacgaacattacacgaattctatacagacaagagaatacagatctccagaggtgttattaggcgccccttggggttgtggtgcagatatatggtctactgcttgtttaatttttgaattgattaccggagattttcttttcgaaccggacgaaggtcattcctacactaaggatgatgaccatattgcacaaatcatcgagttattgggagaattaccatcttaccttttgaggaacggcaaatatacaagaactttcttcaattctagagggcttttaagaaatatctccaaattgaaattttggcccttagaagatgttttaactgaaaaatataagttttctaaggacgaagccaaggaaatatctgattttttgtctcctatgttacagttagacccaaggaaaagagctgatgcaggtggcttggttaaccatccatggctcaaggataccttgggtatggaagagattagagtacctgatagagagttgtacgggagtggttccgatatccccggatggtttgaagaagtccgcgatcataaaagacattga

SEQ ID NO: 8793 - DNA, 1578 bp, Saccharomyces cerevisiae
atggctgccggtgaacaagtttctaacatgtttgacactatcttagtgttagactttggttctcaatactctcatttgattaccagaagattaagagagtttaacatctatgctgagatgttgccatgcactcagaagatctctgagttgggctggactccaaagggtgtcattctttctggtggtccatattccgtatacgctgaagacgctccacacgtagaccatgctatctttgatttgaacgttccaatcctgggtatctgttacggtatgcaagaattggcttggattaatggtaaacaagttggtcgtggtgacaagagagagtacggtcctgccactttgaaggtgattgacgattccaactctctattcaaaggtatgaacgactctactgtctggatgtctcacggtgataaattgcacggcttgccaactggttacaagaccattgccacctccgataactccccatactgtggtattgtccacgaaactaagccaatctatggtattcaattccacccagaagttacacattctacccaaggtaagactcttttgaaaaacttcgccgttgatttgtgtcacgctaagcaaaactggactatggaaaactttatcgacactgaaataaacagaatcagaaaactggtcggtccaactgctgaagtcattggtgctgtttccggtggtgttgattctactgttgcatccaaattgatgacagaagccatcggtgatagattccatgccatcttggtcgataacggtgttttgagattaaatgaagctgctaacgttaaaaagacccttgtcgaaggtttaggtatcaacttgatggttgtcgatgcttccgaagaatttttaagtaaattgaagggtgtcactgacccagaaaagaagagaaagattattggtaacacatttatccacgtctttgaaagagaagctgaaaaaattaagccaaaagatggtaaggagattcaattcctgttacaaggtactctttatccagatgtcatcgaatccatttctttcaaaggtccttctcaaaccattaaaactcatcacaacgtcggtggtttactagagaacatgaaattaaagctaattgaaccattgagagaactgttcaaagacgaagtcaggcatctaggtgaattattaggaatccctcatgatctagtctggagacaccctttccctggtccaggtattgctattcgtgttctaggtgaagttactaaggaacaagtcgaaatagcaagaaaagctgacaacatttacattgaagaaatcaagaaggccggcttatacaaccaaatttcccaagcctttgcctgtttgttgcccgttaaatccgttggtgttatgggtgaccaaagaacctatgatcaagttattgctttgagggccattgaaactactgatttcatgactgctgactggttcccattcgaacacagtttcttgaagaaagtcgcctcaagaattgtcaatgaagtcgatggggttgctagggtcacttacgatataacttccaaacctcctgcaactgttgaatgggaatga

SEQ ID NO: 8794 - DNA, 1578 bp, Artificial Sequence
  Description of Artificial Sequence: Synthetic polynucleotide
atggctgccggtgaacaagtttctaacatgtttgacactatcttagtgttagactttggttctcaatactctcatttgattaccagaagattaagagagtttaacatctatgctgagatgttgccatgcactcagaagatctctgagttgggctggactccaaagggtgtcattctttctggtggtccatattccgtatacgctgaagacgctccacacgtagaccatgctatctttgatttgaacgttccaatcttgggtatctgttacggtatgcaagaattggcttggattaatggtaaacaagttggtcgtggtgacaagagagagtacggtcctgccactttgaaggtgattgacgattccaactctttattcaaaggtatgaacgactctactgtctggatgtctcacggtgataaattgcacggcttgccaactggttacaagaccattgccacctccgataactccccatactgtggtattgtccacgaaactaagccaatctatggtattcaattccacccagaagttacacattctacccaaggtaagactcttttgaaaaacttcgccgttgatttgtgtcacgctaagcaaaactggactatggaaaactttatcgacactgaaataaacagaatcagaaaattggtcggtccaactgctgaagtcattggtgctgtttccggtggtgttgattctactgttgcatccaaattgatgacagaagccatcggtgatagattccatgccatcttggtcgataacggtgttttgagattaaatgaagctgctaacgttaaaaagacccttgtcgaaggtttaggtatcaacttgatggttgtcgatgcttccgaagaatttttaagtaaattgaagggtgtcactgacccagaaaagaagagaaagattattggtaacacatttatccacgtctttgaaagagaagctgaaaaaattaagccaaaagatggtaaggagattcaattcttattacaaggtactctttatccagatgtcatcgaatccatttctttcaaaggtccttctcaaaccattaaaactcatcacaacgtcggtggtttattggagaacatgaaattaaagttgattgaaccattgagagaattattcaaagacgaagtcaggcatttaggtgaattattaggaatccctcatgatttggtctggagacaccctttccctggtccaggtattgctattcgtgttttaggtgaagttactaaggaacaagtcgaaatagcaagaaaagctgacaacatttacattgaagaaatcaagaaggccggcttatacaaccaaatttcccaagcctttgcctgtttgttgcccgttaaatccgttggtgttatgggtgaccaaagaacctatgatcaagttattgctttgagggccattgaaactactgatttcatgactgctgactggttcccattcgaacacagtttcttgaagaaagtcgcctctagaattgtcaatgaagtcgatggggttgctagggtcacttacgatataacttccaaacctcctgcaactgttgaatgggaatga

SEQ ID NO: 8795 - DNA, 3309 bp, Saccharomyces cerevisiae
atggataaagaaatatattgtggatcggttcctgtcagctattttgacccgtttgatttatttgagagtctgaggccagagtttcagcagattttaccgttagacaatatacattggaaggcatttgacggaactgtacgaacggttaacaggcttccaattgaattgattccagaaggtagaggggaggcagacaagtctaatgatgaacagccgtttatcagatttttgatagtgaactgtatctctatcgaccaatacagggccaaagtacggcctcttgtgagacagtggctaccaaatctggaatctgtatcttcatcgacaggagaaaaaatgatttataaaccaattattttactgtatgccaattctgaagtagtggactctaacctattcaaatcggtatccctaatggagaaatttggcaaagactttccgcatgtacaaactttggaagttcgatcggtttatagatctcccaaagaaaggcaggagttttggaaccaatttagccaaaagattaaggcttccgtactgagcatctttcaaaaacgattgacacatttgcaacattcgttggccaatttacaaaaaggaaataactttgaggaacagcttttgacaagagaaaaattgtacgagttatatgtggtattcaatattttggaagatgccagcctggaattgcaaaaaatcaaaaaagaaatactccgtagaaacatgaatatgccggatggaaaacttcaggtaccttttgaatcatcttctaaatcagatgaatcactgggctccataataatagaaggtacactcgataagtttcaattgcataagtattttttcattagaaggttaagacttctaaaactagaggaccagacgttgaccgcctttgtaggagcatttcaactaatcaagaattttattgaatccatatcaatagagtatagaaagtctgtgagattattggaatttaagcactattttataacttcgatgctgtcatattttgaatttgagaatgtctcaaatcctctcttgtgtgaaatcaaagctgagttattaatgttgaagcgcgacaactgggtgcaaggtgttatggctacaagtggttatagactaatggacaaaaactaccctaatagtgacgttaaatacaaatttgatctattaaaagaaacttttgtcgatgaaactgtcttccaagaaaacttccttactctcaccaaagaaattctttctctcttcaacaaatgtgaagggaagcgtcaaaggatagtagatattttatccattgagataggtttgctttactatcagggaaagaaatatgaggaggcagtctcgcttttcctttcctgttacgaatattatactcaaacgaactggaatagcattggtttgaaaatattgcaagttttcattgattccttgagccactgccccaaattagacgtcttacagattgatggggaatcagtttctgcatcggccgttttaactaatgcatttctcaatatacttaagttatgcaaagataacgatagcaaggaaatttggtggaaaaagttcatggatttacaaatgaaaaataacattcatctaatgtatcctttagatgggctattcgaagtaactttgaattctaaagttcatctggcaagagcgaatgttagtgctattgaagttaacttgaaaagctacggatttccggaggatatcagtacaaaaacaatgagattatctttgaaaaatatggggggagacgtgatagtttttggagccagtgattttcttttgaagaaaggtgaaaataaactaatattggagtgtagagatatcatgtacggtgaattttctctgctttctttcgaaatcattgttgaggggattacttttgtaaaggagtttccggagaatcaagatgagtttattgtagtgccagaaatatattgtaaggaaagtactaaggttctggtgaagcaggcgcataatttaaacttgggagagtatgcacttgaattgaaaagcgtgcaatctgacgctttagaatctttgcaagtagaggttgaggtgcaaaaaaatattggaaacatgaaaaatttacctgttagtttttccatggatgaaattcaggcaaggaagagatataatactccattcgagaacgttaggctagaatactatctgttggaccaaataaccgccttcgacttaataattaaaacatccttcaccaaaaaaaatgatcaaggcacctttggtgagaccaagaaggtccgcattcaatgttatttacaactgtctgtttcagtggaagatatttttaaaaaggatatatttttcttcaaatttcttctaaactcttcagtcagggaagagccagtaattttatatagttcagaattatcagcaccagatacacgaaatgattacaacatacgtggtgactacatcgctactacacccgcgttaattactttcgatgggaatgagagtttcattaattgctacgaaatcacagccaataataacttcgattcaaaagacatctttaatctgaaagttagatacaacacattaaaagaacagctagattgctttattacagacgccgtgcttattgaaggtgatgttgaatggtttattctgtttgaaaagtggaaaacattttgggaattagaaattttgaaaaagttgaaatacgattatgatgcattcaaagaaaacaggataattagattgttaaagacttcaatagacctgaataaaacaaagtcgaagatacgtaacctatgcattgaaaaagcggtccttgacaaaatattgatctgcttgaataaagtgagtagaggaattgcagtatgtaatactgatatggatgagtatgtgaggaatctggtaccgaaacagttgactgttccggtacaactaccaggttttgaacaattctttcatgtacaattcgagcaaatggaaactagccacgatgcgctacacgatactatagctaccataggcaattccctttcctatactgtaattgtggaaaatcttagtggacaatgggggcaagatgttatagatgacggaggatatatttttgaaattttgagcagtaatgaatggttaattcatggccagaaacgttgcgcaataaaagagaaaagaaaggagtttgaagtccatttgattcctttaaaaaagggctacttaaattttccgcgtgttgaaattaccaacataaatggtaaaagttgtagagttgatcactctaatgcatttgagtcaattttgattttttaa

SEQ ID NO: 8796 - DNA, 3309 bp, Artificial Sequence
  Description of Artificial Sequence: Synthetic polynucleotide
atggataaagaaatatattgtggatctgttcctgtcagctattttgacccgtttgatttatttgagagtttgaggccagagtttcagcagattttaccgttagacaatatacattggaaggcatttgacggaactgtaagaacggttaacaggcttccaattgaattgattccagaaggtagaggggaggcagacaagtctaatgatgaacagccgtttatcagatttttgatagtgaactgtatctctatcgaccaatacagggccaaagtaagacctcttgtgagacagtggttaccaaatttggaatctgtatcttcttctacaggagaaaaaatgatttataaaccaattattttattatatgccaattctgaagtagtggactctaacttgttcaaatctgtatccttgatggagaaatttggcaaagactttccgcatgtacaaactttggaagttagatctgtttatagatctcccaaagaaaggcaggagttttggaaccaatttagccaaaagattaaggcttccgtattgagcatctttcaaaaaagattgacacatttgcaacattctttggccaatttacaaaaaggaaataactttgaggaacagcttttgacaagagaaaaattgtacgagttatatgtggtattcaatattttggaagatgccagcttggaattgcaaaaaatcaaaaaagaaatactccgtagaaacatgaatatgccggatggaaaacttcaggtaccttttgaaagctcttctaaatctgatgaatctttaggctccataataatagaaggtacactcgataagtttcaattgcataagtattttttcattagaaggttaagacttttgaaattagaggaccagacgttgaccgcctttgtaggagcatttcaattgatcaagaattttattgaatccatatccatagagtatagaaagtctgtgagattattggaatttaagcactattttataacttctatgctttcctattttgaatttgagaatgtctccaatcctctcttgtgtgaaatcaaagctgagttattaatgttgaagcgcgacaactgggtgcaaggtgttatggctacaagtggttatagattaatggacaaaaactaccctaatagtgacgttaaatacaaatttgatttattaaaagaaacttttgtcgatgaaactgtcttccaagaaaacttccttactctcaccaaagaaattctttctctcttcaacaaatgtgaagggaagcgtcaaaggatagtagatattttatccattgagataggtttgctttactatcagggaaagaaatatgaggaggcagtctcccttttcctttcctgttacgaatattatactcaaacgaactggaatagcattggtttgaaaatattgcaagttttcattgattccttgagccactgccccaaattagacgtcttacagattgatggggaatctgtttctgcatctgccgttttaactaatgcatttctcaatatacttaagttatgcaaagataacgatagcaaggaaatttggtggaaaaagttcatggatttacaaatgaaaaataacattcatttaatgtatcctttagatgggcttttcgaagtaactttgaattctaaagttcatttagcaagagcgaatgttagtgctattgaagttaacttgaaaagctacggatttccggaggatatcagtacaaaaacaatgagattatctttgaaaaatatggggggagacgtgatagtttttggagccagtgattttcttttgaagaaaggtgaaaataaattgatattggagtgtagagatatcatgtacggtgaattttctttactttctttcgaaatcattgttgaggggattacttttgtaaaggagtttccggagaatcaagatgagtttattgtagtgccagaaatatattgtaaggaaagtactaaggttttggtgaagcaggcgcataatttaaacttgggagagtatgcacttgaattgaaaagcgtgcaatctgacgctttagaatctttgcaagtagaggttgaggtgcaaaaaaatattggaaacatgaaaaatttacctgttagtttttccatggatgaaattcaggcaaggaagagatataatactccattcgagaacgttaggttagaatactatcttttggaccaaataaccgccttcgacttaataattaaaacatccttcaccaaaaaaaatgatcaaggcacctttggtgagaccaagaaggtccgcattcaatgttatttacaattatctgtttctgtggaagatatttttaaaaaggatatatttttcttcaaatttcttttgaactcttctgtcagggaagagccagtaattttatatagttctgaattaagtgcaccagatacaagaaatgattacaacatacgtggtgactacatcgctactacacccgcgttaattactttcgatgggaatgagagtttcattaattgctacgaaatcacagccaataataacttcgattctaaagacatctttaatttgaaagttagatacaacacattaaaagaacagttagattgctttattacagacgccgtgcttattgaaggtgatgttgaatggtttattttatttgaaaagtggaaaacattttgggaattagaaattttgaaaaagttgaaatacgattatgatgcattcaaagaaaacaggataattagattgttaaagacttccatagacttgaataaaacaaagtccaagatacgtaacttatgcattgaaaaagcggtccttgacaaaatattgatctgcttgaataaagtgagtagaggaattgcagtatgtaatactgatatggatgagtatgtgaggaatttggtaccgaaacagttgactgttccggtacaattaccaggttttgaacaattctttcatgtacaattcgagcaaatggaaactagccacgatgcgttgcacgatactatagctaccataggcaattccctttcctatactgtaattgtggaaaatcttagtggacaatgggggcaagatgttatagatgacggaggatatatttttgaaattttgagcagtaatgaatggttaattcatggccagaaacgttgcgcaataaaagagaaaagaaaggagtttgaagtccatttgattcctttaaaaaagggctacttaaattttccgcgtgttgaaattaccaacataaatggtaaaagttgtagagttgatcactctaatgcatttgagtctattttgattttttga

SEQ ID NO: 8797 - DNA, 4977 bp, Saccharomyces cerevisiae
atgtcaaaaaaaaaagaaacctttactccaagggcaaataaacttaaactgacgaccccaagaagaaaactgaaaatactgtcatctctccttgacgcggacgaggattccaaaatgaaagatcaacatgggtactcaagggtccacaatgataaatacagagtagcaaagcctactcagcactcgactttacatgaatctatttcctccaggcgaagcagtcatattcataataaatcccttcatgaagatagtgcgagggcattaagctgggtagattctctaattaatagggggaaaagtatacttactacactagaaaaggaagatgccttgtttgagcgtagtcttgaggaggaaagacaacgttttcagcttcatgactctttaatgaacaagtacacaggaaacagtaaatctcatcagcgactaatcgatctcaggaagagccaatacggaacggatacttctttccaaaataatgatgaaattcccttagatagtttcataagttctcccttaccggacgctgaggacgagtcgtcctcaaatatcgactccgataaggatgaagatctggaaggtaaacaatctttaatcaaagatttcgatcttgaaaatgatgaatacgagctctctgaagaagaaaagaatagtgacggccaaagtagtccttcaataatgatattatcagatgaagaatatgcagaggaaggagcactacaagatgtatcgaatgatgaatatgccgaagaggaggggcaagttgagagaaagaatatagggcaagaacaggcaaatgtagagaatgctacacaaattagttcttctgattccagtgaaggacagaattattcagagggagtagaaatggaattagaagacgacattgatgtggaaagcgatgctgaaaaagatgaaagtcagggtgcagaaggaacagaacattcggtagatttttcaaaatacatgcagcctagaacagataatactaagatccccgttatcgaaaaatatgaatctgatgagcacaaagtccatcaaagatattcagaagacggtgcatttgatttcggttcagtaaatatttcagttgacgatgagtccgaggatgaagaaagtcaagctgaaagttactcagcaaatgctgaaaatgtgtaccaccataatgaacatgaactggatgataaggaactaatagaagatatagaatcttcagatagtgaatcccaaagtgcacaagaaagcgaacaaggaagtgaagatgattttgaatataaaatgaaaaacgaaaaaagcacgtcagaagaaactgagaataccagcgaaagcagagaccaaggtttcgctaaagatgcttatactaagaacaaagtggaacaacaggaaaatgacgaagaacctgaaaaagatgacattatcagaagctctctagacaaaaattttcacggaaacaacaacaaaagtgaatactcggaaaatgttttggagaatgaaactgatcctgctatagtagaaagagaaaatcaaattaacgatgttgaaggttatgacgtaacaggaaaaagtgtcgaaagtgatttgcacgagcattcccctgataatttgtatgatctcgccgcaagggctatgcttcaattccaacaaagtagaaattcgaactgccctcaaaaagaggagcaggtatccgaatcttatttagggcactcaaatggaagcaacttatcgggcaggtctttagacgaatccgaagagcaaatacccctaaaggacttcacaggtgaaaacaataataatttaaaaacagaccgaggtgatctttcatcttctgttgaaatagaggttgaaaaagtttctgaaaagaaactggacggttctacagaaaaagaactggtaccactatccacagatactacgattaacaattcatcattaggaaatgaagacagtatctattattcactcgatgacgctgatgctatatcagagaatcttaccgatgttcctcttatggaaatcaaaacaactccgaaatatgaagtagtaatttctgaatctgtgtatagttctacttcttacgaagataacacagttgccatgccaccgcaagtggagtacacttcaccatttatgaatgacccattcaattcgttgaacgatgattacgaaaagaagcatgacctactgaaatcaacgttagcagcccttgccccagctttcaccaaaaaggatgcagaatttgtggaagctggagtgacgaaatcatgcttgacatctacatctgggcacacaaacatttttcacacaagtaaggaaactaaacaggtgagcgatttggatgaatctacggaaaacgttacttttgaaaatgaaaatacaggtgatgaaaataaaaatcaaagtaaaaattttccaggcgtggctaacagtactgacaagtcaactgaagataacacggatgaaaagtacttttcagcgattaattataccaacgttacaggagactcttcctgcgaggacataattgaaacggcttcaaatgtagaagaaaatttaagatactgtgaaaaggatatgaacgaagctgagatgtcttctggcgatgaatgcgtaaaacagaatgatgatggtagtaaaactcaaatttcgttttcaacagattcgccagacaattttcaagaaagcaacgacaacactgaattctcttctactaaatataaagtaagaaatagtgatcttgaagacgacgaatcactcaagaaggaacttacaaaagctgaagtagttgataagcttgatgaagaggaaagtgaggattcatatgaacaagattatgcggatccagaaccaggcaatgatgaaggcagtaatgaaaatatagttaaaggtacaaaaaaggatactctcggaatagtagaaccagaaaatgaaaaagttaataaggtgcacgaagaagaaacacttttcgaagccaatgtcagttcatccgtaaatgttcagaacaaagacatgcacaccgacgtcatcaatcaagaggcgcaagcgaattacgaagctggtgaaagaaaatactatatccagaatacagatacggaggaagcacacatttccattatcgaaagaatagatgagaatgcgattggaaataatatggagatcccagaaaggtcgtgcgtggaaaaaacgcacaacgaagtgctctttgaaagaagagcaactaccattgaaaacacaaaagccctggaaaataataccaatatgcatgatcaggttagccaagcttgctctgattcagaccgagaccaagactccacagctgaaaaaaatgttgagggatctgcaaaacataatttggacattcgggtgtccagttcggaaattgagtctgtggaaccattgaagccagaatctgatcgatcaaatattttttcatccccaattcgtgttattggagctgtagttaagggagtgggtaaggtagtcgacgtagctgaatcattcgtgaaaaaaattgatgttatggattctgagagtgatgataacgttgatattggtgattataatcaagacatttttaacaagtcgaattctaccgatgcatctgttaatatgaaaagtgtaagtagcaaagagagagacagcgatgaagatgaagctgtcatactcggaggagttaccgcagaagcacataatgacaatggtaataattctcgtgtgataaacatcgatcccacgacaaacggtgcttatgaagaggactccgaagtgtttcgacagcaagtaaaggacaaggaaaatttgcataagtcggaagagccgctagttgaaggtttacaatccgagcaacatttcgaaaagaaagaccacagcgagaatgaagaagaatttgataccatatatggagatataacatcagcaaatattcacagtaatgcccccgatgatattaagagacaacaactcctaaagaatctaagtgacctagagaattattctcagaggctcattgaagattccaggagaggaaaaaatcaagaagaatcagacgaagttaatacaagccgtgaacgggatctcacgtttgaaaagtccgttaatgagaaatatgctggagcaattgaagaagacactttttcggagttagatattagcattcaacaccccgaacatgaagaagacctggacctatcaaacaatcaggagaggtcaatagaagaactaaattcagagccagaagaagctgagttgtacgaattggaaatagagggccctacagagacagcagcttctagtaaaatgaatgatgatgaaaggcaacgcggaaatataccgtccacagatcttccatctgatcctccgtctgataaggaagaagtgacagattcttatccctattcaaattcggaaaatattaccgctgaaaagagtgcgccaacatcaccggaagtgtatgaaatattctcagacacgccaaatgaagtccctatggaaattaatgatgaaattcccgccaccacgcttgagaaacacgataaaaccaatgtaacatccgttttggatgatagatcagaacatttatctagccacgatgttgataatgagccacacgataattccattaacatcaaagtaaatgaaggtgaggagcccgaacatcaagcagtggatatacctgttaaagtagaagttaaagaagaacaggaggaaatgccttcaaaatctgtacttgaagaacagaaaccaagtatggaactaatcaatgataaaagttctccagaaaataataatgatgaggaaacaaaccgcgaaaaggacaaaactaaagcaaaaaagaaaagccgtaaaagaaactacaacagcagaagacggaaaagaaaaatcacagaaggcagttctgccgcatcaaatactaaaaggcgtagggggcacgagccaaaaagccgtggacagaatacgcatccaagtgttgacaaataa

SEQ ID NO: 8798 - DNA, 4977 bp, Artificial Sequence
  Description of Artificial Sequence: Synthetic polynucleotide
atgtccaaaaaaaaagaaacctttactccaagggcaaataaacttaaattaacgaccccaagaagaaaattgaaaatattatcttctctccttgacgcggacgaggattccaaaatgaaagatcaacatgggtactctagggtccacaatgataaatacagagtagcaaagcctactcagcacagtactttacatgaatctatttcctccaggagaagcagtcatattcataataaatcccttcatgaagatagtgcgagggcattaagctgggtagattctttgattaatagggggaaaagtatacttactacattagaaaaggaagatgccttgtttgagcgtagtcttgaggaggaaagacaacgttttcagcttcatgactctttaatgaacaagtacacaggaaacagtaaatctcatcagaggttgatcgatctcaggaagagccaatacggaacggatacttctttccaaaataatgatgaaattcccttagatagtttcataagttctcccttaccggacgctgaggacgagtcttcctctaatatcgactccgataaggatgaagatttggaaggtaaacaatctttaatcaaagatttcgatcttgaaaatgatgaatacgagctctctgaagaagaaaagaatagtgacggccaaagtagtccttccataatgatattaagtgatgaagaatatgcagaggaaggagcattacaagatgtatctaatgatgaatatgccgaagaggaggggcaagttgagagaaagaatatagggcaagaacaggcaaatgtagagaatgctacacaaattagttcttctgattccagtgaaggacagaattattctgagggagtagaaatggaattagaagacgacattgatgtggaaagcgatgctgaaaaagatgaaagtcagggtgcagaaggaacagaacattctgtagatttttccaaatacatgcagcctagaacagataatactaagatccccgttatcgaaaaatatgaatctgatgagcacaaagtccatcaaagatattctgaagacggtgcatttgatttcggttctgtaaatatttctgttgacgatgagtccgaggatgaagaaagtcaagctgaaagttacagtgcaaatgctgaaaatgtgtaccaccataatgaacatgaattagatgataaggaattgatagaagatatagaatcttctgatagtgaatcccaaagtgcacaagaaagcgaacaaggaagtgaagatgattttgaatataaaatgaaaaacgaaaaaagcacgagtgaagaaactgagaataccagcgaaagcagagaccaaggtttcgctaaagatgcttatactaagaacaaagtggaacaacaggaaaatgacgaagaacctgaaaaagatgacattatcagaagctctttggacaaaaattttcacggaaacaacaacaaaagtgaatactctgaaaatgttttggagaatgaaactgatcctgctatagtagaaagagaaaatcaaattaacgatgttgaaggttatgacgtaacaggaaaaagtgtcgaaagtgatttgcacgagcattcccctgataatttgtatgatctcgccgcaagggctatgcttcaattccaacaaagtagaaatagcaactgccctcaaaaagaggagcaggtatccgaatcttatttagggcactctaatggaagcaacttaagtggcaggtctttagacgaatccgaagagcaaatacccttgaaggacttcacaggtgaaaacaataataatttaaaaacagaccgtggtgatctttcttcttctgttgaaatagaggttgaaaaagtttctgaaaagaaattagacggttctacagaaaaagaattggtaccattgtccacagatactacgattaacaattcttctttaggaaatgaagacagtatctattattccctcgatgacgctgatgctatatctgagaatcttaccgatgttcctcttatggaaatcaaaacaactccgaaatatgaagtagtaatttctgaatctgtgtatagttctacttcttacgaagataacacagttgccatgccaccgcaagtggagtacacttctccatttatgaatgacccattcaattctttgaacgatgattacgaaaagaagcatgacttattgaaatctacgttagcagcccttgccccagctttcaccaaaaaggatgcagaatttgtggaagctggagtgacgaaaagttgcttgacatctacatctgggcacacaaacatttttcacacaagtaaggaaactaaacaggtgagcgatttggatgaatctacggaaaacgttacttttgaaaatgaaaatacaggtgatgaaaataaaaatcaaagtaaaaattttccaggcgtggctaacagtactgacaagtctactgaagataacacggatgaaaagtacttttctgcgattaattataccaacgttacaggagactcttcctgcgaggacataattgaaacggcttctaatgtagaagaaaatttaagatactgtgaaaaggatatgaacgaagctgagatgtcttctggcgatgaatgcgtaaaacagaatgatgatggtagtaaaactcaaatttccttttctacagattctccagacaattttcaagaaagcaacgacaacactgaattctcttctactaaatataaagtaagaaatagtgatcttgaagacgacgaatctctcaagaaggaacttacaaaagctgaagtagttgataagcttgatgaagaggaaagtgaggattcttatgaacaagattatgcggatccagaaccaggcaatgatgaaggcagtaatgaaaatatagttaaaggtacaaaaaaggatactctcggaatagtagaaccagaaaatgaaaaagttaataaggtgcacgaagaagaaacacttttcgaagccaatgtcagttcttccgtaaatgttcagaacaaagacatgcacaccgacgtcatcaatcaagaggcgcaagcgaattacgaagctggtgaaagaaaatactatatccagaatacagatacggaggaagcacacatttccattatcgaaagaatagatgagaatgcgattggaaataatatggagatcccagaaaggagttgcgtggaaaaaacgcacaacgaagtgctctttgaaagaagagcaactaccattgaaaacacaaaagccttggaaaataataccaatatgcatgatcaggttagccaagcttgctctgattctgacagagaccaagactccacagctgaaaaaaatgttgagggatctgcaaaacataatttggacattagagtgtccagttctgaaattgagtctgtggaaccattgaagccagaatctgatagatctaatattttttcttccccaattcgtgttattggagctgtagttaagggagtgggtaaggtagtcgacgtagctgaatctttcgtgaaaaaaattgatgttatggattctgagagtgatgataacgttgatattggtgattataatcaagacatttttaacaagagcaattctaccgatgcatctgttaatatgaaaagtgtaagtagcaaagagagagacagcgatgaagatgaagctgtcatactcggaggagttaccgcagaagcacataatgacaatggtaataattctcgtgtgataaacatcgatcccacgacaaacggtgcttatgaagaggactccgaagtgtttagacagcaagtaaaggacaaggaaaatttgcataagtctgaagagccgttggttgaaggtttacaatccgagcaacatttcgaaaagaaagaccacagcgagaatgaagaagaatttgataccatatatggagatataacaagtgcaaatattcacagtaatgcccccgatgatattaagagacaacaactcttgaagaatttgagtgacttggagaattattctcagaggctcattgaagattccaggagaggaaaaaatcaagaagaaagtgacgaagttaatacaagccgtgaaagagatctcacgtttgaaaagtccgttaatgagaaatatgctggagcaattgaagaagacactttttctgagttagatattagcattcaacaccccgaacatgaagaagacttggacttatctaacaatcaggagaggtctatagaagaattgaattctgagccagaagaagctgagttgtacgaattggaaatagagggccctacagagacagcagcttctagtaaaatgaatgatgatgaaaggcaacgcggaaatataccgtccacagatcttccatctgatcctccgtctgataaggaagaagtgacagattcttatccctattctaattctgaaaatattaccgctgaaaagagtgcgccaacatctccggaagtgtatgaaatattcagtgacacgccaaatgaagtccctatggaaattaatgatgaaattcccgccaccacgcttgagaaacacgataaaaccaatgtaacatccgttttggatgatagaagtgaacatttatctagccacgatgttgataatgagccacacgataattccattaacatcaaagtaaatgaaggtgaggagcccgaacatcaagcagtggatatacctgttaaagtagaagttaaagaagaacaggaggaaatgccttccaaatctgtacttgaagaacagaaaccaagtatggaattgatcaatgataaaagttctccagaaaataataatgatgaggaaacaaaccgcgaaaaggacaaaactaaagcaaaaaagaaaagccgtaaaagaaactacaacagcagaagaagaaaaagaaaaatcacagaaggcagttctgccgcatctaatactaaaaggcgtagggggcacgagccaaaaagccgtggacagaatacgcatccaagtgttgacaaatga

SEQ ID NO: 8799 - DNA, 1356 bp, Saccharomyces cerevisiae
atgtcagagttgagagccttcagtgccccagggaaagcgttactagctggtggatatttagttttagatacaaaatatgaagcatttgtagtcggattatcggcaagaatgcatgctgtagcccatccttacggttcattgcaagggtctgataagtttgaagtgcgtgtgaaaagtaaacaatttaaagatggggagtggctgtaccatataagtcctaaaagtggcttcattcctgtttcgataggcggatctaagaaccctttcattgaaaaagttatcgctaacgtatttagctactttaaacctaacatggacgactactgcaatagaaacttgttcgttattgatattttctctgatgatgcctaccattctcaggaggatagcgttaccgaacatcgtggcaacagaagattgagttttcattcgcacagaattgaagaagttcccaaaacagggctgggctcctcggcaggtttagtcacagttttaactacagctttggcctccttttttgtatcggacctggaaaataatgtagacaaatatagagaagttattcataatttagcacaagttgctcattgtcaagctcagggtaaaattggaagcgggtttgatgtagcggcggcagcatatggatctatcagatatagaagattcccacccgcattaatctctaatttgccagatattggaagtgctacttacggcagtaaactggcgcatttggttgatgaagaagactggaatattacgattaaaagtaaccatttaccttcgggattaactttatggatgggcgatattaagaatggttcagaaacagtaaaactggtccagaaggtaaaaaattggtatgattcgcatatgccagaaagcttgaaaatatatacagaactcgatcatgcaaattctagatttatggatggactatctaaactagatcgcttacacgagactcatgacgattacagcgatcagatatttgagtctcttgagaggaatgactgtacctgtcaaaagtatcctgaaatcacagaagttagagatgcagttgccacaattagacgttcctttagaaaaataactaaagaatctggtgccgatatcgaacctcccgtacaaactagcttattggatgattgccagaccttaaaaggagttcttacttgcttaatacctggtgctggtggttatgacgccattgcagtgattactaagcaagatgttgatcttagggctcaaaccgctaatgacaaaagattttctaaggttcaatggctggatgtaactcaggctgactggggtgttaggaaagaaaaagatccggaaacttatcttgataaataa

SEQ ID NO: 8800 - DNA, 1356 bp, Artificial Sequence
  Description of Artificial Sequence: Synthetic polynucleotide
atgtctgagttgagagccttcagtgccccagggaaagcgttattagctggtggatatttagttttagatacaaaatatgaagcatttgtagtcggattaagtgcaagaatgcatgctgtagcccatccttacggttctttgcaagggtctgataagtttgaagtgcgtgtgaaaagtaaacaatttaaagatggggagtggttataccatataagtcctaaaagtggcttcattcctgtttctataggcggatctaagaaccctttcattgaaaaagttatcgctaacgtatttagctactttaaacctaacatggacgactactgcaatagaaacttgttcgttattgatattttctctgatgatgcctaccattctcaggaggatagcgttaccgaacatcgtggcaacagaagattgagttttcattctcacagaattgaagaagttcccaaaacagggttgggctcctctgcaggtttagtcacagttttaactacagctttggcctccttttttgtaagtgacttggaaaataatgtagacaaatatagagaagttattcataatttagcacaagttgctcattgtcaagctcagggtaaaattggaagcgggtttgatgtagcggcggcagcatatggatctatcagatatagaagattcccacccgcattaatctctaatttgccagatattggaagtgctacttacggcagtaaattagcgcatttggttgatgaagaagactggaatattacgattaaaagtaaccatttaccttctggattaactttatggatgggcgatattaagaatggttctgaaacagtaaaattggtccagaaggtaaaaaattggtatgattctcatatgccagaaagcttgaaaatatatacagaactcgatcatgcaaattctagatttatggatggattatctaaattggatcgcttacacgagactcatgacgattacagcgatcagatatttgagtctcttgagaggaatgactgtacctgtcaaaagtatcctgaaatcacagaagttagagatgcagttgccacaattagacgttcctttagaaaaataactaaagaatctggtgccgatatcgaacctcccgtacaaactagcttattggatgattgccagaccttaaaaggagttcttacttgcttaatacctggtgctggtggttatgacgccattgcagtgattactaagcaagatgttgatcttagggctcaaaccgctaatgacaaaagattttctaaggttcaatggcttgatgtaactcaggctgactggggtgttaggaaagaaaaagatccggaaacttatcttgataaatga

SEQ ID NO: 8801 - DNA, 1515 bp, Saccharomyces cerevisiae
atgaccagtacaagaacgttgagatacgcacaggttgcctgtgcttgtatctggtgtcttttttcagctggtattatctttggatttgctgctttgaaacctattttaatttcagaaggtgtataccatgaattgtgtgatcctaaggatggtgatagattattatgtactgcacaggatctgaaattaaattttatatttgctctcagtgctactgtaacaaacatcatggcccttcctgtcggtaagattttggatatgtatggacctcgtgtctgcggaataataggatcatgtctcttgttcctagcaagcggtaattttatttctgccaagcatctagtgtctctttgggacccatatcttgtcggttacacgcttttggcagttgccggtccgttcgtcttcatttcatgttttcaattggcaaatagcttcccacaaagatcaggaaccgtattggccctactaacaggatcatttgattcgtcatctgcgctgtttctgttatataggttgttatatcaaaactggtttcctaccttgaacgtttccagatttttcaccctatatttgattgttccagtgtttattcttgcctgtcaactcacgataatgcctcattcttcctacaaaactgtcaatcacattgctaagatcgctgtggaaggtttagatgaaaacggaagactcatcgagggtgatacaggctccggtatcatccctgatgaacaggaacgtcaatcgttgattgcaatcgagcgtgaagaagatagtatcccatcaaggccgcagagaaggaaatcggtattggaaacttacgttgaagataagttgcagaaaaagtcaggcggcatattcggagtcttgcatgggaaatccgcttatgaacaaataaagagtccgtggttttatttaatgcttttatttgcgcttgttgccatgctgaggataaactattttattgctaccgtcagaacacaagaagaatacttattaaatgatcctgatttagcactaaaattgaattccatttttgatatgttacttccacttggcggtgctgtttccataccatttattgggctgctcttggaccatacagatactttgtccactctcacaatattgttcaccacttctaccgctataggtgtttttggcttgattccaaattcattcacttggaacttaataggtatagtacttctggtagtgtacagaccattttattacacagttgtttctgattattcttcaaaagtttttggatttgacacatttggtactgtttatgggttattgtcctgcatttgtggtattttcaacatgagtcaaaacttactggacaaatggacacatactactttcaacatgaatccattcccaataaaccttacactggtaatcctcacagtcgttttttcactaactttaacattttacatacgatctcagattttgcccaagcccgtgaatgaaagaggattgtcctccaactaccaaactatctga

SEQ ID NO: 8802 - DNA, 1515 bp, Artificial Sequence
  Description of Artificial Sequence: Synthetic polynucleotide
atgaccagtacaagaacgttgagatacgcacaggttgcctgtgcttgtatctggtgtcttttttctgctggtattatctttggatttgctgctttgaaacctattttaatttctgaaggtgtataccatgaattgtgtgatcctaaggatggtgatagattattatgtactgcacaggatttgaaattaaattttatatttgctctcagtgctactgtaacaaacatcatggcccttcctgtcggtaagattttggatatgtatggacctcgtgtctgcggaataataggatcttgtctcttgttcttggcaagcggtaattttatttctgccaagcatttggtgtctctttgggacccatatcttgtcggttacacgcttttggcagttgccggtccgttcgtcttcattagttgttttcaattggcaaatagcttcccacaaagatctggaaccgtattggccttgttgacaggaagttttgattcttcttctgcgttatttttattatataggttgttatatcaaaactggtttcctaccttgaacgtttccagatttttcaccttatatttgattgttccagtgtttattcttgcctgtcaactcacgataatgcctcattcttcctacaaaactgtcaatcacattgctaagatcgctgtggaaggtttagatgaaaacggaagactcatcgagggtgatacaggctccggtatcatccctgatgaacaggaacgtcaatctttgattgcaatcgagcgtgaagaagatagtatcccatctaggccgcagagaaggaaatctgtattggaaacttacgttgaagataagttgcagaaaaagtctggcggcatattcggagtcttgcatgggaaatccgcttatgaacaaataaagagtccgtggttttatttaatgcttttatttgcgcttgttgccatgttaaggataaactattttattgctaccgtcagaacacaagaagaatacttattaaatgatcctgatttagcattgaaattgaattccatttttgatatgttacttccacttggcggtgctgtttccataccatttattgggttactcttggaccatacagatactttgtccactctcacaatattgttcaccacttctaccgctataggtgtttttggcttgattccaaattctttcacttggaacttaataggtatagtacttttggtagtgtacagaccattttattacacagttgtttctgattattcttctaaagtttttggatttgacacatttggtactgtttatgggttattgtcctgcatttgtggtattttcaacatgagtcaaaacttattagacaaatggacacatactactttcaacatgaatccattcccaataaaccttacattggtaatcctcacagtcgttttttctttgactttaacattttacataagatctcagattttgcccaagcccgtgaatgaaagaggattgtcctccaactaccaaactatctga

SEQ ID NO: 8803 - DNA, 672 bp, Saccharomyces cerevisiae
atgacgaagaatgtattgatgttacatgggcttgcgcagtcaggtgactactttgcctctaagacaaaggggtttcgcgccgaaatggaaaagttaggatataaactctactatccaacagcacccaatgaatttcccccagctgatgttcctgatttcttgggtgaggtaattgctgatgcacctggggatggtgagaataccggtgtgcttgcgtggctagagaatgacccttccaccggtggctatttcataccgcagacgacaatcgactatttacacaattatgtccttgaaaatggtccatttgcaggtattgtaggatttagtcaaggagccggtgtagctggatacctagcaacggatttcaatggtttgttgggccttacaacagaagaacagccgccgctagaatttttcatggcggtcagtggtttcaggttccaaccacaacagtatcaagaacagtacgacctgcatccaatatcggtcccatctctacatgttcaaggagaacttgacactatcacagagccggccaaagtgcaaggcctatataactcttgtacggaagactctcgcactttactaatgcactctgggggccactttgtgccgaactcaagagggtttgtgagaaaagtggctcaatggctccagcagttgacctga

SEQ ID NO: 8804 - DNA, 672 bp, Artificial Sequence
  Description of Artificial Sequence: Synthetic polynucleotide
atgacgaagaatgtattgatgttacatgggcttgcgcagtctggtgactactttgcctctaagacaaaggggtttcgcgccgaaatggaaaagttaggatataaactctactatccaacagcacccaatgaatttcccccagctgatgttcctgatttcttgggtgaggtaattgctgatgcacctggggatggtgagaataccggtgtgcttgcgtggttggagaatgacccttccaccggtggctatttcataccgcagacgacaatcgactatttacacaattatgtccttgaaaatggtccatttgcaggtattgtaggatttagtcaaggagccggtgtagctggatacttggcaacggatttcaatggtttgttgggccttacaacagaagaacagccgccgttggaatttttcatggcggtcagtggtttcaggttccaaccacaacagtatcaagaacagtacgacttgcatccaatatctgtcccatctttgcatgttcaaggagaacttgacactatcacagagccggccaaagtgcaaggcttgtataactcttgtacggaagactctcgcactttattgatgcactctgggggccactttgtgccgaactctagagggtttgtgagaaaagtggctcaatggctccagcagttgacctga

SEQ ID NO: 8805 - DNA, 1416 bp, Saccharomyces cerevisiae
atgagcatttgtccacatatacagcaagtatttcagaatgaaaagtctaaagatggggttctaaaaacgtgcaatgctgccaggtatatattaaatcattccgtacccaaggaaaaattcttaaacaccatgaaatgtggtacatgccacgaaataaactctggtgcaactttcatgtgtctacaatgtggattttgtggatgttggaaccattcgcattttctctctcacagtaaacagattggtcacatatttggtatcaactcaaataatggccttttattttgcttcaaatgtgaggactatatagggaatatcgatctgattaacgatgctatcctagcgaagtattgggacgacgtgtgcacaaagaccatggttcctagcatggaaagaagagatgggctttctggcctgatcaacatgggatccacttgtttcatgagtagtattctccaatgtctaatccataacccttactttattaggcactcaatgagtcaaattcattctaataattgtaaagtgcgttctccagataaatgtttttcatgtgcactcgataaaattgttcatgaactttatggagcgctgaatacaaagcaagcttcttcgtcatctacatctactaatcggcaaaccggattcatatatcttttaacttgtgcctggaaaatcaatcaaaatctagcagggtattcacaacaagatgctcatgaattttggcagtttataattaaccaaatccaccaaagctatgttcttgatttgccaaatgccaaggaagtcagcagagcaaataataagcagtgtgaatgcatagtgcatactgtgtttgagggctccttggaaagttctattgtgtgtccaggctgtcaaaataattcaaagacaaccattgatccattcttggatctttctctggatatcaaggataagaaaaaactttatgaatgtcttgacagtttccataaaaaagaacagttgaaggatttcaactatcattgtggggagtgtaacagcactcaagatgcaataaagcaactaggcatacacaaattaccatcggttttggttttgcaattgaaaagattcgaacacctacttaatggaagtaacagaaaactagacgattttattgaatttccaacttatttaaatatgaaaaattactgttcaacgaaggaaaaagataagcattctgaaaatggcaaggttccagacattatttacgaattaatcggtattgtttcccacaaggggacggttaatgagggacattatattgcattttgtaaaatttctggagggcaatggtttaaattcaatgattccatggtctcctctatatctcaagaagaggttttaaaggaacaggcatatttattattctacaccattcgtcaagtaaattga

SEQ ID NO: 8806 - DNA, 1416 bp, Artificial Sequence
  Description of Artificial Sequence: Synthetic polynucleotide
atgagcatttgtccacatatacagcaagtatttcagaatgaaaagtctaaagatggggttttgaaaacgtgcaatgctgccaggtatatattaaatcattccgtacccaaggaaaaattcttaaacaccatgaaatgtggtacatgccacgaaataaactctggtgcaactttcatgtgtttgcaatgtggattttgtggatgttggaaccattctcattttctctctcacagtaaacagattggtcacatatttggtatcaacagtaataatggccttttattttgcttcaaatgtgaggactatatagggaatatcgatttgattaacgatgctatcttagcgaagtattgggacgacgtgtgcacaaagaccatggttcctagcatggaaagaagagatgggctttctggcttaatcaacatgggatccacttgtttcatgagtagtattctccaatgtttaatccataacccttactttattaggcactccatgagtcaaattcattctaataattgtaaagtgcgttctccagataaatgtttttcttgtgcactcgataaaattgttcatgaactttatggagcgttgaatacaaagcaagcttcttcttcttctacatctactaatagacaaaccggattcatatatcttttaacttgtgcctggaaaatcaatcaaaatttggcagggtattctcaacaagatgctcatgaattttggcagtttataattaaccaaatccaccaaagctatgttcttgatttgccaaatgccaaggaagtcagcagagcaaataataagcagtgtgaatgcatagtgcatactgtgtttgagggctccttggaaagttctattgtgtgtccaggctgtcaaaataattctaagacaaccattgatccattcttggatctttctttagatatcaaggataagaaaaaactttatgaatgtcttgacagtttccataaaaaagaacagttgaaggatttcaactatcattgtggggagtgtaacagcactcaagatgcaataaagcaattaggcatacacaaattaccatctgttttggttttgcaattgaaaagattcgaacacttacttaatggaagtaacagaaaattagacgattttattgaatttccaacttatttaaatatgaaaaattactgttccacgaaggaaaaagataagcattctgaaaatggcaaggttccagacattatttacgaattaatcggtattgtttcccacaaggggacggttaatgagggacattatattgcattttgtaaaatttctggagggcaatggtttaaattcaatgattccatggtctcctctatatctcaagaagaggttttaaaggaacaggcatatttattattctacaccattcgtcaagtaaattga

SEQ ID NO: 8807 - DNA, 2079 bp, Saccharomyces cerevisiae
atggactatcctgatccagacacaataaggattttaattactacagataatcatgtgggttacaacgaaaatgatcccattactggcgatgattcttggaaaactttccatgaagtcatgatgctggccaaaaataacaacgtagacatggttgtacagtccggtgatctttttcacgtgaataagccttccaagaagtcactctaccaagtactgaagactttgagattatgttgcatgggtgacaagccttgcgagttagaattattgagcgatccctcacaagtttttcactacgatgaatttaccaacgttaactatgaggaccccaactttaatatttctattcccgtattcggcatatcaggtaatcatgatgatgcgtcgggggactcactgttgtgtcctatggatatacttcatgcgactggtctaataaatcatttcgggaaagtcatcgaatctgataaaataaaagtcgtgccattattatttcagaaagggtccactaagttagcattgtacggattagccgctgttcgtgatgaaaggttatttagaacttttaaggatggtggtgtcacttttgaagtaccgactatgcgagaaggtgaatggtttaatttaatgtgcgtccatcaaaatcatacaggtcacacgaatactgcatttttacctgaacagttcttgccagatttcctggatatggtgatatggggtcatgaacatgagtgtattccgaatctcgtacacaatccaattaaaaattttgatgtattacaaccaggttcatctgtagctacttcactttgtgaggctgaggcacaacccaagtatgtctttatccttgacataaagtatggagaagcaccaaaaatgacacctattcctcttgagactatacggacattcaaaatgaaatccatttcgttacaagatgttccccatttgaggcctcacgataaagatgctacgtctaagtatcttattgaacaagttgaagaaatgatccgcgacgctaatgaggaaactaaacaaaaattagcggacgatggtgaaggtgacatggttgcggaattaccgaaaccattgatcagattacgtgttgattatagtgcaccctccaatacacaatccccaatagattaccaagttgaaaacccgcgtagatttagcaatcgatttgtgggacgtgttgctaacggtaataacgttgtgcagttttataaaaaaaggtcacctgtaactagatcaaaaaaatccggtataaatggaacaagcatcagtgatagagatgttgagaaacttttcagcgaaagtggcggtgaactagaagttcaaactttggttaatgatctcttgaacaaaatgcaactatctttattaccagaagttggtttgaatgaagcagtaaagaagtttgtagataaagatgagaaaacagctcttaaagaatttattagccatgaaatatcgaacgaagttggaatattatctacgaatgaagaatttctgagaacagatgatgcagaggaaatgaaagcgcttataaaacaggttaagcgtgctaacagtgttaggccgactccccctaaagaaaatgatgagacaaatttcgcattcaatggtaatgggctagattccttccggtctagtaatagagaagtaagaactggatctccagacattacccaatcacatgttgataatgaatcaagaataacccatattagtcaagcggaaagcagtaagccaacgagcaaacccaaacgagtgcgaactgcaacgaaaaagaaaattcctgctttttcagactcaactgtcatatccgatgcagaaaatgaactcggtgataataacgatgctcaagatgatgttgatattgatgagaatgacataattatggtcagtactgacgaagaggacgctagttatggtttacttaatggtcgaaaaacaaaaacaaagactcgtcctgctgcgagcaccaaaaccgcttccagaaggggaaaaggaagagcatcaaggacgccaaagacggatattcttggaagtctccttgctaagaaaagaaaatag

SEQ ID NO: 8808 - DNA, 2079 bp, Artificial Sequence
  Description of Artificial Sequence: Synthetic polynucleotide
atggactatcctgatccagacacaataaggattttaattactacagataatcatgtgggttacaacgaaaatgatcccattactggcgatgattcttggaaaactttccatgaagtcatgatgttggccaaaaataacaacgtagacatggttgtacagtccggtgatctttttcacgtgaataagccttccaagaagtctctctaccaagtattgaagactttgagattatgttgcatgggtgacaagccttgcgagttagaattattgagcgatccctctcaagtttttcactacgatgaatttaccaacgttaactatgaggaccccaactttaatatttctattcccgtattcggcatatctggtaatcatgatgatgcgtctggggactctttgttgtgtcctatggatatacttcatgcgactggtttgataaatcatttcgggaaagtcatcgaatctgataaaataaaagtcgtgccattattatttcagaaagggtccactaagttagcattgtacggattagccgctgttcgtgatgaaaggttatttagaacttttaaggatggtggtgtcacttttgaagtaccgactatgagagaaggtgaatggtttaatttaatgtgcgtccatcaaaatcatacaggtcacacgaatactgcatttttacctgaacagttcttgccagatttcttggatatggtgatatggggtcatgaacatgagtgtattccgaatctcgtacacaatccaattaaaaattttgatgtattacaaccaggttcttctgtagctacttctctttgtgaggctgaggcacaacccaagtatgtctttatccttgacataaagtatggagaagcaccaaaaatgacacctattcctcttgagactataagaacattcaaaatgaaatccatttctttacaagatgttccccatttgaggcctcacgataaagatgctacgtctaagtatcttattgaacaagttgaagaaatgatccgcgacgctaatgaggaaactaaacaaaaattagcggacgatggtgaaggtgacatggttgcggaattaccgaaaccattgatcagattacgtgttgattatagtgcaccctccaatacacaatccccaatagattaccaagttgaaaacccgcgtagatttagcaatagatttgtgggacgtgttgctaacggtaataacgttgtgcagttttataaaaaaaggtctcctgtaactagaagtaaaaaatccggtataaatggaacaagcatcagtgatagagatgttgagaaacttttcagcgaaagtggcggtgaattggaagttcaaactttggttaatgatctcttgaacaaaatgcaattatctttattaccagaagttggtttgaatgaagcagtaaagaagtttgtagataaagatgagaaaacagctcttaaagaatttattagccatgaaataagcaacgaagttggaatattatctacgaatgaagaatttttaagaacagatgatgcagaggaaatgaaagcgcttataaaacaggttaagcgtgctaacagtgttaggccgactccccctaaagaaaatgatgagacaaatttcgcattcaatggtaatgggttagattccttcagatctagtaatagagaagtaagaactggatctccagacattacccaatctcatgttgataatgaatctagaataacccatattagtcaagcggaaagcagtaagccaacgagcaaacccaaaagagtgagaactgcaacgaaaaagaaaattcctgctttttctgactctactgtcatatccgatgcagaaaatgaactcggtgataataacgatgctcaagatgatgttgatattgatgagaatgacataattatggtcagtactgacgaagaggacgctagttatggtttacttaatggtagaaaaacaaaaacaaagactcgtcctgctgcgagcaccaaaaccgcttccagaaggggaaaaggaagagcaagcaggacgccaaagacggatattcttggaagtctccttgctaagaaaagaaaatga

SEQ ID NO: 8809 - DNA, 297 bp, Saccharomyces cerevisiae
atgataactaaatacttcagtaaggtaattgtcaggtttaatccctttggcaaggaagcgaaagttgctaggttagtacttgctgccattccaccaacgcaacgaaacatgggcacgcagattcaatcggaaattatctcagattacaataaagtcaagcctcttgtgaaagtaacctacaaggacaaaaaagaaatggaagtcgatccatcaaacatgaactttcaggaattagccaatcatttcgaccgtcactcgaaacagctggatctcaaacatatgttggaaatgcattga

SEQ ID NO: 8810 - DNA, 297 bp, Artificial Sequence
  Description of Artificial Sequence: Synthetic polynucleotide
atgataactaaatacttcagtaaggtaattgtcaggtttaatccctttggcaaggaagcgaaagttgctaggttagtacttgctgccattccaccaacgcaaagaaacatgggcacgcagattcaaagtgaaattatcagtgattacaataaagtcaagcctcttgtgaaagtaacctacaaggacaaaaaagaaatggaagtcgatccatctaacatgaactttcaggaattagccaatcatttcgaccgtcactctaaacagttagatctcaaacatatgttggaaatgcattga

SEQ ID NO: 8811 - DNA, 804 bp, Saccharomyces cerevisiae
atgtcccaaggtagaaaagctgcagaaagattggctaagaagactgtcctcattacaggtgcatctgctggtattggtaaggcgaccgcattagagtacttggaggcatccaatggtgatatgaaactgatcttggctgctagaagattagaaaagctcgaggaattgaagaagaccattgatcaagagtttccaaacgcaaaagttcatgtggcccagctggatatcactcaagcagaaaaaatcaagcccttcattgaaaacttgccacaagagttcaaggatattgacattctggtgaacaatgccggaaaggctcttggcagtgaccgtgtgggccagatcgcaacggaggatatccaggacgtgtttgacaccaacgtcacggctttaatcaatatcacacaagctgtactgcccatattccaagccaagaattcaggagatattgtaaatttgggttcaatcgctggcagagacgcatacccaacaggttctatctattgtgcctctaagtttgccgtgggggcgttcactgatagtttgagaaaggagctcatcaacactaaaattagagtcattctaattgcaccagggctagtcgagactgaattttcactagttagatacagaggtaacgaggaacaagccaagaatgtttacaaggatactaccccattgatggctgatgacgtggctgatctgatcgtctatgcaacttccagaaaacaaaatactgtaattgcagacactttaatctttccaacaaaccaagcgtcacctcatcatatcttccgtggataa

SEQ ID NO: 8812 - DNA, 804 bp, Artificial Sequence
  Description of Artificial Sequence: Synthetic polynucleotide
atgtcccaaggtagaaaagctgcagaaagattggctaagaagactgtcctcattacaggtgcatctgctggtattggtaaggcgaccgcattagagtacttggaggcatccaatggtgatatgaaattaatcttggctgctagaagattagaaaagctcgaggaattgaagaagaccattgatcaagagtttccaaacgcaaaagttcatgtggcccagttagatatcactcaagcagaaaaaatcaagcccttcattgaaaacttgccacaagagttcaaggatattgacattttggtgaacaatgccggaaaggctcttggcagtgaccgtgtgggccagatcgcaacggaggatatccaggacgtgtttgacaccaacgtcacggctttaatcaatatcacacaagctgtattgcccatattccaagccaagaattctggagatattgtaaatttgggttctatcgctggcagagacgcatacccaacaggttctatctattgtgcctctaagtttgccgtgggggcgttcactgatagtttgagaaaggagctcatcaacactaaaattagagtcattttaattgcaccagggttagtcgagactgaattttctttggttagatacagaggtaacgaggaacaagccaagaatgtttacaaggatactaccccattgatggctgatgacgtggctgatttgatcgtctatgcaacttccagaaaacaaaatactgtaattgcagacactttaatctttccaacaaaccaagcgtcccctcatcatatcttccgtggatga

SEQ ID NO: 8813 - DNA, 1773 bp, Saccharomyces cerevisiae
atggctgttataagaattaaaaaacccagaggaccaggagagaaggatcaaccattagaaggcgagcctaaactaaagagaattcgcataaagacaaaggtaactgatgaagatatcaaaccaaagcctaaattaaagataaacctaaagaaaaagaaagagagtgctgacggcaaagagaagaagaattcattgaagttaaagttaaacttgaaaaaaaatgaagaaccagttaagaagatacacaaggcgccaaagctacgtctcaaacctattagaattcctggggaagcgtacgactcagaagcctctgatattgaagatgaccctctcatagagagtggtgtgatattaaggatacttccagacatacagttagagtttgtaaaaaattcgttagaatcaggtgattattctgggataagtatcaagtggaaaaacgagagacacgctgtcgtaacaataaacgatgtaatgtatggtgccattctagtagatttgcctacagttatagaagtgaacaagagcgtcgatagaaaaaacctcctgaagacatttgacgtatcacaaatgctactatgcataagacctatacaagaagaggaagaagtatatgccctagaagcccctgatacagaagatctggttgttaagcattttgaaggcatagaggatgaaatttgggagaataaagaaaccttcttaaaaggatacaatggtgcgcctttaagtgatatggaggctaaacatttgaaagaaatagctttgaagggctatgactacaaacatggaatatcaccacctttgtacaatgttcgaaatagacgatttagacggaaaatggaccctaatgaaatagactatgtagaaaaagtggttgatatgcttttgaagcaagataaacaggcagaagaggtcagctatgatctggttgataaaagtgaactgcaagcgaggcaagagcgtgtttctagttgggaaaatttcaaagaggagcctggagagcctttatctagacctgctttaaagaaagaagagatacacacaattgcttcggcagtaggaaaacaaggtgcagaagaagagggagaagaaggaatggaagaagaagaagaggaggatcttgacctaggcgctgcttttgaaagtgaagaggaaggtagcggtgccgagggagacaaggagcaacaacaagaggaagtcggtgatgaggtggatcaagacacaggcggagaagatgatgacgatgatgacgacggtgacattgaagctgctggtggggaaagtgaatctgatgacgaaaaagacgaaaacagacagcacactgaattacttgcggacgaattgaacgaactagagaccaccctggcccataccaagcataaattaagtaaagccacgaatcctcttttgaaaagcaggttcatagatagcattaaaaagctcgagaaggaggctgaactaaaacgtaagcagttacaacaaaccgaagattctgtccagaaacaacatcaacatcgctctgacgcagaaactgcaaataacgtcgaggaagaagaagaggaagaggaagaagaagaggaagaggatgaagtggacgaagacgaggaggatgacgaagaaaacgatgaggacgaggataatgtgcatgaacgggaacacatacaagagaacaaggtggtgcgcgaacttgatgaagcccccgcagaggaaacactcgaccagaacgatctcgatatgatgatgctatttggtgcagagggtgatgagtaa

SEQ ID NO: 8814 - DNA, 1773 bp, Artificial Sequence
  Description of Artificial Sequence: Synthetic polynucleotide
atggctgttataagaattaaaaaacccagaggaccaggagagaaggatcaaccattagaaggcgagcctaaattgaagagaattcgcataaagacaaaggtaactgatgaagatatcaaaccaaagcctaaattaaagataaacttgaagaaaaagaaagagagtgctgacggcaaagagaagaagaattctttgaagttaaagttaaacttgaaaaaaaatgaagaaccagttaagaagatacacaaggcgccaaagttgcgtctcaaacctattagaattcctggggaagcgtacgactctgaagcctctgatattgaagatgaccctctcatagagagtggtgtgatattaaggatacttccagacatacagttagagtttgtaaaaaattctttagaaagtggtgattattctgggataagtatcaagtggaaaaacgagagacacgctgtcgtaacaataaacgatgtaatgtatggtgccattttagtagatttgcctacagttatagaagtgaacaagagcgtcgatagaaaaaacctcttgaagacatttgacgtatctcaaatgttattatgcataagacctatacaagaagaggaagaagtatatgccttggaagcccctgatacagaagatttggttgttaagcattttgaaggcatagaggatgaaatttgggagaataaagaaaccttcttaaaaggatacaatggtgcgcctttaagtgatatggaggctaaacatttgaaagaaatagctttgaagggctatgactacaaacatggaatatctccacctttgtacaatgttagaaatagaagatttagaagaaaaatggaccctaatgaaatagactatgtagaaaaagtggttgatatgcttttgaagcaagataaacaggcagaagaggtcagctatgatttggttgataaaagtgaattacaagcgaggcaagagcgtgtttctagttgggaaaatttcaaagaggagcctggagagcctttatctagacctgctttaaagaaagaagagatacacacaattgcttctgcagtaggaaaacaaggtgcagaagaagagggagaagaaggaatggaagaagaagaagaggaggatcttgacttgggcgctgcttttgaaagtgaagaggaaggtagcggtgccgagggagacaaggagcaacaacaagaggaagtcggtgatgaggtggatcaagacacaggcggagaagatgatgacgatgatgacgacggtgacattgaagctgctggtggggaaagtgaatctgatgacgaaaaagacgaaaacagacagcacactgaattacttgcggacgaattgaacgaattagagaccaccttggcccataccaagcataaattaagtaaagccacgaatcctcttttgaaaagcaggttcatagatagcattaaaaagctcgagaaggaggctgaattgaaacgtaagcagttacaacaaaccgaagattctgtccagaaacaacatcaacatcgctctgacgcagaaactgcaaataacgtcgaggaagaagaagaggaagaggaagaagaagaggaagaggatgaagtggacgaagacgaggaggatgacgaagaaaacgatgaggacgaggataatgtgcatgaaagagaacacatacaagagaacaaggtggtgcgcgaacttgatgaagcccccgcagaggaaacactcgaccagaacgatctcgatatgatgatgttatttggtgcagagggtgatgagtga

SEQ ID NO: 8815 - DNA, 1026 bp, Saccharomyces cerevisiae
atgtctgttccaatccctggtattaaagatatctccaaacttaagttcttttatggtttcaaatatttatggaatccaacagtatacaataaaatctttgataagctggatttaactaaaacgtataaacatccagaagaattgaaagtacttgacctctaccctggtgttggtatacaatcagctattttttataataaatattgccccaggcaatattctttattagaaaaacgctcaagtctctacaagtttctgaatgcaaaattcgaagggtctccattgcaaattctaaaaagagatccatatgactggtcaacctactcgaatctaattgacgaagagcgaatatttgttcctgaagttcaatcctcagatcatattaatgataaatttctaaccgttgctaatgtgacgggggagggttctgaaggtcttataatgcagtggctgtcctgtattggaaacaagaactggttgtataggtttggtaaagtaaagatgttattatggatgccaagcacaacagctagaaaacttctagctaggccaggcatgcattctagatccaaatgttcagtagtaagggaggcatttacagatactaaactcattgccatatcagacgcaaatgaattgaagggatttgatagtcaatgcatagaagaatgggatcccattttatttagtgctgcggaaatatggcctacaaagggaaagccaattgcgttagtagaaatggacccaattgacttcgattttgacgtagataattgggattatgtcacgaggcacttaatgattttgaaaagaacacccttgaatactgtcatggactcgctgggacatggtggccaacaatattttaatagtagaatcactgacaaagatctgctaaaaaagtgtccgattgatttgacaaatgacgagtttatatatctaacgaaattattcatggagtggcctttcaaaccagatattttaatggattttgttgatatgtatcaaacagagcactctggttga

SEQ ID NO: 8816 - DNA, 1026 bp, Artificial Sequence
  Description of Artificial Sequence: Synthetic polynucleotide
atgtctgttccaatccctggtattaaagatatctccaaacttaagttcttttatggtttcaaatatttatggaatccaacagtatacaataaaatctttgataagttggatttaactaaaacgtataaacatccagaagaattgaaagtacttgacctctaccctggtgttggtatacaatctgctattttttataataaatattgccccaggcaatattctttattagaaaaacgcagtagtctctacaagtttttgaatgcaaaattcgaagggtctccattgcaaattttgaaaagagatccatatgactggtctacctactctaatttaattgacgaagagagaatatttgttcctgaagttcaatccagtgatcatattaatgataaatttttaaccgttgctaatgtgacgggggagggttctgaaggtcttataatgcagtggttatcctgtattggaaacaagaactggttgtataggtttggtaaagtaaagatgttattatggatgccaagcacaacagctagaaaacttttagctaggccaggcatgcattctagatccaaatgttctgtagtaagggaggcatttacagatactaaactcattgccatatctgacgcaaatgaattgaagggatttgatagtcaatgcatagaagaatgggatcccattttatttagtgctgcggaaatatggcctacaaagggaaagccaattgcgttagtagaaatggacccaattgacttcgattttgacgtagataattgggattatgtcacgaggcacttaatgattttgaaaagaacacccttgaatactgtcatggactctttgggacatggtggccaacaatattttaatagtagaatcactgacaaagatttattgaaaaagtgtccgattgatttgacaaatgacgagtttatatatttgacgaaattattcatggagtggcctttcaaaccagatattttaatggattttgttgatatgtatcaaacagagcactctggttga

SEQ ID NO: 8817 - DNA, 5190 bp, Saccharomyces cerevisiae
atggtagcttccaccaaaagaaagagagatgaagattttccactttcgagggaagactccacaaagcagccctctacctcatcattagtaaggaacactgaggaagtctcttttccaaggggtggtgcgtctgctttgactcctttagaactgaaacaagttgctaacgaagctgcaagtgatgtgttatttggtaatgaaagtgtcaaagcatctgaaccagcaagtagacccttgaaaaagaagaagacaacaaagaaatccacttctaaagattccgaggcctcatcagcaaactctgatgaagctagagctggactaattgaacatgtcaactttaaaacgttgaagaatggctcttctttgcttggtcagatttctgctatcactaaacaagatttatgtataacattcacagacggaatttctggttatgtgaacctaacacatatctcagaagaatttacttcgattttggaagatctggatgaagatatggatagtgatactgatgctgctgatgagaaaaaatccaaagttgaagatgcagaatacgaatcgtccgacgacgaagatgaaaaattagataaatctaatgaattacctaatttaagaaggtactttcacattggtcaatggctaagatgctctgtcatcaagaatacctctttagaaccatcaactaagaaatccaaaaagaagagaatagagttaaccatcgaaccttcatccgtcaacatatacgcagatgaagatttggttaaatccacgtctattcaatgcgcggtcaaatccatcgaggatcacggtgctaccttagatgttggtctgccaggctttacagggttcattgctaagaaggattttggcaattttgaaaaattattgccgggggctgttttcttaggtaatatcaccaaaaaatccgacagatcaattgttgtaaatacagacttttcggacaagaaaaacaaaattactcaaatctcctcaattgatgccattatccctggtcaaatcgtcgacttattgtgtgaatcaatcactaaaaatggtattgccggtaaagtttttgggttagtatccggtgttgtcaacgtatcacatttaagaacattttccgaagaagatttaaagcataaatttgttattggttctagtattagatgccgaattattgcttgtttagaaaacaaaagcggtgacaaggtcttgattttgtcaaaccttccacacattttaaaactagaagacgctttgagatctactgaaggtcttgatgcattccctatcggctacacatttgaatcatgcagcattaaagggcgtgattccgaatatctatacttagcattggatgatgatagattaggtaaagtacattcttcaagagttggtgaaattgaaaattcagaaaatttaagttccagggtccttggttatagccctgttgatgacatttatcaattgtccactgatccaaaatacctaaaattaaagtatctaagaacaaatgatattccaatcggagaattattaccaagttgtgaaataacttccgtctctagttcaggtattgaattgaagatatttaacgggcaatttaaggcttctgttccaccattacacatttcagataccaggctagtttatccagaaaggaagttcaagataggttctaaggttaaaggtagagttatatcagttaattcaagaggtaatgtgcatgtcactttgaaaaaatcattagttaatattgaagacaacgaattaccactggtttccacttatgaaaacgccaaaaatatcaaagaaaaaaatgaaaagactttagcaactattcaagttttcaaaccaaatggttgcatcatttccttttttggtggtttatcgggatttttacctaattctgagatctcagaagtctttgtgaagagaccagaagaacatttaagactcggtcaaacagtaatagtaaaacttcttgacgtcgatgctgacaggaggagaattattgccacatgcaaagtttcaaatgaacaggctgcccaacaaaaagataccattgaaaatattgttccaggcagaacaatcattactgtccatgttatcgaaaaaaccaaagattctgttattgttgaaattcctgatgttggcttgcgtggtgtcatctacgttggtcatctctctgattccagaattgaacaaaatagggctcagttgaaaaagctcagaatcggcactgaactgactggtttggtaattgataaagatacaagaacccgcgttttcaatatgtccctcaaaagttctctgattaaagacgctaaaaaggagactcttccattaacatatgatgatgttaaggatctaaataaagatgtaccaatgcacgcttacattaaatccatttctgataagggtctctttgttgcatttaacggtaagttcattgggttggttttaccaagttacgctgttgatagtagggatattgatatcagcaaggcgttttatattaaccaatccgttaccgtctatttattaagaacagacgacaaaaaccagaaattcctattatctctaaaagctccaaaggtcaaagaagagaagaagaaagttgaatctaatatcgaagatcctgttgattcgtctatcaaaagctgggacgatttgtctattggtagtattgttaaagcaaaaatcaagagcgtcaagaaaaatcaattgaatgttattttagcggcaaatttgcatggcagagtggacattgctgaagtgtttgacacgtatgaagaaattacagataagaaacagccgttgagtaattacaaaaaagacgatgtcatcaaggtaaaaatcataggtaatcacgatgtcaagagccataagttcttgccgattacacacaaaatctcaaaggctagcgttttggaattatccatgaaaccatcagaattaaaatctaaggaagtgcacacaaaaagtcttgaggaaatcaacattgggcaagagttaactggctttgtcaacaattcatcaggtaaccacctatggctaacaatttctccagttttgaaggcgagaatttctctactagatttagctgataacgattcaaatttttcagaaaatattgaatctgttttcccattaggttcagccctccaagtgaaagttgcctctattgaccgcgagcatggctttgtcaatgccattggaaagagtcatgttgacataaatatgtccacaattaaagttggtgatgaattgccaggtcgtgttctaaaaatagctgaaaagtatgttttgttagaccttggtaacaaagtgactggtatttcctttattacggatgcgttaaatgatttctccctaacattgaaggaagcttttgaagacaaaattaacaacgtcattccaactaccgttttatctgttgatgaacagaataagaaaattgaactatcccttcgtcctgctactgcaaaaactcgttcgatcaaatctcatgaagatttgaagcaaggcgagattgtagatggtattgttaagaatgtgaatgacaaaggtatttttgtttacttgagtaggaaagttgaagcctttgtccctgttagtaaactatctgattcttacttgaaggaatggaagaagttttacaagcctatgcaatacgttttgggaaaagtcgttacatgcgatgaagattctcgtatttctctaaccctaagagaatccgaaataaatggtgatttaaaggttctaaagacctattcagacattaaggctggtgatgttttcgagggtacaattaaaagcgtcactgattttggtgttttcgtcaaactagataacactgttaatgttactggtttggcacatattactgaaattgcggacaaaaaacctgaagatctttctgccttgtttggtgttggggacagagtaaaagctattgttttgaaaacaaatccagaaaaaaaacaaatttcattgagcttgaaagcgtctcatttctctaaagaagccgaattggcttctactaccaccaccactactactgtggatcaactggaaaaggaggatgaagatgaagtcatggcagatgctggcttcaacgattccgacagcgaatctgatatcggagaccaaaacaccgaagttgccgataggaagcctgaaacatcttcggatgggctatccttgagtgctggttttgattggactgcttccattttggatcaagcgcaagaagaagaagagtctgaccaagatcaagaagactttactgaaaataagaaacacaagcacaagagaagaaaggaaaatgttgttcaggataagaccattgatatcaacactagggcaccagaatctgttgccgattttgaacgtctacttatcggtaatccaaattcgtccgtagtgtggatgaactatatggctttccaactacaactgagtgagatcgagaaggctcgagagctcgcagaacgtgcgctaaagaccatcaacttcagagaagaagccgagaagttgaatatttggattgcaatgctgaatttagaaaatacttttggtaccgaagaaactttagaagaagtgtttagcagggcttgtcagtatatggactcatatactattcatacaaaactgcttggtatttatgaaataagtgaaaagttcgacaaagcagcagaattattcaaagctacagctaagaaatttggcggcgagaaagtttctatctgggtatcgtggggtgattttttgatcagccacaatgaagagcaagaggcacgtactattttaggtaatgctttgaaggccctaccaaagcgtaatcatatcgaggttgtccgcaagtttgctcaattagaatttgcaaagggtgacccagaaaggggtcggtcattattcgaaggtttggttgctgatgcgccaaagagaattgacctgtggaacgtttacgtagaccaggaagtgaaggcaaaagataagaagaaggtggaagatttatttgagagaataataaccaaaaaaataacaaggaagcaggctaagtttttctttaataaatggttacaatttgaggaatctgaaggtgacgaaaagaccattgaatacgttaaagctaaagctactgagtatgtcgctagccatgaatctcaaaaagcagacgaataa

SEQ ID NO: 8818 - DNA, 5190 bp, Artificial Sequence
  Description of Artificial Sequence: Synthetic polynucleotide
atggtagcttccaccaaaagaaagagagatgaagattttccactttctagggaagactccacaaagcagccctctacctcttctttagtaaggaacactgaggaagtctcttttccaaggggtggtgcgtctgctttgactcctttagaattgaaacaagttgctaacgaagctgcaagtgatgtgttatttggtaatgaaagtgtcaaagcatctgaaccagcaagtagacccttgaaaaagaagaagacaacaaagaaatccacttctaaagattccgaggcctcttctgcaaactctgatgaagctagagctggattgattgaacatgtcaactttaaaacgttgaagaatggctcttctttgcttggtcagatttctgctatcactaaacaagatttatgtataacattcacagacggaatttctggttatgtgaacttaacacatatcagtgaagaatttacttctattttggaagatttggatgaagatatggatagtgatactgatgctgctgatgagaaaaaatccaaagttgaagatgcagaatacgaatcttccgacgacgaagatgaaaaattagataaatctaatgaattacctaatttaagaaggtactttcacattggtcaatggttgagatgctctgtcatcaagaatacctctttagaaccatctactaagaaatccaaaaagaagagaatagagttaaccatcgaaccttcttccgtcaacatatacgcagatgaagatttggttaaatccacgtctattcaatgcgcggtcaaatccatcgaggatcacggtgctaccttagatgttggtttgccaggctttacagggttcattgctaagaaggattttggcaattttgaaaaattattgccgggggctgttttcttaggtaatatcaccaaaaaatccgacagatctattgttgtaaatacagacttttctgacaagaaaaacaaaattactcaaatctccagtattgatgccattatccctggtcaaatcgtcgacttattgtgtgaaagtatcactaaaaatggtattgccggtaaagtttttgggttagtatccggtgttgtcaacgtatctcatttaagaacattttccgaagaagatttaaagcataaatttgttattggttctagtattagatgccgtattattgcttgtttagaaaacaaaagcggtgacaaggtcttgattttgtctaaccttccacacattttaaaattagaagacgctttgagatctactgaaggtcttgatgcattccctatcggctacacatttgaaagttgcagcattaaagggcgtgattccgaatatttgtacttagcattggatgatgatagattaggtaaagtacattcttctagagttggtgaaattgaaaattctgaaaatttaagttccagggtccttggttatagccctgttgatgacatttatcaattgtccactgatccaaaatacttgaaattaaagtatttaagaacaaatgatattccaatcggagaattattaccaagttgtgaaataacttccgtctctagttctggtattgaattgaagatatttaacgggcaatttaaggcttctgttccaccattacacatttctgataccaggttggtttatccagaaaggaagttcaagataggttctaaggttaaaggtagagttatatctgttaattctagaggtaatgtgcatgtcactttgaaaaaatctttagttaatattgaagacaacgaattaccattagtttccacttatgaaaacgccaaaaatatcaaagaaaaaaatgaaaagactttagcaactattcaagttttcaaaccaaatggttgcatcatttccttttttggtggtttatctggatttttacctaattctgagatcagtgaagtctttgtgaagagaccagaagaacatttaagactcggtcaaacagtaatagtaaaacttcttgacgtcgatgctgacaggaggagaattattgccacatgcaaagtttctaatgaacaggctgcccaacaaaaagataccattgaaaatattgttccaggcagaacaatcattactgtccatgttatcgaaaaaaccaaagattctgttattgttgaaattcctgatgttggcttgcgtggtgtcatctacgttggtcatctctctgattccagaattgaacaaaatagggctcagttgaaaaagctcagaatcggcactgaattgactggtttggtaattgataaagatacaagaacccgcgttttcaatatgtccctcaaaagttctttgattaaagacgctaaaaaggagactcttccattaacatatgatgatgttaaggatttgaataaagatgtaccaatgcacgcttacattaaatccatttctgataagggtctctttgttgcatttaacggtaagttcattgggttggttttaccaagttacgctgttgatagtagggatattgatatcagcaaggcgttttatattaaccaatccgttaccgtctatttattaagaacagacgacaaaaaccagaaattcttattatctttgaaagctccaaaggtcaaagaagagaagaagaaagttgaatctaatatcgaagatcctgttgattcttctatcaaaagctgggacgatttgtctattggtagtattgttaaagcaaaaatcaagagcgtcaagaaaaatcaattgaatgttattttagcggcaaatttgcatggcagagtggacattgctgaagtgtttgacacgtatgaagaaattacagataagaaacagccgttgagtaattacaaaaaagacgatgtcatcaaggtaaaaatcataggtaatcacgatgtcaagagccataagttcttgccgattacacacaaaatctccaaggctagcgttttggaattatccatgaaaccatctgaattaaaatctaaggaagtgcacacaaaaagtcttgaggaaatcaacattgggcaagagttaactggctttgtcaacaattcttctggtaaccacctttggttgacaatttctccagttttgaaggcgagaatttctttattagatttagctgataacgattctaatttttctgaaaatattgaatctgttttcccattaggttctgccctccaagtgaaagttgcctctattgaccgcgagcatggctttgtcaatgccattggaaagagtcatgttgacataaatatgtccacaattaaagttggtgatgaattgccaggtcgtgttttgaaaatagctgaaaagtatgttttgttagaccttggtaacaaagtgactggtatttcctttattacggatgcgttaaatgatttctccttaacattgaaggaagcttttgaagacaaaattaacaacgtcattccaactaccgttttatctgttgatgaacagaataagaaaattgaattatcccttcgtcctgctactgcaaaaactcgttccatcaaatctcatgaagatttgaagcaaggcgagattgtagatggtattgttaagaatgtgaatgacaaaggtatttttgtttacttgagtaggaaagttgaagcctttgtccctgttagtaaattatctgattcttacttgaaggaatggaagaagttttacaagcctatgcaatacgttttgggaaaagtcgttacatgcgatgaagattctcgtatttctttaaccttgagagaatccgaaataaatggtgatttaaaggttttgaagacctattctgacattaaggctggtgatgttttcgagggtacaattaaaagcgtcactgattttggtgttttcgtcaaattggataacactgttaatgttactggtttggcacatattactgaaattgcggacaaaaaacctgaagatctttctgccttgtttggtgttggggacagagtaaaagctattgttttgaaaacaaatccagaaaaaaaacaaatttctttgagcttgaaagcgtctcatttctctaaagaagccgaattggcttctactaccaccaccactactactgtggatcaattggaaaaggaggatgaagatgaagtcatggcagatgctggcttcaacgattccgacagcgaatctgatatcggagaccaaaacaccgaagttgccgataggaagcctgaaacatcttctgatgggttatccttgagtgctggttttgattggactgcttccattttggatcaagcgcaagaagaagaagagtctgaccaagatcaagaagactttactgaaaataagaaacacaagcacaagagaagaaaggaaaatgttgttcaggataagaccattgatatcaacactagggcaccagaatctgttgccgattttgaacgtttacttatcggtaatccaaattcttccgtagtgtggatgaactatatggctttccaattacaattgagtgagatcgagaaggctagagagctcgcagaacgtgcgttaaagaccatcaacttcagagaagaagccgagaagttgaatatttggattgcaatgttgaatttagaaaatacttttggtaccgaagaaactttagaagaagtgtttagcagggcttgtcagtatatggactcttatactattcatacaaaattacttggtatttatgaaataagtgaaaagttcgacaaagcagcagaattattcaaagctacagctaagaaatttggcggcgagaaagtttctatctgggtaagctggggtgattttttgatcagccacaatgaagagcaagaggcacgtactattttaggtaatgctttgaaggccttaccaaagcgtaatcatatcgaggttgtccgcaagtttgctcaattagaatttgcaaagggtgacccagaaaggggtagatctttattcgaaggtttggttgctgatgcgccaaagagaattgacttatggaacgtttacgtagaccaggaagtgaaggcaaaagataagaagaaggtggaagatttatttgagagaataataaccaaaaaaataacaaggaagcaggctaagtttttctttaataaatggttacaatttgaggaatctgaaggtgacgaaaagaccattgaatacgttaaagctaaagctactgagtatgtcgctagccatgaatctcaaaaagcagacgaatga

SEQ ID NO: 8819 - DNA, 318 bp, Saccharomyces cerevisiae
atgttgatgccaaagcaagaaagaaacaaaattcaccaatacttgtttcaagaaggtgttgtcgtcgctaagaaggatttcaaccaagctaagcacgaagaaattgataccaagaacttgtatgttatcaaggctttgcaatccttgacttctaagggttacgttaagactcaattctcatggcaatactactattacactttgactgaagaaggtgttgaatacttgagagaatacttgaacttgcctgaacacattgtcccaggtacctacattcaagaaagaaacccatcccaaagacctcaaagaagatactaa

SEQ ID NO: 8820 - DNA, 318 bp, Artificial Sequence
  Description of Artificial Sequence: Synthetic polynucleotide
atgttgatgccaaagcaagaaagaaacaaaattcaccaatacttgtttcaagaaggtgttgtcgtcgctaagaaggatttcaaccaagctaagcacgaagaaattgataccaagaacttgtatgttatcaaggctttgcaatccttgacttctaagggttacgttaagactcaattcagttggcaatactactattacactttgactgaagaaggtgttgaatacttgagagaatacttgaacttgcctgaacacattgtcccaggtacctacattcaagaaagaaacccatcccaaagacctcaaagaagatactga

SEQ ID NO: 8821 - DNA, 189 bp, Saccharomyces cerevisiae
atgtgtattattgtaaaatactcacaatgtaatctattttttcaggatgtgttacgatgcagacatgttttgtgcatgctctttagcattgttgtgcattttagattgtcgtcgtttgtttctgtatgtggtgtacggattatgtgtaactgtattaattgttcaagattcattcataatattaactaa

SEQ ID NO: 8822 - DNA, 189 bp, Artificial Sequence
  Description of Artificial Sequence: Synthetic polynucleotide
atgtgtattattgtaaaatactctcaatgtaatttattttttcaggatgtgttaagatgcagacatgttttgtgcatgctctttagcattgttgtgcattttagattgtcttcttttgtttctgtatgtggtgtaagaattatgtgtaactgtattaattgttccagattcattcataatattaactga

SEQ ID NO: 8823 - DNA, 3090 bp, Saccharomyces cerevisiae
atgtccctgagctcctggaggcaattccagcttttcgagaatattcccataagagatcctaattttggaggagattccctattgtactcggacccaacactttgcgcagctacaatagtagatcctcaaactctgatcatagctgtaaattcaaatattataaaagttgtcaaattaaatcaatcgcaagtaatacatgaatttcaatcttttcctcatgattttcaaatcactttcctgaaagtcatcaacggggaatttctcgtagcgttagctgaatccattggcaaaccttccctaataagagtatataaactagaaaaactgccaaatagagaacaactataccattcacaagtcgaactgaaaaacggtaataatacataccctatttcagttgtctccatatcaaatgacctttcctgtattgtggttggattcattaatgggaaaatcatccttattagaggtgacatttcaagagatagaggatctcaacaaaggattatatatgaagatccaagtaaagagccaataacagctttattcctcaataacgacgcaacggcttgttttgcggctacaacttcaagaatccttttatttaatacgactggtagaaatagagggcgcccaagtttggttttaaattcaaaaaatggcctggatctaaattgtggatcttttaatccggcaacaaacgaatttatatgttgcttaagcaactttatcgaatttttcagctctagtggaaaaaagcatcaattcgcatttgatctatcgctgagaaagaggatattttgtgtagataaagatcacattttgattgtgactgaggaaacaggtgtaccaactacatccataagtgttaatgaactgtcgcccacaataattaaccgaatattcatcattgatgctaaaaataaaatcatttctttgaattttgttgtttctagtgcaattattgatattttttcaacctctcagagcggtaaaaacatcacttatctgctaacttctgaaggagtaatgcataggataactccaaaatctttagaaaatcaaattaacatcatcatccaaaaggaactgtacccttttgctttacaattagcgaaacagcattcattatcaccgctagatgttcaggaaattcataaaaaatatggtgattatctctttaaaaagggactcaggaaggaagcaacagaccagtacatacaatgtctggacgttgtggaaactagtgaaatcatttcaaaatttggtgtcaaggaggttcctgacccagagagtatgaggaacttggctgactatctgtggtctttgatcaagaattctatttctcaacgcgatcatgttacccttttgttaattgttttaatcaaattgaaggatgttgaaggaattgatacttttatccagcatttcgatagaaaaggcatttggaatgaaggtgttgtgatggacgatatggatgatgtgacgtttttttattcagataacgatttttttgatttagatttaatcttagagcttatgaaagagtcagattttaagcgtctctcatacagacttgcaaagaagtattcaaaggattcattaattattgtggatattttattgaatctattgcataaccctgtaaaagccataaaatacataaaaagtttaccaattgatgaaaccctaagatgccttgtgacgtactcgaaaaaattactggaggagtcaccgaatgaaactaatgctttactgatagaagtatttacagggaagttcaaaccatccacttttgaagtggatctggaccggagagatacgacgggcgatttttctgaaaatattagaacagttttttacagttacaaaacattcttcaactacatgaactcaaatggtacatcagacgcaatgagcgagtcttcagaggcatcccacgaacatgaagagcctacttatcatccgccgaagccatccattgttttcagttcattcgttacaaaaccttttgaatttgttgttttcttagaagcctgtttggcatgttaccagcagtatgagggttttgacgaagataggcaagtaattttgactactttatatgacttatatttgaatttggcgcaaaatgatgtacccgagcgtatagacgactggcgttcaagagcaactggcgtattgcgtgagagcaataaattggtgtattctgccgcaagtaataatactagcaaaagggtggataactcaataatgctgttaatttcccatatggatcaaagtagtgcttcagcaaaagataagacgaaaattgacatagcttcatttgccaatgataaccccgagatggatttgctgagtacatttagggctatgacgttaaatgaagaaccaagtacttgtctcaaattcctagaaaaatatggcacagaggaacccaagctcttacaagtagcattgagttactttgtttctaataaactaatcttcaaggagatgggcggtaatgaagtactgaaagaaaaagtattgaggccaattatagagggggaaagaatgccactgttggatataattaaagcgctatcccgtacaaatgtagcccactttgggctgatacaagacatcattattgatcatgtcaaaaccgaagatacagaaatcaaaaggaacgaaaaactaattgaatcttacgataaagagttaaaggagaaaaacaagaagttgaagaacaccattaattcagatcaacctctccacgtacccctgaagaatcaaacgtgtttcatgtgtagactgacattggatattcctgtagttttttttaaatgtggtcacatttaccaccaacattgtctaaatgaggaagaagatactctagaaagcgagagaaagctctttaaatgtcccaaatgcttggtggacttagaaacctccaacaaactttttgaagctcaacacgaagtagttgaaaagaatgatcttttgaattttgcattaaacagtgaagaaggtagtagagaccgtttcaaagtcataacagagtttttaggtagaggtgccatcagttattctgacatcactatttaa

SEQ ID NO: 8824 - DNA, 3090 bp, Artificial Sequence
  Description of Artificial Sequence: Synthetic polynucleotide
atgtccttaagctcctggaggcaattccagcttttcgagaatattcccataagagatcctaattttggaggagattccttattgtacagtgacccaacactttgcgcagctacaatagtagatcctcaaactttgatcatagctgtaaatagtaatattataaaagttgtcaaattaaatcaatctcaagtaatacatgaatttcaatcttttcctcatgattttcaaatcactttcttgaaagtcatcaacggggaatttctcgtagcgttagctgaatccattggcaaaccttccttgataagagtatataaattagaaaaattaccaaatagagaacaattgtaccattctcaagtcgaattgaaaaacggtaataatacataccctatttctgttgtctccatatccaatgacctttcctgtattgtggttggattcattaatgggaaaatcatccttattagaggtgacatttctagagatagaggatctcaacaaaggattatatatgaagatccaagtaaagagccaataacagctttattcctcaataacgacgcaacggcttgttttgcggctacaacttccagaatccttttatttaatacgactggtagaaatagagggcgcccaagtttggttttaaattctaaaaatggcttggatttgaattgtggatcttttaatccggcaacaaacgaatttatatgttgcttaagcaactttatcgaatttttcagctctagtggaaaaaagcatcaattcgcatttgatttatctttgagaaagaggatattttgtgtagataaagatcacattttgattgtgactgaggaaacaggtgtaccaactacatccataagtgttaatgaattatctcccacaataattaacagaatattcatcattgatgctaaaaataaaatcatttctttgaattttgttgtttctagtgcaattattgatattttttccacctctcagagcggtaaaaacatcacttatttattaacttctgaaggagtaatgcataggataactccaaaatctttagaaaatcaaattaacatcatcatccaaaaggaattatacccttttgctttacaattagcgaaacagcattctttatctccgttagatgttcaggaaattcataaaaaatatggtgattatctctttaaaaagggactcaggaaggaagcaacagaccagtacatacaatgtttggacgttgtggaaactagtgaaatcatttccaaatttggtgtcaaggaggttcctgacccagagagtatgaggaacttggctgactatttatggtctttgatcaagaattctatttctcaacgcgatcatgttacccttttgttaattgttttaatcaaattgaaggatgttgaaggaattgatacttttatccagcatttcgatagaaaaggcatttggaatgaaggtgttgtgatggacgatatggatgatgtgacgtttttttattctgataacgatttttttgatttagatttaatcttagagcttatgaaagagtctgattttaagcgtctctcttacagacttgcaaagaagtattccaaggattctttaattattgtggatattttattgaatttattgcataaccctgtaaaagccataaaatacataaaaagtttaccaattgatgaaaccttgagatgccttgtgacgtactctaaaaaattattggaggagtctccgaatgaaactaatgctttattgatagaagtatttacagggaagttcaaaccatccacttttgaagtggatttggacagaagagatacgacgggcgatttttctgaaaatattagaacagttttttacagttacaaaacattcttcaactacatgaacagtaatggtacaagtgacgcaatgagcgagtcttctgaggcatcccacgaacatgaagagcctacttatcatccgccgaagccatccattgttttcagttctttcgttacaaaaccttttgaatttgttgttttcttagaagcctgtttggcatgttaccagcagtatgagggttttgacgaagataggcaagtaattttgactactttatatgacttatatttgaatttggcgcaaaatgatgtacccgagcgtatagacgactggcgttccagagcaactggcgtattgcgtgagagcaataaattggtgtattctgccgcaagtaataatactagcaaaagggtggataacagcataatgcttttaatttcccatatggatcaaagtagtgcttctgcaaaagataagacgaaaattgacatagcttcttttgccaatgataaccccgagatggatttgttaagtacatttagggctatgacgttaaatgaagaaccaagtacttgtctcaaattcttggaaaaatatggcacagaggaacccaagctcttacaagtagcattgagttactttgtttctaataaattaatcttcaaggagatgggcggtaatgaagtattgaaagaaaaagtattgaggccaattatagagggggaaagaatgccattgttggatataattaaagcgctttcccgtacaaatgtagcccactttgggttgatacaagacatcattattgatcatgtcaaaaccgaagatacagaaatcaaaaggaacgaaaaattgattgaatcttacgataaagagttaaaggagaaaaacaagaagttgaagaacaccattaattctgatcaacctctccacgtacccttgaagaatcaaacgtgtttcatgtgtagattgacattggatattcctgtagttttttttaaatgtggtcacatttaccaccaacattgtttgaatgaggaagaagatactttggaaagcgagagaaagctctttaaatgtcccaaatgcttggtggacttagaaacctccaacaaactttttgaagctcaacacgaagtagttgaaaagaatgatcttttgaattttgcattaaacagtgaagaaggtagtagagaccgtttcaaagtcataacagagtttttaggtagaggtgccatcagttattctgacatcactatttga

SEQ ID NO: 8825 - DNA, 2034 bp, Saccharomyces cerevisiae
atgtttaagacttcatataacttgtacgatttgaactatccgaaaaatgattcattaacgccaataagagactacaaaaatgactattttcataaaaatgatgacaaattaccagaaattgttagaaaacctacgagaaagttatcgaaacatgaaaacaaactcaacgataaaaaattcacgaataaacgaccagcaagtctggacttgcattctatagtggagagcctgagcaataaaaaaatttactctcctattaacacagagatatttcaaaatgtcgtgagactgaatttgagccctcagattcccaattctcctcacgagggatgcaaattttataaaatcgtacaggagttttacctctctgaagtggaatattacaataatttgttaaccgcaaataacgtatacagaaaggcattgaatagtgatccaagattcaagaataaacttgtcaagcttgattcaagtgacgagctattgctttttgggaacattgacactattgcgtcaatcagcaaaatactggtaacggcaataaaagacctacttttagccaagcaacgtgggaaaatgttggatgcgaatgaatggcaaaagatattcaccaaaaatgaggtacaacagcagctatattcaacttttgatatttcagaggcgttcgagcaacatttgttaagaatcaaatccacctacacaagctattttgttagccaccaaaaacaaatggaactatttactacattaaggatgaataagaatcatttttttaacaagtggtatgaatattgtttaaaagagagtggatgtataaagttagaggacatattgaaaagcccgatgaaaagactgactcagtggattgatactttggaaactttggaaagctgttacgaagatattctttcgccagaattgggcttgaaactaagcccgacaagaagaaaatattctttattttccaataagttagaaaccgaggtctccgagtataagagtaattccatgtataatttcagtttaaccccatcagagattatacaaagttatgatgaagatcagtttacacaccttttaaaacccccagacaaacaaaataaaaatatatgtaatgcatctcgacaagagagtaatttggataatagtagagttccttctcttctttctggatcatcgagttactactcagatgtatcagggctagaaattgtcactaatacttcaactgcctcagctgagatgataaatctaaaaatggatgaagaaacagaattttttacattggcagatcacatcagtaaattcaagaaagtaatgaaaggtttgttagaattaaaaaagaatttattgaaaaacgatctgtcaggcattattgatatcagtttaagaagaataaatgcatggaaaaaggtgatcgagtgcgaacgcccttctggtgcattttttgcgcacgataacttaatatcgaccatgtgttcttcgtacatagataaactgcatgaacaaaaaaatcaagtaacaattttgaaactcacagagctcgaaacagatgtgatgaacccacttgaaagaatcatagcccattgtactaccgttaaaagcaaactaaaagatttgcaagctttgaagaaagattacatgttatttttacaagaaaaaaaagcaaatgtgcgagatattaaacgtgacttgttgggaatgcatttccaaaacctgcaaaaccagatgaaaagggaattaccggtctttattactttgatccacgatactatcgaatgtatcttgttgaactatatcaaagtcttcttaaaatatttggaaatcattgctggtggaaaaaaatacctgcaaaaagatcttgaaaatatgtctcttaatgactctatagctaccggccaaattaaaaatcttgatattttgcagtgttattctaaatcacgatatatgacaaaacgcatggtaagaaaagattggcctttccctggagaccctagtggaagccgtgttgtcagaaaacttttcgaactttaa

SEQ ID NO: 8826 - DNA, 2034 bp, Artificial Sequence
  Description of Artificial Sequence: Synthetic polynucleotide
atgtttaagacttcttataacttgtacgatttgaactatccgaaaaatgattctttaacgccaataagagactacaaaaatgactattttcataaaaatgatgacaaattaccagaaattgttagaaaacctacgagaaagttatccaaacatgaaaacaaactcaacgataaaaaattcacgaataaaaggccagcaagtttggacttgcattctatagtggagagcttgagcaataaaaaaatttactctcctattaacacagagatatttcaaaatgtcgtgagattgaatttgagccctcagattcccaattctcctcacgagggatgcaaattttataaaatcgtacaggagttttacctctctgaagtggaatattacaataatttgttaaccgcaaataacgtatacagaaaggcattgaatagtgatccaagattcaagaataaacttgtcaagcttgattctagtgacgagttattgctttttgggaacattgacactattgcgtctatcagcaaaatattagtaacggcaataaaagacttacttttagccaagcaacgtgggaaaatgttggatgcgaatgaatggcaaaagatattcaccaaaaatgaggtacaacagcagttatattctacttttgatatttctgaggcgttcgagcaacatttgttaagaatcaaatccacctacacaagctattttgttagccaccaaaaacaaatggaattatttactacattaaggatgaataagaatcatttttttaacaagtggtatgaatattgtttaaaagagagtggatgtataaagttagaggacatattgaaaagcccgatgaaaagattaactcagtggattgatactttggaaactttggaaagctgttacgaagatattctttctccagaattgggcttgaaattaagcccgacaagaagaaaatattctttattttccaataagttagaaaccgaggtctccgagtataagagtaattccatgtataatttcagtttaaccccaagtgagattatacaaagttatgatgaagatcagtttacacaccttttaaaacccccagacaaacaaaataaaaatatatgtaatgcatctagacaagagagtaatttggataatagtagagttccttctcttctttctggatcttccagttactactctgatgtaagtgggttggaaattgtcactaatacttctactgcctctgctgagatgataaatttgaaaatggatgaagaaacagaattttttacattggcagatcacatcagtaaattcaagaaagtaatgaaaggtttgttagaattaaaaaagaatttattgaaaaacgatttaagtggcattattgatatcagtttaagaagaataaatgcatggaaaaaggtgatcgagtgcgaacgcccttctggtgcattttttgcgcacgataacttaatatctaccatgtgttcttcctacatagataaattgcatgaacaaaaaaatcaagtaacaattttgaaactcacagagctcgaaacagatgtgatgaacccacttgaaagaatcatagcccattgtactaccgttaaaagcaaattgaaagatttgcaagctttgaagaaagattacatgttatttttacaagaaaaaaaagcaaatgtgagagatattaaacgtgacttgttgggaatgcatttccaaaacttacaaaaccagatgaaaagggaattaccggtctttattactttgatccacgatactatcgaatgtatcttgttgaactatatcaaagtcttcttaaaatatttggaaatcattgctggtggaaaaaaatacttacaaaaagatcttgaaaatatgtctcttaatgactctatagctaccggccaaattaaaaatcttgatattttgcagtgttattctaaatctagatatatgacaaaacgcatggtaagaaaagattggcctttccctggagaccctagtggaagccgtgttgtcagaaaacttttcgaactttga

SEQ ID NO: 8827 - DNA, 681 bp, Saccharomyces cerevisiae
atggccgacatcaataaatatattccgatggttgacgctattttgagcgtatccaaccccgatgaaataagcccaaaaagggtgaggaaagccctgcaaattctctattcagttaatttggattcacaaagaaagttaattaatgaattgattcttgagaggttcggcgatatacaagaaaacccaagagtcttaattccgaagaacgacctcattagtcgggatcaagaactatctttgaggttacagaaggaagaagaaagacccttgaggtctacgaggaaaaggaaaggtaaaagtgaaagtaaatctaaaaggaagaagaaaaagaatgatagtcctgattccaacagcatttccgtccgcaaagttctgttgtcagctcctttacaaaagtttctaggatctgaagaactgccacgaacgcaagtagtgaagatgatatggcagtatatcaaagagcatgatcttcaaaacccaaaagatcgtagagaaattctatgcgatgagaagatggaaccaatttttggcaaaaaaatgacgatgttttcaatgaataaactcttaactaagcacttgtttaatcccgatgaaattgtgaaacatgaagaggaacaaaagcaaacacccgaaaaagaaatcaaattggaaaacgaatctcttcccaatttaagcggttga

SEQ ID NO: 8828 - DNA, 681 bp, Artificial Sequence
  Description of Artificial Sequence: Synthetic polynucleotide
atggccgacatcaataaatatattccgatggttgacgctattttgagcgtatccaaccccgatgaaataagcccaaaaagggtgaggaaagccttgcaaattctctattctgttaatttggattctcaaagaaagttaattaatgaattgattcttgagaggttcggcgatatacaagaaaacccaagagtcttaattccgaagaacgacctcattagtagagatcaagaattatctttgaggttacagaaggaagaagaaagacccttgaggtctacgaggaaaaggaaaggtaaaagtgaaagtaaatctaaaaggaagaagaaaaagaatgatagtcctgattccaacagcatttccgtccgcaaagttttattgtctgctcctttacaaaagtttttgggatctgaagaattaccaagaacgcaagtagtgaagatgatatggcagtatatcaaagagcatgatcttcaaaacccaaaagatcgtagagaaattttgtgcgatgagaagatggaaccaatttttggcaaaaaaatgacgatgttttccatgaataaactcttaactaagcacttgtttaatcccgatgaaattgtgaaacatgaagaggaacaaaagcaaacacccgaaaaagaaatcaaattggaaaacgaatctcttcccaatttaagcggttga

SEQ ID NO: 8829 - DNA, 1047 bp, Saccharomyces cerevisiae
atggcaaggcaagggaacttctacgcggttagaaagggcagggaaactgggatctataatacatggaatgaatgtaaaaaccaagttgatggttatggtggtgcaatttataaaaaatttaacagctacgagcaagcgaaatctttcctaggtcaaccaaatactacatcaaactatggaagttcaacgcatgctggagggcaagttagtaaacctcataccactcaaaagcgagttcatcgaaggaatcggccacttcattattcctccttgacatcgtcatcagcatgttcatctttaagctctgctaatacaaataccttttattcagtaaagagtaatgttccaaatatcgagagtaaaatctttaacaattggaaagactgtcaagcctatgtcaagcataaaaggggtataaccttcaagaagtttgaagaccaattagctgcggaaaacttcattagtggtatgagtgcgcatgattacaagctcatgaatatatccaaagaaagttttgaatctaagtataagctttctagcaataccatgtacaacaagtctatgaacgtttactgtgatggttcaagttttggaaacggcacgtcatcttcaagggcaggttatggtgcatattttgaaggagcgccagaggaaaatatttcagaacccttattatcgggagctcaaactaataatagagctgaaatcgaagcagtatcagaagctttgaagaaaatctgggaaaagttaactaatgaaaaggaaaaagtaaattatcaaatcaaaactgattcagagtacgtaaccaaattattaaatgacaggtatatgacgtatgataataaaaaacttgaagggctacctaattctgatttaattgttcctttggtgcagaggttcgttaaagttaaaaagtactatgagttgaataaagagtgcttcaaaaataatggtaaatttcagattgaatgggtaaaaggacacgatggtgatccaggaaatgaaatggcagattttctggcgaagaaaggagcatctagacgataa

SEQ ID NO: 8830 - DNA, 1047 bp, Artificial Sequence
  Description of Artificial Sequence: Synthetic polynucleotide
atggcaaggcaagggaacttctacgcggttagaaagggcagggaaactgggatctataatacatggaatgaatgtaaaaaccaagttgatggttatggtggtgcaatttataaaaaatttaacagctacgagcaagcgaaatctttcttgggtcaaccaaatactacaagtaactatggaagttccacgcatgctggagggcaagttagtaaacctcataccactcaaaagagagttcatagaaggaatagaccacttcattattcctccttgacatcttcttctgcatgttcttctttaagctctgctaatacaaataccttttattctgtaaagagtaatgttccaaatatcgagagtaaaatctttaacaattggaaagactgtcaagcctatgtcaagcataaaaggggtataaccttcaagaagtttgaagaccaattagctgcggaaaacttcattagtggtatgagtgcgcatgattacaagctcatgaatatatccaaagaaagttttgaatctaagtataagctttctagcaataccatgtacaacaagtctatgaacgtttactgtgatggtagtagttttggaaacggcacgtcttcttccagggcaggttatggtgcatattttgaaggagcgccagaggaaaatatttctgaacccttattatctggagctcaaactaataatagagctgaaatcgaagcagtatctgaagctttgaagaaaatctgggaaaagttaactaatgaaaaggaaaaagtaaattatcaaatcaaaactgattctgagtacgtaaccaaattattaaatgacaggtatatgacgtatgataataaaaaacttgaagggttgcctaattctgatttaattgttcctttggtgcagaggttcgttaaagttaaaaagtactatgagttgaataaagagtgcttcaaaaataatggtaaatttcagattgaatgggtaaaaggacacgatggtgatccaggaaatgaaatggcagattttttggcgaagaaaggagcatctagaagatga

SEQ ID NO: 8831 - DNA, 1224 bp, Saccharomyces cerevisiae
atggctaccttgcacttcgttcctcagcacgaggaagaacaagtttactccatctctgggaaggcactcaagttaacaaccagtgacgatatcaaaccatacctggaagaattggcagctttgaaaacctgtaccaaattagacctttcagggaatacaatcggtactgaagcttcggaagcattagctaaatgcatcgctgaaaatacacaggtcagggaatctttggttgaagtaaattttgctgacttatacacttcgaggttggttgacgaagtcgttgattcgttgaagtttttattgcctgttctgttgaaatgtcctcacttggagattgtgaacctttctgataatgcgtttgggctaagaacaatcgagttactagaagattacattgcacatgccgtgaatatcaaacatttgatcttaagtaacaatggtatgggcccttttgctggtgaaaggattggtaaggccctatttcatctcgctcaaaataagaaagctgcttccaaaccatttttggaaacttttatctgtggtagaaatagattagagaatggatccgcagtctacttagctctgggtttgaaaagccactccgaaggtttgaaagtcgtaaagctgtaccaaaatggtattaggcctaaaggtgtcgccacgctaattcattacggtttacagtacttgaaaaacttggaaatcttggatcttcaagacaatactttcacgaaacatgcttctttgatccttgctaaggccttgcctacatggaaggatagtttatttgaattgaatttgaacgactgtcttttgaaaactgctggttcagatgaagtctttaaagtattcaccgaagttaaattccccaatttgcatgtcttgaaattcgaatataatgaaatggctcaagaaaccattgaagtatccttcttaccggctatggaaaagggaaatttacctgaattggaaaagctagaaataaatggtaacagattagatgaagattctgatgctttagatttgctccaaagcaaatttgatgatttagaggttgacgattttgaagaggtcgatagtgaagatgaggaaggcgaggacgaggaagacgaggacgaggatgaaaaactcgaagaaattgaaacggaaaggcttgaaaaggaactgctagaagtacaagtagatgatcttgctgaacgtttagctgaaactgaaatcaaatag

SEQ ID NO: 8832 - DNA, 1224 bp, Artificial Sequence
  Description of Artificial Sequence: Synthetic polynucleotide
atggctaccttgcacttcgttcctcagcacgaggaagaacaagtttactccatctctgggaaggcactcaagttaacaaccagtgacgatatcaaaccatacttggaagaattggcagctttgaaaacctgtaccaaattagacctttccgggaatacaatcggtactgaagcttctgaagcattagctaaatgcatcgctgaaaatacacaggtcagggaatctttggttgaagtaaattttgctgacttatacacttctaggttggttgacgaagtcgttgattctttgaagtttttattgcctgttttattgaaatgtcctcacttggagattgtgaacctttctgataatgcgtttgggttgagaacaatcgagttattggaagattacattgcacatgccgtgaatatcaaacatttgatcttaagtaacaatggtatgggcccttttgctggtgaaaggattggtaaggccttatttcatctcgctcaaaataagaaagctgcttccaaaccatttttggaaacttttatctgtggtagaaatagattagagaatggatccgcagtctacttagctttgggtttgaaaagccactccgaaggtttgaaagtcgtaaagttgtaccaaaatggtattaggcctaaaggtgtcgccacgttgattcattacggtttacagtacttgaaaaacttggaaatcttggatcttcaagacaatactttcacgaaacatgcttctttgatccttgctaaggccttgcctacatggaaggatagtttatttgaattgaatttgaacgactgtcttttgaaaactgctggttctgatgaagtctttaaagtattcaccgaagttaaattccccaatttgcatgtcttgaaattcgaatataatgaaatggctcaagaaaccattgaagtatccttcttaccggctatggaaaagggaaatttacctgaattggaaaagttggaaataaatggtaacagattagatgaagattctgatgctttagatttgctccaaagcaaatttgatgatttagaggttgacgattttgaagaggtcgatagtgaagatgaggaaggcgaggacgaggaagacgaggacgaggatgaaaaactcgaagaaattgaaacggaaaggcttgaaaaggaattattggaagtacaagtagatgatcttgctgaacgtttagctgaaactgaaatcaaatga

SEQ ID NO: 8833 - DNA, 474 bp, Saccharomyces cerevisiae
atgaacggcggaggcaagaatgttttgaataaaaactcagtgggctcagtatcagaagttggtccggactcaacacaagaggaaacgccacgagatgtccgtcttttgcatctgctcctcgcatcacagtcgattcatcaatatgaggaccaagtaccgctacaattgatggattttgcacataggtacacacaaggagtccttaaggacgcgttggtttacaacgactacgctggcagtggaaattctgccggcagtggattaggagtagaagacatacggcttgccattgcagcgagaacacaataccaatttaagcctacggcacctaaggagctcatgttacagttagctgcggaaagaaacaagaaggcattacctcaagtgatgggtacgtggggtgtcaggcttcccccagaaaaatattgtctcacagcgaaggagtgggaccttgaggacccaaagtctatgtga

SEQ ID NO: 8834 - DNA, 474 bp, Artificial Sequence
  Description of Artificial Sequence: Synthetic polynucleotide
atgaacggcggaggcaagaatgttttgaataaaaactctgtgggctctgtatctgaagttggtccggactctacacaagaggaaacgccaagagatgtccgtcttttgcatcttctcctcgcatcccagagtattcatcaatatgaggaccaagtaccgttacaattgatggattttgcacataggtacacacaaggagtccttaaggacgcgttggtttacaacgactacgctggcagtggaaattctgccggcagtggattaggagtagaagacataaggcttgccattgcagcgagaacacaataccaatttaagcctacggcacctaaggagctcatgttacagttagctgcggaaagaaacaagaaggcattacctcaagtgatgggtacgtggggtgtcaggcttcccccagaaaaatattgtctcacagcgaaggagtgggaccttgaggacccaaagtctatgtga

SEQ ID NO: 8835 - DNA, 2175 bp, Saccharomyces cerevisiae
atgttgtctcaaacctccataccggaagtgaaagaagacgtgataggctatgcgctacaccagaggagagccagagtgggacaattccaagacttgggtccgcctgatttaattactttgatcaaatcgttaccttcatcctcgagcacaacaactgctactgcctccgccaacgataacggagcaacttcaaacatcaatggacaagatcctacgaccatagttacggagttacattcccatgacaaattaaaggggcagatcggcactttcttttactgtatgggtatcgatacttcggatccaacttctattacaatctttgccaaaaagataaccgatcttttcttagacacgccccaaatttggtttggtaagaagaagcactttcacgtatcgaagatttctatcagttcttggaatgcgtttaggaaatatgatgttaacattatagttcacattccaggaactgtgcaaacctacattataaatagcgacggtgaacaatcgcaacttccctccgtggcagaagcgtcatctggccgcaactcacaggatttaaacgtcaacatgatttgggcggaaacgtttatgagtggtattgtacgtgacattatgattatgaaagataatcgtgcggatggagaatcccagaatttggtagaaacactaattttcaatccatttacctcgggtgagttggaagatgttgccaataactttattaaactgttccccttggtctatgaaaaaggtgtttatttagatgcacctactcacgttttaaatccctcgttaaccaataattatttagtggaaactttagtggaaatagttaggttaactaagagtttggaagcatgtcgtaaaatgctcaagaagttaatagaaattcatccagaagcagtaataatattaattcgtgtttattttgcgtgcgatttagagatagatgcagttgacctgatcaacgagcaactaaattccccctcttcgttcttagccgacgattcaaagactagccatatccagctaatcttcaaatccgaattattaagtattcaaagtgaattcttactggatgtcaagagagattacaagcttgctaaggaagtagccatggaggctgttaactgtgcaccaaacgaatttaaaacttggtatttattgactagaatatacattaaactaaacgatatgtcaaatgccttgctatcgttaaacgcctgccccatgtcacaggttaaggaaaaatacgttcttagaagaattgcgcctattacttcagatgaaaatcttcatctgccattaccattggatgcctcaattgaggagatttcgtcattgaaccccatggatgtccagttggagcaaaagtccgcagatccaaacctagtcaatctctctgcgtcaagtttaaagtctactttccaactagcctataaattattgacagaaattgtccaaataacaggatgggagcagctgttgaaatatagatcaaaaattttcgttatggaagacgagtaccaaggctccacttcttccattgatgaagcagaagttcgcggtaatgatatatccaaaatgagatcaaagaggctatgcgaaagatggttggataatctcttcatgttactatacgaagatttgaaaacttacaccgattggcaatcagagcaattgtattttgatgctcaaaacagtaaatatcacaaattaactgttgaatgggaattattcggcctttgtgcgaaaagactgggacatcttccagaagctgcgaaggctttccaaattgggctttcccaaagattttctccagtatgcgcaaagaatctattacagttttacattgacgagcataagcgtattaggagggattcagtctcagcaaactccgagttaacctcttctcaaatattgtcaagtatcaatgacatcgacagctcaatcatcgatctagtagtcaagatttgttgctggaatcatcgttggtacatcgagttctcaataatattaatagatgctctgagtgttgcagtacaagatatgggcattactaaagtacataatgaaattgcctctagattttctgacccagtagcccaattgattgacgataacattctaaattttctgaagaatttcacgaatgacactttcgataattag

SEQ ID NO: 8836 - DNA, 2175 bp, Artificial Sequence
  Description of Artificial Sequence: Synthetic polynucleotide
atgttgtctcaaacctccataccggaagtgaaagaagacgtgataggctatgcgttgcaccagaggagagccagagtgggacaattccaagacttgggtccgcctgatttaattactttgatcaaatctttaccttcttcctctagcacaacaactgctactgcctccgccaacgataacggagcaacttctaacatcaatggacaagatcctacgaccatagttacggagttacattcccatgacaaattaaaggggcagatcggcactttcttttactgtatgggtatcgatacttctgatccaacttctattacaatctttgccaaaaagataaccgatcttttcttagacacgccccaaatttggtttggtaagaagaagcactttcacgtatccaagatttctatcagttcttggaatgcgtttaggaaatatgatgttaacattatagttcacattccaggaactgtgcaaacctacattataaatagcgacggtgaacaatctcaacttccctccgtggcagaagcgtcttctggccgcaactctcaggatttaaacgtcaacatgatttgggcggaaacgtttatgagtggtattgtacgtgacattatgattatgaaagataatcgtgcggatggagaatcccagaatttggtagaaacattaattttcaatccatttacctctggtgagttggaagatgttgccaataactttattaaattattccccttggtctatgaaaaaggtgtttatttagatgcacctactcacgttttaaatccctctttaaccaataattatttagtggaaactttagtggaaatagttaggttaactaagagtttggaagcatgtcgtaaaatgctcaagaagttaatagaaattcatccagaagcagtaataatattaattcgtgtttattttgcgtgcgatttagagatagatgcagttgacttgatcaacgagcaattgaattccccctcttctttcttagccgacgattctaagactagccatatccagttaatcttcaaatccgaattattaagtattcaaagtgaattcttattagatgtcaagagagattacaagcttgctaaggaagtagccatggaggctgttaactgtgcaccaaacgaatttaaaacttggtatttattgactagaatatacattaaattgaacgatatgagtaatgccttgctttctttaaacgcctgccccatgtctcaggttaaggaaaaatacgttcttagaagaattgcgcctattacttctgatgaaaatcttcatttaccattaccattggatgcctctattgaggagatttcttctttgaaccccatggatgtccagttggagcaaaagtccgcagatccaaacttggtcaatctctctgcgtccagtttaaagtctactttccaattggcctataaattattgacagaaattgtccaaataacaggatgggagcagttattgaaatatagaagtaaaattttcgttatggaagacgagtaccaaggctccacttcttccattgatgaagcagaagttcgcggtaatgatatatccaaaatgagatccaagaggctttgcgaaagatggttggataatctcttcatgttattgtacgaagatttgaaaacttacaccgattggcaaagtgagcaattgtattttgatgctcaaaacagtaaatatcacaaattaactgttgaatgggaattattcggcctttgtgcgaaaagattaggacatcttccagaagctgcgaaggctttccaaattgggctttcccaaagattttctccagtatgcgcaaagaatttattacagttttacattgacgagcataagcgtattaggagggattctgtctctgcaaactccgagttaacctcttctcaaatattgagcagtatcaatgacatcgacagctctatcatcgatttagtagtcaagatttgttgctggaatcatcgttggtacatcgagttctctataatattaatagatgctttaagtgttgcagtacaagatatgggcattactaaagtacataatgaaattgcctctagattttctgacccagtagcccaattgattgacgataacattttgaattttttgaagaatttcacgaatgacactttcgataattga

SEQ ID NO: 8837 - DNA, 1377 bp, Saccharomyces cerevisiae
atgatcgtcaatattagtgcgaagatgatcttatcgatatgctttacgtttctgtcattttttaaagccactcatgccatggatttggatactactagcaaaacgtcaatttgtgatgcgacagcgttaattcaaggtggtatgctggattactatgagggtactagatacggtggtaccgttgggatgtttcagtcaccatactattggtggcatgcaggggaagcatttggtggcatgttggaaaattggtttctttgtgagaatgatacatatcaagaattactatacgatgcactattagcgcaaactggttccaattacgattatatcccgtccaaccaaacgatggttgaggggaatgatgaccaaggtatttggggtattactgttatgggtgctgtcgagagaaattttacagaccccggtgacggcaagccaggttggttggcaatggtacaagctgttttcaacaccatgtactcaagatgggattcagagcactgtggcggtggtctgagatggcaaattttcacttggaatagtggttataattataaaaatacagtttcaaatgcatgtttgttccagattgcggcgaggttgggcagatatactggtaacactacatatttggaggttgctgaacaggttttcgactggctagtggatgtcgggtatgtggttcttaacgatactgcaaatgtctttgatggtgctgaaattgatacaaattgcactgatattacaaaaattgaatggacttataatcacggtatcgtgcttggtggtcttgcatacatgtataatgctacaaatggaacaggtgaatgggagaccagtttgacaaaaattctaaatggtgctaaatcttatttcttcaaagatagtattatgtacgaaagcgcttgtcaagactatggcacctgtaacaccgatcaaagaacattcaaaagtattttttctcgtatgcttggtcttacaagtgtcatggctccctttactagggacacaattgatgatttgataaaaacaagtgctgaggccgctgcaaaatcatgtaatggtggtacagatgggcatacatgtggtttaaattggcagaaacaaaccaatgatggctactatggattaggtgagcaaatgagtgctctagaagttattcaaaatcttttaattcatgacaggccagctccatataaggaagataatggcggtacgtcaaaaggtgacgcgaatgccggtatgaactcatcgaccactaacgtgctacaaaacaatttaaacattaagaaaggtgatcgcgctggtgccgctatcatcacagcagtcatactgagtgtgctaactggtggggctgtgtggatgctgttttaa

SEQ ID NO: 8838 - DNA, 1377 bp, Artificial Sequence
  Description of Artificial Sequence: Synthetic polynucleotide
atgatcgtcaatattagtgcgaagatgatcttatctatatgctttacgtttttatctttttttaaagccactcatgccatggatttggatactactagcaaaacgtccatttgtgatgcgacagcgttaattcaaggtggtatgcttgattactatgagggtactagatacggtggtaccgttgggatgtttcagtctccatactattggtggcatgcaggggaagcatttggtggcatgttggaaaattggtttctttgtgagaatgatacatatcaagaattattgtacgatgcattattagcgcaaactggttccaattacgattatatcccgtccaaccaaacgatggttgaggggaatgatgaccaaggtatttggggtattactgttatgggtgctgtcgagagaaattttacagaccccggtgacggcaagccaggttggttggcaatggtacaagctgttttcaacaccatgtactctagatgggattctgagcactgtggcggtggtttaagatggcaaattttcacttggaatagtggttataattataaaaatacagtttctaatgcatgtttgttccagattgcggcgaggttgggcagatatactggtaacactacatatttggaggttgctgaacaggttttcgactggttggtggatgtcgggtatgtggttcttaacgatactgcaaatgtctttgatggtgctgaaattgatacaaattgcactgatattacaaaaattgaatggacttataatcacggtatcgtgcttggtggtcttgcatacatgtataatgctacaaatggaacaggtgaatgggagaccagtttgacaaaaattttgaatggtgctaaatcttatttcttcaaagatagtattatgtacgaaagcgcttgtcaagactatggcacctgtaacaccgatcaaagaacattcaaaagtattttttctcgtatgcttggtcttacaagtgtcatggctccctttactagggacacaattgatgatttgataaaaacaagtgctgaggccgctgcaaaaagttgtaatggtggtacagatgggcatacatgtggtttaaattggcagaaacaaaccaatgatggctactatggattaggtgagcaaatgagtgctttggaagttattcaaaatcttttaattcatgacaggccagctccatataaggaagataatggcggtacgtccaaaggtgacgcgaatgccggtatgaactcttccaccactaacgtgttgcaaaacaatttaaacattaagaaaggtgatcgcgctggtgccgctatcatcacagcagtcatattgagtgtgttgactggtggggctgtgtggatgttattttga

SEQ ID NO: 8839 - DNA, 1416 bp, Saccharomyces cerevisiae
atgggctcaaaagtagcaggtaaaaagaaaacccagaatgataataaactagataacgaaaatggttcacagcagcgcgaaaatatcaataccaagacgcttttgaaaggcaaccttaagatatcaaattacaaatatcttgaggtgattcaactagaacatgctgtgacaaaattggtggagtcttacaataaaataattgaactttcaccaaatttggtagcttacaatgaagccgttaacaatcaagatagagtgcctgttcagatacttccttctctatcacgttatcaattaaaactggcagctgaattaaaaaccttacatgatcttaaaaaagacgcaattttgacagaaattactgattatgaaaatgaatttgatactgaacaaaagcaacctatattgcaagaaatcagtaaagctgatatggaaaagttagagaagctagaacaagttaaaagggaaaagcgagagaaaatagatgtaaatgtgtacgaaaatttaaatgaaaaggaagatgaagaagaagacgaaggagaagatagctatgacccaacaaaggctggtgatatcgtcaaggcaacaaaatggcctccaaaattaccagagattcaagatttagcgattagggccagggtatttattcacaaatccacaataaaggataaagtttacttgtctggatcagaaatgatcaacgcacataatgaaagactagaattcctaggcgattcgatcttaaattctgttatgacattaattatttataacaagtttcccgattacagcgagggtcagttatcaacattaaggatgaatttggtaagcaacgaacagatcaaacaatggtcaataatgtacaatttccatgagaaacttaagacaaattttgacttgaaggatgaaaattccaattttcaaaacggcaaactaaaactgtatgcagatgtgttcgaagcttacattggcggcttgatggaagatgatccaaggaataatttgcccaaaataagaaaatggttaagaaagcttgccaaacctgtcattgaggaggctacccgtaatcaagttgccttggagaagacggataaacttgatatgaatgctaaaaggcagctttactctttgattggctatgcttcattacgtctacattatgttaccgtaaaaaaacccactgcagttgatcctaattccatagttgagtgcagagtaggtgatggaacagttttagggaccggtgtgggcagaaatatcaaaattgcgggtattagggctgcagaaaatgctcttcgtgacaaaaaaatgttagatttttacgccaaacaaagagctgccattcctaggagtgaatctgtgttaaaagatccctcacaaaagaataagaaaagaaaattctcagatacaagctga

SEQ ID NO: 8840 - DNA, 1416 bp, Artificial Sequence
  Description of Artificial Sequence: Synthetic polynucleotide
atgggctctaaagtagcaggtaaaaagaaaacccagaatgataataaattggataacgaaaatggttctcagcagcgcgaaaatatcaataccaagacgcttttgaaaggcaaccttaagatatccaattacaaatatcttgaggtgattcaattggaacatgctgtgacaaaattggtggagtcttacaataaaataattgaactttctccaaatttggtagcttacaatgaagccgttaacaatcaagatagagtgcctgttcagatacttccttctttatctcgttatcaattaaaattggcagctgaattaaaaaccttacatgatcttaaaaaagacgcaattttgacagaaattactgattatgaaaatgaatttgatactgaacaaaagcaacctatattgcaagaaatcagtaaagctgatatggaaaagttagagaagttggaacaagttaaaagggaaaagagagagaaaatagatgtaaatgtgtacgaaaatttaaatgaaaaggaagatgaagaagaagacgaaggagaagatagctatgacccaacaaaggctggtgatatcgtcaaggcaacaaaatggcctccaaaattaccagagattcaagatttagcgattagggccagggtatttattcacaaatccacaataaaggataaagtttacttgtctggatctgaaatgatcaacgcacataatgaaagattagaattcttgggcgattctatcttaaattctgttatgacattaattatttataacaagtttcccgattacagcgagggtcagttatctacattaaggatgaatttggtaagcaacgaacagatcaaacaatggtccataatgtacaatttccatgagaaacttaagacaaattttgacttgaaggatgaaaattccaattttcaaaacggcaaattgaaactttatgcagatgtgttcgaagcttacattggcggcttgatggaagatgatccaaggaataatttgcccaaaataagaaaatggttaagaaagcttgccaaacctgtcattgaggaggctacccgtaatcaagttgccttggagaagacggataaacttgatatgaatgctaaaaggcagctttactctttgattggctatgcttctttacgtttgcattatgttaccgtaaaaaaacccactgcagttgatcctaattccatagttgagtgcagagtaggtgatggaacagttttagggaccggtgtgggcagaaatatcaaaattgcgggtattagggctgcagaaaatgctcttcgtgacaaaaaaatgttagatttttacgccaaacaaagagctgccattcctaggagtgaatctgtgttaaaagatccctctcaaaagaataagaaaagaaaattcagtgatacaagctga

SEQ ID NO: 8841 - DNA, 1311 bp, Saccharomyces cerevisiae
atggctagaaccaaaagtaggaagcgttccggaaataaccaaaataagaatgcgtctgtggtaaataataaggctgagatcgccgccatgattgatgcaagaaggcttgagcaaaagaaaaagggtggggtgactaacagcaaaggaaagacgaataaggtagtggatgcgaagttagaaaaagagttcaaagacgttttacaacgatttcaagtgcaagagaatgatacgccgaaggaaatcacgaaagatgaaaagaacaatcatgtcgttattgttgagaaaaacccagttatgaacagaaagcatacagcagaagatgaattggaggatacaccctcggatggtattgaggagcatctatcggcaagaaaacgtaggaagactgaaaaaccttcactttcgcagttaaaaagccaggtaccgtatcctcaaattatagaatggtacgattgtgacgcaagatatccaggcttactagcgtcaattaagtgcaccaaaaatgtcattcctgttccaagccactggcagtccaagaaggaatatctatctggccgttctctgttaggtaaaagaccttttgaacttcctgacattatcaagaagacaaatatagaacaaatgagatcgacgcttccgcaaagcggactggatggtcaagatgaaaagtcactaaaggaggcctcaagagcaagagtgcagccgaaaatgggcgccttggatttggattacaagaagttacacgatgtgtttttcaagataggagccaactggaaacctgaccatttgttatgcttcggtgacgtctattatgaaaataggaatcttttcgaggaaacgaactggaaaagaatggttgatcataagagaccggggagaattagccaagagcttcgtgccataatgaatttacccgaaggtcaactaccaccatggtgtatgaagatgaaagacattggattacctacgggatatcctgatctgaaaattgccggcttgaattgggatataacgaatttaaaaggcgacgtttacggaaaaataatccctaatcaccattcaaggtccaagaaacagggtagaaactattttggcgcattgatctcatttgaaacccctgaatttgaaaattcaaaagaggatacacaggcgaatgcggaaaatgggcgccaagatgacaaaatcgatgatgaagtagagcataagttagatcacttccaggaagacatatccgaagtgacaagcgcagaagaaaaacttgagagaaacgaagaggaatcggagaagcaactatatactgtattgaaataa

SEQ ID NO: 8842 - DNA, 1311 bp, Artificial Sequence
  Description of Artificial Sequence: Synthetic polynucleotide
atggctagaaccaaaagtaggaagcgttccggaaataaccaaaataagaatgcgtctgtggtaaataataaggctgagatcgccgccatgattgatgcaagaaggcttgagcaaaagaaaaagggtggggtgactaacagcaaaggaaagacgaataaggtagtggatgcgaagttagaaaaagagttcaaagacgttttacaaagatttcaagtgcaagagaatgatacgccgaaggaaatcacgaaagatgaaaagaacaatcatgtcgttattgttgagaaaaacccagttatgaacagaaagcatacagcagaagatgaattggaggatacaccctctgatggtattgaggagcatttaagtgcaagaaaacgtaggaagactgaaaaaccttctctttctcagttaaaaagccaggtaccgtatcctcaaattatagaatggtacgattgtgacgcaagatatccaggcttattggcgtccattaagtgcaccaaaaatgtcattcctgttccaagccactggcagtccaagaaggaatatttatctggccgttctttattaggtaaaagaccttttgaacttcctgacattatcaagaagacaaatatagaacaaatgagatctacgcttccgcaaagcggattagatggtcaagatgaaaagtctttgaaggaggcctctagagcaagagtgcagccgaaaatgggcgccttggatttggattacaagaagttacacgatgtgtttttcaagataggagccaactggaaacctgaccatttgttatgcttcggtgacgtctattatgaaaataggaatcttttcgaggaaacgaactggaaaagaatggttgatcataagagaccggggagaattagccaagagcttcgtgccataatgaatttacccgaaggtcaattaccaccatggtgtatgaagatgaaagacattggattacctacgggatatcctgatttgaaaattgccggcttgaattgggatataacgaatttaaaaggcgacgtttacggaaaaataatccctaatcaccattccaggtccaagaaacagggtagaaactattttggcgcattgatctcttttgaaacccctgaatttgaaaattctaaagaggatacacaggcgaatgcggaaaatgggcgccaagatgacaaaatcgatgatgaagtagagcataagttagatcacttccaggaagacatatccgaagtgacaagcgcagaagaaaaacttgagagaaacgaagaggaaagtgagaagcaattatatactgtattgaaatga

SEQ ID NO: 8843 - DNA, 945 bp, Saccharomyces cerevisiae
atgccatctaccactaatactgctgcagcaaacgtaatagaaaaaaagccagtctcgttttctaatatcctattgggtgcctgtttaaacttgtcagaggtgactacattagggcaacctttggaggttgttaagaccacaatggctgcaaacagaaacttcacatttttagaatctgttaagcatgtctggtcaagaggtggtatcttgggttactaccaaggtttgattccatgggcatggatcgaagcctccactaaaggtgctgtgttgctgttcgtgtcagctgaggctgagtatcgtttcaaaagtttggggttgaacaactttgcctcaggtatattaggtggtgtcacgggtggtgtcactcaagcctacttaaccatggggttctgtacctgtatgaaaacggtggaaattacaagacataaatctgcctccgcaggtggtgtcccacaatcttcttggagtgtgttcaagaatatttataaaaaggaaggtattagaggtattaataagggtgttaatgctgttgctattagacaaatgaccaactggggttctcgttttggtttgtccagactagtggaagatggtatcagaaagatcaccgggaaaaccaataaagacgacaagttgaatccgttcgagaaaattggtgccagtgctttaggtggtggtttaagtgcttggaatcaaccaatcgaagtcattagagttgaaatgcaatctaagaaggaagatccaaacagaccaaaaaatttgactgttggtaagacatttaaatacatctatcaatcaaatggtctaaagggtctttaccgtggtgtcaccccaagaattggtttaggtatctggcaaactgtcttcatggttggttttggtgatatggcgaaggaatttgtcgccagaatgactggtgaaaccccagttgccaaacattag

SEQ ID NO: 8844 - DNA, 945 bp, Artificial Sequence
  Description of Artificial Sequence: Synthetic polynucleotide
atgccatctaccactaatactgctgcagcaaacgtaatagaaaaaaagccagtcagtttttctaatatcttgttgggtgcctgtttaaacttgagtgaggtgactacattagggcaacctttggaggttgttaagaccacaatggctgcaaacagaaacttcacatttttagaatctgttaagcatgtctggtccagaggtggtatcttgggttactaccaaggtttgattccatgggcatggatcgaagcctccactaaaggtgctgtgttgttattcgtgtctgctgaggctgagtatcgtttcaaaagtttggggttgaacaactttgcctctggtatattaggtggtgtcacgggtggtgtcactcaagcctacttaaccatggggttctgtacctgtatgaaaacggtggaaattacaagacataaatctgcctccgcaggtggtgtcccacaatcttcttggagtgtgttcaagaatatttataaaaaggaaggtattagaggtattaataagggtgttaatgctgttgctattagacaaatgaccaactggggttctcgttttggtttgtccagattagtggaagatggtatcagaaagatcaccgggaaaaccaataaagacgacaagttgaatccgttcgagaaaattggtgccagtgctttaggtggtggtttaagtgcttggaatcaaccaatcgaagtcattagagttgaaatgcaatctaagaaggaagatccaaacagaccaaaaaatttgactgttggtaagacatttaaatacatctatcaaagcaatggtttgaagggtctttaccgtggtgtcaccccaagaattggtttaggtatctggcaaactgtcttcatggttggttttggtgatatggcgaaggaatttgtcgccagaatgactggtgaaaccccagttgccaaacattga

SEQ ID NO: 8845 - DNA, 519 bp, Saccharomyces cerevisiae
atggctcactttaaagaataccaagttattggccgtcgtttgccaactgaatctgttccagaaccaaagttgttcagaatgagaatctttgcttcaaatgaagttattgccaagtctcgttactggtatttcttgcaaaagttgcacaaggttaagaaggcttctggtgaaattgtttccatcaaccaaatcaacgaagctcatccaaccaaggtcaagaacttcggtgtctgggttagatacgactccagatctggtactcacaatatgtacaaggaaatcagagacgtctccagagttgctgccgtcgaaaccttataccaagacatggctgccagacacagagctagatttagatctattcacatcttgaaggttgctgaaattgaaaagactgctgacgtcaagagacaatacgttaagcaatttttgaccaaggacttgaaattcccattgcctcacagagtccaaaaatccaccaagactttctcctacaagagaccttccactttctactga

SEQ ID NO: 8846 - DNA, 519 bp, Artificial Sequence
  Description of Artificial Sequence: Synthetic polynucleotide
atggctcactttaaagaataccaagttattggccgtcgtttgccaactgaatctgttccagaaccaaagttgttcagaatgagaatctttgcttctaatgaagttattgccaagtctcgttactggtatttcttgcaaaagttgcacaaggttaagaaggcttctggtgaaattgtttccatcaaccaaatcaacgaagctcatccaaccaaggtcaagaacttcggtgtctgggttagatacgactccagatctggtactcacaatatgtacaaggaaatcagagacgtctccagagttgctgccgtcgaaaccttataccaagacatggctgccagacacagagctagatttagatctattcacatcttgaaggttgctgaaattgaaaagactgctgacgtcaagagacaatacgttaagcaatttttgaccaaggacttgaaattcccattgcctcacagagtccaaaaatccaccaagactttctcctacaagagaccttccactttctactga

SEQ ID NO: 8847 - DNA, 90 bp, Saccharomyces cerevisiae
atgtttaaaatgaaatttggcgataccttgccacggtcagattttggtacaggagggaacaagcaggcgcccggcttagagttgggctaa

SEQ ID NO: 8848 - DNA, 90 bp, Artificial Sequence
  Description of Artificial Sequence: Synthetic oligonucleotide
atgtttaaaatgaaatttggcgataccttgccaagaagtgattttggtacaggagggaacaagcaggcgcccggcttagagttgggctga

SEQ ID NO: 8849 - DNA, 1329 bp, Saccharomyces cerevisiae
atgatcaccggtaaagaattgagaatcatctctcttttgaccttagacacggtttttttcctattggaaattaccataggttatatgtcacattcattggccttgattgccgattcatttcacatgttgaatgatatcatctctcttttagtggcactatgggctgtggatgtggccaaaaacaggggtccagacgctaaatacacttatggatggaaaagagcagaaattttgggtgctttaatcaatgctgtttttcttattgccctgtgtttctctattatgattgaagctttacaaagattgattgaacctcaagaaattcaaaacccaaggttggttttatacgttggtgtagcagggttaatttctaatgtcgtaggtttatttttgttccacgatcatggcagcgatagtctgcactcacactctcatggctctgtggaaagcgggaataacgatttggacatagaatctaatgcgactcattcccactctcatgcatctcttccaaacgataatttggccatcgatgaagatgctatttcgagtcctgggccctcagggcaaattggtgaagtgttgccacaatcagtagtaaacagattatcaaacgaaagccaacccttattgaaccacgatgatcatgaccacagccatgaatcgaagaaaccaggtcatcgctctttgaatatgcatggtgtcttcttacatgtactaggtgatgctctgggtaatattggtgttattgcagctgctttgtttatttggaaaactgaatattcttggagatattactcggatccaatcgtttctttaatcatcaccattattattttctcttccgctctgcccttatcacgtagagcttcaagaattttactacaggctactccttctacaatttctgctgatcagattcaaagagagattttggcagtacctggcgtgatagcggtccatgacttccacgtctggaacttaactgaatcaatatatattgcatctatccacgttcaaatagactgtgcacctgataaattcatgagctccgccaagctgataagaaaaatattccatcaacacggtattcattctgcaactgttcaaccagaatttgtttctggagatgttaatgaggatattcgcagaagattttctatcatagcaggtggttcaccatcttcgtctcaagaagcctttgacagccatggaaacactgagcatggtagaaaaaagcgttcacctactgcctatggtgctactacagcatcatctaattgtattgtagatgacgctgtaaactgcaatacttccaattgcctgtaa

SEQ ID NO: 8850 - DNA, 1329 bp, Artificial Sequence
  Description of Artificial Sequence: Synthetic polynucleotide
atgatcaccggtaaagaattgagaatcatctctcttttgaccttagacacggtttttttcttgttggaaattaccataggttatatgtcccattctttggccttgattgccgattcttttcacatgttgaatgatatcatctctcttttagtggcattatgggctgtggatgtggccaaaaacaggggtccagacgctaaatacacttatggatggaaaagagcagaaattttgggtgctttaatcaatgctgtttttcttattgccctttgtttctctattatgattgaagctttacaaagattgattgaacctcaagaaattcaaaacccaaggttggttttatacgttggtgtagcagggttaatttctaatgtcgtaggtttatttttgttccacgatcatggcagcgatagtttacactctcactctcatggctctgtggaaagcgggaataacgatttggacatagaatctaatgcgactcattcccactctcatgcatctcttccaaacgataatttggccatcgatgaagatgctatttccagtcctgggcccagtgggcaaattggtgaagtgttgccacaaagtgtagtaaacagattatctaacgaaagccaacccttattgaaccacgatgatcatgaccacagccatgaatccaagaaaccaggtcatcgctctttgaatatgcatggtgtcttcttacatgtattgggtgatgctttgggtaatattggtgttattgcagctgctttgtttatttggaaaactgaatattcttggagatattactctgatccaatcgtttctttaatcatcaccattattattttctcttccgctcttcccttatctcgtagagcttccagaattttattgcaggctactccttctacaatttctgctgatcagattcaaagagagattttggcagtacctggcgtgatagcggtccatgacttccacgtctggaacttaactgaaagtatatatattgcatctatccacgttcaaatagactgtgcacctgataaattcatgagctccgccaagttaataagaaaaatattccatcaacacggtattcattctgcaactgttcaaccagaatttgtttctggagatgttaatgaggatattcgcagaagattttctatcatagcaggtggttctccatcttcttctcaagaagcctttgacagccatggaaacactgagcatggtagaaaaaagcgtagtcctactgcctatggtgctactacagcatcttctaattgtattgtagatgacgctgtaaactgcaatacttccaattgcctctga

SEQ ID NO: 8851 - DNA, 1068 bp, Saccharomyces cerevisiae
atggtactttgcaaattactgacaccatatttcttactgtcaattttgagtgtcggcgtgttcacggcgaccgccgcgccatcgcccagtattcaaatgacggaaaatacaaatcaagatcatcatgagcatgccaagcgtggaggaacgtgtgcgttccctaactacgatgggatggtcgcagtacaaaaaggtggatctaatggaggatgggctatgagccctgaccaagaatgttcctacggttcatggtgcccttacgcttgcaaaccaggtcaactaatggggcaatgggacccttcggctaccacatactcttatcctaaatgtcaaaatggaggtttgtactgtgattctaacggtaacttgcaaaagccaaacagtgataaagactattgttatgatgggaagggaaccgtaatagcgaaaaacaacgctaacagcggtgacgttgcattttgccagaccgtgcttccgggcaacgaagctatgctgatcccaaccttagtcggctctgggtcaaagcaaacgctggctgtgcctggtacagactactgggcctccagcgcgtcgcattactacgtaaatgctcccggtgtaagcgtagaggatgcatgccagtggggtagtagtgcaaatccacaggggaactgggccccatttgtagctggttccaacatggacgacaaccagaacacttttgtaaagattggatggaaccccgtctacctggaatcgtcatgtccgttcaagaacgttaagccttcattcggtattagaattacttgtgatgacgaatcacaatgtgaaggcctaccatgctccattgacccaagttctaatggagtcaacgaagtgacaagttctggcggtggttcttccggggctggtggtggaaacttttgtgttgtcaccgccagaaacggcgccaaggccaacatcgaagtttttgatgttggtagcggctcatcttctaaaggcaagagagaactgaatccgctagacgttattaccacaacggtcaccgagaccaagtacaagacagtcaccgtcactgccaaaacttag

SEQ ID NO: 8852 - DNA, 1068 bp, Artificial Sequence
  Description of Artificial Sequence: Synthetic polynucleotide
atggtactttgcaaattattaacaccatatttcttattatccattttgagtgtcggcgtgttcacggcgaccgccgcgccatctcccagtattcaaatgacggaaaatacaaatcaagatcatcatgagcatgccaagcgtggaggaacgtgtgcgttccctaactacgatgggatggtcgcagtacaaaaaggtggatctaatggaggatgggctatgagccctgaccaagaatgttcctacggttcttggtgcccttacgcttgcaaaccaggtcaattgatggggcaatgggacccttctgctaccacatactcttatcctaaatgtcaaaatggaggtttgtactgtgattctaacggtaacttgcaaaagccaaacagtgataaagactattgttatgatgggaagggaaccgtaatagcgaaaaacaacgctaacagcggtgacgttgcattttgccagaccgtgcttccgggcaacgaagctatgttgatcccaaccttagtcggctctgggtccaagcaaacgttggctgtgcctggtacagactactgggcctccagcgcgtctcattactacgtaaatgctcccggtgtaagcgtagaggatgcatgccagtggggtagtagtgcaaatccacaggggaactgggccccatttgtagctggttccaacatggacgacaaccagaacacttttgtaaagattggatggaaccccgtctacttggaatcttcttgtccgttcaagaacgttaagccttctttcggtattagaattacttgtgatgacgaatctcaatgtgaaggcttaccatgctccattgacccaagttctaatggagtcaacgaagtgacaagttctggcggtggttcttccggggctggtggtggaaacttttgtgttgtcaccgccagaaacggcgccaaggccaacatcgaagtttttgatgttggtagcggctcttcttctaaaggcaagagagaattgaatccgttagacgttattaccacaacggtcaccgagaccaagtacaagacagtcaccgtcactgccaaaacttga

SEQ ID NO: 8853 - DNA, 315 bp, Saccharomyces cerevisiae
atgggcttattttcatttgatggtggcaaaaaggaatcacaaccccctaatacccgttcacagagaaagttgtgctgggagtccagggacgcattcttccagtgtttggacaaggcagacatcttggacgcaatggaccccaagaatagcaagagtataaagtcgcactgcaaggtggaaaatgaaaaatttgaggagaattgcgcccatagctggatcaagtacttcaaggagaagagggtcatcgactttaagagagagcagaccatcaagagaatcgagcaggaagctaaacagagggaacgaaatcagtga

SEQ ID NO: 8854 - DNA, 315 bp, Artificial Sequence
  Description of Artificial Sequence: Synthetic polynucleotide
atgggcttattttcttttgatggtggcaaaaaggaatctcaaccccctaatacccgttctcagagaaagttgtgctgggagtccagggacgcattcttccagtgtttggacaaggcagacatcttggacgcaatggaccccaagaatagcaagagtataaagtctcactgcaaggtggaaaatgaaaaatttgaggagaattgcgcccatagctggatcaagtacttcaaggagaagagggtcatcgactttaagagagagcagaccatcaagagaatcgagcaggaagctaaacagagggaaagaaatcagtga

SEQ ID NO: 8855 - DNA, 2085 bp, Saccharomyces cerevisiae
atgaccgaacaatattccgttgcagttggcgaagccgccaatgagcatgaaaccgctccaagaagaaatatcagggttaaagaccagcctttgattagacccataaactcctcagcatctacactgtacgaattcgccctggaatgttttaccaagggtggtaagagagacggtatggcatggagagatattatagatatacatgagacgaaaaaaaccatagtcaagagggtggatggtaaggataagcccatcgaaaaaacatggttgtactacgaactgactccctacataaccatgacatacgaggagatgatctgcgtaatgcacgacattggacgtgggctgataaagattggtgttaaacctaacggtgagaacaagttccacatctttgcctctacttctcacaagtggatgaaaacttttcttggttgcatgtcacaaggtattcctgtggtcaccgcgtacgacactttgggtgagagcggtttgattcactccatggtggaaacagattccgtcgccattttcacggacaaccagctgttgtccaaattagcagttcctttgaaaaccgccaagaacgtaaaattcgtcattcacaacgaacccatcgatccaagtgacaaaagacaaaatggtaagctttacaaggctgccaaggatgctgttgacaaaatcaaggaagttagaccggacataaaaatctacagtttcgatgaaattattgagataggtaaaaaggccaaggacgaggttgaattgcatttccccaagcctgaagatccagcttgtatcatgtacacttctggttccactggtacaccaaagggtgtggtattgacacattacaacattgtagctggtattggtggtgtgggccataacgttatcggatggattggcccaacagaccgtattatcgcattcttgccattggctcatatttttgaattaacctttgaattcgaagcgttctactggaatggtatcctagggtacgccaatgtcaagactttaaccccaacttctacacgtaattgccaaggtgacctgatggagtttaaacctaccgtaatggtgggtgtcgccgcagtttgggaaacagtgagaaaaggtatcctggccaagatcaacgaattgcccggttggtctcaaacgcttttctggactgtctatgctttgaaagagagaaatataccatgtagcggcttgctgagtgggttgatcttcaagagaatcagagaagcaaccggtggaaacttaaggtttattctgaacggtgggtctgcaatcagcatagacgcccaaaaattcctctccaaccttctatgtcctatgctcattggatatgggctaactgagggtgtggctaatgcctgtgtcctggagcctgaacattttgattacggtattgctggtgaccttgtcggaactattacagctaaattggtggatgtcgaagatttgggctattttgccaagaataatcaaggtgaattgctgtttaagggtgcacccatctgttctgaatactataagaatcctgaagaaactgctgcggcctttaccgatgatggctggttccgtaccggtgatatcgctgaatggacccccaagggacaagttaagatcattgatagaaagaaaaatttggttaagaccttaaatggtgagtacattgcattggaaaaattagaatccatttacagatcaaatccttacgtccaaaacatctgtgtctacgctgatgaaaacaaagttaagcctgtcggtattgtggtccctaacttaggacacttgtctaagctggctatcgaattaggtataatggtaccaggtgaagatgtcgaaagctatatccatgaaaagaagctacaggatgccgtttgcaaagatatgctgtcaactgccaaatctcaaggcttgaatggtattgaattattatgtggcattgttttctttgaagaagaatggactccagaaaatggccttgttacatccgcccaaaaattaaagagaagagatattctagcggctgtcaagccagatgtggaaagagtttataaagaaaacacttaa

SEQ ID NO: 8856 - DNA, 2085 bp, Artificial Sequence
  Description of Artificial Sequence: Synthetic polynucleotide
atgaccgaacaatattccgttgcagttggcgaagccgccaatgagcatgaaaccgctccaagaagaaatatcagggttaaagaccagcctttgattagacccataaactcctctgcatctacattgtacgaattcgccttggaatgttttaccaagggtggtaagagagacggtatggcatggagagatattatagatatacatgagacgaaaaaaaccatagtcaagagggtggatggtaaggataagcccatcgaaaaaacatggttgtactacgaattgactccctacataaccatgacatacgaggagatgatctgcgtaatgcacgacattggacgtgggttgataaagattggtgttaaacctaacggtgagaacaagttccacatctttgcctctacttctcacaagtggatgaaaacttttcttggttgcatgtctcaaggtattcctgtggtcaccgcgtacgacactttgggtgagagcggtttgattcactccatggtggaaacagattccgtcgccattttcacggacaaccagttattgtccaaattagcagttcctttgaaaaccgccaagaacgtaaaattcgtcattcacaacgaacccatcgatccaagtgacaaaagacaaaatggtaagctttacaaggctgccaaggatgctgttgacaaaatcaaggaagttagaccggacataaaaatctacagtttcgatgaaattattgagataggtaaaaaggccaaggacgaggttgaattgcatttccccaagcctgaagatccagcttgtatcatgtacacttctggttccactggtacaccaaagggtgtggtattgacacattacaacattgtagctggtattggtggtgtgggccataacgttatcggatggattggcccaacagaccgtattatcgcattcttgccattggctcatatttttgaattaacctttgaattcgaagcgttctactggaatggtatcttggggtacgccaatgtcaagactttaaccccaacttctacacgtaattgccaaggtgacttgatggagtttaaacctaccgtaatggtgggtgtcgccgcagtttgggaaacagtgagaaaaggtatcttggccaagatcaacgaattgcccggttggtctcaaacgcttttctggactgtctatgctttgaaagagagaaatataccatgtagcggcttgttaagtgggttgatcttcaagagaatcagagaagcaaccggtggaaacttaaggtttattttgaacggtgggtctgcaatcagcatagacgcccaaaaattcctctccaaccttttatgtcctatgctcattggatatgggttgactgagggtgtggctaatgcctgtgtcttggagcctgaacattttgattacggtattgctggtgaccttgtcggaactattacagctaaattggtggatgtcgaagatttgggctattttgccaagaataatcaaggtgaattgttatttaagggtgcacccatctgttctgaatactataagaatcctgaagaaactgctgcggcctttaccgatgatggctggttccgtaccggtgatatcgctgaatggacccccaagggacaagttaagatcattgatagaaagaaaaatttggttaagaccttaaatggtgagtacattgcattggaaaaattagaatccatttacagatctaatccttacgtccaaaacatctgtgtctacgctgatgaaaacaaagttaagcctgtcggtattgtggtccctaacttaggacacttgtctaagttggctatcgaattaggtataatggtaccaggtgaagatgtcgaaagctatatccatgaaaagaagttacaggatgccgtttgcaaagatatgctttctactgccaaatctcaaggcttgaatggtattgaattattatgtggcattgttttctttgaagaagaatggactccagaaaatggccttgttacatccgcccaaaaattaaagagaagagatattttggcggctgtcaagccagatgtggaaagagtttataaagaaaacacttga

SEQ ID NO: 8857 - DNA, 4689 bp, Saccharomyces cerevisiae
atgtcgtttggtggaatcaatacatttcaacagtataacacagatttagggctcggccataatggtgttagaatatccttaaactactttgatggtttgccggatccaagtcttttaaactccttgtactcgaacgagctgaaactcattttcaaatctcttctgaaaagagatgaaactacaaaagaaaaagctttaatggatctttccaatttgatcagcgactttaaccagaatgagtactttttcaatgacatttttcttctttgttggtcgcagatatatgctaaactgataattagtgattacaaggtcatcagactgcaatcacatcaaattactataatgcttgtcaaaagccttcggaagaaaatatcgaagtttttaaaggattttatacctttgatacttctcggtacatgcgaactcgattatagtgtttccaaaccttctcttaatgaattaacagagtgtttcaacaaagacccagcaaaaattaacgccttatgggctgtttttcaagaacaactattgaatttagtaaaggagattgttgtaaacgagaatgaagataccatttctgatgaacgttactccagtaaagaagaatctgagtttagataccacagagttatagcaagtgccgtattgctgctgattaagctttttgttcataacaaagacgtctcagaacgtaattcttccagtcttaaggtgattctttctgatgagtcaatctggaaactacttaacttaaaaaatgggcaaaatacaaatgcctacgaaacagttcttcgattgattgatgttctttatacaagaggttacatgccttcccacaaaaatataatgaagttagcggtgaaaaaactattgaaatcgttgactcatattacgtcaaagaatattctaaaagtatgccctgttctcccatcaatactgaaccttttagctaccttggatgactatgaagatgggacaatatggtcatacgataaatcttctaaagaaaaagtactcaaatttttatcggtttcccgtacttcaccatcgccaggatttttcaatgctgtgtttgcattgtacagctcgactaaaagacacagttttcttgattattatcttgaatggcttccattttggcaaaaatcggtgcaaagactgaatgaaaagggcttttctgcgagaaacagcgctgaggttcttaatgagttttggacaaattttttgaagttcgctgaggattcatcagaagaaagagtgaaaaaaatggtggaaagtgagatttttaactctctgtcttgcgggaaatctttatctgagtacacaaaactgaaccagactcttagtggcgtctttccacccgataaatgggagagagagattgaagattacttcacttcagacgaagacataagaaaaataaaggtgagctttgagaagaatctttttgctttattggttacttctcctaataacgaatccgcaattagtcgtttattcgatttttttgtgcaattaatcgaaacagatccctcaaatgttttcaacaaatacgacggtgtatatgatgctctcaattactttttagattcagatatgattttcttgaatgggaagatagggaaatttataaacgaaattccaacgttggtccaagaatcaacatatcaaaactttgctggtatcatggcacagtactcaaactccaaatttttcaaaatgaatactgacgcgattacttcgttggaagacttttttatcgttgcgctttcttttaacttaccaaagacaataattttagccacaatgaatgagttggacaatgatatttatcaacaattaatgaaatcagattccctagaattagaattgtacattgaagactttatgaaaaattataagtttgacgacagtggggaaatatttaaaggtaataataaatttttaaatcaaaggactatcaccacactttaccgaagcgcagttgccaatggccaagttgaacaattttgtgctgttttgtctaaattagatgaaacttttttttcaacgttattgctgaataccgattttctttcttgtgcattgtatgaagtttcagaagacactaatgagaaactattcaagttgtcattacagttggctaaagggaattctgaaatcgctaataagttggcccaagtgattttgcaacatgctcaggtttatttcagccccggggcaaaagaaaaatatgtcacacacgccgtggagctaattaatggctgcaacgatacttctcagattttttttcccgctaacgcaatcgaagtttttgccagatatatgccagcaattgattataggtcatccttagtgagcagcttaagtactaacacgcatttgctccttacagatgataagcctatcaatttaaaaaatatgcaaaagctcatcaggtatgctctattcttagatgccctacttgatgctcttccagagcgcgttaataaccatattgttgcatttataactgtagtttctgagctcgtcactgattataattgcctttcagaggaaccaaatgatctttactatgattttgggcatacctttttcaaacatggcaaagtaaatttgaacttttctgatattgttggaaacgttattcagcctgctaatggtggtgatgctatgcttacttttgatattgctgaaagtaattctgtctactttttttattattcaagagtattatataaggttctattgaacagcattgatactgtttcatccaccacattaaatgggctattagcatcggttgaaagttttgtcacgaaaactgtgagggatcaaaaatctactgataaagattatctcctatgtgctatattactattgatgtttaacaggtccaactcaaaagatgagataacgaaattaaggacattgctggcatctcaattgattgggattagagaagtagaacttgtcgatcaagaattcaagtcgttagctcttttaaataatctgctggatatcccacaggcagataaacagtttgttcctatagcaccgcagagactgaacatgatattccgttcaatactaaaatggttggatagtgatcttgcctacgagcctagctttagcaccgttagattgttactactagattttttcaccaaactgatgaggtttgaaggagtcagagatatgggcataacagcttttgaactttcggaaaggttgctggcagactctctatcgatgtgtcaaattgatgacactttatatttgttagaacttcgctcttcctgtttgaacttatatgaaacattgtcgcaaggcgtttccaaaaatggcgaggaaatctcagaatatggtgatgaaattcaagaaaatttgattgaactgatgtttctcaactttaatcaagaaagaaataaccaagtatccacactcttctaccagaaattgtacaaggtcatttcctcaatggaactcaaaaagttagaatctcaatacaaaagaatattcgaggttgtattgaatgataaggatatcggtagtaatattaatcaatcaagattattaactactttgttgggttctttggtggtaaaaacacagcaggatattataattgagtatgaactgaggattcaaaaacaaactggctcagacgtagatggtagtgcatctgataatgatgtaaactcaaaatttaaactacctcaaaaattattacaaaaagttactgatgaggtgccaaaagaataccttgaatacgagaataaaaattcatttattaaatatctatggtattggcacttgatactgatgtacttcaaagatacgtcttataatatgagacaaatatttattgaacaattaaaggaagctggtttaatcaatagaatgtttgatttcataacagatcaaatagatttaagagatactgagttttggaaacaggtcgacaccaaggaaatttcggaatacaacattgtcggcaataatttctctccttataaagaagacatatttgaagaatgtaaaaaacttttgggccatacactttatcagttgtttaacaacgtcggttgtctaacgagtatttggtggttaaatataaaagataggacattacaaaatgatattgaaaagtttgtctcagagttcatctccccaattttgatcaaaaatgaatttgacgatatcaattctaagatggaccgcctgacttctaatgatgatgctttgactattaaattaaataatattactaatgaagtgaaggcaagctatttgattgacgaccaaaagttggagatttccttcaaactaccaaaaaactaccctttaacaaatatccaagttaatggcgtctctagagttggtataagtgaacaaaaatggaaacaatggataatgtctacacaacatgtaattacaggcatgaatggatccgttttggattcgttggagttgtttactaaaaatgtgcacttacaattttctggtttcgaggaatgtgccatatgttactctatactacatgccgtggataggaaactaccttcgaagacatgtccgacttgtaaaaataagttccacggagcatgtctttacaagtggtttcgatcatcgggtaacaatacatgtccattatgccgtagtgaaattccatttagaaggtag

SEQ ID NO: 8858 - DNA, 4689 bp, Artificial Sequence
  Description of Artificial Sequence: Synthetic polynucleotide
atgagttttggtggaatcaatacatttcaacagtataacacagatttagggctcggccataatggtgttagaatatccttaaactactttgatggtttgccggatccaagtcttttaaactccttgtactctaacgagttgaaactcattttcaaatctcttttgaaaagagatgaaactacaaaagaaaaagctttaatggatctttccaatttgatcagcgactttaaccagaatgagtactttttcaatgacatttttcttctttgttggtctcagatatatgctaaattgataattagtgattacaaggtcatcagattacaatctcatcaaattactataatgcttgtcaaaagccttagaaagaaaatatccaagtttttaaaggattttatacctttgatacttctcggtacatgcgaactcgattatagtgtttccaaaccttctcttaatgaattaacagagtgtttcaacaaagacccagcaaaaattaacgccttatgggctgtttttcaagaacaattattgaatttagtaaaggagattgttgtaaacgagaatgaagataccatttctgatgaacgttactccagtaaagaagaatctgagtttagataccacagagttatagcaagtgccgtattgttgttaattaagctttttgttcataacaaagacgtcagtgaacgtaattcttccagtcttaaggtgattctttctgatgagagtatctggaaattacttaacttaaaaaatgggcaaaatacaaatgcctacgaaacagttcttagattgattgatgttctttatacaagaggttacatgccttcccacaaaaatataatgaagttagcggtgaaaaaacttttgaaatctttgactcatattacgtccaagaatattttgaaagtatgccctgttctcccaagtatattaaaccttttagctaccttggatgactatgaagatgggacaatatggagttacgataaatcttctaaagaaaaagtactcaaatttttaagtgtttcccgtacttctccatctccaggatttttcaatgctgtgtttgcattgtacagctctactaaaagacacagttttcttgattattatcttgaatggcttccattttggcaaaaatctgtgcaaagattgaatgaaaagggcttttctgcgagaaacagcgctgaggttcttaatgagttttggacaaattttttgaagttcgctgaggattcttctgaagaaagagtgaaaaaaatggtggaaagtgagatttttaactctttatcttgcgggaaatctttatctgagtacacaaaattgaaccagactcttagtggcgtctttccacccgataaatgggagagagagattgaagattacttcacttctgacgaagacataagaaaaataaaggtgagctttgagaagaatctttttgctttattggttacttctcctaataacgaatccgcaattagtcgtttattcgatttttttgtgcaattaatcgaaacagatccctccaatgttttcaacaaatacgacggtgtatatgatgctctcaattactttttagattctgatatgattttcttgaatgggaagatagggaaatttataaacgaaattccaacgttggtccaagaatctacatatcaaaactttgctggtatcatggcacagtactctaactccaaatttttcaaaatgaatactgacgcgattacttctttggaagacttttttatcgttgcgctttcttttaacttaccaaagacaataattttagccacaatgaatgagttggacaatgatatttatcaacaattaatgaaatctgattccttagaattagaattgtacattgaagactttatgaaaaattataagtttgacgacagtggggaaatatttaaaggtaataataaatttttaaatcaaaggactatcaccacactttacagaagcgcagttgccaatggccaagttgaacaattttgtgctgttttgtctaaattagatgaaacttttttttctacgttattgttgaataccgattttctttcttgtgcattgtatgaagtttctgaagacactaatgagaaattattcaagttgtctttacagttggctaaagggaattctgaaatcgctaataagttggcccaagtgattttgcaacatgctcaggtttatttcagccccggggcaaaagaaaaatatgtcacacacgccgtggagttgattaatggctgcaacgatacttctcagattttttttcccgctaacgcaatcgaagtttttgccagatatatgccagcaattgattataggtcttccttagtgagcagcttaagtactaacacgcatttgctccttacagatgataagcctatcaatttaaaaaatatgcaaaagctcatcaggtatgctttattcttagatgccttacttgatgctcttccagagcgcgttaataaccatattgttgcatttataactgtagtttctgagctcgtcactgattataattgcctttctgaggaaccaaatgatctttactatgattttgggcatacctttttcaaacatggcaaagtaaatttgaacttttctgatattgttggaaacgttattcagcctgctaatggtggtgatgctatgcttacttttgatattgctgaaagtaattctgtctactttttttattattctagagtattatataaggttttattgaacagcattgatactgtttcttccaccacattaaatgggttattagcatctgttgaaagttttgtcacgaaaactgtgagggatcaaaaatctactgataaagattatctcttatgtgctatattattattgatgtttaacaggtccaactccaaagatgagataacgaaattaaggacattgttggcatctcaattgattgggattagagaagtagaacttgtcgatcaagaattcaagtctttagctcttttaaataatttattagatatcccacaggcagataaacagtttgttcctatagcaccgcagagattgaacatgatattccgttctatattgaaatggttggatagtgatcttgcctacgagcctagctttagcaccgttagattgttattattagattttttcaccaaattaatgaggtttgaaggagtcagagatatgggcataacagcttttgaactttctgaaaggttgttggcagactctttatctatgtgtcaaattgatgacactttatatttgttagaacttcgctcttcctgtttgaacttatatgaaacattgtctcaaggcgtttccaaaaatggcgaggaaatcagtgaatatggtgatgaaattcaagaaaatttgattgaattgatgtttctcaactttaatcaagaaagaaataaccaagtatccacactcttctaccagaaattgtacaaggtcatttcctctatggaactcaaaaagttagaatctcaatacaaaagaatattcgaggttgtattgaatgataaggatatcggtagtaatattaatcaatctagattattaactactttgttgggttctttggtggtaaaaacacagcaggatattataattgagtatgaattgaggattcaaaaacaaactggctctgacgtagatggtagtgcatctgataatgatgtaaactccaaatttaaattacctcaaaaattattacaaaaagttactgatgaggtgccaaaagaataccttgaatacgagaataaaaattcttttattaaatatttatggtattggcacttgatattaatgtacttcaaagatacgtcttataatatgagacaaatatttattgaacaattaaaggaagctggtttaatcaatagaatgtttgatttcataacagatcaaatagatttaagagatactgagttttggaaacaggtcgacaccaaggaaatttctgaatacaacattgtcggcaataatttctctccttataaagaagacatatttgaagaatgtaaaaaacttttgggccatacactttatcagttgtttaacaacgtcggttgtttgacgagtatttggtggttaaatataaaagataggacattacaaaatgatattgaaaagtttgtcagtgagttcatctccccaattttgatcaaaaatgaatttgacgatatcaattctaagatggaccgcttgacttctaatgatgatgctttgactattaaattaaataatattactaatgaagtgaaggcaagctatttgattgacgaccaaaagttggagatttccttcaaattaccaaaaaactaccctttaacaaatatccaagttaatggcgtctctagagttggtataagtgaacaaaaatggaaacaatggataatgtctacacaacatgtaattacaggcatgaatggatccgttttggattctttggagttgtttactaaaaatgtgcacttacaattttctggtttcgaggaatgtgccatatgttactctatattacatgccgtggataggaaattaccttctaagacatgtccgacttgtaaaaataagttccacggagcatgtctttacaagtggtttagatcttctggtaacaatacatgtccattatgccgtagtgaaattccatttagaaggtga

SEQ ID NO: 8859 - DNA, 144 bp, Saccharomyces cerevisiae
atggcacacaaatgtgcaagtgccaagctattgagtggaataatggccttgttatttaatggtaagagccttctgaggccaatctgccttcacgtacacaaccaccttgttagtaacagtgataccaacatagtttggccgtga

SEQ ID NO: 8860 - DNA, 144 bp, Artificial Sequence
  Description of Artificial Sequence: Synthetic polynucleotide
atggcacacaaatgtgcaagtgccaagttgttgagtggaataatggccttgttatttaatggtaagagccttttgaggccaatctgccttcacgtacacaaccaccttgttagtaacagtgataccaacatagtttggccgtga

SEQ ID NO: 8861 - DNA, 1758 bp, Saccharomyces cerevisiae
atgttacacaggcacggttctaagcagaagaacttcgagaatatcgctggaaaagttgtccacgaccttgcaggtctgcaattgctttctaacgacgttcaaaaatccgctgtccaaagtggtcatcaaggatcgaacaatatgagagatacttcgtctcagggcatggctaataagtattcagttccaaaaaagggactacctgctgatttgtcttaccaactgattcataatgaattaacacttgatggtaatccgcatttgaaccttgccagtttcgtgaacacttttaccactgatcaggcaaggaaattgattgatgaaaatttgaccaaaaatcttgctgacaatgatgaatatccgcaattaattgagctaactcagcgttgtatttctatgctagctcaattatggcacgctaatcccgatgaagaaccaataggctgtgccaccacaggttctagtgaggcaatcatgttgggtggactcgccatgaaaaaaagatgggaacacagaatgaagaatgctggtaaagatgcttccaagccgaacattataatgtcttctgcgtgccaagtggcattagagaagtttacgagatattttgaagtggaatgccgattggttccggtatcccacagaagccatcatatgcttgacccagagtcgttatgggattatgtagatgagaacactattggctgttttgtaattttaggaaccacctacactggccatttggaaaatgtagagaaagttgcagatgtcttgtcccaaattgaggccaagcatcctgattggagcaatactgatattccaatccatgcggatggcgcttcaggtgggtttattatcccatttggctttgaaaaagagcacatgaaagcttatggcatggaacgttgggggttcaaccatccgcgtgtggttagtatgaacactagtggtcataagtttggcttaaccactcccggtctgggttgggtgctatggagagatgaatccttactggctgatgaattgagattcaaactaaagtacctcggtggcgtggaagaaactttcggtttgaatttttcaagacctggatttcaagttgtccatcaatacttcaattttgtttctctaggccattcagggtatagaacacaattccaaaattctctatttgttgcaagagcgttttctttcgaattattgaattcgtcaaaattgcccggatgctttgaaattgttagcagtatccatgaaagcattgagaacgattccgcccctaagtcagttaaagactattgggaacacccccaggcttacaaaccaggtgtaccgctggtagccttcaaattgtccaagaaattccacgaagaatatccagaagtgccacaagcaatcctttcctctttactgagaggtaggggttggataataccaaattacccactaccaaaggcaacggatggatccgatgagaaggaggtattaagagtggttttcagatcggagatgaagttggatttagcacagttgttgatcgttgacatcgagagtatcttgacaaagttgattcatagttacgaaaaggtttgtcatcatatagaacttgcctctgagcaaactccagagcgcaagagttcgttcatctacgaaatgttgctggcattggcatctccacaagatgacatcccaacgccggatgaaatcgaaaagaaaaataagctaaaggaaacaacaacgagaaactatagaggaacatgttga

SEQ ID NO: 8862 - DNA, 1758 bp, Artificial Sequence
  Description of Artificial Sequence: Synthetic polynucleotide
atgttacacaggcacggttctaagcagaagaacttcgagaatatcgctggaaaagttgtccacgaccttgcaggtttacaattgctttctaacgacgttcaaaaatccgctgtccaaagtggtcatcaaggaagtaacaatatgagagatacttcttctcagggcatggctaataagtattctgttccaaaaaagggattgcctgctgatttgtcttaccaattgattcataatgaattaacacttgatggtaatccgcatttgaaccttgccagtttcgtgaacacttttaccactgatcaggcaaggaaattgattgatgaaaatttgaccaaaaatcttgctgacaatgatgaatatccgcaattaattgagttaactcagcgttgtatttctatgttggctcaattatggcacgctaatcccgatgaagaaccaataggctgtgccaccacaggttctagtgaggcaatcatgttgggtggactcgccatgaaaaaaagatgggaacacagaatgaagaatgctggtaaagatgcttccaagccgaacattataatgtcttctgcgtgccaagtggcattagagaagtttacgagatattttgaagtggaatgcagattggttccggtatcccacagaagccatcatatgcttgacccagagtctttatgggattatgtagatgagaacactattggctgttttgtaattttaggaaccacctacactggccatttggaaaatgtagagaaagttgcagatgtcttgtcccaaattgaggccaagcatcctgattggagcaatactgatattccaatccatgcggatggcgcttctggtgggtttattatcccatttggctttgaaaaagagcacatgaaagcttatggcatggaacgttgggggttcaaccatccgcgtgtggttagtatgaacactagtggtcataagtttggcttaaccactcccggtttaggttgggtgttgtggagagatgaatccttattagctgatgaattgagattcaaattgaagtacctcggtggcgtggaagaaactttcggtttgaatttttccagacctggatttcaagttgtccatcaatacttcaattttgtttctttaggccattctgggtatagaacacaattccaaaattctttatttgttgcaagagcgttttctttcgaattattgaattcttctaaattgcccggatgctttgaaattgttagcagtatccatgaaagcattgagaacgattccgcccctaagtctgttaaagactattgggaacacccccaggcttacaaaccaggtgtaccgttagtagccttcaaattgtccaagaaattccacgaagaatatccagaagtgccacaagcaatcctttcctctttattaagaggtaggggttggataataccaaattacccattaccaaaggcaacggatggatccgatgagaaggaggtattaagagtggttttcagaagtgagatgaagttggatttagcacagttgttgatcgttgacatcgagagtatcttgacaaagttgattcatagttacgaaaaggtttgtcatcatatagaacttgcctctgagcaaactccagagcgcaagagttctttcatctacgaaatgttgttggcattggcatctccacaagatgacatcccaacgccggatgaaatcgaaaagaaaaataagttgaaggaaacaacaacgagaaactatagaggaacatgttga

SEQ ID NO: 8863 - DNA, 1101 bp, Saccharomyces cerevisiae
atgtctgaaaaatcagctagcaataacaaagctgaattcaaaaggcagtcatcgccattcagagaaatcatctctgcggatcacccaatttataaacctgctaagggaaggtactggctgtatgtggcgctaccatgcccatgggcacaaagaaccttgatcaccagggccctgaaagggctagcgcctataatcgggtgcagtgtagcgcattggcacctggatgacaaaggctggcgattccttgaagaaggagatgggaaaaccaatgaaaggcactggtttgacattgcaggcggaattagctcagtaaatttaaataccagtactcctgtggctaacatacccaataacgcgcatcggttgttggtcgacggaacagatgaaccgcattacgggtacaagagactaagcgacttctatttcaaaacaaagccagactataagggaagattcaccgtacctgttctttgggacttggaaacatgcactatagtaaacaatgaaagcagtgatatcatcggaattatgaattccgctgcgtttgatgagtttgtcggcgaagaataccgtcaagtccgtctggtacctcggtctctagaggcacagattacagagttcaactcttgggtgtacgataaaatcaacaacggtgtatacaaggccggttttgcagaatgtgcagaggtatacgagagggaggtaacaagcctttttcaatatcttgacaaattggaaaatcttctggacaagaagtacacagatttggaggcggagtatggtaagaacaacaaggacaagatactagatcgctactttgccatcggagacactctgaccgaggcggacgtgagactctacccaacgatagtaaggttcgacgtggtataccatcaacacttcaaatgcaatctggccaccatcagagatgattattcccgtatacacacgtggctcaagaatatatactggcgccacgaagccttccagcgcacaacggactttacccacataaaactcggatatactcgctcgcagccacgggtcaacccgattgggatcaccccactggggcccaagcctgatatccgacctccatga

SEQ ID NO: 8864 - DNA, 1101 bp, Artificial Sequence
  Description of Artificial Sequence: Synthetic polynucleotide
atgtctgaaaaatctgctagcaataacaaagctgaattcaaaaggcagtcttctccattcagagaaatcatctctgcggatcacccaatttataaacctgctaagggaaggtactggttatatgtggcgttaccatgcccatgggcacaaagaaccttgatcaccagggccttgaaagggttggcgcctataatcgggtgcagtgtagcgcattggcacttggatgacaaaggctggagattccttgaagaaggagatgggaaaaccaatgaaaggcactggtttgacattgcaggcggaattagctctgtaaatttaaataccagtactcctgtggctaacatacccaataacgcgcatagattgttggtcgacggaacagatgaaccgcattacgggtacaagagattgagcgacttctatttcaaaacaaagccagactataagggaagattcaccgtacctgttctttgggacttggaaacatgcactatagtaaacaatgaaagcagtgatatcatcggaattatgaattccgctgcgtttgatgagtttgtcggcgaagaataccgtcaagtccgtttagtacctagatctttggaggcacagattacagagttcaactcttgggtgtacgataaaatcaacaacggtgtatacaaggccggttttgcagaatgtgcagaggtatacgagagggaggtaacaagcctttttcaatatcttgacaaattggaaaatcttttggacaagaagtacacagatttggaggcggagtatggtaagaacaacaaggacaagatattggatcgctactttgccatcggagacactttgaccgaggcggacgtgagactctacccaacgatagtaaggttcgacgtggtataccatcaacacttcaaatgcaatttggccaccatcagagatgattattcccgtatacacacgtggctcaagaatatatactggcgccacgaagccttccagcgcacaacggactttacccacataaaactcggatatactcgctctcagccaagagtcaacccgattgggatcaccccattagggcccaagcctgatatcagacctccatga

SEQ ID NO: 8865 - DNA, 180 bp, Saccharomyces cerevisiae
atgaagttatctcaagttgttgtttccgccgtcgccttcactggtttagtaagtgctgctaacagttctaacagctcaagctcaaagaatgctgcccaaccaattgccggtttaaacaacggtaaggttgcaggcgccgctggtgttgctctagctggtgctttggcctttttgatttaa

SEQ ID NO: 8866 - DNA, 180 bp, Artificial Sequence
  Description of Artificial Sequence: Synthetic polynucleotide
atgaagttatctcaagttgttgtttccgccgtcgccttcactggtttagtaagtgctgctaacagttctaacagcagcagctctaagaatgctgcccaaccaattgccggtttaaacaacggtaaggttgcaggcgccgctggtgttgctttggctggtgctttggcctttttgatttga

SEQ ID NO: 8867 - DNA, 405 bp, Saccharomyces cerevisiae
atgtttggtaaagttttcgtaagctacatcagaacaagaattgggttcaaacctttaagcacgatatacacgcctgtttcttcttcttcgctcagcttcgataaggaggcatgtttcccctttaaaaaatggcacgaactgaatatgtcccagaagcaagagtttattcagcgttttgtcaaaaactacaggcaccaatacccaagttctaagaccaatgtttcgctgaaggggctgagtattggcatggacgagcacaatgactcgccatctgtgttcggcatattttataacgatatctggaaatcgtttaagaacgagcaattaggaactaacaatgataatatgaaatcgggtagtaggttcagtcaccccagctttaaacaattgttaatacagaagtga

SEQ ID NO: 8868 - DNA, 405 bp, Artificial Sequence
  Description of Artificial Sequence: Synthetic polynucleotide
atgtttggtaaagttttcgtaagctacatcagaacaagaattgggttcaaacctttaagcacgatatacacgcctgtttcttcttcttctctcagcttcgataaggaggcatgtttcccctttaaaaaatggcacgaattgaatatgtcccagaagcaagagtttattcagcgttttgtcaaaaactacaggcaccaatacccaagttctaagaccaatgtttctttgaaggggttgagtattggcatggacgagcacaatgactctccatctgtgttcggcatattttataacgatatctggaaaagttttaagaacgagcaattaggaactaacaatgataatatgaaatctggtagtaggttcagtcaccccagctttaaacaattgttaatacagaagtga

SEQ ID NO: 8869 - DNA, 1245 bp, Saccharomyces cerevisiae
atgaatccatcagtaccgaaggttatgaaaagagaaaacaatacacacctactagtttctaaagaaatgaatgatacgagtttgcaactaccgtctactacgagatcactttcaccgaaagagtcaaacagcaatgaagactttaacgtcgatggcaacgaaacaacgctgcaaagaataagtaaagattatttgaaaccaaatattgggcttgttctcttgacagtatcatatttcttcaactcggccatggtggtgtctactaaagtcttagaaaacgaccccgatgatattgccaatgatagacagatcaagccattgcaaatcttattagttagaatggtaataacatatattggtacattgatatacatgtatattaataagagcacaatttcggatgtaccatttggtaaacctgaagtacgcaaatggttagtattgagaggttgcactggatttttcggtgtctttggaatgtattattcgttaatgtacttgacgattagtgatgccgttttgatcacttttttggcaccatcactaacaatattcctgtcgtgggttatcctgagggaaagattcaccaaagtggaagcgctcggttcgctgatctcattgctgggcgtggtgttaattgtaaggccttcatttttatttggaactcccgaattgaccgactcttcctctcaaatagtagaatcatcggacccaaaatcgagattgattgccactttggttgggttgtggggtgttttagggatgagttgcgtctacatcattattcgttatattggtaagagggctcacgctataatgagtgtgagttatttttctttgatcacagcgatagtgtctttcattgggattaacactatcccttcaatgaaattccagataccacattccaaaaaacaatggatactgtttggtaatctgggtgtgtccggctttatcttccagctgctattaactatgggtatccaaagagaacgtgctggaagagggtctttgatgacatacacacaactactatatgcggttttctgggacgttgcactgtacaagcattggccaaatatctggtcgtggattggtatgataatcatcataagtgccacgttgtgggtaataaggataagggcggcaaacaatgaaacaactgccaaggacctaaccccaataattgacgacgaagagaactctattcccctgacagagtttgacctatccgattctaaataa

SEQ ID NO: 8870 - DNA, 1245 bp, Artificial Sequence
  Description of Artificial Sequence: Synthetic polynucleotide
atgaatccatctgtaccgaaggttatgaaaagagaaaacaatacacacttattggtttctaaagaaatgaatgatacgagtttgcaattgccgtctactacgagatctctttctccgaaagagagcaacagcaatgaagactttaacgtcgatggcaacgaaacaacgttacaaagaataagtaaagattatttgaaaccaaatattgggcttgttctcttgacagtatcttatttcttcaactctgccatggtggtgtctactaaagtcttagaaaacgaccccgatgatattgccaatgatagacagatcaagccattgcaaatcttattagttagaatggtaataacatatattggtacattgatatacatgtatattaataagagcacaatttctgatgtaccatttggtaaacctgaagtacgcaaatggttagtattgagaggttgcactggatttttcggtgtctttggaatgtattattctttaatgtacttgacgattagtgatgccgttttgatcacttttttggcaccatctttaacaatattcttgtcctgggttatcttgagggaaagattcaccaaagtggaagcgctcggttctttgatctctttgttgggcgtggtgttaattgtaaggccttcttttttatttggaactcccgaattgaccgactcttcctctcaaatagtagaaagtagtgacccaaaatctagattgattgccactttggttgggttgtggggtgttttagggatgagttgcgtctacatcattattcgttatattggtaagagggctcacgctataatgagtgtgagttatttttctttgatcacagcgatagtgtctttcattgggattaacactatcccttctatgaaattccagataccacattccaaaaaacaatggatattgtttggtaatttgggtgtgtccggctttatcttccagttgttattaactatgggtatccaaagagaacgtgctggaagagggtctttgatgacatacacacaattattatatgcggttttctgggacgttgcattgtacaagcattggccaaatatctggtcctggattggtatgataatcatcataagtgccacgttgtgggtaataaggataagggcggcaaacaatgaaacaactgccaaggacttgaccccaataattgacgacgaagagaactctattcccttgacagagtttgacttatccgattctaaatga

SEQ ID NO: 8871 - DNA, 309 bp, Saccharomyces cerevisiae
atggtgccactgatattgcttatcttacttttttctaaattttcaacatttctgcgccctgtaaatcacgtgctcgttacaaaatacactgccatagtaaatacaaaatggcaaacaacgcccagcatcattgatgttacatatactatgcacgttttttatatgacgataatacttattttggtcaggaagcaaatgcagtccatacatgcgtttctgggtagtttatgcttaccctcccacgtgctagatttttcgattgtaagagatattttatcatggtatttccttgagacagtcgcagtatga

SEQ ID NO: 8872 - DNA, 309 bp, Artificial Sequence
  Description of Artificial Sequence: Synthetic polynucleotide
atggtgccattgatattgcttatcttacttttttctaaattttctacatttttacgccctgtaaatcacgtgctcgttacaaaatacactgccatagtaaatacaaaatggcaaacaacgcccagcatcattgatgttacatatactatgcacgttttttatatgacgataatacttattttggtcaggaagcaaatgcagtccatacatgcgtttttaggtagtttatgcttaccctcccacgtgttggatttttctattgtaagagatattttatcttggtatttccttgagacagtcgcagtatga

SEQ ID NO: 8873 - DNA, 567 bp, Saccharomyces cerevisiae
atgcctttagaatctatatgggccgatgcccctgacgaagaaccaataaagaagcagaaaccaagtcacaagcggagtaataacaataaaaagaataataatagcaggtggagtaatgaatcaagttcaaacaataagaaaaaagattctgtaaacaaagtgaagaataacaaaggtaaccacgaaagtaaaacgaaaaataaaataaaggaaactcttcccagagaaaagaagccgcctcatagtcagggcaaaatatcgcctgtaagtgaatcattggcgataaatcctttctcccaaaaagcaacagagatatctcctccaccagtttcacctagcaagatgaaaactaccaaaacacaatccaaacaggataccgcttctaagatgaagttattaaaaaagaaaattgaagagcagagggaaatattgcaaaagactcatcacaagaatcaacagcaacaagtgttgatggattttctgaacgatgaagggagctccaactgggttgacgatgatgaagaggagcttatccttcaacgtttgaagacctctttgaaaatatga

SEQ ID NO: 8874 - DNA, 567 bp, Artificial Sequence
  Description of Artificial Sequence: Synthetic polynucleotide
atgcctttagaatctatatgggccgatgcccctgacgaagaaccaataaagaagcagaaaccaagtcacaagagaagtaataacaataaaaagaataataatagcaggtggagtaatgaaagtagtagtaacaataagaaaaaagattctgtaaacaaagtgaagaataacaaaggtaaccacgaaagtaaaacgaaaaataaaataaaggaaactcttcccagagaaaagaagccgcctcatagtcagggcaaaatatctcctgtaagtgaatctttggcgataaatcctttctcccaaaaagcaacagagatatctcctccaccagtttctcctagcaagatgaaaactaccaaaacacaatccaaacaggataccgcttctaagatgaagttattaaaaaagaaaattgaagagcagagggaaatattgcaaaagactcatcacaagaatcaacagcaacaagtgttgatggattttttgaacgatgaagggagctccaactgggttgacgatgatgaagaggagcttatccttcaacgtttgaagacctctttgaaaatatga

SEQ ID NO: 8875 - DNA, 183 bp, Saccharomyces cerevisiae
atggctaataaagttattcaactacagaaaatcttccaatcttccactaaacctctatggtggagacatccaaggtcagctttatacctgtatccattttatgctatttttgcggtagccgtcgttacaccacttctatacattccaaatgctattagaggtatcaaagccaagaaggcatag

SEQ ID NO: 8876 - DNA, 183 bp, Artificial Sequence
  Description of Artificial Sequence: Synthetic polynucleotide
atggctaataaagttattcaattgcagaaaatcttccaatcttccactaaacctttatggtggagacatccaaggtctgctttatacttatatccattttatgctatttttgcggtagccgtcgttacaccacttttatacattccaaatgctattagaggtatcaaagccaagaaggcatga

SEQ ID NO: 8877 - DNA, 2403 bp, Saccharomyces cerevisiae
atgttacaacggagatttatatcctccagtggtataaagagattacttcacagagaatcaaacaaggttatgcacactgttttctttaaagtacgatattactcaactgagttgatcaaaaaaaagcataaggaagatattgaggattgggttaaagcgcaactaaaagattcttcaacaataagcggtgtgtatgagtctcggaataaactcgattggatggactccattaccaaaagccccagcagcttagatattcttaagaatcaatataatatagtgaaagacaaagattttggaatattgtggaagcaaaaattcgaaagtgcagatccagatattttgatgacaataattagcctttccactaaccaaaaggttttgttttcaatacagcaattactgatcttaataaattctcttcactttttgaaaagggactacgatattggacaaatatacacaacatatgagcaattcacgcccttattagcaagccacactgataaaggcacatatggtcagttcatcgaaattatgttggtagtacagcataatttacatcattttgatgtctgtgaaactttatttgcagaatatatcaaatattgcaaagtaaagccacaaatgatatctttaggattaaactctttcataaggagtaataacactcaactagcggtggaattttacacgcaagcaattaccaatcctgatacatttccaataactgaaaagcagctttttgagtttctccgatgtatggaaagatatctagatatgtccagtatgaaacacatcttttatctctggttgaaagtgaaatgtggtgatgagcaatcctcttcaactaaccttccctcgttcaaaaccctcgcgataatacacagaatgttattacgtttttctaatacagatgagctaaacgattttttaaccaatcccgttgttttaagtacgggatatacatcaagtgtgcagtttgagttgattgaattttgtcattctctgtattgcatcaaaggagacagaacaaaaagcattgatgactcaatattgatggaaagagttgataaatttattaccagacttaataataatatttcaacacgaaaagagctatatatgtcagtggttcaagcgtacgtctctactaacaatttcgagaatttaaaagtaatcttggaaaaaatccagagagataatgatattagcatagacggttcgtttcatttgtgcatttctaggtattttgtcaacaccaatcaattcgaaggacttttcaaatattatcgcagtgtagttaaaaccactgatggtaaaacgcgattacggcccgcatttattcaacaattatggtcatgtgccgtaaatgtttatccaatgctggcaaaagaaattacaaatgacctacttgtgactctaaaaaggagccaatacagcaaatgtctcacttgggtgtacacatttttacaagaaaatgcccatatccatacgagaaagatcaatggaggagaagactcttcgttatctggtttcaacgcggttgattttgaaaggtttgaagagttcaagaaaaaagtttctcacaatgatgtatatggagcagaattggtgatttcgaatagtttgaaggagggcattgcgcctcaattttcatttttgtattccgttttggcattatgcttgagaaactctttaactggtttggcacgtgtagttgatgtgatattaaggaccagattccgctatatcccactaaaagtcgatatattatggttgaaatgggagatcatttctaattatagatcttttgaaaagttgtctgctgaacatttaaaagaactggaattcaaactgaaggaatttgaacgagtacatcaaaaggagctttcagttcaaaactatttacaacttactcaaatatgtttccacacccgtgatttcaaatatgcatgttacctaatttcacaagctagaaaaaatttggatacttcaaataacaaacagtggatgatgtattacatgacatctttaaagttggcgtcaagaatgcatgaaagcgaacggtttagtaggattttaaaagactggaattgtaatcatagggcaagcctgattactccaggttgcattagacaaatcaaaggctttatgaaatattttgagaaaaggcctgcttacatttcaactgctgcttccattgataacaaggagataaaggatcgcattgacgagttagtacttagatatgtggactataaataccaggggcttgagaatatgagaaagttaacacttttcttaaaagaatggtttgatgaagagatttcactattaaagttggagcaaaatgaaaggaaaatgaagctttttgaagagaataaaaaggaggaggagtaa

SEQ ID NO: 8878 - DNA, 2403 bp, Artificial Sequence
  Description of Artificial Sequence: Synthetic polynucleotide
atgttacaaagaagatttatatcctccagtggtataaagagattacttcacagagaatctaacaaggttatgcacactgttttctttaaagtaagatattactccactgagttgatcaaaaaaaagcataaggaagatattgaggattgggttaaagcgcaattgaaagattcttctacaataagcggtgtgtatgagtctagaaataaactcgattggatggactccattaccaaaagccccagcagcttagatattcttaagaatcaatataatatagtgaaagacaaagattttggaatattgtggaagcaaaaattcgaaagtgcagatccagatattttgatgacaataattagcctttccactaaccaaaaggttttgttttccatacagcaattattgatcttaataaattctcttcactttttgaaaagggactacgatattggacaaatatacacaacatatgagcaattcacgcccttattagcaagccacactgataaaggcacatatggtcagttcatcgaaattatgttggtagtacagcataatttacatcattttgatgtctgtgaaactttatttgcagaatatatcaaatattgcaaagtaaagccacaaatgatatctttaggattaaactctttcataaggagtaataacactcaattggcggtggaattttacacgcaagcaattaccaatcctgatacatttccaataactgaaaagcagctttttgagtttctccgttgtatggaaagatatttggatatgtccagtatgaaacacatcttttatctctggttgaaagtgaaatgtggtgatgagcaatcctcttctactaaccttccctctttcaaaaccctcgcgataatacacagaatgttattacgtttttctaatacagatgagttgaacgattttttaaccaatcccgttgttttaagtacgggatatacatctagtgtgcagtttgagttgattgaattttgtcattctttgtattgcatcaaaggagacagaacaaaaagcattgatgacagtatattgatggaaagagttgataaatttattaccagacttaataataatatttctacaagaaaagagttgtatatgtctgtggttcaagcgtacgtctctactaacaatttcgagaatttaaaagtaatcttggaaaaaatccagagagataatgatattagcatagacggttcttttcatttgtgcatttctaggtattttgtcaacaccaatcaattcgaaggacttttcaaatattatcgcagtgtagttaaaaccactgatggtaaaacgagattaagacccgcatttattcaacaattatggtcttgtgccgtaaatgtttatccaatgttagcaaaagaaattacaaatgacttacttgtgactttgaaaaggagccaatacagcaaatgtctcacttgggtgtacacatttttacaagaaaatgcccatatccatacgagaaagatcaatggaggagaagactcttctttatctggtttcaacgcggttgattttgaaaggtttgaagagttcaagaaaaaagtttctcacaatgatgtatatggagcagaattggtgatttctaatagtttgaaggagggcattgcgcctcaattttcttttttgtattccgttttggcattatgcttgagaaactctttaactggtttggcacgtgtagttgatgtgatattaaggaccagattccgctatatcccattgaaagtcgatatattatggttgaaatgggagatcatttctaattatagatcttttgaaaagttgtctgctgaacatttaaaagaattggaattcaaattgaaggaatttgaaagagtacatcaaaaggagctttctgttcaaaactatttacaacttactcaaatatgtttccacacccgtgatttcaaatatgcatgttacttgatttctcaagctagaaaaaatttggatacttccaataacaaacagtggatgatgtattacatgacatctttaaagttggcgtccagaatgcatgaaagcgaaagatttagtaggattttaaaagactggaattgtaatcatagggcaagcttaattactccaggttgcattagacaaatcaaaggctttatgaaatattttgagaaaaggcctgcttacatttctactgctgcttccattgataacaaggagataaaggatcgcattgacgagttagtacttagatatgtggactataaataccaggggcttgagaatatgagaaagttaacacttttcttaaaagaatggtttgatgaagagatttctttattaaagttggagcaaaatgaaaggaaaatgaagctttttgaagagaataaaaaggaggaggagtga

SEQ ID NO: 8879 - DNA, 1662 bp, Saccharomyces cerevisiae
atggcattccaagatcaagatatattcatagtgttctcgcatgcctccttatttcttaatcaaaatgatttattaagcctaagtctaacatccaaaaaaatgcatgacatgattgcaatccctcgtctttatagcaatattcacataactaagaatcctgttttaagaacaaacaaatggtttttggacgggggaaaaacttatgtaagtggttatagatctgttctgaaaaccggtgacaagaatgacatatttttatatgatagaattgaaaggttgttggagacatcgcatttaaaatgtataaaacagctgactattgacgaggatttgtttcacaacagggaagaaggattgcaactgttacaaagattggtcaatgaaatcactgacttggacgtgattgaaagtcttgacatcaaggatcctaccttgtttgagttatgttcagcaaagtattatcgcctgtcaagtttaaagaagagagtagtatatggcgaaactggatttgatggtatcaaattatggcaaaacttcaaaagcttaaaatggcaattacctgaatcgttggatttgcaaaacgtaataatccctgaagtgggtgtaatgttaatgaagcaacttaatggaggagagttagaaataaaggacgaagcgtactcaagcctaagggtctttgaatactttgattccctgaacctccgcttcaagaatctgcgccgtttgaagcttaatcatgttcacaaacaaggtgatgggagtgctacttctatgagattatcttcacgcgcgtttaaggatgtagttaatttatccaatcttaaagcccttgaattagaattttcttgtgaggtggacgactgtgaatgtgatgatgactttcttcaagatataacaggaaaccttgtttccttaacaagtctggggttcattgaaaagacattcaccaaaaaagggtaccattacatggacgagaaatgggacttggtcgttaataagtttattttaaatttaccaaacgtgagtaaagatttgcgtttgttaagcatacgacatgacccacctttaaatggcaagggcattgatactgttgatgggaacttgcttcgccgtaaaaaactttatgaaaaggttttaccaaagctaacttcgttggaaacaataatagctccaactgtattgcagtccatcacctcatatgaaatgtatgcgtgtgaccttttgtggaacggctgcaaatgtgcgttctgctccaaatacttaccattatttgataagtacatcatgaatcatcaatacttttcgaccccggatgcaagatacttggatattataccgatagtgtttgcagcatatactggaaaatctctagctaagaggtttgatcctcagaagaactgggatttggatttactacagtatgcccctgaggatacgacgtggaatttccatggctttgagagaattcatcactttgcaagttatgaatgttattttgacgaatcctcatttgagcccttagccactattatatcgcattttttttatccttacatgaactacttgataaagatattgccaaaccttcgccaaactatgttgtcaggaatatactttagcgtgagcccagaattacacacttatgaaactatttatgattaa

SEQ ID NO: 8880 - DNA, 1662 bp, Artificial Sequence
  Description of Artificial Sequence: Synthetic polynucleotide
atggcattccaagatcaagatatattcatagtgttctctcatgcctccttatttcttaatcaaaatgatttattaagcttaagtttgacatccaaaaaaatgcatgacatgattgcaatccctcgtctttatagcaatattcacataactaagaatcctgttttaagaacaaacaaatggtttttggacgggggaaaaacttatgtaagtggttatagatctgttttgaaaaccggtgacaagaatgacatatttttatatgatagaattgaaaggttgttggagacatctcatttaaaatgtataaaacagttgactattgacgaggatttgtttcacaacagggaagaaggattgcaattattacaaagattggtcaatgaaatcactgacttggacgtgattgaaagtcttgacatcaaggatcctaccttgtttgagttatgttctgcaaagtattatcgcttatccagtttaaagaagagagtagtatatggcgaaactggatttgatggtatcaaattatggcaaaacttcaaaagcttaaaatggcaattacctgaatctttggatttgcaaaacgtaataatccctgaagtgggtgtaatgttaatgaagcaacttaatggaggagagttagaaataaaggacgaagcgtactccagcttgagggtctttgaatactttgattccttgaacctccgcttcaagaatttacgccgtttgaagcttaatcatgttcacaaacaaggtgatgggagtgctacttctatgagattatcttctcgcgcgtttaaggatgtagttaatttatccaatcttaaagcccttgaattagaattttcttgtgaggtggacgactgtgaatgtgatgatgactttcttcaagatataacaggaaaccttgtttccttaacaagtttagggttcattgaaaagacattcaccaaaaaagggtaccattacatggacgagaaatgggacttggtcgttaataagtttattttaaatttaccaaacgtgagtaaagatttgcgtttgttaagcataagacatgacccacctttaaatggcaagggcattgatactgttgatgggaacttgcttcgccgtaaaaaactttatgaaaaggttttaccaaagttgacttctttggaaacaataatagctccaactgtattgcagtccatcacctcttatgaaatgtatgcgtgtgaccttttgtggaacggctgcaaatgtgcgttctgctccaaatacttaccattatttgataagtacatcatgaatcatcaatacttttccaccccggatgcaagatacttggatattataccgatagtgtttgcagcatatactggaaaatctttggctaagaggtttgatcctcagaagaactgggatttggatttattgcagtatgcccctgaggatacgacgtggaatttccatggctttgagagaattcatcactttgcaagttatgaatgttattttgacgaatcctcttttgagcccttagccactattatatctcattttttttatccttacatgaactacttgataaagatattgccaaaccttcgccaaactatgttgagtggaatatactttagcgtgagcccagaattacacacttatgaaactatttatgattga

SEQ ID NO: 8881 - DNA, 4263 bp, Saccharomyces cerevisiae
atgactacggatgtgcaattttcaagtcaggaaatcgagcttttccgtgtcaaagaattcttgattgctaataatccagcaaagatcaacaatgaaaataaggatgctgttttaactcagattgagcatgatttcaggtatttaatacagtatatcaaggacggattaccgaacttaaatgagtccacaaggttaatttttccagataccttttcgatctgtttactaaggagccatcaaataattgcaagcaaaaaaattgactctcaagaatttttatcggcggtaaaagagcaactcttaactgaagcgaatgcaaatattatctttgaatatgttcttgacttttgggctgatggtggagccccactgatgaatgccttgagagatttattcagtaaactactgaacttattgaaaatcacatatcctatgtcaaccttgaaggatgttttatttaattggatgaatgaaatattagaagtaccatctacgttgcgtgttcagtattacttgattgatgccctttcttctgattttgacctttattatattatagaaaaaaagcctcatttcatcgataactctttttcattaatgaactctgatttgctagcaaattcggtaggtaaatgcattgttagtttgctgttaaacatttacgaaaagcatttcaaaaagaacgagtcttttgtacaagaatggatacaattatggaaaagttgtgctttaaagtacattcacgacaaacaatacaccaaatccattaatctgtatattatgattccattattcaaaaatatgccaaactcggccttcacacttttcctagaatgtatgtctaacaaagacccatcacttttgctctcacttttaaagattggccaagaattggggattgaagaagaaccattttgtgataataaatataccactgtagattctgttaacaaactcatagagcaagatgagtataaacttcaggtatttgaaatactgaccttttcgacaaaaaagtcaaagcctattcgtcccttcgtcttcaaaactataaaacagtacctatatgtgttcttcgtggacactgaacttgaacgcagaaattacttttgcagttcgatgaaacactttatatttagaaccagagactgcgcatactctttagctagggatgccagaaagcttaaaaaggctgagaaatttccggacgaacagagggaaaagttggcgcaagttgaggaggctagagcctttttggtttggctatgcaattttataaaatataatttggcccctggtactttatatcaggcgaacgtgacctcattaaaacttatgcacattctgatcaagtctggtgttgataaatctactccacaaaaatttttagacaaccaaaataagagggaatatcctttttctatcccaattttacaggatgtcacatttttaaggttgctcattgaccttttggttagtaattatgctgacgtgcgcgaattatctaaagaaatgctatttataatgataagcgctgatgaatctagaggtctttttttggataccttagacgcaaatgctttgaagtggactgcaacctctcttttaagtgactatgagaaaggtgatgctggagctaccgtatatgagttcatattcacagtcatgggctctcaaagaagcttcattgaccagacaattgatatattagcgcagatggtacaaaatttgcaaaatgacagcattggttgtgcagaaaattcaatcggtcctcactttgctgcactaagcttgattttgaataagtttaactctgaagaaaaccatcaagatacttcaaaaataatctcaaaattaataaatcttgtactcaagagctgggaagcaacgagaaatgtagtgtgtcatgattctgcccatggaatactacctgaaaaatatgctaattgtggtgtaccggaccaagttataataagtcacgcatttagggcgataaaagaagcatcatatttacttgaaacaatattaaaaaaataccctttaacaagagatcaattagacagtatcggcgatctttttattgttcagctttctactattcgtcatagtggcgccttccaagccgttttaccggggctaaaggcattttgtattcgttgtcaacttgaatttcccgctattctggaagaacttttaagcaagagtgtaaaatctttaaaatccaaaactcaacatattacaagaaggtcaggaggcttgcctttcttggtcacaaccgtcttaagtgcagaagttaccaaagggagacctttgttacaaaaaacttttgaaaacttactactcgttgcaaggttaccaattcctccccatcaagatgagtttgatttaccacaggttaatgctattaattgtataaacgcaatctttgttgaaccgaagctctctgtacactgtacgtcatttgtctcagaggcattagaactagctttattgaatttcgactgtgatatatgggctctaagaaactgttctatcatgctgtttacctccttgcaaaatagaatttttggaaaagtgggcagaagcgttagtgcaaaattattctttaccaaatattctggcttgaggcaactgcttttgaatattctaaacagttctattgctcaatattcgggaagtgaaagaaaatcatatcaaattgaaagcattttcttggtccttaatgtgctactgaggttacggcctacagctggctatactggtctaaaagaattcaacgtttctgtttatgaatgtttatcaaatgagaactggaagatcagagatatggcctctagagtattgcatatgctgtcggaaaattttgaagaagagataagaaaattacttgacttggcttctatcgcgaagcaaaaccagttacatggacacttactagcactccaacaactagtaccacaatacctttcaggaactagagatatggagttgattcaaaggatacttgaaaagaaaaggatgcttctactagagaacaagtgctttatcactaaaaaggcctacttaaaattgacctgctgtatattggaaacatgcgacatacctgattctattttaaaagattatatcagcactttgcggaacacatttattgctgaaaataacgaatatgttgtggatggtagcaaacagctatatcttgcacaaatcttagacatgctcttaaaatatgaggatagtatatatctcgatgatatttgcttattaggattgtattctccattttatgaggctcagctcagtacactacagtacatgaatactaactttcactgggaaactacaagaaactcagaatttcttgaacaactacaattattactcagggttccagatttgctgcctatggctaaagctttagtagtgaaaattctctcaagaaaaaagaatactttatccctgacgacctgcactgatctcctaaaaacaaataatagtgaagatacaaaacttgctgccgtttcatcactaagtgctaaattgtcttcgcaaacctttcaccaggtatggaacttgttacaaggatttttcgccgattcttgttcaaaagattttagattggcatctttagaatgtttaactgcttatccagaaagttgtaagaactccagaatactattacaactgtacaacttcttatgggacgatgattctgaaataagagaaaaggcttctttttatttgaataagaactttattcaaactgcagactgggaatataacaggaacaccagtgtgaccgctcttatattcacaaaaaagtttgttgacgtattcacaagttctgaggtggtagaagagttgtgtttacagttgtttcaatatctaaatgaatatgatatgtttgctgccgaagaatcggcgaagaattgtctatttactatagaaaaggataaccagttcatcaacgaactacaaaaggcaatgcatatattaaatatgataaaattgactggaagggatatctcaaagtgttacaaagaccagatacatcacctaaaaagtgctctattggagcacttcaacaccgaggattttaaagattccccactcggctggtgctctaatgctgaaatattttcaagaataacgcttttaaaggaactgattcaacattattctccttctgattatgagaattttatcaatgttctgactaaacattctgttcatcccctaattatcagttattcccaattataa

SEQ ID NO: 8882 - DNA, 4263 bp, Artificial Sequence
  Description of Artificial Sequence: Synthetic polynucleotide
atgactacggatgtgcaattttctagtcaggaaatcgagcttttccgtgtcaaagaattcttgattgctaataatccagcaaagatcaacaatgaaaataaggatgctgttttaactcagattgagcatgatttcaggtatttaatacagtatatcaaggacggattaccgaacttaaatgagtccacaaggttaatttttccagataccttttctatctgtttattgaggagccatcaaataattgcaagcaaaaaaattgactctcaagaatttttatctgcggtaaaagagcaactcttaactgaagcgaatgcaaatattatctttgaatatgttcttgacttttgggctgatggtggagccccattaatgaatgccttgagagatttattcagtaaattattaaacttattgaaaatcacatatcctatgtctaccttgaaggatgttttatttaattggatgaatgaaatattagaagtaccatctacgttgcgtgttcagtattacttgattgatgccctttcttctgattttgacctttattatattatagaaaaaaagcctcatttcatcgataactctttttctttaatgaactctgatttgttggcaaattctgtaggtaaatgcattgttagtttgttattaaacatttacgaaaagcatttcaaaaagaacgagtcttttgtacaagaatggatacaattatggaaaagttgtgctttaaagtacattcacgacaaacaatacaccaaatccattaatttatatattatgattccattattcaaaaatatgccaaactctgccttcacacttttcttggaatgtatgtctaacaaagacccaagtcttttgctctcccttttaaagattggccaagaattggggattgaagaagaaccattttgtgataataaatataccactgtagattctgttaacaaactcatagagcaagatgagtataaacttcaggtatttgaaatattgaccttttctacaaaaaagtccaagcctattcgtcccttcgtcttcaaaactataaaacagtacttatatgtgttcttcgtggacactgaacttgaacgcagaaattacttttgcagttctatgaaacactttatatttagaaccagagactgcgcatactctttagctagggatgccagaaagcttaaaaaggctgagaaatttccggacgaacagagggaaaagttggcgcaagttgaggaggctagagcctttttggtttggttgtgcaattttataaaatataatttggcccctggtactttatatcaggcgaacgtgaccagtttaaaacttatgcacattttgatcaagtctggtgttgataaatctactccacaaaaatttttagacaaccaaaataagagggaatatcctttttctatcccaattttacaggatgtcacatttttaaggttgctcattgaccttttggttagtaattatgctgacgtgcgcgaattatctaaagaaatgttatttataatgataagcgctgatgaatctagaggtctttttttggataccttagacgcaaatgctttgaagtggactgcaacctctcttttaagtgactatgagaaaggtgatgctggagctaccgtatatgagttcatattcacagtcatgggctctcaaagaagcttcattgaccagacaattgatatattagcgcagatggtacaaaatttgcaaaatgacagcattggttgtgcagaaaattccatcggtcctcactttgctgcattaagcttgattttgaataagtttaactctgaagaaaaccatcaagatacttctaaaataatctccaaattaataaatcttgtactcaagagctgggaagcaacgagaaatgtagtgtgtcatgattctgcccatggaatattacctgaaaaatatgctaattgtggtgtaccggaccaagttataataagtcacgcatttagggcgataaaagaagcaagttatttacttgaaacaatattaaaaaaataccctttaacaagagatcaattagacagtatcggcgatctttttattgttcagctttctactattcgtcatagtggcgccttccaagccgttttaccggggttgaaggcattttgtattcgttgtcaacttgaatttcccgctattttggaagaacttttaagcaagagtgtaaaatctttaaaatccaaaactcaacatattacaagaaggtctggaggcttgcctttcttggtcacaaccgtcttaagtgcagaagttaccaaagggagacctttgttacaaaaaacttttgaaaacttacttctcgttgcaaggttaccaattcctccccatcaagatgagtttgatttaccacaggttaatgctattaattgtataaacgcaatctttgttgaaccgaagctctctgtacactgtacgtcttttgtcagtgaggcattagaattggctttattgaatttcgactgtgatatatgggctttgagaaactgttctatcatgttatttacctccttgcaaaatagaatttttggaaaagtgggcagaagcgttagtgcaaaattattctttaccaaatattctggcttgaggcaattacttttgaatattttgaacagttctattgctcaatattctggaagtgaaagaaaaagttatcaaattgaaagcattttcttggtccttaatgtgttgttgaggttaagacctacagctggctatactggtttgaaagaattcaacgtttctgtttatgaatgtttatccaatgagaactggaagatcagagatatggcctctagagtattgcatatgctttctgaaaattttgaagaagagataagaaaattacttgacttggcttctatcgcgaagcaaaaccagttacatggacacttattggcactccaacaattggtaccacaatacctttctggaactagagatatggagttgattcaaaggatacttgaaaagaaaaggatgcttttattggagaacaagtgctttatcactaaaaaggcctacttaaaattgacctgctgtatattggaaacatgcgacatacctgattctattttaaaagattatatcagcactttgagaaacacatttattgctgaaaataacgaatatgttgtggatggtagcaaacagttatatcttgcacaaatcttagacatgctcttaaaatatgaggatagtatatatctcgatgatatttgcttattaggattgtattctccattttatgaggctcagctcagtacattacagtacatgaatactaactttcactgggaaactacaagaaactctgaatttcttgaacaattacaattattactcagggttccagatttgttacctatggctaaagctttagtagtgaaaattctcagcagaaaaaagaatactttatccttgacgacctgcactgatctcttgaaaacaaataatagtgaagatacaaaacttgctgccgtttcttctttgagtgctaaattgtcttctcaaacctttcaccaggtatggaacttgttacaaggatttttcgccgattcttgttctaaagattttagattggcatctttagaatgtttaactgcttatccagaaagttgtaagaactccagaatattattacaattgtacaacttcttatgggacgatgattctgaaataagagaaaaggcttctttttatttgaataagaactttattcaaactgcagactgggaatataacaggaacaccagtgtgaccgctcttatattcacaaaaaagtttgttgacgtattcacaagttctgaggtggtagaagagttgtgtttacagttgtttcaatatttgaatgaatatgatatgtttgctgccgaagaaagtgcgaagaattgtttatttactatagaaaaggataaccagttcatcaacgaattacaaaaggcaatgcatatattaaatatgataaaattgactggaagggatatctccaagtgttacaaagaccagatacatcacttgaaaagtgctttattggagcacttcaacaccgaggattttaaagattccccactcggctggtgctctaatgctgaaatattttccagaataacgcttttaaaggaattgattcaacattattctccttctgattatgagaattttatcaatgttttaactaaacattctgttcatcccttaattatcagttattcccaattatga

SEQ ID NO: 8883 - DNA, 462 bp, Saccharomyces cerevisiae
atgggtaagaaaaacactaaaggtggtaaaaaaggtagaagaggtaagaacgactctgacggtccaaagcgtgaacttatttataaggaagaaggccaagaatatgctcaaatcaccaagatgttgggtaatggaagagtcgaagccagttgctttgatggtaataagagaatggcccatattagaggtaagttaagaaagaaagtctggatgggacaaggtgatattattcttgtttccttaagagatttccaagatgaccaatgtgatgttgtccacaaatataatttagatgaagccagaacactgaaaaaccaaggtgaacttcctgaaaacgccaaaattaatgaaacagacaactttggtttcgaatctgatgaagacgttaactttgaatttggtaacgctgatgaagatgatgaggaaggtgaagatgaagaacttgatattgatgacatttaa

SEQ ID NO: 8884 - DNA, 462 bp, Artificial Sequence
  Description of Artificial Sequence: Synthetic polynucleotide
atgggtaagaaaaacactaaaggtggtaaaaaaggtagaagaggtaagaacgactctgacggtccaaagcgtgaacttatttataaggaagaaggccaagaatatgctcaaatcaccaagatgttgggtaatggaagagtcgaagccagttgctttgatggtaataagagaatggcccatattagaggtaagttaagaaagaaagtctggatgggacaaggtgatattattcttgtttccttaagagatttccaagatgaccaatgtgatgttgtccacaaatataatttagatgaagccagaacattaaaaaaccaaggtgaacttcctgaaaacgccaaaattaatgaaacagacaactttggtttcgaatctgatgaagacgttaactttgaatttggtaacgctgatgaagatgatgaggaaggtgaagatgaagaacttgatattgatgacatttga

SEQ ID NO: 8885 - DNA, 3165 bp, Saccharomyces cerevisiae
atgactattatcgtcgcttctttattcttaccatatacccctcaattcgaggctgatgtcaccaactcggatactgctaagctggttgaatcaagtatgatcaaggtagactgcaacaaccaggaattgagcaacaacaagcaagaaagaagcagttctgtaacttcggcaagctctcattatattggcttacctcaggaggcgcaaattaacggtgaacccttacaaagggccaatgtgggctctcctgctacgggagttaactatcataatgagatggaaatgctttcctcagagcaattcctggaagagctgactgccaatgccactcatgcagcaaactctggtattccgccagctaataacccagtttcttctggctcaactgcccagcggccttcagtcgaggaattcttttctgctccgtctgctagagtctgttctccctcccaggaagcttctgcttcgtctatttctgctagtcgttcatcggctcaccacaacgatttgagctccagccttatgaaaaatcccaatttgtcatttgattcacatccacccagggtcagaagctcatccaagagtgctgtaatcactcccgtctctaaaagcgttccagatgtcgatcctgctgttgtagatgtcgcaaaagttagagaagagtttcaacagcaagcctccttgccttccatgaaaagagtttccggaagcaccgctggagactcttccattgcttcttcgagttctaatctcaggtactcacagcaatttcaggataactttatcgaagacactgatagtgaggatgacattgattctgatttggagaccgatgctactaagaaatacaacgtcccaaaatttggtggctattccaataacgcaaagttaagagcatctctaatgagaaactcgtatgagctattcaaacatttgccatggacaatagtcgacagtgacaaagggaacggatccttgaaaaatgcagttaatattgcagttgctgaaaagacagtgaaagaacctgtttcctgggtaggtacaatgggaatccctactgacgaacttcctcacgaagtttgccataagatttcaaagaaattagaacaggatttttcttcttttccagtggtcacggacgatattacttttaagggtgcttataagaactacgccaaacagattttatggcccactctacattatcaaattccagataatccaaattcaaaggcttttgaagaccattcttgggactactatcaaaaagtgaatcaaaagttttctgataggatagtttccgtttacaaacctggcgacacaatttggatccatgattatcatttgatgcttgtcccacaaatggtgagagagaaactgcctaaagctaagattggatttttcttacacgtatcatttccaagtagtgaggtcttcagatgccttgctaacagagaaaggattcttgaaggtattattggtgcaaactttgttgggtttcaaactaaagaatacaaaagacatttcctacaaacttgtaacagattgcttgctgcggatgtctctaatgatgaagtcaaataccattgcaatattgtttccgtgatgtatgcgccaattggtattgattattaccatttgacatcgcagttgagaaatggttctgtacttgaatggcgccaattaattaaagaaagatggcgtaataaaaaactgattgtttgtcgcgatcaatttgacagaattagaggtcttcagaaaaaaatgttagcctacgagaggtttttgatagaaaaccctgaatacatcgaaaaagttgttttgatccaaatctgcatcggtaagagttccgatcctgagtacgaacgtcaaattatggttgtcgttgatagaatcaattctttgtcttcgaacatcagtatctctcaaccagtggtctttttgcatcaagatttagattttgctcaatatttggcattgaattgtgaagctgacgttttccttgtggatgcgctgagagaaggtatgaatttaacatgtcatgagttcattgtcagttcattcgaaaaaaatgcgcctctattattatctgaattcactggtagttcttctgtcctaaaggaaggtgccatcttaataaacccatgggatataaatcatgtagcacaaagtatcaagagaagtttagaaatgtctccagaagaaaaaaggcgtaggtggaaaaaattattcaaatctgttattgaacatgattcggataattggattacaaagtgcttcgaatacataaataatgcttgggagtccaaccaagaaacgtctactgttttcaatttggctccagaaaaattctgtgctgattacaaagcctccaaaaagcatttatttatcttcaagatttcagaacctccaacgtccagaatgctatccttgctaagtgaattgagttcaaataatatagtttacgttttgagttcatttacaaagaatacattcgaaagcttatacaatggtgttctaaacatcggattgatagcggagaatggtgcctacgtaagagttaatgggtcgtggtacaacatcgtggaagagcttgattggatgaaagaggtggcaaagatctttgacgagaaagtcgagaggttacctggttcatactacaaaatcgctgattctatgatcagattccatacagaaaacgctgatgatcaagatcgagtcccaactgttattggggaagccattacgcacataaacaccttatttgatgacagggatattcacgcttatgtgcataaggatattgtcttcgttcaacaaacggggctagccttagccgccgctgagtttttgatgaaattttacaacagtggcgtcagtcctactgacaatagcagaatatctctatcaagaacatcctcttcgatgtccgtcggtaataataagaagcatttccaaaaccaggtagatttcgtttgcgtttccggttcgacatcacctattattgaaccattatttaaattagtgaagcaagaggttgaaaagaacaatctaaaatttggttacaccattctttacggtagctcaagatccacttatgccaaggaacatatcaatggtgtcaatgaactttttaccatccttcatgacttgacagccgcctaa

SEQ ID NO: 8886 - DNA, 3165 bp, Artificial Sequence
  Description of Artificial Sequence: Synthetic polynucleotide
atgactattatcgtcgcttctttattcttaccatatacccctcaattcgaggctgatgtcaccaacagtgatactgctaagttggttgaaagtagtatgatcaaggtagactgcaacaaccaggaattgagcaacaacaagcaagaaagaagcagttctgtaacttctgcaagctctcattatattggcttacctcaggaggcgcaaattaacggtgaacccttacaaagggccaatgtgggctctcctgctacgggagttaactatcataatgagatggaaatgctttcctctgagcaattcttggaagagttaactgccaatgccactcatgcagcaaactctggtattccgccagctaataacccagtttcttctggctccactgcccagaggccttctgtcgaggaattcttttctgctccgtctgctagagtctgttctccctcccaggaagcttctgcttcttctatttctgctagtcgttcttctgctcaccacaacgatttgagctccagccttatgaaaaatcccaatttgagttttgattctcatccacccagggtcagaagctcttccaagagtgctgtaatcactcccgtctctaaaagcgttccagatgtcgatcctgctgttgtagatgtcgcaaaagttagagaagagtttcaacagcaagcctccttgccttccatgaaaagagtttccggaagcaccgctggagactcttccattgcttcttccagttctaatctcaggtactctcagcaatttcaggataactttatcgaagacactgatagtgaggatgacattgattctgatttggagaccgatgctactaagaaatacaacgtcccaaaatttggtggctattccaataacgcaaagttaagagcatctttgatgagaaacagttatgagcttttcaaacatttgccatggacaatagtcgacagtgacaaagggaacggatccttgaaaaatgcagttaatattgcagttgctgaaaagacagtgaaagaacctgtttcctgggtaggtacaatgggaatccctactgacgaacttcctcacgaagtttgccataagatttccaagaaattagaacaggatttttcttcttttccagtggtcacggacgatattacttttaagggtgcttataagaactacgccaaacagattttatggcccactttacattatcaaattccagataatccaaattctaaggcttttgaagaccattcttgggactactatcaaaaagtgaatcaaaagttttctgataggatagtttccgtttacaaacctggcgacacaatttggatccatgattatcatttgatgcttgtcccacaaatggtgagagagaaattacctaaagctaagattggatttttcttacacgtatcctttccaagtagtgaggtcttcagatgccttgctaacagagaaaggattcttgaaggtattattggtgcaaactttgttgggtttcaaactaaagaatacaaaagacatttcttacaaacttgtaacagattgcttgctgcggatgtctctaatgatgaagtcaaataccattgcaatattgtttccgtgatgtatgcgccaattggtattgattattaccatttgacatctcagttgagaaatggttctgtacttgaatggcgccaattaattaaagaaagatggcgtaataaaaaattgattgtttgtcgcgatcaatttgacagaattagaggtcttcagaaaaaaatgttagcctacgagaggtttttgatagaaaaccctgaatacatcgaaaaagttgttttgatccaaatctgcatcggtaagagttccgatcctgagtacgaacgtcaaattatggttgtcgttgatagaatcaattctttgtcttccaacatcagtatctctcaaccagtggtctttttgcatcaagatttagattttgctcaatatttggcattgaattgtgaagctgacgttttccttgtggatgcgttaagagaaggtatgaatttaacatgtcatgagttcattgtcagttctttcgaaaaaaatgcgcctttattattatctgaattcactggtagttcttctgtcttgaaggaaggtgccatcttaataaacccatgggatataaatcatgtagcacaaagtatcaagagaagtttagaaatgtctccagaagaaaaaaggcgtaggtggaaaaaattattcaaatctgttattgaacatgattctgataattggattacaaagtgcttcgaatacataaataatgcttgggagtccaaccaagaaacgtctactgttttcaatttggctccagaaaaattctgtgctgattacaaagcctccaaaaagcatttatttatcttcaagatttctgaacctccaacgtccagaatgctttccttgttaagtgaattgagtagtaataatatagtttacgttttgagttcttttacaaagaatacattcgaaagcttatacaatggtgttttgaacatcggattgatagcggagaatggtgcctacgtaagagttaatgggtcctggtacaacatcgtggaagagcttgattggatgaaagaggtggcaaagatctttgacgagaaagtcgagaggttacctggttcttactacaaaatcgctgattctatgatcagattccatacagaaaacgctgatgatcaagatagggtcccaactgttattggggaagccattacgcacataaacaccttatttgatgacagggatattcacgcttatgtgcataaggatattgtcttcgttcaacaaacggggttagccttagccgccgctgagtttttgatgaaattttacaacagtggcgtcagtcctactgacaatagcagaatatctttatctagaacatcctcttctatgtccgtcggtaataataagaagcatttccaaaaccaggtagatttcgtttgcgtttccggttctacatctcctattattgaaccattatttaaattagtgaagcaagaggttgaaaagaacaatttgaaatttggttacaccattctttacggtagcagcagatccacttatgccaaggaacatatcaatggtgtcaatgaactttttaccatccttcatgacttgacagccgcctga

SEQ ID NO: 8887 - DNA, 942 bp, Saccharomyces cerevisiae
atgaataaacttgttgatgcccactgtcatgttataaccgacccagacaacacattctgcggtgatgatggagggtcccagggtacgttgcgttgcgttatgtcatcaaacccatatgactggaacaatttgaaaaaattggctggcagaagcacaagtaaaaacgatatatgcgtgggatttggtgtgcatccttggtacagccacttattttatgtgggaagtcggcgcgacaaggtttctcactatcaagatgtactggagtataagaatgaagaacagttcgacagtttggttcaggtgcttcccgaacctctagatcttgaagagtatataaaaagagagtttaacgacactttggttagtgtgattggagaaatcggtcttgataagctcttcagacttcctgcaaatggtttctacatgcagaacgagaaggcaaggcttacgacagtgaaggtcaaactatcgcatcaagaaacagtattcaggcgattttgccgactggcaaggcacacaagcaagcccatctctatacacgatgtaaagtgccacgggaaactaaacgatatctgcaatgaagagctcttgacgtatcactctgtcaagatatgtttacattcgtacacaggctccaaggaaacgcttctgggccaatggctcaagaagtttcccccggatcgtatttttgtgagcctatccaaatggattaattttaaggacccagaagagggagatgccctggtcaggagcttgccctcaacttgcatacttactgaaaccgactatcctattgacaatccagatccgtcataccaaaaggcccttacagagcagctgcagtatttgaatgcacaaatcgcacgagcatgggacgagacactggatgcctcacaagccgctttgcgtgtatacgaaaactttcagaaatttatcaagtga

SEQ ID NO: 8888 - DNA, 942 bp, Artificial Sequence
  Description of Artificial Sequence: Synthetic polynucleotide
atgaataaacttgttgatgcccactgtcatgttataaccgacccagacaacacattctgcggtgatgatggagggtcccagggtacgttgcgttgcgttatgtcttccaacccatatgactggaacaatttgaaaaaattggctggcagaagcacaagtaaaaacgatatatgcgtgggatttggtgtgcatccttggtacagccacttattttatgtgggaagtagacgcgacaaggtttctcactatcaagatgtattggagtataagaatgaagaacagttcgacagtttggttcaggtgcttcccgaacctttggatcttgaagagtatataaaaagagagtttaacgacactttggttagtgtgattggagaaatcggtcttgataagctcttcagacttcctgcaaatggtttctacatgcagaacgagaaggcaaggcttacgacagtgaaggtcaaattatctcatcaagaaacagtattcaggaggttttgcaggttagcaaggcacacaagcaagcccatctctatacacgatgtaaagtgccacgggaaattgaacgatatctgcaatgaagagctcttgacgtatcactctgtcaagatatgtttacattcttacacaggctccaaggaaacgcttttgggccaatggctcaagaagtttcccccggatcgtatttttgtgagcctttccaaatggattaattttaaggacccagaagagggagatgccttggtcaggagcttgccctccacttgcatacttactgaaaccgactatcctattgacaatccagatccgagctaccaaaaggcccttacagagcagttacagtatttgaatgcacaaatcgcaagagcatgggacgagacattagatgcctctcaagccgctttgcgtgtatacgaaaactttcagaaatttatcaagtga

SEQ ID NO: 8889 - DNA, 606 bp, Saccharomyces cerevisiae
atggctaggccagttaatacaaacgctgaaacggaatcgagaggcagacccactcagggtggtggttacgcaagtaacaacaatggcagctgtaacaacaacaatggcagcaataataacaataataacaataataataataataataacagcaataacagcaataacaataacgggcctacctccagcgggagaaccaatgggaagcaaagactcacagctgcacaacagcagtacattaagaatctcatagagacacatatcaccgacaaccaccctgatctgcgccccaagagtcacccaatggatttcgaagagtatacggatgcgttcctgagaaggtataaagaccactttcaattggacgtaccggacaacctgacgctgcagggatacttattgggttccaaattgggcgcgaagacttattcatacaagaggaacacacaggggcagcacgataaaaggatacataagagagacctggccaacgtggtgagaaggcatttcgatgagcattccattaaagagacagattgcataccgcaatttatatacaaggtaaaaaaccagaagaagaaattcaagatggaatttcggggttga

SEQ ID NO: 8890 - DNA, 606 bp, Artificial Sequence
  Description of Artificial Sequence: Synthetic polynucleotide
atggctaggccagttaatacaaacgctgaaacggaatctagaggcagacccactcagggtggtggttacgcaagtaacaacaatggcagctgtaacaacaacaatggcagcaataataacaataataacaataataataataataataacagcaataacagcaataacaataacgggcctacctccagcgggagaaccaatgggaagcaaagactcacagctgcacaacagcagtacattaagaatctcatagagacacatatcaccgacaaccaccctgatttacgccccaagagtcacccaatggatttcgaagagtatacggatgcgttcttaagaaggtataaagaccactttcaattggacgtaccggacaacttgacgttgcagggatacttattgggttccaaattgggcgcgaagacttattcttacaagaggaacacacaggggcagcacgataaaaggatacataagagagacttggccaacgtggtgagaaggcatttcgatgagcattccattaaagagacagattgcataccgcaatttatatacaaggtaaaaaaccagaagaagaaattcaagatggaatttagaggttga

SEQ ID NO: 8891 - DNA, 612 bp, Saccharomyces cerevisiae
atggaggattcgagattgcttatcactttgattcttgtgtttggagttatatttctgaaaaaattcttccaaagtaatcagcatccctcagcacaacgcttatccgctacaggtgtaaacgcacacggacgtcctcagggctccacgcagaatgccttgagaaggactggtagagtcaatggaggtcaccccgtgactactcagatggtggaaacagtgcaaaatctagcccctaacttacatcctgagcaaattaggtatagtttggaaaacacaggctcagtcgaggaaacagtggaaaggtacttgcgtggtgatgaattcagctttccacctgggtttgagccctccagggcgccaatgggggccaatgcggctgttgataataacgctgctggtggcggagagtttaacgatcccagaaagaagaacatgatttgcgctgagaatctactcgataaattccatgtggatctcaatgaagatatgagtaacttaagctttaaggacttagacattgaagagagaaagagattgttggtttggcaagccagaaagaatttggagacaaaattgcaaagtgataaagatttgcaaagtttgctgacttga

SEQ ID NO: 8892 - DNA, 612 bp, Artificial Sequence
  Description of Artificial Sequence: Synthetic polynucleotide
atggaggattccagattgcttatcactttgattcttgtgtttggagttatatttttgaaaaaattcttccaaagtaatcagcatccctctgcacaacgcttatccgctacaggtgtaaacgcacacggacgtcctcagggctccacgcagaatgccttgagaaggactggtagagtcaatggaggtcaccccgtgactactcagatggtggaaacagtgcaaaatttggcccctaacttacatcctgagcaaattaggtatagtttggaaaacacaggctctgtcgaggaaacagtggaaaggtacttgcgtggtgatgaattcagctttccacctgggtttgagccctccagggcgccaatgggggccaatgcggctgttgataataacgctgctggtggcggagagtttaacgatcccagaaagaagaacatgatttgcgctgagaatttactcgataaattccatgtggatctcaatgaagatatgagtaacttaagctttaaggacttagacattgaagagagaaagagattgttggtttggcaagccagaaagaatttggagacaaaattgcaaagtgataaagatttgcaaagtttgttgacttga

SEQ ID NO: 8893 - DNA, 1386 bp, Saccharomyces cerevisiae
atggaagaatttgaagaatttcgaaggaaaggggagatgtccagcagatgtggcaatcaccgtgtgctcagaaaatggaatagttgcgcttgcgagttggccgtgccctttgaggttcctgagcatgcgattacgaaattgcacatatacgacttcgacaatacattatttgcaacgccgggtcctacagagcaattgtatacacgtgagctactaaatttgttgacatcgagcacgctaccgaatggaggctggtggaatgagccggggtttctgcaggctgctattgagatctcgaagactaaaccgagaaggtattcgtggaatgcggatatcgttaaattggcggaggagtcatattctgccaaggatactatctcgatcgttttaacgggcagagaggaaagtaagttccataagttgattgagcatgctttacagacggcaaggagccattggaaatgctcagaaaatgagtttaggttcaatgcagtttgcctaaaaaaaagagcaatttctgagtacactagcaaatataaaaaagagttgatgcgggatttcttagaatattatccctctctgcgggagttgtccatatatgatgatagaatacaccaaatagatgcattcaagtctttcttccattctttggatctaccacgtctgaaatggtctgcgatccccgtacgaccattcaccaaatcgctgccaagagagcaggaacttgaaatggtgatggacatggtacgaaagaacaatagccaagctctcagcacttcacaaaagtttgatttaagacggactccaagacaaattggttatatcctttgcacggcatctcatcgtctattatcaatagaggtcatcaagtacttaaagcggcgtaaggggagaagaacgttcagacccaagctgtatgaacatcccttgtatataccgtgcgcagaacccggtaaagatatccctgcacttgaaatcgctaaggtatggtcaaacaatgacactcgcacgtttgattctgagaagaaagtacagcatatttcacaaattttttatctggaacagcctgggaagtgcatcgtacacttccaagtcacagaccttgccgtcatcgcgtcggcccaccacaacagaagaaagccattggaggtttatttcaaagccacacccgaaccaaacagatacactttcactctctttccagaatatatagtcactggtcatttttacaaaagagaccgaattgaagatttagaagtggtaacagagcgtctaataaactgcaaggaagatattcactgggttccgttagacaatacaataccaataaaggcatttttcgggcgatttgccaagttggcagcaataccgtgttccaatgcttaa

SEQ ID NO: 8894 - DNA, 1386 bp, Artificial Sequence
  Description of Artificial Sequence: Synthetic polynucleotide
atggaagaatttgaagaatttagaaggaaaggggagatgtccagcagatgtggcaatcaccgtgtgctcagaaaatggaatagttgcgcttgcgagttggccgtgccctttgaggttcctgagcatgcgattacgaaattgcacatatacgacttcgacaatacattatttgcaacgccgggtcctacagagcaattgtatacacgtgagttattgaatttgttgacatctagcacgttgccgaatggaggctggtggaatgagccggggtttttgcaggctgctattgagatctccaagactaaaccgagaaggtattcttggaatgcggatatcgttaaattggcggaggagtcttattctgccaaggatactatctccatcgttttaacgggcagagaggaaagtaagttccataagttgattgagcatgctttacagacggcaaggagccattggaaatgcagtgaaaatgagtttaggttcaatgcagtttgcttgaaaaaaagagcaatttctgagtacactagcaaatataaaaaagagttgatgagagatttcttagaatattatccctctttaagagagttgtccatatatgatgatagaatacaccaaatagatgcattcaagtctttcttccattctttggatttaccacgtttgaaatggtctgcgatccccgtaagaccattcaccaaatctttaccaagagagcaggaacttgaaatggtgatggacatggtaagaaagaacaatagccaagctctcagcacttctcaaaagtttgatttaagaagaactccaagacaaattggttatatcctttgcacggcatctcatcgtttattatctatagaggtcatcaagtacttaaagagacgtaaggggagaagaacgttcagacccaagctttatgaacatcccttgtatataccgtgcgcagaacccggtaaagatatccctgcacttgaaatcgctaaggtatggagcaacaatgacactcgcacgtttgattctgagaagaaagtacagcatatttctcaaattttttatttggaacagcctgggaagtgcatcgtacacttccaagtcacagaccttgccgtcatcgcgagtgcccaccacaacagaagaaagccattggaggtttatttcaaagccacacccgaaccaaacagatacactttcactctctttccagaatatatagtcactggtcatttttacaaaagagacagaattgaagatttagaagtggtaacagagcgtttaataaactgcaaggaagatattcactgggttccgttagacaatacaataccaataaaggcatttttcgggagatttgccaagttggcagcaataccgtgttccaatgcttga

SEQ ID NO: 8895 - DNA, 2862 bp, Saccharomyces cerevisiae
atgaatagtactaatagtactaatagtactacaacagctaccagtacaaacacgtcaactcaacaagtcgttacttctttggtaagtaatggtactatttttggtgtttttgtcatagcgttcttgattttgcgtataaaactaaaaaggatttatgagcccaaatcctcattcaatctgattaatgaagaaaaaaagccagaaccgctaccgcagggcgtctggcaatggctgaagccgttattgaaaaaatcagacaattttgtcattcaacaagccggtctggatggatatttctttttgaggtaccttttcatcattgcaatttactgtgctgtttccatgagttatatattccctattttgttgtccattaacgccagtaacggtaaccatgaaagcggattgaatcaattggcctatcagaacgtcaagcaccgtggtagatattttgcacatgttttctgtggatggattttcttttgggggttcctttacattatttacagagaattgtatttttacacctctatgaagcaagctgtactagcgtcccctcgttatgctaaaaaactatcctcgagaaccgtgttattccagactgtccctaagcaatacttaagtgaagaagagttttctaagttgtttgatggtgtgaaaagagtctggatcgcaagaggttccggttcaattgaagcaatggtcaaagcaagggacaatatggccatacaattggaaggtgctgaaacaaaatacctgaaagcagcattgaaaaaaattaagaagttaaacaaaaaaagtccgcaattatctgtctctgataatattgctgaatatgtccctgacaagaaaagaccacatcataaaattaacaaggttgctaaattcttttttggtaaaaaagttgacaccatatcctacattaaggaggagttgcccaagttaaaccaaaaggtgaaggcattacaagaagatcatgaaaattcatcccctttcaactccgtttttgtggagtttgaatcccaatatcaggcccaagttgccgctcagatcaccacataccatgctcctcttttcatgacgcctgtgtatattggtattgagccatccgatgtcgtttggtttaatttgaggatgttctggtgggaaagattaggtagggaagtcagtgcggtttcagcaattgtcgcgctagtaatattatgggctttcccagtggcttttgttggtatgatctctaatattacttccttgactaatgaagttaaatggttaaagttcatctataaattaccaaaacaactattaggtttactgacatctctggccccaactgtggcattggccgttttaatgagtttcttgccgaaatttattaggggtatggctatcactcaaggtgctccatctaagcaaaatgtggaatatttcactcaacaagcttatttcgcctttcaagttatccaagtctttttagttaccactctatcctccgccgccacttccacagtaacggaaattgttaaagagcccacgaaggctatggatctactggcttctaatctgccaaaagcttctaattttttcatgtcatacgttattctacaaggtctgtccatttcatcaggtgctcttttgcaaattgttccactaatactcttttatgttttaggtgcctttttagatggtaccgttaggaagaaatggaatcgtttttgtgggctatccagtatgcagtgggggacagcttttccagtttatacaaacttggcagttattactttctcctactccatcatttctccgttgattttattatttgctgccgtcgcgtttttcctattgtatattgcatatttatacaatttgacttatgtctatcaggaatcacccgacgcaaggggtatttattatccaagagctcttttccaaactatagttggtatctacatcggtcagatatgtctattaggtctttttgccgttggtaaaggttggggcccaatcgttttacaggtaattggaatttgtgttaccgtccttattcatttacatttgagcgctgcatttgatcatttatcaaaggttatacccgttgataccatgaaaccgttagatggtgtatcagatacaccttctttcaaaaatatttataaaggcatagaaagtacaaaggtgaagaaaaatacttttggtgcaaatattgacatggacggaatcaaagaattacctgaatttccaataaagaaatatcacaagaggagtgaatcagtcactgagcaacaagttgaaaatagcatatttagtgaaaatacattcgaatatcaattcaacccagcaaatgaagccaatgcagatgggcacgctataaatgcagaaaatttaattgaggacgtgccattattagcagatggtgatacaatgaaaattcctccggctccatggtggaagagattcttaaaacctcacatttactactcctataaggctgtaaagagcagactgccagaaatatatggtttggttgatcctgatgaaagagtcaatgatttcgatatctctcatgcttacgattatccagctgttagtgcacaatgccccgaattgtggattcctcgcgatccttttggattttccaaattgttgatttcagacgtttctggcgttgttgaaatgaacgatgaaaatgctaccatcgatgagaatttgaaatttactctgcgtgacgtaccaccaccatataatgatgttaaagacgaagcaaatggtgaagcaaatggcgaatttgacacagctagtaaggaaaataatccatttgcggacccaaagtataaggaagaagagagtcgttcggcagtctaa

SEQ ID NO: 8896 - DNA, 2862 bp, Artificial Sequence
  Description of Artificial Sequence: Synthetic polynucleotide
atgaatagtactaatagtactaatagtactacaacagctaccagtacaaacacgtctactcaacaagtcgttacttctttggtaagtaatggtactatttttggtgtttttgtcatagcgttcttgattttgcgtataaaattgaaaaggatttatgagcccaaatccagtttcaatttaattaatgaagaaaaaaagccagaaccgttaccgcagggcgtctggcaatggttaaagccgttattgaaaaaaagtgacaattttgtcattcaacaagccggtttggatggatatttctttttgaggtaccttttcatcattgcaatttactgtgctgtttccatgagttatatattccctattttgttgtccattaacgccagtaacggtaaccatgaaagcggattgaatcaattggcctatcagaacgtcaagcaccgtggtagatattttgcacatgttttctgtggatggattttcttttgggggttcctttacattatttacagagaattgtatttttacacctctatgaagcaagctgtattggcgtcccctcgttatgctaaaaaactttccagcagaaccgtgttattccagactgtccctaagcaatacttaagtgaagaagagttttctaagttgtttgatggtgtgaaaagagtctggatcgcaagaggttccggttccattgaagcaatggtcaaagcaagggacaatatggccatacaattggaaggtgctgaaacaaaatacttgaaagcagcattgaaaaaaattaagaagttaaacaaaaaaagtccgcaattatctgtctctgataatattgctgaatatgtccctgacaagaaaagaccacatcataaaattaacaaggttgctaaattcttttttggtaaaaaagttgacaccatatcctacattaaggaggagttgcccaagttaaaccaaaaggtgaaggcattacaagaagatcatgaaaattcttcccctttcaactccgtttttgtggagtttgaatcccaatatcaggcccaagttgccgctcagatcaccacataccatgctcctcttttcatgacgcctgtgtatattggtattgagccatccgatgtcgtttggtttaatttgaggatgttctggtgggaaagattaggtagggaagtcagtgcggtttctgcaattgtcgcgttggtaatattatgggctttcccagtggcttttgttggtatgatctctaatattacttccttgactaatgaagttaaatggttaaagttcatctataaattaccaaaacaattattaggtttattaacatctttggccccaactgtggcattggccgttttaatgagtttcttgccgaaatttattaggggtatggctatcactcaaggtgctccatctaagcaaaatgtggaatatttcactcaacaagcttatttcgcctttcaagttatccaagtctttttagttaccactttatcctccgccgccacttccacagtaacggaaattgttaaagagcccacgaaggctatggatttattagcttctaatttaccaaaagcttctaattttttcatgagttacgttattttacaaggtttatccatttcttctggtgctcttttgcaaattgttccattgatactcttttatgttttaggtgcctttttagatggtaccgttaggaagaaatggaatcgtttttgtgggttatccagtatgcagtgggggacagcttttccagtttatacaaacttggcagttattactttctcctactccatcatttctccgttgattttattatttgctgccgtcgcgtttttcttgttgtatattgcatatttatacaatttgacttatgtctatcaggaaagtcccgacgcaaggggtatttattatccaagagctcttttccaaactatagttggtatctacatcggtcagatatgtcttttaggtctttttgccgttggtaaaggttggggcccaatcgttttacaggtaattggaatttgtgttaccgtccttattcatttacatttgagcgctgcatttgatcatttatccaaggttatacccgttgataccatgaaaccgttagatggtgtatctgatacaccttctttcaaaaatatttataaaggcatagaaagtacaaaggtgaagaaaaatacttttggtgcaaatattgacatggacggaatcaaagaattacctgaatttccaataaagaaatatcacaagaggagtgaatctgtcactgagcaacaagttgaaaatagcatatttagtgaaaatacattcgaatatcaattcaacccagcaaatgaagccaatgcagatgggcacgctataaatgcagaaaatttaattgaggacgtgccattattagcagatggtgatacaatgaaaattcctccggctccatggtggaagagattcttaaaacctcacatttactactcctataaggctgtaaagagcagattaccagaaatatatggtttggttgatcctgatgaaagagtcaatgatttcgatatctctcatgcttacgattatccagctgttagtgcacaatgccccgaattgtggattcctcgcgatccttttggattttccaaattgttgatttctgacgtttctggcgttgttgaaatgaacgatgaaaatgctaccatcgatgagaatttgaaatttactttacgtgacgtaccaccaccatataatgatgttaaagacgaagcaaatggtgaagcaaatggcgaatttgacacagctagtaaggaaaataatccatttgcggacccaaagtataaggaagaagagagtcgttctgcagtctga

SEQ ID NO: 8897 - DNA, 933 bp, Saccharomyces cerevisiae
atgaatttattacgaatgaatgctttaacaagcaaggctaggtcaatagaacggttaaaacaaacattgaatattttatccattcgtaatcatagacaattcagcaccattcaacaaggcagcaaatataccctcgggtttaagaaatacttgacattattaaatggagaggttggttcttttttccatgatgtccctttagatttgaatgaacatgaaaagaccgtaaatatgattgttgaagtaccaagatggacaactggaaaatttgaaatatccaaagaacttaggttcaatccgatcgttcaagatacgaagaatggcaagcttaggttcgtgaacaatatctttccctatcacggctatatacacaactatggtgctattccccaaacatgggaagatcccacaattgaacataaactggggaagtgtgacgtggctttgaaaggtgacaatgatcctcttgattgttgcgaaatcggttcggatgttttggaaatgggttccattaaaaaggtcaaggtattaggatcactcgctttaattgatgatggagaattggattggaaggtcatagtgatcgacgtaaatgatcctttatcctctaaaatagatgacttggaaaaaattgaggagtactttcctgggattctagatacgactagggagtggtttagaaagtataaagttccagcagggaagccattaaatagtttcgcctttcatgaacagtatcaaaattccaataaaaccatccaaactataaagaaatgtcacaattcgtggaaaaacctcatttcaggatcactccaggagaagtatgacaacctgcctaatacagaaagggctggtaatggtgtcacacttgaagatagtgttaaacccccttctcaaataccgcctgaggtgcaaaaatggtattacgtttaa

SEQ ID NO: 8898 - DNA, 933 bp, Artificial Sequence
  Description of Artificial Sequence: Synthetic polynucleotide
atgaatttattaagaatgaatgctttaacaagcaaggctaggtctatagaaagattaaaacaaacattgaatattttatccattcgtaatcatagacaattcagcaccattcaacaaggcagcaaatataccctcgggtttaagaaatacttgacattattaaatggagaggttggttcttttttccatgatgtccctttagatttgaatgaacatgaaaagaccgtaaatatgattgttgaagtaccaagatggacaactggaaaatttgaaatatccaaagaacttaggttcaatccgatcgttcaagatacgaagaatggcaagcttaggttcgtgaacaatatctttccctatcacggctatatacacaactatggtgctattccccaaacatgggaagatcccacaattgaacataaattggggaagtgtgacgtggctttgaaaggtgacaatgatcctcttgattgttgcgaaatcggttctgatgttttggaaatgggttccattaaaaaggtcaaggtattaggatctctcgctttaattgatgatggagaattggattggaaggtcatagtgatcgacgtaaatgatcctttatcctctaaaatagatgacttggaaaaaattgaggagtactttcctgggattttagatacgactagggagtggtttagaaagtataaagttccagcagggaagccattaaatagtttcgcctttcatgaacagtatcaaaattccaataaaaccatccaaactataaagaaatgtcacaattcttggaaaaacctcatttctggatctctccaggagaagtatgacaacttgcctaatacagaaagggctggtaatggtgtcacacttgaagatagtgttaaacccccttctcaaataccgcctgaggtgcaaaaatggtattacgtttga

SEQ ID NO: 8899 - DNA, 1335 bp, Saccharomyces cerevisiae
atggagtatggacatcacgctagaccagattcaaaacgaccattggatgaaggatcaccagcagccgcaggattaacttctaagaaggcgaacgaagctttaacaagaaatagagaattaacaactgtattagtcaaaaatttgcctaagagctataatcaaaacaaagtctataagtacttcaaacattgtgggcccattatacacgttgatgttgcggattcgctgaagaagaactttcgttttgcacgtattgaatttgccaggtatgatggagccctcgctgcaataaccaaaacacacaaagttgtaggtcagaatgaaattatagtatctcatttaacagaatgcacattatggatgacgaatttccccccaagttatactcaaagaaatattagagatctattgcaagatattaacgttgttgcactcagtatacggcttcccagtttacgattcaatacaagcagaaggttcgcttacatcgatgttacttctaaagaggatgcaagatattgtgtagaaaaattgaatggactcaaaatagaaggttatactttagttactaaagtttccaatccgctggaaaagtcgaaacggaccgattctgccacactagaggggcgagagattatgatacgaaacctaagtacagaattgctcgacgaaaaccttctgagggaatcttttgagggatttggttccattgaaaaaatcaacatacctgctggacagaaagagcacagtttcaataactgttgtgcatttatggtttttgaaaataaagattctgctgaaagggcacttcaaatgaatagaagtttgttaggtaatagggaaatttccgtttccttggctgataaaaaaccattcttagaaagaaacgaagtcaaaagacttctcgcatcgcgtaacagcaaagaactagaaacactaatatgcttatttccactttcagataaggtgtcaccaagcttaatctgccaatttcttcaggaagaaatacacatcaatgaaaaagatattaggaaaatacttctcgttagcgacttcaatggcgccattattatatttagagatagtaagtttgcagcaaaaatgctaatgatactaaatggatctcaatttcagggaaaggtgatacgttcaggtactattaatgacatgaaaagatattataacaatcaacagaatcacagcatgaaacacgtcaaacctagttgtataaacatgatggaaaaaggaccaaatcttcaagtaaagaaaaaaattcctgacaaacaagagcagatgtccaacgacgattttcgcaagatgtttctaggtgagtag

SEQ ID NO: 8900 - DNA, 1335 bp, Artificial Sequence
  Description of Artificial Sequence: Synthetic polynucleotide
atggagtatggacatcacgctagaccagattctaaaaggccattggatgaaggatctccagcagccgcaggattaacttctaagaaggcgaacgaagctttaacaagaaatagagaattaacaactgtattagtcaaaaatttgcctaagagctataatcaaaacaaagtctataagtacttcaaacattgtgggcccattatacacgttgatgttgcggattctttgaagaagaactttcgttttgcacgtattgaatttgccaggtatgatggagccctcgctgcaataaccaaaacacacaaagttgtaggtcagaatgaaattatagtatctcatttaacagaatgcacattatggatgacgaatttccccccaagttatactcaaagaaatattagagatttattgcaagatattaacgttgttgcactcagtataaggcttcccagtttaagattcaatacaagcagaaggttcgcttacatcgatgttacttctaaagaggatgcaagatattgtgtagaaaaattgaatggactcaaaatagaaggttatactttagttactaaagtttccaatccgttggaaaagagtaaaagaaccgattctgccacattagaggggcgtgagattatgataagaaacttgagtacagaattgctcgacgaaaaccttttgagggaatcttttgagggatttggttccattgaaaaaatcaacatacctgctggacagaaagagcacagtttcaataactgttgtgcatttatggtttttgaaaataaagattctgctgaaagggcacttcaaatgaatagaagtttgttaggtaatagggaaatttccgtttccttggctgataaaaaaccattcttagaaagaaacgaagtcaaaagacttctcgcatctcgtaacagcaaagaattggaaacattaatatgcttatttccactttctgataaggtgtctccaagcttaatctgccaatttcttcaggaagaaatacacatcaatgaaaaagatattaggaaaatacttctcgttagcgacttcaatggcgccattattatatttagagatagtaagtttgcagcaaaaatgttaatgatattgaatggatctcaatttcagggaaaggtgatacgttctggtactattaatgacatgaaaagatattataacaatcaacagaatcacagcatgaaacacgtcaaacctagttgtataaacatgatggaaaaaggaccaaatcttcaagtaaagaaaaaaattcctgacaaacaagagcagatgtccaacgacgattttcgcaagatgtttttaggtgagtga

SEQ ID NO: 8901 - DNA, 636 bp, Saccharomyces cerevisiae
atggatagcaaagaatatctgatatcatatggttggaaagaaggagaagcgtttagagaaggtggtttgaaaagacccatactggtaaagcacaagagagataagaagggattgggtaatgctcctggcgggaatgatggcgaagcatggtgggaaaggctatttgatggacatctgaagaacctggatgtaagcactgattcgaataatggcagtattaaatttactcaaaatgaggcagttgctactgctgtatcgaaaagtagctcacctctatacaggtggtttgtaaagggagaagggctgaaaggaaccattactaatcttggtaaaaaggaggaagccagctttgttgtatctagtgcaagttcgagtaaagggaagaagagaagaaggcgtgatgaagatgataacaaggtcaagagaaaaaaattgaaaaaagataaaaagactagtaacgacagtgagagtaagaagaagaagaagaagaaaagcaagaaggagagtaaaaaaggaaagaaaagtaagcatagcagcgatgaaggtgataaatcgaagcataaaaaatccaaaaagtcaaaaaaacataaaaaggaagaaagttcagcaagaagagatagaaaggagcatatatga

SEQ ID NO: 8902 - DNA, 636 bp, Artificial Sequence
  Description of Artificial Sequence: Synthetic polynucleotide
atggatagcaaagaatatttgatatcttatggttggaaagaaggagaagcgtttagagaaggtggtttgaaaagacccatattagtaaagcacaagagagataagaagggattgggtaatgctcctggcgggaatgatggcgaagcatggtgggaaaggttatttgatggacatttgaagaaccttgatgtaagcactgattctaataatggcagtattaaatttactcaaaatgaggcagttgctactgctgtatccaaaagtagctctcctttgtacaggtggtttgtaaagggagaagggttgaaaggaaccattactaatcttggtaaaaaggaggaagccagctttgttgtatctagtgcaagtagtagtaaagggaagaagagaagaaggcgtgatgaagatgataacaaggtcaagagaaaaaaattgaaaaaagataaaaagactagtaacgacagtgagagtaagaagaagaagaagaagaaaagcaagaaggagagtaaaaaaggaaagaaaagtaagcatagcagcgatgaaggtgataaatccaagcataaaaaatccaaaaagagtaaaaaacataaaaaggaagaaagttctgcaagaagagatagaaaggagcatatatga

SEQ ID NO: 8903 - DNA, 1098 bp, Saccharomyces cerevisiae
atgagtgatcttgacgaagaaagtcaaattgaaactcagatcgatgctcctatcgaagatattatacgaggatctgagcttaccactacaaccgctgataaagagactttgaaatctgcaaatgaattattagattctctagaacactcgcacagagtcgacctttcgttgcatttatactctgcgtacctcttgaaaagactattgtataaggcaaatgaaaaaaaacatttttatgaagtaaaccagtttgtgaagacccaaattaaggataactggacgagctggcctaatcccaatacaattattgaccctagtgtagacaaattgtatgaagatataccggaaggtattgcaaatgtaagcgtacagccgggggagatctcaaatagggctttaatgcacgcctctgatatgatgagggttgagctggatgctcaatggcaaaaatttctctctaagtctgccttggaccatgatgtaactctagatgtggatgaattgaacattccaaacgaaatatcccggaatatcttagttaaactggacagcttattcgaagggttgcatgataaaatagccaaagagaacgaattcgatgtaaggcaagataagcattctaataatataagggcgaatcagatagacgacgagcccatgcaggccaatcgacgaattaaatacacatatcatgacttggtttcaagaggttgtgaaatgaacgaggatatgacggatatctacatgaaatcattagagctatataacgatatcccagaaaagtataaaaagagaaaattcagactgcccaaacaaattctaaaaaagtatcaccagccaaaaaagaccagttcatacttaaaggagctattaagtaaaacaagagaagatttcatacctgtggaaaagttattgaaggataaacggttgacatcaaaggacaaatccaagctacaacgcttaaatcgtgaagagacggaagatgctctaaacaaaagaacattttttcaggtaaagggctacttagaggatgagaatgagatctctgattacgagttggacgactgcctcatagaactgcctaatgggaacatatga

SEQ ID NO: 8904 - DNA, 1098 bp, Artificial Sequence
  Description of Artificial Sequence: Synthetic polynucleotide
atgagtgatcttgacgaagaaagtcaaattgaaactcagatcgatgctcctatcgaagatattataagaggatctgagcttaccactacaaccgctgataaagagactttgaaatctgcaaatgaattattagattctttggaacactctcacagagtcgacctttctttgcatttatactctgcgtacctcttgaaaagattattgtataaggcaaatgaaaaaaaacatttttatgaagtaaaccagtttgtgaagacccaaattaaggataactggacgagctggcctaatcccaatacaattattgaccctagtgtagacaaattgtatgaagatataccggaaggtattgcaaatgtaagcgtacagccgggggagatctctaatagggctttaatgcacgcctctgatatgatgagggttgagttagatgctcaatggcaaaaatttctctctaagtctgccttggaccatgatgtaactttagatgtggatgaattgaacattccaaacgaaatatccagaaatatcttagttaaattagacagcttattcgaagggttgcatgataaaatagccaaagagaacgaattcgatgtaaggcaagataagcattctaataatataagggcgaatcagatagacgacgagcccatgcaggccaatagaagaattaaatacacatatcatgacttggtttctagaggttgtgaaatgaacgaggatatgacggatatctacatgaaatctttagagttgtataacgatatcccagaaaagtataaaaagagaaaattcagattacccaaacaaattttgaaaaagtatcaccagccaaaaaagaccagtagttacttaaaggagttattaagtaaaacaagagaagatttcatacctgtggaaaagttattgaaggataaaagattgacatccaaggacaaatccaagttacaacgcttaaatcgtgaagagacggaagatgctttgaacaaaagaacattttttcaggtaaagggctacttagaggatgagaatgagatctctgattacgagttggacgactgcctcatagaattacctaatgggaacatatga

SEQ ID NO: 8905 - DNA, 684 bp, Saccharomyces cerevisiae
atgtctgcatctactacaagtttagaggaatatcaaaaaactttccttgaactgggattagaatgcaaagcactaagatttgggtcattcaagctgaattcaggcaggcagtcgccatattttttcaatcttagtttgttcaattctggaaagctgttggcaaaccttgccaccgcgtatgcaactgctatcattcaatcggagcttaaattcgatgttattttcggacctgcttacaaagggatccctttggctgctattgtatgcgttaaactagcagaaatcgggggcactaaatttcaaggtattcaatatgcttttaatagaaagaaagttaaagaccacggcgaaggtggtattattgttggagcatcgcttgaagacaagagggtgttgattatcgacgatgtcatgactgcaggaactgcaatcaatgaagcatttgagataatcagtattgctcaaggtagggtagtgggttgtattgttgctttagataggcaagaagtgattcatgaatctgatccggaaagaacaagtgctacccaatctgtttcaaagagatacaacgttcctgtgctaagtattgtatcactgactcaagtggtacaatttatgggaaatagactatcaccagagcaaaaatcagcgattgaaaactaccgtaaggcctatggtatatga

SEQ ID NO: 8906 - DNA, 684 bp, Artificial Sequence
  Description of Artificial Sequence: Synthetic polynucleotide
atgtctgcatctactacaagtttagaggaatatcaaaaaactttccttgaattaggattagaatgcaaagcattgagatttgggtctttcaagttgaatagtggcaggcagtctccatattttttcaatcttagtttgttcaattctggaaagttgttggcaaaccttgccaccgcgtatgcaactgctatcattcaaagtgagcttaaattcgatgttattttcggacctgcttacaaagggatccctttggctgctattgtatgcgttaaattggcagaaatcgggggcactaaatttcaaggtattcaatatgcttttaatagaaagaaagttaaagaccacggcgaaggtggtattattgttggagcatctcttgaagacaagagggtgttgattatcgacgatgtcatgactgcaggaactgcaatcaatgaagcatttgagataatcagtattgctcaaggtagggtagtgggttgtattgttgctttagataggcaagaagtgattcatgaatctgatccggaaagaacaagtgctacccaatctgtttccaagagatacaacgttcctgtgttgagtattgtatctttgactcaagtggtacaatttatgggaaatagattatctccagagcaaaaatctgcgattgaaaactaccgtaaggcctatggtatatga

SEQ ID NO: 8907 - DNA, 1155 bp, Saccharomyces cerevisiae
atgtcgactaatacttccaagactttggaactgttttcaaaaaagacggtacaagaacacaatactgccaatgactgctgggtcacttatcaaaacagaaagatttatgacgtgaccaggtttttgagcgaacaccctggtggtgacgagtccatcttggactatgctggtaaggacattactgagatcatgaaagactcagatgtgcatgaacacagcgactccgcgtatgaaatccttgaggacgaatatttgattggttacttggcaactgacgaagaggcagcgagattgttgactaacaagaaccataaggttgaagtgcagttgtcagctgacggtactgagtttgactccactacttttgtaaaggagttgcccgccgaggagaaactaagtattgctacggactacagtaacgactacaaaaagcataaatttttggatctgaaccgtcctttgctgatgcagattctgcgtagtgatttcaagaaagatttttacgttgaccaaatccatagaccaagacattacggtaaggggtctgccccgctatttggtaatttcttggaaccattaactaaaacagcttggtgggttgttccagttgcttggttgcctgtagttgtgtaccacatgggtgttgctttgaagaacatgaaccagctatttgcatgtttcttgttctgtgtcggtgtctttgtttggactttgattgaatacggtcttcaccgtttcctatttcatttcgatgattggttacctgaaagtaacatcgcattcgccacacattttctactacatggttgccatcattacttgcccatggacaagtaccgtttagttatgccacctactctgttcgtcatcctttgtgctccattttacaagttggtatttgctctgctgccactttattgggcttacgctggttttgctggcggtcttttcggttatgtctgttatgacgaatgtcatttcttcttgcaccactctaaattgcctcccttcatgcgtaagttgaaaaaatatcacctggaacatcattataaaaactaccaactgggatttggcgtcacatcctggttttgggacgaagtttttggcacctacttaggccccgatgccccattgtccaaaatgaaatatgaataa

SEQ ID NO: 8908 - DNA, 1155 bp, Artificial Sequence
  Description of Artificial Sequence: Synthetic polynucleotide
atgtctactaatacttccaagactttggaattattttccaaaaagacggtacaagaacacaatactgccaatgactgctgggtcacttatcaaaacagaaagatttatgacgtgaccaggtttttgagcgaacaccctggtggtgacgagtccatcttggactatgctggtaaggacattactgagatcatgaaagacagtgatgtgcatgaacacagcgactccgcgtatgaaatccttgaggacgaatatttgattggttacttggcaactgacgaagaggcagcgagattgttgactaacaagaaccataaggttgaagtgcagttgtctgctgacggtactgagtttgactccactacttttgtaaaggagttgcccgccgaggagaaattaagtattgctacggactacagtaacgactacaaaaagcataaatttttggatttgaaccgtcctttgttgatgcagattttgcgtagtgatttcaagaaagatttttacgttgaccaaatccatagaccaagacattacggtaaggggtctgccccgttgtttggtaatttcttggaaccattaactaaaacagcttggtgggttgttccagttgcttggttgcctgtagttgtgtaccacatgggtgttgctttgaagaacatgaaccagttatttgcatgtttcttgttctgtgtcggtgtctttgtttggactttgattgaatacggtcttcaccgtttcttatttcatttcgatgattggttacctgaaagtaacatcgcattcgccacacattttttattacatggttgccatcattacttgcccatggacaagtaccgtttagttatgccacctactttattcgtcatcctttgtgctccattttacaagttggtatttgctttattaccactttattgggcttacgctggttttgctggcggtcttttcggttatgtctgttatgacgaatgtcatttcttcttgcaccactctaaattgcctcccttcatgcgtaagttgaaaaaatatcacttggaacatcattataaaaactaccaattaggatttggcgtcacatcctggttttgggacgaagtttttggcacctacttaggccccgatgccccattgtccaaaatgaaatatgaatga

SEQ ID NO: 8909 - DNA, 108 bp, Saccharomyces cerevisiae
atgagaagtttggtgtttgtccaactttccctgttgtcctgggaaatattctgtggggaacgtagctttgtgagcatgaaagctatcttttcgtgtatgtacgtgtga

SEQ ID NO: 8910 - DNA, 108 bp, Artificial Sequence
  Description of Artificial Sequence: Synthetic polynucleotide
atgagaagtttggtgtttgtccaactttccttattgtcctgggaaatattctgtggggaacgtagctttgtgagcatgaaagctatcttttcttgtatgtacgtgtga

SEQ ID NO: 8911 - DNA, 2748 bp, Saccharomyces cerevisiae
atgtccaatagagataacgagagcatgctgcgtactacatcaagcgataaggcgatcgctagtcaaagggataaacggaagtctgaagttttgattgctgcacagtcccttgacaatgaaatccgcagcgtaaaaaacctaaaaagattgtcgattgggtcaatggatttacttattgatccagaattagatataaaattcggtggggaatctagtgggagacgatcatggtctggcacgacatccagttctgcgtcaatgccaagtgacacaaccaccgttaataacacacgatatagcgatccaactccgctagagaacttgcatgggaggggtaactcagggatagaatcctccaataagactaaacaaggtaactacttaggtataaaaaaaggtgttcactctccatccaggaaattaaatgctaacgtattaaagaaaaacttattatgggttcccgccaatcaacaccctaacgttaagcctgataatttcctagagcttgtacaagatactttacaaaatatacaactaagcgacaatggtgaagataatgatgggaatagcaatgaaaataacgatattgaggataatggggaggataaagaatcacaatcatatgaaaataaggagaacaacactatcaacttgaacagggggctgtcaaggcatggaaacgcgtcactaatacgaaggccttcaacattgcggaggtcatatacagagtttgatgataacgaagatgacgataataagggagacagtgcctctgaaacagtaaataaagtcgaagaaagaatctccaaaataaaagagagaccagtgtcgttaagagatataactgaagaactgacaaagatctcaaatagtgcaggactaaccgacaatgatgccattacattagccagaactcttagtatggctggttcatattcagataaaaaagatcaaccacaaccggaagggcattatgatgaaggagatattggtttttcaacttcacaagcgaatactttggatgatggtgaatttgcctccaatatgcccatcaataataccatgacatggcctgaacgatcgtcactgagaaggagtagattcaacacttatcgaatcaggtcacaagagcaagaaaaagaagtagaacaaagtgtggatgaaatgaaaaacgacgacgaagaacgtctaaaattgaccaagaatacaataaaggtcgaaatagatccgcacaaatccccttttagacagcaagatgaggattctgagaatatgagttcgcctgggtcaattggtgattttcaagacatttataatcattacagacagtctagtggcgagtgggaacaagaaatgggaatagagaaagaagccgaagaggtacccgtcaaggttcgaaatgacacagtagaacaagacttagagttaagagagggaacaacagacatggtaaagccaagcgcaacggatgacaacaaagaaacgaagcgacatcgtcgaagaaacggatggacatggttgaacaataaaatgagcagagaagacgataacgaagaaaaccaaggggacgatgaaaatgaagaaaacgtggattcacaaagaatggagctcgacaattccaaaaaacattatatttctctatttaatggcggtgagaagacggaggtgtcaaataaagaagaaatgaacaattcaagtacttccaccgccacatcacagacaagacagaaaatcgagaaaacttttgcgaacctattcagaagaaagccacaccacaagcatgatgcatcatcatcaccctcgtcgtcaccatcatcgtcaccatcaataccaaataacgatgccgtgcacgttcgcgtgaggaaaagcaaaaagcttggtaacaaaagtggaagggagccggttgaacccattgtgttgcgcaatcgccctcgtcctcaccgtcaccatcacagccgtcatggttcccaaaaaataagcgtaaaaacccttaaagattctcagccgcagcagcagataccattacaaccacaattggaaggcgcaatagagatagaaaagaaagaggaaagcgattccgagagcttgccccaactacagccggccgttagtgtaagtagtaccaaaagtaactctagagacagagaagaagaggaggcaaagaaaaagaacaagaagaggagcaatacgacagaaatttccaaccaacaacactccaaacacgtccaaaaggagaataccgatgagcaaaaagctcaactacaagctccagctcaagaacaagtccaaacttcagtcccagttcaagcttcagccccagtccaaaattcagccccagtccaaacttcagccccagttgaagcttcagctcaaactcaggctccagcggcaccaccattgaaacatacctccatattgcccccaagaaagcttacatttgcagacgtcaaaaaacctgacaaaccaaactccccggttcaattcacagacagtgcctttgggttcccactgcctttgctgacagtgtctacggttatcatgttcgaccaccgtctaccaattaacgtcgaaagggccatataccggctgagtcacttgaaattgagcaattcgaagaggggactgcgcgagcaggtattactaagtaacttcatgtatgcttatctgaacttggttaatcacactctgtacatggagcaggtagcccacgacaaagaacaacaacaacaacaacaacaacaaccctga

SEQ ID NO: 8912 - DNA, 2748 bp, Artificial Sequence
  Description of Artificial Sequence: Synthetic polynucleotide
atgtccaatagagataacgagagcatgcttcgtactacatctagcgataaggcgatcgctagtcaaagggataaaagaaagtctgaagttttgattgctgcacagtcccttgacaatgaaatccgcagcgtaaaaaacttgaaaagattgtctattgggtccatggatttacttattgatccagaattagatataaaattcggtggggaatctagtgggagaagaagttggtctggcacgacatccagttctgcgtccatgccaagtgacacaaccaccgttaataacacaagatatagcgatccaactccgttagagaacttgcatgggaggggtaactctgggatagaatcctccaataagactaaacaaggtaactacttaggtataaaaaaaggtgttcactctccatccaggaaattaaatgctaacgtattaaagaaaaacttattatgggttcccgccaatcaacaccctaacgttaagcctgataatttcttggagcttgtacaagatactttacaaaatatacaattgagcgacaatggtgaagataatgatgggaatagcaatgaaaataacgatattgaggataatggggaggataaagaatctcaaagttatgaaaataaggagaacaacactatcaacttgaacagggggctttctaggcatggaaacgcgtctttgataagaaggccttctacattgagaaggagttatacagagtttgatgataacgaagatgacgataataagggagacagtgcctctgaaacagtaaataaagtcgaagaaagaatctccaaaataaaagagagaccagtgtctttaagagatataactgaagaattaacaaagatctctaatagtgcaggattaaccgacaatgatgccattacattagccagaactcttagtatggctggttcttattctgataaaaaagatcaaccacaaccggaagggcattatgatgaaggagatattggtttttccacttctcaagcgaatactttggatgatggtgaatttgcctccaatatgcccatcaataataccatgacatggcctgaaagaagttctttgagaaggagtagattcaacacttatagaatcaggtctcaagagcaagaaaaagaagtagaacaaagtgtggatgaaatgaaaaacgacgacgaagaacgtttgaaattgaccaagaatacaataaaggtcgaaatagatccgcacaaatccccttttagacagcaagatgaggattctgagaatatgagtagccctgggtctattggtgattttcaagacatttataatcattacagacagtctagtggcgagtgggaacaagaaatgggaatagagaaagaagccgaagaggtacccgtcaaggttagaaatgacacagtagaacaagacttagagttaagagagggaacaacagacatggtaaagccaagcgcaacggatgacaacaaagaaacgaagagacatcgtagaagaaacggatggacatggttgaacaataaaatgagcagagaagacgataacgaagaaaaccaaggggacgatgaaaatgaagaaaacgtggattctcaaagaatggagctcgacaattccaaaaaacattatatttctttatttaatggcggtgagaagacggaggtgagtaataaagaagaaatgaacaatagtagtacttccaccgccacatctcagacaagacagaaaatcgagaaaacttttgcgaacttgttcagaagaaagccacaccacaagcatgatgcatcttcttctccctcttcttctccatcttcttctccaagtataccaaataacgatgccgtgcacgttcgcgtgaggaaaagcaaaaagcttggtaacaaaagtggaagggagccggttgaacccattgtgttgcgcaatcgccctcgtcctcaccgtcaccatcacagccgtcatggttcccaaaaaataagcgtaaaaacccttaaagattctcagccgcagcagcagataccattacaaccacaattggaaggcgcaatagagatagaaaagaaagaggaaagcgattccgagagcttgccccaattgcagccggccgttagtgtaagtagtaccaaaagtaactctagagacagagaagaagaggaggcaaagaaaaagaacaagaagaggagcaatacgacagaaatttccaaccaacaacactccaaacacgtccaaaaggagaataccgatgagcaaaaagctcaattacaagctccagctcaagaacaagtccaaactagtgtcccagttcaagcttctgccccagtccaaaattctgccccagtccaaacttctgccccagttgaagcttctgctcaaactcaggctccagcggcaccaccattgaaacatacctccatattgcccccaagaaagcttacatttgcagacgtcaaaaaacctgacaaaccaaactccccggttcaattcacagacagtgcctttgggttcccattgcctttgttgacagtgtctacggttatcatgttcgaccaccgtttgccaattaacgtcgaaagggccatatacagattaagtcacttgaaattgagcaattctaagaggggattacgcgagcaggtattattaagtaacttcatgtatgcttatttgaacttggttaatcacactttgtacatggagcaggtagcccacgacaaagaacaacaacaacaacaacaacaacaaccctga

SEQ ID NO: 8913 - DNA, 948 bp, Saccharomyces cerevisiae
atgctacaattctcaacatttctagtgctcctatacatctccatatcctatgtgctaccgctatatgcaacttcacaaccagaagggtctaaacgagataatcctcgaacgattaaatctcgcatgcaaaaacttacaattatgctaatttccaacctttttttggtgccttttttacaatctcaattatctagtaccacttcacatataagtttcaaggacgcatttttaggcttaggtattatcccaggttattacgctgcattgccaaacccttggcaattcagccagttcgtgaaagacttaacgaaatgtgttgcgatgttattgaccttatattgtggacccgttttagattttgtattatatcatttattaaatccaaagagctctatacttgaagatttttaccatgaattcctgaatatttggagtttcaggaattttatatttgcaccaataactgaggaaatattttacacgtcaatgcttttgactacgtacttaaacctaataccgcattcgcaactaagctatcaacagttattttggcaaccatcgcttttttttggacttgcgcacgcacaccatgcttatgagcaattacaggaaggctccatgacaactgtttccattctgctgacaacatgcttccaaattttatacacaacactttttggagggttaaccaagtttgtattcgtaagaacaggcgggaacctatggtgctgcataatcctgcatgccctttgcaatatcatggggtttcctggtccttcaagattgaatttacatttcacagtagtagacaagaaagctggacgcatttccaaattggtctcaatctggaataagtgctacttcgcactgctggtccttggattaatatccctgaaggataccttacaaactctggtaggaactcctggttatagaataaccctttag

SEQ ID NO: 8914 - DNA, 948 bp, Artificial Sequence
  Description of Artificial Sequence: Synthetic polynucleotide
atgttacaattcagtacatttttagtgctcttatacatctccatatcctatgtgttgccgttatatgcaacttctcaaccagaagggtctaaaagagataatcctcgcacgattaaatctcgcatgcaaaaacttacaattatgttgatttccaacctttttttggtgccttttttacaatctcaattatctagtaccacttctcatataagtttcaaggacgcatttttaggcttaggtattatcccaggttattacgctgcattgccaaacccttggcaattcagccagttcgtgaaagacttaacgaaatgtgttgcgatgttattgaccttatattgtggacccgttttagattttgtattatatcatttattaaatccaaagagctctatacttgaagatttttaccatgaattcttgaatatttggagtttcaggaattttatatttgcaccaataactgaggaaatattttacacgtctatgcttttgactacgtacttaaacttgataccgcattctcaattgagctatcaacagttattttggcaaccaagtcttttttttggacttgcgcacgcacaccatgcttatgagcaattacaggaaggctccatgacaactgtttccattttattaacaacatgcttccaaattttatacacaacactttttggagggttaaccaagtttgtattcgtaagaacaggcgggaacctttggtgctgcataatcttgcatgccctttgcaatatcatggggtttcctggtccttccagattgaatttacatttcacagtagtagacaagaaagctggacgcatttccaaattggtctccatctggaataagtgctacttcgcattattggtccttggattaatatccttgaaggataccttacaaactttggtaggaactcctggttatagaataaccctttga

SEQ ID NO: 8915 - DNA, 2931 bp, Saccharomyces cerevisiae
atggccaaagatttgaacgattcggggtttccaccgaagaggaagcctttgctgcgtcctcaacgatctgattttaccgcaaatagttcgacaactatgaacgttaatgcaaacacaagggggcgtggtaggcagaaacaagagggtggtaaaggcagttcgaggtcaccgtcgttacactctccaaaatcatggataagaagcgcgtctgctacggggatccttggactaagacgtcccgaactagcacattctcattcgcatgctccttccaccggaacgcctgctggaggtaatcgttctcctttgagaagatcaactgcaaatgcgacccccgtcgagaccggaaggtccttgaccgacggagatatcaacaatgttgttgatgtactgccctcatttgagatgtacaataccctgcataggcacattccgcagggcaacgtcgatccagataggcatgatttcccaccttcataccaagaggccaataattctactgcaacaggtgctgcgggctcgagcgctgatctctcacatcaatcattgtccactgacgcattgggtgccacacgttcttcgtcaacatcaaatttagaaaacttaattccccttcgaaccgaacatcacagtattgcagcacatcaatcaaccgctgtcgatgaagattcactggatatacctcccatacttgatgacttgaacgatacagacaacattttcatcgacaaattgtacactttaccaaaaatgtccacacccatcgaaatcaccatcaagacgacgaagcatgcacctataccacacgtgaagccggaggaggagtccattttgaaagagtatacgtcgggggatttgattcatggttttatcactattgaaaacaaatctcaagcaaacctaaagtttgaaatgttctatgtcactttagagtcttacatttccattattgataaagtaaagagtaaaagaacgattaaacggtttttaaggatggtagacttgagcgcttcttggtcatactcgaaaatagcactggggtccggtgtggacttcattcccgcagatgttgactacgatggttctgtatttgggctaaacaatagccgggttctggaacccggagtcaagtacaagaaattcttcattttcaaattgccactgcaattgctagatgtcacttgtaagcaggagcatttctctcattgtttgttacctcccagttttggtattgataaatataggaacaattgcaaatattccggtatcaaagtcaatagggtacttgggtgcggtcatttaggtacaaagggctcccccatcttaactaacgatatgtctgatgacaacctttcgatcaattacactattgatgcaaggattgtcggtaaagatcaaaaggcctctaaactgtatattatgaaggaaagagaatataatctaagagtaatcccttttggttttgacgccaatgtcgtcggagaaagaaccactatgagtcagctgaatgatatcaccaaactagtgcaggaaaggttggatgctcttagaaaaatctttcagagattagagaaaaaagaacccataacgaaccgcgacattcacggtgcagacttgagtggtaccattgatgattctattgaatcagactcccaagaaattttgcagaggaaattggaccaactgcacattaagaacagaaataactatttagtcaactataacgatttgaagttgggccacgatttggacaatggccgcagtggaaatagtggtcataataccgatacttccagagcttggggtccctttgttgaaagtgaactaaaatataaactgaaaaacaaatccaattcctcctcatttctgaacttctctcattttttaaacagcagttccagctcaatgtcctcttcctcaaatgcgggaaagaataatcatgatttaacgggaaataaagaaaggacagggctaatactagtaaaggcgaaaattccaaaacagggcctaccatattgggctccctcattattgagaaagaccaatgtttttgaatctaagagtaaacacgaccaagaaaattgggtgagattgtctgagttgattccggaagacgtaaaaaaaccattggaaaaacttgatttacaattgacttgcatagaatccgataatagcttacctcatgatccgccagaaattcaatcgattaccacagaactgatatgtataactgctaaatctgataattctatcccaataaaactcaattctgaactgttgatgaacaaagagaagctgacaagcatcaaagctttgtacgatgatttccattcaaaaatttgtgaatatgaaaccaagttcaacaagaattttcttgaattaaatgagttatataatatgaataggggagaccgtaggccaaaggaactgaaatttacagattttattacttcacagctgtttaacgatatcgaaagcatttgcaacttgaaagttagtgttcacaacttatccaacatttttaaaaaacaggtcagtaccctaaaacaacactcaaagcacgcattatctgaggattcaatatcgcacacaggtaacggtagttcatcgtcgcccagttcagcgtcattaacgccagtaacttcttcatccaagagtagtttatttttacctagcggtagctcgtctacttccctgaaatttacagaccagattgttcataaatgggttaggattgctcctttacagtacaaacgagacattaatgtgaacttggaatttaataaggacattaaggaaactttaattccaagttttgaaagctgcctatgttgtaggttttattgcgttcgagtaatgattaaatttgaaaaccatcttggcgtagcgaagattgatatccctatttctgttaggcaagtgacaaaataa

SEQ ID NO: 8916 - DNA, 2931 bp, Artificial Sequence
  Description of Artificial Sequence: Synthetic polynucleotide
atggccaaagatttgaacgattctgggtttccaccgaagaggaagcctttgttacgtcctcaaagatctgattttaccgcaaatagttctacaactatgaacgttaatgcaaacacaagggggcgtggtaggcagaaacaagagggtggtaaaggcagttctaggtctccgtctttacactctccaaaaagttggataagaagcgcgtctgctacggggatccttggattaagacgtcccgaattggcacattctcattctcatgctccttccaccggaacgcctgctggaggtaatcgttctcctttgagaagatctactgcaaatgcgacccccgtcgagaccggaaggtccttgaccgacggagatatcaacaatgttgttgatgtattgcccagttttgagatgtacaataccttacataggcacattccgcagggcaacgtcgatccagataggcatgatttcccaccttcttaccaagaggccaataattctactgcaacaggtgctgcgggcagtagcgctgatctctctcatcaatctttgtccactgacgcattgggtgccacacgttcttcttctacaagtaatttagaaaacttaattccccttagaaccgaacatcacagtattgcagcacatcaatccaccgctgtcgatgaagattctttagatatacctcccatacttgatgacttgaacgatacagacaacattttcatcgacaaattgtacactttaccaaaaatgtccacacccatcgaaatcaccatcaagacgacgaagcatgcacctataccacacgtgaagccggaggaggagtccattttgaaagagtatacgtctggggatttgattcatggttttatcactattgaaaacaaatctcaagcaaacttgaagtttgaaatgttctatgtcactttagagtcttacatttccattattgataaagtaaagagtaaaagaacgattaaaagatttttaaggatggtagacttgagcgcttcttggagttactctaaaatagcattggggtccggtgtggacttcattcccgcagatgttgactacgatggttctgtatttgggttgaacaatagcagagttttggaacccggagtcaagtacaagaaattcttcattttcaaattgccattgcaattgttggatgtcacttgtaagcaggagcatttctctcattgtttgttacctcccagttttggtattgataaatataggaacaattgcaaatattccggtatcaaagtcaatagggtacttgggtgcggtcatttaggtacaaagggctcccccatcttaactaacgatatgtctgatgacaacctttctatcaattacactattgatgcaaggattgtcggtaaagatcaaaaggcctctaaactttatattatgaaggaaagagaatataatttaagagtaatcccttttggttttgacgccaatgtcgtcggagaaagaaccactatgagtcagttgaatgatatcaccaaattagtgcaggaaaggttggatgctcttagaaaaatctttcagagattagagaaaaaagaacccataacgaaccgcgacattcacggtgcagacttgagtggtaccattgatgattctattgaaagtgactcccaagaaattttgcagaggaaattggaccaattacacattaagaacagaaataactatttagtcaactataacgatttgaagttgggccacgatttggacaatggccgcagtggaaatagtggtcataataccgatacttccagagcttggggtccctttgttgaaagtgaattgaaatataaattgaaaaacaaatccaattcctcctcttttttgaacttctctcattttttaaacagcagttccagcagtatgtcctcttcctctaatgcgggaaagaataatcatgatttaacgggaaataaagaaaggacagggttgatattagtaaaggcgaaaattccaaaacagggcttaccatattgggctccctctttattgagaaagaccaatgtttttgaatctaagagtaaacacgaccaagaaaattgggtgagattgtctgagttgattccggaagacgtaaaaaaaccattggaaaaacttgatttacaattgacttgcatagaatccgataatagcttacctcatgatccgccagaaattcaatctattaccacagaattgatatgtataactgctaaatctgataattctatcccaataaaactcaattctgaattattgatgaacaaagagaagttaacaagcatcaaagctttgtacgatgatttccattctaaaatttgtgaatatgaaaccaagttcaacaagaattttcttgaattaaatgagttatataatatgaataggggagaccgtaggccaaaggaattgaaatttacagattttattacttctcagttatttaacgatatcgaaagcatttgcaacttgaaagttagtgttcacaacttatccaacatttttaaaaaacaggtcagtaccttgaaacaacactccaagcacgcattatctgaggattctatatctcacacaggtaacggtagttcttcttctcccagttctgcgtctttaacgccagtaacttcttcttccaagagtagtttatttttacctagcggtagctcttctacttccttgaaatttacagaccagattgttcataaatgggttaggattgctcctttacagtacaaaagagacattaatgtgaacttggaatttaataaggacattaaggaaactttaattccaagttttgaaagctgcttgtgttgtaggttttattgcgttagagtaatgattaaatttgaaaaccatcttggcgtagcgaagattgatatccctatttctgttaggcaagtgacaaaatga

SEQ ID NO: 8917 - DNA, 1122 bp, Saccharomyces cerevisiae
atgtcgttgaatatacatatcaagtcaggacaagacaagtgggaagtaaatgtggcacctgaaagcacagtgttgcaattcaaggaggcgataaacaaagcgaacggtatcccggtggcaaatcagagattgatctactcgggtaagattttaaaggacgaccaaaccgtggagtcataccacattcaagacggtcacagcgtccatctggtcaagtcacaacccaaaccacaaaccgccagtgccgctggcgcaaataacgccaccgccaccggtgcagcagctggcactggcgccaccccgaacatgtcgtcaggtcaaagtgcaggcttcaatccgctggccgacttgaccagtgccagatacgctggatatttgaatatgccatctgcagacatgtttggcccggacggtggtgcattaaacaacgactcgaataaccaagacgagctgttgaggatgatggaaaaccccatcttccaatcgcaaatgaacgagatgttgagtaaccctcagatgttggactttatgatccagtccaacccgcaattgcaggccatgggtccacaagccaggcaaatgctacaaagtcccatgtttagacagatgctcaccaatcctgatatgattagacagagcatgcaattcgcaagaatgatggaccctaatgccggtatgggctctgcaggtggggctgcctctgccttccccgctcctggtggcgatgctccagaggaaggctccaacacgaacactacttcctcatccaacacagggaacaacgcagggactaatgcaggtaccaacgcaggcgctaacacagctgcaaacccatttgcgtctcttctgaaccctgcattaaacccctttgctaacgcgggaaacgctgcatccaccgggatgcccgccttcgatcctgcattgctagcgtctatgttccaaccccctgtacaagcatctcaagcagaagacaccagaccaccggaagaacgctatgaacatcaattaagacaactaaacgacatgggcttcttcgatttcgatagaaacgtcgcagccctcaggagaagcggtggctccgtccaaggcgctcttgattcactactgaacggcgatgtttaa

SEQ ID NO: 8918 - DNA, 1122 bp, Artificial Sequence
  Description of Artificial Sequence: Synthetic polynucleotide
atgtctttgaatatacatatcaagagtggacaagacaagtgggaagtaaatgtggcacctgaaagcacagtgttgcaattcaaggaggcgataaacaaagcgaacggtatcccggtggcaaatcagagattgatctactctggtaagattttaaaggacgaccaaaccgtggagagttaccacattcaagacggtcacagcgtccatttggtcaagtctcaacccaaaccacaaaccgccagtgccgctggcgcaaataacgccaccgccaccggtgcagcagctggcactggcgccaccccgaacatgtcttctggtcaaagtgcaggcttcaatccgttagccgacttgaccagtgccagatacgctggatatttgaatatgccatctgcagacatgtttggcccggacggtggtgcattaaacaacgactctaataaccaagacgagttattgaggatgatggaaaaccccatcttccaatctcaaatgaacgagatgttgagtaaccctcagatgttggactttatgatccagtccaacccgcaattgcaggccatgggtccacaagccaggcaaatgttacaaagtcccatgtttagacagatgctcaccaatcctgatatgattagacagagcatgcaattcgcaagaatgatggaccctaatgccggtatgggctctgcaggtggggctgcctctgccttccccgctcctggtggcgatgctccagaggaaggctccaacacgaacactacttcctcctccaacacagggaacaacgcagggactaatgcaggtaccaacgcaggcgctaacacagctgcaaacccatttgcgtctcttttgaaccctgcattaaacccctttgctaacgcgggaaacgctgcatccaccgggatgcccgccttcgatcctgcattgttagcgtctatgttccaaccccctgtacaagcatctcaagcagaagacaccagaccaccggaagaacgctatgaacatcaattaagacaattgaacgacatgggcttcttcgatttcgatagaaacgtcgcagccctcaggagaagcggtggctccgtccaaggcgctcttgattctttattaaacggcgatgtttga

SEQ ID NO: 8919 - DNA, 2199 bp, Saccharomyces cerevisiae
atgaccacacaaataaggtctccccaaggcttgccgtatccgattcagatcgataaactcattccaagcgtaggttcgtaccttcatgagggtgataggttgcttgtctataagttctggtatttggtggaaagggcctcagacactggtgacgatgataacgagcacgatgtttcccccggcggcagcgccggaagtaatggtgtctctccgccaaccaaacaactgcgtgaatccatagaattcttcgaaagtccctacgagggggacttgattagttggaatgtagacgtaggagatgaagtagccactgctaaccaagtgatttgcgaaataaaaaggccatgtaaccatgacatcgtgtatggcgggctatgtactcaatgcgggaaagaagtttctgcagatgccttcgatggtgtaccactagacgttgtcggggacgtggatttacagattagcgagacagaagccattagaacaggcaaggcattgaaggagcatttgcgacgggataagaaacttatcttagtggtggatttagatcaaaccatcatccattgtggcgtggaccctacgattgcagagtggaagaacgaccccaataatccgaattttgaaacattaagagacgtcaagagctttacgttggatgaggagttagtactcccacttatgtacatgaatgacgatggttctatgctgagaccgcctcccgtaagaaaatgttggtactacgtgaaggtaaggcccggtttaaaggaatttttcgctaaagtggcgcctctttttgaaatgcatatctacacaatggctacaagggcttatgccttgcaaattgccaaaatcgtggaccctacgggcgaattgtttggcgatagaattctgtcgcgtgatgaaaatgggtctctaacaactaaatcattagctaaacttttccccactgaccagtcaatggttgtagttattgacgacagaggtgatgtttggaattggtgtccaaacttgatcaaagttgttccttataacttcttcgttggtgtaggtgacattaattctaatttcttgcccaaacaatctacaggaatgctacaactagggaggaagacaagacagaagagccaagaatctcaggaactgctgacggatattatggataacgaaaaaaaactacaagaaaagatagataaagaagttaaacgccaagaagaaaaattgaaccatcaactggcgactgctgaggagcctcctgcgaacgaatccaaagaagagttgaccaagaaactagaatattcagcatctttagaagtccaacaacaaaatcgacccttggccaaactacaaaaacacctgcatgatcaaaaactactagttgatgacgatgatgaactatactacttaatgggtacgctatcaaacattcacaaaacttattatgatatgctctcacaacaaaatgagccagaaccaaatctgatggaaatcataccaagtttgaagcaaaaagtcttccaaaattgctattttgttttttcaggattaatacccctcgggaccgatattcaaaggtcggacatagtgatatggacgagtacatttggtgccacttccactccagatatagattacctgacgacacatttaatcaccaagaaccctagcacttataaagcgcgtctagcgaaaaagttcaacccacagattaaaattgttcacccagattggatatttgagtgtttggtaaattggaaaaaggtggatgaaaaaccctacacgttaatcgtggacagccccatctccgacgaggaattacaaaactttcaaacacaattacaaaaaagacaagaatatctggaggagacccaggaacaacagcatatgttgacatcacaagaaaatctaaatttattcgctgctggtacttcatggttaaacaatgacgacgatgaagatattccggacacagctagcgacgacgacgaagatgacgaccacgacgacgaaagtgatgacgaaaacaactcggaaggcattgacagaaagaggagcatcgaggacaatcatgatgatacatcacaaaagaagaccaaggcggaaccttctcaagatggtcctgtacaacataaaggagaaggggatgacaacgaagacagcgattcgcagttggaggaagagttgatggatatgctggatgattag

SEQ ID NO: 8920 - DNA, 2199 bp, Artificial Sequence
  Description of Artificial Sequence: Synthetic polynucleotide
atgaccacacaaataaggtctccccaaggcttgccgtatccgattcagatcgataaactcattccaagcgtaggttcttaccttcatgagggtgataggttgcttgtctataagttctggtatttggtggaaagggccagtgacactggtgacgatgataacgagcacgatgtttcccccggcggcagcgccggaagtaatggtgtctctccgccaaccaaacaattgcgtgaatccatagaattcttcgaaagtccctacgagggggacttgattagttggaatgtagacgtaggagatgaagtagccactgctaaccaagtgatttgcgaaataaaaaggccatgtaaccatgacatcgtgtatggcgggctttgtactcaatgcgggaaagaagtttctgcagatgccttcgatggtgtaccattggacgttgtcggggacgtggatttacagattagcgagacagaagccattagaacaggcaaggcattgaaggagcatttgaggagagataagaaacttatcttagtggtggatttagatcaaaccatcatccattgtggcgtggaccctacgattgcagagtggaagaacgaccccaataatccgaattttgaaacattaagagacgtcaagagctttacgttggatgaggagttagtactcccacttatgtacatgaatgacgatggttctatgttgagaccgcctcccgtaagaaaatgttggtactacgtgaaggtaaggcccggtttaaaggaatttttcgctaaagtggcgcctctttttgaaatgcatatctacacaatggctacaagggcttatgccttgcaaattgccaaaatcgtggaccctacgggcgaattgtttggcgatagaattttatctcgtgatgaaaatgggtctttaacaactaaatctttagctaaacttttccccactgaccagtccatggttgtagttattgacgacagaggtgatgtttggaattggtgtccaaacttgatcaaagttgttccttataacttcttcgttggtgtaggtgacattaattctaatttcttgcccaaacaatctacaggaatgttacaattagggaggaagacaagacagaagagccaagaatctcaggaattattgacggatattatggataacgaaaaaaaattacaagaaaagatagataaagaagttaaacgccaagaagaaaaattgaaccatcaattggcgactgctgaggagcctcctgcgaacgaatccaaagaagagttgaccaagaaattagaatattctgcatctttagaagtccaacaacaaaataggcccttggccaaattacaaaaacacttgcatgatcaaaaattattggttgatgacgatgatgaattatactacttaatgggtacgttatctaacattcacaaaacttattatgatatgctctctcaacaaaatgagccagaaccaaatttaatggaaatcataccaagtttgaagcaaaaagtcttccaaaattgctattttgttttttctggattaatacccctcgggaccgatattcaaaggagtgacatagtgatatggacgagtacatttggtgccacttccactccagatatagattacttgacgacacatttaatcaccaagaaccctagcacttataaagcgcgtttggcgaaaaagttcaacccacagattaaaattgttcacccagattggatatttgagtgtttggtaaattggaaaaaggtggatgaaaaaccctacacgttaatcgtggacagccccatctccgacgaggaattacaaaactttcaaacacaattacaaaaaagacaagaatatttggaggagacccaggaacaacagcatatgttgacatctcaagaaaatttgaatttattcgctgctggtacttcttggttaaacaatgacgacgatgaagatattccggacacagctagcgacgacgacgaagatgacgaccacgacgacgaaagtgatgacgaaaacaactctgaaggcattgacagaaagaggagcatcgaggacaatcatgatgatacatctcaaaagaagaccaaggcggaaccttctcaagatggtcctgtacaacataaaggagaaggggatgacaacgaagacagcgattctcagttggaggaagagttgatggatatgcttgatgattga

SEQ ID NO: 8921 - DNA, 1869 bp, Saccharomyces cerevisiae
atgttgcaaggaattttagaaaccgtaccatctgacttgaaagatccgatatcattatggtttaagcaagaccgcaacccaaaaactatagaagaggtcaccgctctctgcaaaaaatccgactggaatgagttacacaaaagatttgattctagaattcagtttggcactgctggtttaagatcgcaaatgcaagctggctttagcaggatgaatactttagtagtcatacaagcgtctcagggattggcaacttatgtaagacaacagtttccagacaatttggtagctgttgtgggacacgatcatagattccattctaaggagttcgctagagctactgctgctgcatttcttttaaaaggatttaaggtacattatttgaatcctgaccacgaatttgttcatacccctttagttccctttgcagtggataagctaaaggcctccgttggcgtaatgataacagcaagtcacaacccaaaaatggataatggatataaagtatactattccaatggatgccaaatcattccacctcacgatcatgccatctctgattccattgacgcaaatttagaaccatgggccaatgtgtgggatttcgacgatgttctaaataaggctctcaaacaagggaaattgatgtattccagagaagaaatgctgaagttatatttagaggaggtttctaaaaatctggtagaaatcaacccattaaagcttgaagtaaaagccaaaccttggttcgtttacactccaatgcatggggttggatttgacattttcagcaccatcgtaaaaaaaacactgtgcctggtagaaggtaaggattacctatgtgttcctgaacaacaaaatccagatccttctttcccaactgttggatttcctaaccctgaagaaaaaggtgctttagacattggtataaacttggctgaaaaacatgacattgacttacttgttgccaacgaccctgacgctgatagattctctgttgctgttaaagatatgcagtcaggcgaatggcgacaactaacaggtaacgaaatcggttttctttttgcattttatgaatatcagaaatataaaagtatggacaaagaatttcagcacgttcatccgttggctatgttaaattcaacagtgtcttcacaaatgataaaaaaaatggcagaaatagaagggttccattatgaggatacattaacaggatttaagtggatcggaaatcgtgccatactcttggaaaagaaaggctattacgttccttttggattcgaggaagcaataggctacatgtttccagcaatggagcatgataaggatggtatcagtgcatccattgtcttcttgcaagcctactgtaagtggaaaatagaccacaatttggacccgctaaatgtcttagaaaatggcttcaaaaaatatggcgtgttcaaagagtacaatggctattatgtcgttccaaatccaactgttacaaaagatatatttgactacatcaggaatgtctacactcctgagggcgcgtcatatccttcatctattggtgaagaaatcgaagtactttactatcgagatttaaccactggttaccaatcggataccataaatcataaacctactctacccgtcgatcctacatcacaaatgataacagtatctgctagaccaagtaacggtagtgagaatgagcatatccgcttcactattcgcgggtccggaacagaaccaaaacttaaagtatatattgaagcttgcgcaaatgaagaacaaagagcctctttcttggcgaaattgacttggaatgtgctgagacgtgaatggtttagaccagatgaaatgaatatagttacaaaattttga

SEQ ID NO: 8922 - DNA, 1869 bp, Artificial Sequence
  Description of Artificial Sequence: Synthetic polynucleotide
atgttgcaaggaattttagaaaccgtaccatctgacttgaaagatccgatatctttatggtttaagcaagaccgcaacccaaaaactatagaagaggtcaccgctctctgcaaaaaatccgactggaatgagttacacaaaagatttgattctagaattcagtttggcactgctggtttaagatctcaaatgcaagctggctttagcaggatgaatactttagtagtcatacaagcgtctcagggattggcaacttatgtaagacaacagtttccagacaatttggtagctgttgtgggacacgatcatagattccattctaaggagttcgctagagctactgctgctgcatttcttttaaaaggatttaaggtacattatttgaatcctgaccacgaatttgttcatacccctttagttccctttgcagtggataagttgaaggcctccgttggcgtaatgataacagcaagtcacaacccaaaaatggataatggatataaagtatactattccaatggatgccaaatcattccacctcacgatcatgccatctctgattccattgacgcaaatttagaaccatgggccaatgtgtgggatttcgacgatgttttgaataaggctctcaaacaagggaaattgatgtattccagagaagaaatgttgaagttatatttagaggaggtttctaaaaatttggtagaaatcaacccattaaagcttgaagtaaaagccaaaccttggttcgtttacactccaatgcatggggttggatttgacattttcagcaccatcgtaaaaaaaacattgtgcttagtagaaggtaaggattacttgtgtgttcctgaacaacaaaatccagatccttctttcccaactgttggatttcctaaccctgaagaaaaaggtgctttagacattggtataaacttggctgaaaaacatgacattgacttacttgttgccaacgaccctgacgctgatagattctctgttgctgttaaagatatgcagtctggcgaatggagacaattgacaggtaacgaaatcggttttctttttgcattttatgaatatcagaaatataaaagtatggacaaagaatttcagcacgttcatccgttggctatgttaaattctacagtgtcttctcaaatgataaaaaaaatggcagaaatagaagggttccattatgaggatacattaacaggatttaagtggatcggaaatcgtgccatactcttggaaaagaaaggctattacgttccttttggattcgaggaagcaataggctacatgtttccagcaatggagcatgataaggatggtatcagtgcatccattgtcttcttgcaagcctactgtaagtggaaaatagaccacaatttggacccgttaaatgtcttagaaaatggcttcaaaaaatatggcgtgttcaaagagtacaatggctattatgtcgttccaaatccaactgttacaaaagatatatttgactacatcaggaatgtctacactcctgagggcgcgtcttatccttcttctattggtgaagaaatcgaagtactttactatagagatttaaccactggttaccaatctgataccataaatcataaacctactttacccgtcgatcctacatctcaaatgataacagtatctgctagaccaagtaacggtagtgagaatgagcatatccgcttcactattcgcgggtccggaacagaaccaaaacttaaagtatatattgaagcttgcgcaaatgaagaacaaagagcctctttcttggcgaaattgacttggaatgtgttgagacgtgaatggtttagaccagatgaaatgaatatagttacaaaattttga

SEQ ID NO: 8923 - DNA, 1623 bp, Saccharomyces cerevisiae
atgttttcaatcttcaaaaagaaaacgagcgtgcagggcacggactctgagatagatgagaaaattacagtgaaagcaaaagataaagtagtggtttccacagaagatgaagaggtgacaacaattgtttcttcaaccaaatcaactcaagtgaccaatgactcaccatggcaggaccccacttacttcagttcctttgggaaagaattaatgttcatagcgacatgcatgttggcacagttattgaatcaagcgggccaaacacacgctctctgtataatgaacgttctttcgaaatcctttaattcagaagcaaacaatcaggcatggttgatggcatcttttcccttggctgctgggtcgttcatccttattagtgggaggttaggagatatttatggattgaagaaaatgttgatcgttggttatgtcatcgtaatcgtttggtctataatttctggtctctccaaatactctaatagcgacgcgtttttcattacgagccgtgcgttccaaggagttggaattgcgtttattttaccaaatattatggggcttgttggtcatgtttataaggtcggttcattcaggaagaacattgttattagtttcatcggcgcatgtgctccaacaggcggcatgtttggtggattattcggggggttaattgtcactgaagaccccaatcagtggccttgggtattttatgcctttggtattgcaacgtttctaagtttattaatggcatggtactccatcccaaacaacgttcccacaaatattcatgggctttcgatggattggactgggtccgcgcttgccattatcgggctgattcttttcaactttgtctggaatcaagcaccaatagttggctgggacaaaccttatatcattgttcttttgataatatctgtgatattcttggttgctttttttgtttacgaaagtaaatacgcagaggttcctcttctaccacgtgcaatgacgaagaaccgtcatatgattatgatattattggcggtattcctgggatgggggtcgtttggtatttggacattctattatgtttccttccaactaaatttgaggcattacagtcctgtttggaccggaggtacgtatttcgttttcgtaattttcggatccatggctgcattcttcgttgccttttctatcaagagattaggaccagctctactactatgtttttcactaatggcatttgacgctggttccataatgtttagtgtattgccagtggaacaaagctattggaagttgaactttgcgatgcaggctatcttatgttttggtatggacctgtccttcccggcatcatccattatattgagtgacgggcttccaatgcagtatcaaggtatggctggatcattagtaaacaccgttattaattattcagcgtctctatgtttaggtatgggaggcactgttgaacaccaaattaataaaagcggcaatgatttgttgaaaggttaccgagcagctgtatatctgggagttgggctcgcttctcttggtgttgtgattagtgtgacttacatgcttgaaaacctttggaatcgacacagaaaatctgaagatagaagtttggaggcataa

SEQ ID NO: 8924 - DNA, 1623 bp, Artificial Sequence
  Description of Artificial Sequence: Synthetic polynucleotide
atgttttctatcttcaaaaagaaaacgagcgtgcagggcacggactctgagatagatgagaaaattacagtgaaagcaaaagataaagtagtggtttccacagaagatgaagaggtgacaacaattgtttcttccaccaaatctactcaagtgaccaatgactctccatggcaggaccccacttacttcagttcctttgggaaagaattaatgttcatagcgacatgcatgttggcacagttattgaatcaagcgggccaaacacacgctctctgtataatgaacgttctttctaaatcctttaattctgaagcaaacaatcaggcatggttgatggcatcttttcccttggctgctgggtctttcatccttattagtgggaggttaggagatatttatggattgaagaaaatgttgatcgttggttatgtcatcgtaatcgtttggtctataatttctggtctctccaaatactctaatagcgacgcgtttttcattacgagccgtgcgttccaaggagttggaattgcgtttattttaccaaatattatggggcttgttggtcatgtttataaggtcggttctttcaggaagaacattgttattagtttcatcggcgcatgtgctccaacaggcggcatgtttggtggattattcggggggttaattgtcactgaagaccccaatcagtggccttgggtattttatgcctttggtattgcaacgtttttgagtttattaatggcatggtactccatcccaaacaacgttcccacaaatattcatgggctttctatggattggactgggtccgcgcttgccattatcgggttgattcttttcaactttgtctggaatcaagcaccaatagttggctgggacaaaccttatatcattgttcttttgataatatctgtgatattcttggttgctttttttgtttacgaaagtaaatacgcagaggttcctcttttaccacgtgcaatgacgaagaaccgtcatatgattatgatattattggcggtattcttgggatgggggtcttttggtatttggacattctattatgtttccttccaattgaatttgaggcattacagtcctgtttggaccggaggtacgtatttcgttttcgtaattttcggatccatggctgcattcttcgttgccttttctatcaagagattaggaccagctttgttattatgtttttctttgatggcatttgacgctggttccataatgtttagtgtattgccagtggaacaaagctattggaagttgaactttgcgatgcaggctatcttatgttttggtatggacttatccttcccggcatcttccattatattgagtgacgggcttccaatgcagtatcaaggtatggctggatctttagtaaacaccgttattaattattctgcgtctttatgtttaggtatgggaggcactgttgaacaccaaattaataaaagcggcaatgatttgttgaaaggttacagagcagctgtatatttgggagttgggctcgcttctcttggtgttgtgattagtgtgacttacatgcttgaaaacctttggaatagacacagaaaatctgaagatagaagtttggaggcatga

SEQ ID NO: 8925 - DNA, 4302 bp, Saccharomyces cerevisiae
atggcaaataataattctgatcgacaaggtttggaacccagagtcattagaactctgggttcacaagcgcttagcggtcctagcatatctaatagaacttcaagttcggaggcaaaccctcatttttccaagaacgtgaaggaagcaatgatcaagacagcttctccgactcctttatctacacctatttacaggatagctcaagcttgtgacaggtgtcgatctaagaaaacaaggtgcgatggaaaaagaccacagtgttcgcagtgtgctgctgtcggatttgaatgcagaataagcgataaattactgaggaaagcgtatccaaaagggtacacagaaagcctggaagaaagagtacgcgaactggaggcagagaataagcgtttgctagctttgtgtgatatcaaagaacagcaaataagccttgtttcacagtcgcgaccacagacatcaacggataataccataaatggcaatttcaaacatgatttgaaagatgctccattgaatctgtcttctacaaatatctatttattaaatcaaacggttaataagcagctacaaaatggcaaaatggatggtgataatagcggttctgcaatgagtccattgggggcaccacctccaccgccacacaaagaccatctttgtgacggcgtttcctgtacaaatcatttacacgtcaagcctacttctacgagtttaaacgatccaaccgctatatcttttgaacaggacgaggcacctggtcttcctgcggtaaaggcattaaaatcaatgacgactcatcaacgtagcactcaattggcaactttagtttctttatccatcccaagatctactgaagaaattctgtttattcctcagcttttaactaggataagacaaatatttggtttcaactcaaagcaatgtttgtatacggtttcattattatcttcattgaaaaatagattgccagcaccacggcttctagcaccttcaacatcaaccaagttaaaggagaaagatgaagataaaaaacttgatgatgattcggcttttgtgaaaaggtttcaaagcacaaacctctccgagtttgtcgatttgaaaaagtttttaatttctttgaaatttaacattaactcgttttcaaagcaatcagaaaagccggctaatgatcaggatgatgaactactttccctcactgaaattaaagagcttttacacctttttttcaaattttggtctaatcaggtaccaattctaaacaatgaccacttcttaatatatttcaacaattttgttgaagtcgtgaagcatttatctacagaaaatttggagacgaataacactactaaaagtacagtcaccactaatcatgaaatatttgccctaaagcttctgatgatgttacaaatggggttactcgttaagattaaaatggaaaaaataaaatacactgtaccgaagaatccgaaggccaaatatgctagattgatggcatattatcatcagctttccctaataattcctaaaaatccttattttttaaatatgtccacaacttcattaccatccttacaattgttatctttggcatccttttattatttaaacgtgggtgatatttcggcaatctatggggtaagaggccgtattgtttctatggcacaacaattgagacttcacagatgtcctagtgccgtattaagtgtacactctaacccagttctacaaaaatttgagcaaagcgagaggagattactgttttgggcaatttattacgttgacgtttttgcctcattgcaacttggtgttcctcgtttacttaaggattttgatattgaatgtgcattaccaatttctgatgttgagtataaggatcagttatctatggaaaatgaaaaagcagataaaaaagctaaaaagattcaactgcaaggtcaagtttcaagcttttcattgcagataatcagatttgcgaaaatattaggtaacattctagactcgatttttaagagaggaatgatggatgaacgtataacttctgaagttgcattagtacatgaaaacgcactggataactggagaaatcaacttcccgaaatgtactactttcaaataactgtaaacggaactgtgaatttagacgagattagagcaaccaatcaaagaaatactgagaccaaatttgataagaaagacataatattatttgaaaagaagattctattgctgttttatttcttggccaaatctatgatacatttaccggttattgcaaccaaacctttgcctaagaatgttgataatgccacaaagaagaaacagtcaatgttcaacaacgactctaaaggcgcaaccaaccaggaccacatgatattagatgttgatatgacttctcctgctataaggacatcatcctcatatatcattttacaacaagctaccaatgcaacgcttacgattttccaggccattaattccatgtatttacctttgccattgaatgtatcaagaacgttaatcagattttctttgctctgtgctagaggttctttggaatataccaaaggtggtgcgttattcttagataataaaaatcttctcctcgacaccatcaaagatatcgaaaacgataggcttttggatttacctggaattgcctcttggcacacgctgaaactgtttgacatgagcatcaacctgttgttgaaagcacctaatgttaaggttgaaagactggataaattcttggaaaagaaattgaattactacaatagattgatggggttaccaccggccacaaccacatccttaaaaccattatttggctctcaatcgaagaacagcctggaaaatagacaaagaacacctaatgtcaaaagagaaaacccagaacacgagtatctttatggaaacgatagtaataataacaataattctgaagcgggtcactctccaatgacaaatacaactaatggtaataagagattaaagtatgaaaaagatgcaaaacgaaatgcaaaagatggcggtatatccaagggggagaacgcacataatttccagaatgataccaaaaaaaacatgtccaccagcaatctgtttccattttcgtttagtaatacagaccttactgcgctgttcacccatcctgaaggaccgaattgtacgaatactaataatggcaacgtggatgtgtgtaacagagcttctacagatgccacggatgccaatatagagaacttaagctttttaaatatggcaccattcttacagaccggtaactccaatataggtcaaaacacgattgagaataagcctatgcacatggatgcgatattcagtctaccaagtaatttagatctaatgaaggataatatggactctaaaccggaacaattagaacccgttattaagcaaaaccctgagaattcaaaaaacaaccaatttcatcagaaaggaaaaagtacgaatatggaaaagaataatctctctttcaacaacaagagtaactacagcctaacaaagctaatgagattgctgaacaacgataattctttctcgaatattagtattaacaactttttataccaaaatgatcagaactccgcgtcagcggatccgggaacaaataaaaaagccgttacaaatgcaggtgccaacttcaaaccaccttcaactggcagtaataccagccaaggcagtatccttggaagtacaaagcatggaatggacaactgtgatttcaacgatttaggtaattttaacaatttcatgacaaatgtcaattattctggggtcgactatgattacattgtagatgcatcacttgggttggctcctttattagtggatacgcccgatatctcaaataccaacacgacgtctactacgtcaaatcgaagtaaaaacagcatcatcctagatacgacatttaacgatgacttggatcggtcacgcatgaatgccagagaagtattgaatcctaccgactcaattttaagtcaagggatggtatcctccgtaagtacgagaaataccagcaatcaaagatctctttcatcgggcaatgattcaaaaggtgacagtagttctcaagagaactcaaagagtgcaactggcaaccagttggatacaccttctacactgtttcaaatgagaaggacctcttcagggccctcggcgtcccaccgtggtccaagacggcctcagaaaaatcgttacaatacagatcgatcaaaaagttctggtggcggaagttccaacacagataatgtatctgatttattccaatggcaaaacgccaaataa

SEQ ID NO: 8926 - DNA, 4302 bp, Artificial Sequence
  Description of Artificial Sequence: Synthetic polynucleotide
atggcaaataataattctgatagacaaggtttggaacccagagtcattagaactttaggttctcaagcgcttagcggtcctagcatatctaatagaacttctagtagtgaggcaaaccctcatttttccaagaacgtgaaggaagcaatgatcaagacagcttctccgactcctttatctacacctatttacaggatagctcaagcttgtgacaggtgtcgttctaagaaaacaaggtgcgatggaaaaagaccacagtgttctcagtgtgctgctgtcggatttgaatgcagaataagcgataaattattgaggaaagcgtatccaaaagggtacacagaaagcttggaagaaagagtacgcgaattagaggcagagaataagcgtttgttggctttgtgtgatatcaaagaacagcaaataagccttgtttctcagtctagaccacagacaagtacggataataccataaatggcaatttcaaacatgatttgaaagatgctccattgaatttatcttctacaaatatctatttattaaatcaaacggttaataagcagttacaaaatggcaaaatggatggtgataatagcggttctgcaatgagtccattgggggcaccacctccaccgccacacaaagaccatctttgtgacggcgtttcctgtacaaatcatttacacgtcaagcctacttctacgagtttaaacgatccaaccgctatatcttttgaacaggacgaggcacctggtcttcctgcggtaaaggcattaaaatctatgacgactcatcaacgtagcactcaattggcaactttagtttctttatccatcccaagatctactgaagaaattttatttattcctcagcttttaactaggataagacaaatatttggtttcaactccaagcaatgtttgtatacggtttctttattatcttctttgaaaaatagattgccagcaccaaggcttttagcaccttctacatctaccaagttaaaggagaaagatgaagataaaaaacttgatgatgattctgcttttgtgaaaaggtttcaaagcacaaacctctccgagtttgtcgatttgaaaaagtttttaatttctttgaaatttaacattaactctttttccaagcaaagtgaaaagccggctaatgatcaggatgatgaattgctttccctcactgaaattaaagagcttttacacctttttttcaaattttggtctaatcaggtaccaattttgaacaatgaccacttcttaatatatttcaacaattttgttgaagtcgtgaagcatttatctacagaaaatttggagacgaataacactactaaaagtacagtcaccactaatcatgaaatatttgccttgaagcttttgatgatgttacaaatggggttactcgttaagattaaaatggaaaaaataaaatacactgtaccgaagaatccgaaggccaaatatgctagattgatggcatattatcatcagctttccttgataattcctaaaaatccttattttttaaatatgtccacaacttctttaccatccttacaattgttatctttggcatccttttattatttaaacgtgggtgatatttctgcaatctatggggtaagaggccgtattgtttctatggcacaacaattgagacttcacagatgtcctagtgccgtattaagtgtacactctaacccagttttgcaaaaatttgagcaaagcgagaggagattacttttttgggcaatttattacgttgacgtttttgcctctttgcaacttggtgttcctcgtttacttaaggattttgatattgaatgtgcattaccaatttctgatgttgagtataaggatcagttatctatggaaaatgaaaaagcagataaaaaagctaaaaagattcaattacaaggtcaagtttccagcttttctttgcagataatcagatttgcgaaaatattaggtaacattttggacagtatttttaagagaggaatgatggatgaacgtataacttctgaagttgcattagtacatgaaaacgcattggataactggagaaatcaacttcccgaaatgtactactttcaaataactgtaaacggaactgtgaatttagacgagattagagcaaccaatcaaagaaatactgagaccaaatttgataagaaagacataatattatttgaaaagaagattttattgttattttatttcttggccaaatctatgatacatttaccggttattgcaaccaaacctttgcctaagaatgttgataatgccacaaagaagaaacagtccatgttcaacaacgactctaaaggcgcaaccaaccaggaccacatgatattagatgttgatatgacttctcctgctataaggacatcttccagctatatcattttacaacaagctaccaatgcaacgcttacgattttccaggccattaattccatgtatttacctttgccattgaatgtatctagaacgttaatcagattttctttgctctgtgctagaggttctttggaatataccaaaggtggtgcgttattcttagataataaaaatcttctcctcgacaccatcaaagatatcgaaaacgataggcttttggatttacctggaattgcctcttggcacacgttgaaattatttgacatgagcatcaaccttttgttgaaagcacctaatgttaaggttgaaagattagataaattcttggaaaagaaattgaattactacaatagattgatggggttaccaccggccacaaccacatccttaaaaccattatttggctctcaatccaagaacagcttggaaaatagacaaagaacacctaatgtcaaaagagaaaacccagaacacgagtatctttatggaaacgatagtaataataacaataattctgaagcgggtcactctccaatgacaaatacaactaatggtaataagagattaaagtatgaaaaagatgcaaaaagaaatgcaaaagatggcggtatatccaagggggagaacgcacataatttccagaatgataccaaaaaaaacatgtccaccagcaatttatttccattttcttttagtaatacagaccttactgcgttattcacccatcctgaaggaccgaattgtacgaatactaataatggcaacgtggatgtgtgtaacagagcttctacagatgccacggatgccaatatagagaacttaagctttttaaatatggcaccattcttacagaccggtaactccaatataggtcaaaacacgattgagaataagcctatgcacatggatgcgatattcagtttaccaagtaatttagatttgatgaaggataatatggactctaaaccggaacaattagaacccgttattaagcaaaaccctgagaattctaaaaacaaccaatttcatcagaaaggaaaaagtacgaatatggaaaagaataatctctctttcaacaacaagagtaactacagcttaacaaagttgatgagattgttgaacaacgataattctttcagtaatattagtattaacaactttttataccaaaatgatcagaactccgcgagtgcggatccgggaacaaataaaaaagccgttacaaatgcaggtgccaacttcaaaccaccttccactggcagtaataccagccaaggcagtatccttggaagtacaaagcatggaatggacaactgtgatttcaacgatttaggtaattttaacaatttcatgacaaatgtcaattattctggggtcgactatgattacattgtagatgcatctcttgggttggctcctttattagtggatacgcccgatatctctaataccaacacgacgtctactacgtccaatagaagtaaaaacagcatcatcttagatacgacatttaacgatgacttggatagatctcgcatgaatgccagagaagtattgaatcctaccgacagtattttaagtcaagggatggtatcctccgtaagtacgagaaataccagcaatcaaagatctctttcttctggcaatgattctaaaggtgacagtagttctcaagagaactccaagagtgcaactggcaaccagttggatacaccttctacattatttcaaatgagaaggacctcttctgggccctctgcgtcccaccgtggtccaagaagacctcagaaaaatcgttacaatacagatagaagtaaaagttctggtggcggaagttccaacacagataatgtatctgatttattccaatggcaaaacgccaaatga

SEQ ID NO: 8927 - DNA, 915 bp, Saccharomyces cerevisiae
atgaagatgttgaggcgtacaaaggtaaatttttcaaaattgctttacaagattactaaactagcaatagtactgacgatcctatatatttattttacgcccaaaatcgtctcccgaaacaatgcatcattgcagcatatttttcctcataaatatggcgattatgaaatcaatttggtcatagcgcaccctgacgacgaagttatgtttttttcccccataatttctcaactgaattcgtactttccgagaaccgtcccatttaacataatctgcttatcaaagggcaacgccgaaggtcttggcgaaaccagggtaagagaattaaatgagtcggccgctttattgctacacaatgaaagagcagtctccgtacaggtgatggatttccaggatggtatggacgaaatatgggatattgattctataacttcttctctttcacaaaagatagatataaagaatcataacttgaaccagattatcgttacctttgattcatatggtgtatcaaatcatatcaaccacaaaagctgttatgctgccgttaaaaagttggtggatgattatgctcaacctaagaccaaaagaaatgaacaaccacctcatgtcactgcgctttatttgagaagctacaagaacaacatcgttttaaagtacaactcctttatttgggaaatcctaaaaatactttacgacctgatttctccattccgtagaataattcaggcgcttccgcctaacacagccgccgaaaaagacaagctttcacttatgaatacacatgcacaatacgtactagcgtttgccactatgctaaatgctcacgaatcccaagttgtgtggtttagatacggatggtggatattttccagatttgtcttcgttaatgaatttgatgtttatacatattag

SEQ ID NO: 8928 - DNA, 915 bp, Artificial Sequence
  Description of Artificial Sequence: Synthetic polynucleotide
atgaagatgttgaggcgtacaaaggtaaatttttccaaattgctttacaagattactaaattggcaatagtattgacgatcttatatatttattttacgcccaaaatcgtctccagaaacaatgcaagtttgcagcatatttttcctcataaatatggcgattatgaaatcaatttggtcatagcgcaccctgacgacgaagttatgtttttttcccccataatttctcaattgaattcttactttccgagaaccgtcccatttaacataatctgcttatccaagggcaacgccgaaggtcttggcgaaaccagggtaagagaattaaatgagtctgccgctttattgttgcacaatgaaagagcagtctccgtacaggtgatggatttccaggatggtatggacgaaatatgggatattgattctataacttcttctctttctcaaaagatagatataaagaatcataacttgaaccagattatcgttacctttgattcttatggtgtatctaatcatatcaaccacaaaagctgttatgctgccgttaaaaagttggtggatgattatgctcaacctaagaccaaaagaaatgaacaaccacctcatgtcactgcgctttatttgagaagctacaagaacaacatcgttttaaagtacaactcctttatttgggaaatcttgaaaatactttacgacttgatttctccattccgtagaataattcaggcgcttccgcctaacacagccgccgaaaaagacaagctttctcttatgaatacacatgcacaatacgtattggcgtttgccactatgttgaatgctcacgaatcccaagttgtgtggtttagatacggatggtggatattttccagatttgtcttcgttaatgaatttgatgtttatacatattga

SEQ ID NO: 8929 - DNA, 1743 bp, Saccharomyces cerevisiae
atgtggataaatagactggttaaacatccatcctacagtgttctgaggttttacacgaagaggctctgcactgtatcagtgaaatcgctgcgtgaatttggtgtactgccgaatagcacaatatgtcattctgtctatccccgaagaacgtatgtaatgggtagggctgtcataaatgatattttaatcaaaaaatcctattcaactcacacggtatgtgcaattgatcgatcaaaagatgaaaataatgggagcgcttatgacaaattcgaggcaaaaggtatacctatagatgttcacacattaaaacgaattatcagctcgagtggaatggatgaatccgaattttccaagagtataagttacttattcgcgaaaaccgtggaccctgaaccgaaggatgttctgtctttagaggacctgtcttttcttttgagcaaactatacacacaacggtttcaaattaggagaatctgtagagacataaacgctaaatattcagaattttggttcaaacttttttccttatatgcagaaaaagttgatgccaagagaaaccaagttaacttacggaatacgaaactagatgcatgtgaaatatttgatgcaaatcttatgatcaagaactttatagagctcggtcaattaggtaaggctcaaaaaattttaagctttattcttgatagaaatcctgatatattactgtctccgaaaaatgcagatattagcacaatagttcactttttacaactgcgttgtggcgctttggcgccttattggaaaataccagataatagtgagcaaaaacaaggttttttaagaaaaatggttcgactaggtgcgaaaaatacgtcaattcgtctttcttctacttacaaagccatggatcaccaaacattattaaagattgctgatcttgctctgcaggagaaaaagcttttgaattccgaggatttgttgtccactttaattcaatcctttggacacctaggccaaacccaaatattggaacggtgtattgaacatatatggcaaatatcaccccaagagtttcctagtcacgtagtaattaagcaccgagggtgctatcctagttccaaaatactcgtttcaatcttagtgtcattctactttaatgaccacgatcttcacagaggcctaagtattttggattcattcataaagcactatccggacgtgaaattggatgcgctattttggagaaggctgtttcagctaagtcattttgcttggacaccagcaaacgacaagaaagccacttctgttgttagatgttggcatttaatgaagcagtggtatgcatctaagcggctaaggccttcagttgattatgagacgttgagacaactgtacgatatcatgaagaaaacaggcaatttcccgcttggaattgatgttttaaggagtttcaaaccggggatcgaaagaacgagagcagaaaatgctggaaaagttaacaatatcattatcaaataccaaaaatgtattattaaggagcttgtaaatagaggtagattttcagcggtaagggaattcattgatagttatggttttgatagaaaaatgaccaaagatttgaatattttttgtgcgaatcgtatgtttctaagaagtaagaaaatgaaaaacaagattgagaacaaaaaggaaagggagaaagtgcggctagatagtttcgatgacgatgaagatgatggtatgattataggtagcctttggtaa

SEQ ID NO: 8930 - DNA, 1743 bp, Artificial Sequence
  Description of Artificial Sequence: Synthetic polynucleotide
atgtggataaatagattggttaaacatccatcctacagtgttttgaggttttacacgaagaggctctgcactgtatctgtgaaatctttacgtgaatttggtgtattaccgaatagcacaatatgtcattctgtctatcccagaagaacgtatgtaatgggtagggctgtcataaatgatattttaatcaaaaaatcctattctactcacacggtatgtgcaattgatagaagtaaagatgaaaataatgggagcgcttatgacaaattcgaggcaaaaggtatacctatagatgttcacacattaaaaagaattatcagcagtagtggaatggatgaatccgaattttccaagagtataagttacttattcgcgaaaaccgtggaccctgaaccgaaggatgttttatctttagaggacttgtcttttcttttgagcaaactttacacacaaagatttcaaattaggagaatctgtagagacataaacgctaaatattctgaattttggttcaaacttttttccttatatgcagaaaaagttgatgccaagagaaaccaagttaacttaagaaatacgaaattggatgcatgtgaaatatttgatgcaaatcttatgatcaagaactttatagagctcggtcaattaggtaaggctcaaaaaattttaagctttattcttgatagaaatcctgatatattattatctccgaaaaatgcagatattagcacaatagttcactttttacaattgcgttgtggcgctttggcgccttattggaaaataccagataatagtgagcaaaaacaaggttttttaagaaaaatggttagattaggtgcgaaaaatacgtccattcgtctttcttctacttacaaagccatggatcaccaaacattattaaagattgctgatcttgctttacaggagaaaaagcttttgaattccgaggatttgttgtccactttaattcaatcctttggacacttgggccaaacccaaatattggaaagatgtattgaacatatatggcaaatatctccccaagagtttcctagtcacgtagtaattaagcaccgcgggtgctatcctagttccaaaatactcgtttccatcttagtgtctttctactttaatgaccacgatcttcacagaggcttaagtattttggattctttcataaagcactatccggacgtgaaattggatgcgttattttggagaaggttatttcagttgagtcattttgcttggacaccagcaaacgacaagaaagccacttctgttgttagatgttggcatttaatgaagcagtggtatgcatctaagagattaaggccttctgttgattatgagacgttgagacaattgtacgatatcatgaagaaaacaggcaatttcccgcttggaattgatgttttaaggagtttcaaaccggggatcgaaagaacgagagcagaaaatgctggaaaagttaacaatatcattatcaaataccaaaaatgtattattaaggagcttgtaaatagaggtagattttctgcggtaagggaattcattgatagttatggttttgatagaaaaatgaccaaagatttgaatattttttgtgcgaatcgtatgtttttaagaagtaagaaaatgaaaaacaagattgagaacaaaaaggaaagggagaaagtgagattagatagtttcgatgacgatgaagatgatggtatgattataggtagcctttggtga

SEQ ID NO: 8931 - DNA, 1542 bp, Saccharomyces cerevisiae
atggtatcgaggctatcaaagagatatagatccagagtacagtttagtatatccgtgatggatgaaaatatttatctttcgctatctcagataaataaagacatcagaaaggaaaacaagtccgtaaggaatcgacttcagagtattcttttagacaataaatttttgcaagatcgagttatccctatatttccccattatccactgatacccaatgaaagatgtgggctatggtactgtaatccatcaagtttcaaacagaccagttactttaagagcacagacgggcatgtcaaccaatgggactttagcacccgaagattgaactttcatttgttagagaccattcgagataataaaggtattataattgtcgatagtactagaagaggtaaaaaaatcccagatgctttgagtaagactgtccccatatggtgtgctgtattaaatacgttaatgcttcaggaaacagaaaaaaatgttgccatcgataaggtactgtatcttccacctgagacagttcccaaatcagaatatgacatgattaagcgaaaaatacccgaactagttgctaaactacaaaaattgaatattatagattctaagaaattgaacgaactgtttatgggtaagttattgcggcccatatgggttcaccctggttcttcacttctagaccattctgttgattacttcacgggtgaagtacaggagtatgaagcctgggaaacacctgaagaccaaaacataatacccattattttgtgcacggtaagctatcaagcacaagatggtatggataaaagatacggcttcacttatgtgcagggtgcagccgacgatcacgagctctggtcttttggtttggattcaaatatgttttgggcccatatagaatacctaggcgacgcaagttattcagacgaccagttacatgattacatcatggatttggctgctgcaaagctgagaaatcagtgttatatacaagataaaggaagcttggatgaagtctttggaaacattgataaaattacgaatgagatatctctaggaaaagtgagttcaggcttaaccatcaataagaatttgaaacagaaattgaagtcagaatatggtaaagttataattttcagtaattcggtgactgttgctgaagatacagacgatgaagaagaaagtgggacagatccgtttatttcaatatacaagttgcaaagcggagacaagaaaagttcaaaagctttacgatccacattccctagaatccatggagaaattcaatcgttgtttacaaatcgagatgaaaaaataaagccaatgctaatatgctgcaatacaggtactgatatgtcaatcggtgtcatcttaagtatcctttgtaccaaatatactgaagaatggatgcttacgtcggagttaccggacatcagtaagcttattgtaagaaaacacttgacaaaattgatttcccacttgaaaggacgcaacgttaacccttcaagagcaacactgaacagcgtcaatagctttttaatgtag

SEQ ID NO: 8932 - DNA, 1542 bp, Artificial Sequence
  Description of Artificial Sequence: Synthetic polynucleotide
atggtaagtaggttatccaagagatatagatccagagtacagtttagtatatccgtgatggatgaaaatatttatctttctttatctcagataaataaagacatcagaaaggaaaacaagtccgtaaggaatagacttcagagtattcttttagacaataaatttttgcaagatagagttatccctatatttccccattatccattgatacccaatgaaagatgtgggttgtggtactgtaatccatctagtttcaaacagaccagttactttaagagcacagacgggcatgtcaaccaatgggactttagcaccagaagattgaactttcatttgttagagaccattagagataataaaggtattataattgtcgatagtactagaagaggtaaaaaaatcccagatgctttgagtaagactgtccccatatggtgtgctgtattaaatacgttaatgcttcaggaaacagaaaaaaatgttgccatcgataaggtattatatcttccacctgagacagttcccaaaagtgaatatgacatgattaagagaaaaatacccgaattggttgctaaattacaaaaattgaatattatagattctaagaaattgaacgaattatttatgggtaagttattgagacccatatgggttcaccctggttcttctcttttggaccattctgttgattacttcacgggtgaagtacaggagtatgaagcctgggaaacacctgaagaccaaaacataatacccattattttgtgcacggtaagctatcaagcacaagatggtatggataaaagatacggcttcacttatgtgcagggtgcagccgacgatcacgagctctggtcttttggtttggattctaatatgttttgggcccatatagaatacttgggcgacgcaagttattctgacgaccagttacatgattacatcatggatttggctgctgcaaagttgagaaatcagtgttatatacaagataaaggaagcttggatgaagtctttggaaacattgataaaattacgaatgagatatctttgggaaaagtgagttctggcttaaccatcaataagaatttgaaacagaaattgaagtctgaatatggtaaagttataattttcagtaattctgtgactgttgctgaagatacagacgatgaagaagaaagtgggacagatccgtttatttctatatacaagttgcaaagcggagacaagaaaagttctaaagctttaagatccacattccctagaatccatggagaaattcaatctttgtttacaaatagagatgaaaaaataaagccaatgttgatatgctgcaatacaggtactgatatgtccatcggtgtcatcttaagtatcctttgtaccaaatatactgaagaatggatgcttacgagtgagttaccggacatcagtaagcttattgtaagaaaacacttgacaaaattgatttcccacttgaaaggacgcaacgttaacccttccagagcaacattgaacagcgtcaatagctttttaatgtga

SEQ ID NO: 8933 - DNA, 1809 bp, Saccharomyces cerevisiae
atgcgctcagtcactaatgcatttggcaatagtggagaacttaacgatcaagtggatgaaacaggttataggaagtttgatatccatgaaggaattttgttttgcattgaactatcagagacaatgtttaaagagtcctctgatctagagtataaatcaccattgttggaaattctggaatcactagatgagctaatgtcacaattggtcataacaagacctgggacagctattggttgctatttttattactgtaacagagaggatgccaaggaaggtatctatgaactttttccattaagggatataaatgctacatttatgaagaaattgaacgatcttttagaagatttatcatcggggagaataagcctatacgactattttatgtttcaacaaactgggagtgaaaagcaagtgcgcttatctgtattattcacattcatgcttgacacttttttggaagagattccgggtcaaaagcaattaagcaacaagagagtgttcttattcactgacattgataaaccacaagaggcgcaagatatcgatgaacgggcaagattgagaaggcttacaattgatttatttgataacaaagtgaattttgcaactttttttattggctatgccgataaaccatttgacaacgagttttattcggacatactgcagttgggttcacatacaaatgagaatactggtttggattctgaatttgatggtccaagtacaaagcctatagatgctaaatacatcaagtccagaatcctaaggaaaaaggaggtaaagaggataatgtttcaatgtccattaatcttggatgagaaaacaaattttatagtcggagtcaagggttacactatgtatacccatgaaaaagctggagtcaggtataaacttgtttatgagcatgaagatatcagacaagaagcatattcaaaaagaaaatttttaaatcctataacaggagaagacgttactggtaaaactgtcaaggtttatccttatggtgacctcgatatcaatctatcagatagtcaagatcagatagtaatggaggcttatactcaaaaagatgcgtttttgaagattattgggttccgttcatcgagcaaatcgatacactatttcaataacatagacaaaagttcgtttatcgtaccagatgaagcaaaatatgaaggttcgataagaaccttggcttctttattaaaaattttgagaaaaaaagataaaattgcaatattatgggggaagcttaaatcaaattcacatccttcactatatacgttatcaccctcaagcgtgaaggactacaacgaaggattttatctctacagggttccattcctagacgaaattcgaaaatttcctagtttactatcctatgatgatggctctgaacataaactagattatgataacatgaaaaaagtaactcaaagtataatgggatactttaacttgagggatggatataacccatccgatttcaaaaacccactattacaaaaacattacaaagttttacatgattacctgttgcaaattgaaaccacttttgacgaaaatgagacacctaatactaaaaaagacagaatgatgcgtgaggacgattctttaaggaaactatattatatacgaaataaaattttagaatctgagaagtcagaagatccaatcatccaaaggctaaataaatatgttaaaatctggaatatgttctacaaaaaatttaacgatgataacatttcgataaaagaagaaaagaagccctttgataaaaagccgaaattcaatatataa

SEQ ID NO: 8934 - DNA, 1809 bp, Artificial Sequence
  Description of Artificial Sequence: Synthetic polynucleotide
atgcgctctgtcactaatgcatttggcaatagtggagaacttaacgatcaagtggatgaaacaggttataggaagtttgatatccatgaaggaattttgttttgcattgaattatctgagacaatgtttaaagagtcctctgatttagagtataaatctccattgttggaaattttggaatctttagatgagttgatgtctcaattggtcataacaagacctgggacagctattggttgctatttttattactgtaacagagaggatgccaaggaaggtatctatgaactttttccattaagggatataaatgctacatttatgaagaaattgaacgatcttttagaagatttatcttctgggagaataagcttgtacgactattttatgtttcaacaaactgggagtgaaaagcaagtgcgcttatctgtattattcacattcatgcttgacacttttttggaagagattccgggtcaaaagcaattaagcaacaagagagtgttcttattcactgacattgataaaccacaagaggcgcaagatatcgatgaaagagcaagattgagaaggcttacaattgatttatttgataacaaagtgaattttgcaactttttttattggctatgccgataaaccatttgacaacgagttttattctgacatattacagttgggttctcatacaaatgagaatactggtttggattctgaatttgatggtccaagtacaaagcctatagatgctaaatacatcaagtccagaatcttgaggaaaaaggaggtaaagaggataatgtttcaatgtccattaatcttggatgagaaaacaaattttatagtcggagtcaagggttacactatgtatacccatgaaaaagctggagtcaggtataaacttgtttatgagcatgaagatatcagacaagaagcatattctaaaagaaaatttttaaatcctataacaggagaagacgttactggtaaaactgtcaaggtttatccttatggtgacctcgatatcaatttaagtgatagtcaagatcagatagtaatggaggcttatactcaaaaagatgcgtttttgaagattattgggttccgttcttctagcaaatctatacactatttcaataacatagacaaaagttcttttatcgtaccagatgaagcaaaatatgaaggttccataagaaccttggcttctttattaaaaattttgagaaaaaaagataaaattgcaatattatgggggaagcttaaatctaattctcatccttctttgtatacgttatctccctctagcgtgaaggactacaacgaaggattttatctctacagggttccattcttggacgaaattagaaaatttcctagtttattatcctatgatgatggctctgaacataaattggattatgataacatgaaaaaagtaactcaaagtataatgggatactttaacttgagggatggatataacccatccgatttcaaaaacccattattacaaaaacattacaaagttttacatgattacttgttgcaaattgaaaccacttttgacgaaaatgagacacctaatactaaaaaagacagaatgatgcgtgaggacgattctttaaggaaactttattatataagaaataaaattttagaatctgagaagtctgaagatccaatcatccaaaggttgaataaatatgttaaaatctggaatatgttctacaaaaaatttaacgatgataacatttctataaaagaagaaaagaagccctttgataaaaagccgaaattcaatatatga

SEQ ID NO: 8935 - DNA, 1548 bp, Saccharomyces cerevisiae
atgacacaagacaaagaagtcaaagtggttgccccagatgttgcgcccgaccaagaagtagaaattaataaatctgtaaaagatgcaaaacatcaaaccaatgatgattcgttacttcaacataaaaagaagggcaagaaaggtaaaaaatcgaagcccatagtgaccccagaacatatcgctaaggttcgtgccgaaagggaagttatgagaaaggctaaaagagatgcaatgttggctcaaggtgttgatccggactgcccgccagagctgcattttatcagaagacctttcctatctctacatgaggcagagccagtaactggatttagattcaagctaatgacttataattgcttggcgcaagctctaatccgcagaaagctgttcccggatagtggtgacgctttaaaatggtacaggcgttctaaagttctcttaaacgagtttaaatattataattccgatgtcatttgtttgcaagagattgatcatattcagtttcaaagcttttggaaagatgaattcagtaaattgggatacgatggacaatattatagaaatgctacaaaaaaccatggtgtcgcgataatgtggaggagagaattatttcaccaggttgacaaaatgctaatcgactatgataaagaaagttcagaaagcatttccactagaacaacgacaaacaacgtgggattagtcttagccttgaagttttctgagaaagtactgtcgaatttgggtaaaaaatcgtctaaaaaatgcggtatcttgatcggcactacgcatctattttggcatccatttggtacttatgaacgaacaagacaatgctatattgttttaaaaaagatgaaggaattcatgcatcgtgtgaatgttttacagaacgaaaatgatggggatttatctcattggtttccttttttctgtggtgattttaattcccagccgttcgacacaccatatttatctatgacatccaaaccagtgcactatagaaacagggcaaagaccgtcattgggtgcagcacttcatataagttttccaaggtccgtgatggcgaagaaggtgcagatgacgaagaaggcgggaatattgaaaaatatggtaaagatcaacctgagagccccgttcctgaaaaatttcatgctaatgaagaacagtctgaactcgtagataaaatggcacaactccataactcattggatatgagggctatttcactatactctgttgggtataagaatgttcatccagaaaatgcaggtcttgataatgatagaggtgagcctgaaatttcaaattgggcaaacacttggcgtggtttattagactatctattttatgtaaagaaatgggacccacaaagtaattgtcaggaagtggaaacccttggcgattttgaaaaagaaaataaagttaaatgcagaggttttttgagaatgccgcccggtaatgaaatgacaaagcatggacaaccacatgttggagaatatgcaagtgatcatttgtctatggtgtgtgatttagagttacaactatag

SEQ ID NO: 8936 - DNA, 1548 bp, Artificial Sequence
  Description of Artificial Sequence: Synthetic polynucleotide
atgacacaagacaaagaagtcaaagtggttgccccagatgttgcgcccgaccaagaagtagaaattaataaatctgtaaaagatgcaaaacatcaaaccaatgatgattctttacttcaacataaaaagaagggcaagaaaggtaaaaaatccaagcccatagtgaccccagaacatatcgctaaggttcgtgccgaaagggaagttatgagaaaggctaaaagagatgcaatgttggctcaaggtgttgatccggactgcccgccagagttacattttatcagaagacctttcttatctttgcatgaggcagagccagtaactggatttagattcaagttgatgacttataattgcttggcgcaagctttgatccgcagaaagcttttcccggatagtggtgacgctttaaaatggtacaggcgttctaaagttctcttaaacgagtttaaatattataattccgatgtcatttgtttgcaagagattgatcatattcagtttcaaagcttttggaaagatgaattcagtaaattgggatacgatggacaatattatagaaatgctacaaaaaaccatggtgtcgcgataatgtggaggagagaattatttcaccaggttgacaaaatgttgatcgactatgataaagaaagttctgaaagcatttccactagaacaacgacaaacaacgtgggattagtcttagccttgaagttttctgagaaagtattatccaatttgggtaaaaaatcttctaaaaaatgcggtatcttgatcggcactacgcatttattttggcatccatttggtacttatgaaagaacaagacaatgctatattgttttaaaaaagatgaaggaattcatgcatcgtgtgaatgttttacagaacgaaaatgatggggatttatctcattggtttccttttttctgtggtgattttaattcccagccgttcgacacaccatatttatctatgacatccaaaccagtgcactatagaaacagggcaaagaccgtcattgggtgcagcacttcttataagttttccaaggtccgtgatggcgaagaaggtgcagatgacgaagaaggcgggaatattgaaaaatatggtaaagatcaacctgagagccccgttcctgaaaaatttcatgctaatgaagaacagtctgaactcgtagataaaatggcacaactccataactctttggatatgagggctatttctttgtactctgttgggtataagaatgttcatccagaaaatgcaggtcttgataatgatagaggtgagcctgaaatttctaattgggcaaacacttggcgtggtttattagactatttattttatgtaaagaaatgggacccacaaagtaattgtcaggaagtggaaacccttggcgattttgaaaaagaaaataaagttaaatgcagaggttttttgagaatgccgcccggtaatgaaatgacaaagcatggacaaccacatgttggagaatatgcaagtgatcatttgtctatggtgtgtgatttagagttacaattgtga

SEQ ID NO: 8937 - DNA, 261 bp, Saccharomyces cerevisiae
atggtgttttacaaagtcacgttgagtaggtcgcttatcggtgtgccacacacaacgaagagcattgtcaaaagtttgggtttaggtaaaagagggtccatagtctacaaaaaagtaaacccggccatagctggctccctagctaaagtaaaagagttagtcaaagtagaagtaacagaacatgaattaacaccatcgcagcaacgagagttgagaaagtcaaaccctgggtttatagtggagaagagaaccatcgactga

SEQ ID NO: 8938 - DNA, 261 bp, Artificial Sequence
  Description of Artificial Sequence: Synthetic polynucleotide
atggtgttttacaaagtcacgttgagtaggagtcttatcggtgtgccacacacaacgaagagcattgtcaaaagtttgggtttaggtaaaagagggtccatagtctacaaaaaagtaaacccggccatagctggctccttggctaaagtaaaagagttagtcaaagtagaagtaacagaacatgaattaacaccatctcagcaaagagagttgagaaagtctaaccctgggtttatagtggagaagagaaccatcgactga

SEQ ID NO: 8939 - DNA, 2910 bp, Saccharomyces cerevisiae
atggtagttaggcggaaagtacatgttcttctaattgcaaggagctttcattcctacacaccttgcttcagagtaactaccagaggcaaacgacagcgaagtaagagtaagcagcaagcaaaagtagaactagatcacacacgagagctagataatgatcaagctacagagacagttgtagaccgttcggttggaccggagaaagatatagaatcaataaacaaagactttctgcaacgaacaaaaggattagagcctgatattgaattaaaacaactgcctcaaattaaacaggaatttaaccaacgttataaagataggtatgttaaaccttccgaagattggtacgtaaactcctggaggtctttaacaaaaccaaaaattccgctttacaagttaataaattcagattttcaattaataacaaaactgaaagctccaaacccaatggaatttcaacctgttcagctaatggaaagtcccttaaatgttggtgactttgttcttttaaaaatgagacccaatgaattggcgatgtgtgtaagtcttccaagtagcactatggatcctcgatacacttttgttactattgatggaactatgtgctttgcgaccaaaaaccgggtgttattgaggattcctcacaaattacctgctggaatccattcacttatacagcctgagagccatcacaaacatttgccaattggaaccgttaagaacttttctaaccaaacgaatattttgcctattgtagcaaggcagctaataacaagtaggtatccagcccaaatttcaaagttggcctggaaagatttgcccattactaccaaaaaattacagttactccacagatcattacaaaattatatgggtccatggcagattcctttttttaccctagtcggattagttcagaaattggatttaaataaagccttggacgataaaaatggaataaattacttaactagtttagttaataactatcacactgtaaacgatataccaataaattcacctacctttgtttccacgtactgggcgattatgcaacaacaggaatcgaacctttggggggaaatccatctgaatacagcgttgctgtcgcctatatcagtaacgattattcccttaaaatcacaacatttatattatgcgcaggtgatagagaagctagaagccaacagttatagagaggtcaataagtttgtaaaattggtgaatgaaaggaaatatcgcgatatatcagctttatatccttctgtgatccaattattgaaagattttgctgctgggaattttcacaataacggaattatagtagctttgatctcaaaaatattcagaaagatagaacgctataaggattgtgacatcacaagagatatatgtcaagatttaatcaatgagataacacccaactcaatacccaatccattgttacttaacatggatttagcattacctgcttcctcgaagttagtgaaatggcaacaaaaactctacgacttaactaatatagaagaattgcaatggaaaaaatccggcactgatgacgataggtacgattttggcgatcttagggttttttgtatagactctgaaactgcgcatgagattgatgacggcgtgtcggtgaaaaactatggtagagatggactgtacactttatatattcatattgcggatccaacttctatgtttccggaaagcactaatgttgatattgagggtataagtacagatatcctaaatgttgccttgaaaagatcatttaccacatatttaccagatacggttgttcctatgttacctcaatctatttgtcacttatcagatttggggaaacaaggacaaaggacgaaaactatatccttctctgttgatgttaaaatcacttctaaatgcagtggaaaatcaattgaaattatgtatgacagttttaaaatccggaaaggcattgtgtccaacttcccaaaggccacttatgaagatgttgacaggatactcggtacacccaatagcgaagcatcacctgtcaaaaaggatttggaaagtttgtccatgatttccaaattattgagagaacaacgtataaaaaacagtaatgctgttattttcggggagggctttaataagggcctagtgatgctaaacgccgattcagaaggagaactgactgaggtaacattttcggatcaagaggagacgctgtctaccattttggtttcagaaatgatgatcttggcgaatactttaacgggtagatattttgcggagaacaaaatcggtggtgtgttcagatgttataaacagttaccactgggcgaagtagcacaacaacagtatgattctatgataacaagtacaaaaaaaggaatttttcccaagctaaaagatatcgttaagctttcttcattgttgaactcgagtttttatacaggtcgaccttttagacatgaaatgattggagctaaacaatatttgacagtaacatcccctcttcgtcgttttccagacttgataaatcatctacaaattcaccgtcatttgcagaaaaagcctctatgttttaatcaaacacaaatcgacagtttgatctggccaattcaatctcgagcggatattttaaaaagggctagccgtaattcgtcgacgtactggacactgaattatttaaaaaagctaaccaaactagagccagaaaggactttcgatgtaatggtaacatcagtaccgcagaacggatttactggatgtgtttttccagacttatcgttcgctagaggaacattaaaattgcatccaagttctatgcattatccgatgattggagatatcgtgaagaattgtaaaatttcaaaaattgactgtttagaaggaatgttagagttggaaaagctataa

SEQ ID NO: 8940 - DNA, 2910 bp, Artificial Sequence
  Description of Artificial Sequence: Synthetic polynucleotide
atggtagttaggagaaaagtacatgttcttttgattgcaaggagctttcattcctacacaccttgcttcagagtaactaccagaggcaaaagacagagaagtaagagtaagcagcaagcaaaagtagaattagatcacacaagagagttagataatgatcaagctacagagacagttgtagaccgttctgttggaccggagaaagatatagaaagtataaacaaagactttttgcaaagaacaaaaggattagagcctgatattgaattaaaacaattacctcaaattaaacaggaatttaaccaacgttataaagataggtatgttaaaccttccgaagattggtacgtaaactcctggaggtctttaacaaaaccaaaaattccgctttacaagttaataaattctgattttcaattaataacaaaattgaaagctccaaacccaatggaatttcaacctgttcagttgatggaaagtcccttaaatgttggtgactttgttcttttaaaaatgagacccaatgaattggcgatgtgtgtaagtcttccaagtagcactatggatcctcgttacacttttgttactattgatggaactatgtgctttgcgaccaaaaacagagtgttattgaggattcctcacaaattacctgctggaatccattctcttatacagcctgagagccatcacaaacatttgccaattggaaccgttaagaacttttctaaccaaacgaatattttgcctattgtagcaaggcagttgataacaagtaggtatccagcccaaatttccaagttggcctggaaagatttgcccattactaccaaaaaattacagttactccacagatctttacaaaattatatgggtccatggcagattcctttttttaccttggtcggattagttcagaaattggatttaaataaagccttggacgataaaaatggaataaattacttaactagtttagttaataactatcacactgtaaacgatataccaataaattctcctacctttgtttccacgtactgggcgattatgcaacaacaggaatctaacctttggggggaaatccatttgaatacagcgttgctttctcctatatctgtaacgattattcccttaaaatctcaacatttatattatgcgcaggtgatagagaagttggaagccaacagttatagagaggtcaataagtttgtaaaattggtgaatgaaaggaaatatcgcgatatatctgctttatatccttctgtgatccaattattgaaagattttgctgctgggaattttcacaataacggaattatagtagctttgatctccaaaatattcagaaagatagaacgctataaggattgtgacatcacaagagatatatgtcaagatttaatcaatgagataacacccaacagcatacccaatccattgttacttaacatggatttagcattacctgcttcctccaagttagtgaaatggcaacaaaaactctacgacttaactaatatagaagaattgcaatggaaaaaatccggcactgatgacgataggtacgattttggcgatcttagggttttttgtatagactctgaaactgcgcatgagattgatgacggcgtgtctgtgaaaaactatggtagagatggattatacactttatatattcatattgcggatccaacttctatgtttccggaaagcactaatgttgatattgagggtataagtacagatatcttgaatgttgccttgaaaagatcttttaccacatatttaccagatacggttgttcctatgttacctcaatctatttgtcacttaagtgatttggggaaacaaggacaaaggacgaaaactatatccttctctgttgatgttaaaatcacttctaaatgcagtggaaaatccattgaaattatgtatgacagttttaaaatcagaaaaggcattgtgtccaacttcccaaaggccacttatgaagatgttgacaggatactcggtacacccaatagcgaagcatctcctgtcaaaaaggatttggaaagtttgtccatgatttccaaattattgagagaacaacgtataaaaaacagtaatgctgttattttcggggagggctttaataagggcttggtgatgttgaacgccgattctgaaggagaattgactgaggtaacattttctgatcaagaggagacgttgtctaccattttggtttctgaaatgatgatcttggcgaatactttaacgggtagatattttgcggagaacaaaatcggtggtgtgttcagatgttataaacagttaccattaggcgaagtagcacaacaacagtatgattctatgataacaagtacaaaaaaaggaatttttcccaagttgaaagatatcgttaagctttcttctttgttgaacagtagtttttatacaggtagaccttttagacatgaaatgattggagctaaacaatatttgacagtaacatcccctcttcgtcgttttccagacttgataaatcatttacaaattcaccgtcatttgcagaaaaagcctctttgttttaatcaaacacaaatcgacagtttgatctggccaattcaatctcgtgcggatattttaaaaagggctagccgtaattcttctacgtactggacattaaattatttaaaaaagttgaccaaattagagccagaaaggactttcgatgtaatggtaacatctgtaccgcagaacggatttactggatgtgtttttccagacttatctttcgctagaggaacattaaaattgcatccaagttctatgcattatccgatgattggagatatcgtgaagaattgtaaaatttccaaaattgactgtttagaaggaatgttagagttggaaaagttgtga

SEQ ID NO: 8941 - DNA, 2916 bp, Saccharomyces cerevisiae
atgagtcatccgattcaatttgtaaacgctaataatagcgataagagccaccaattaggcggtcaatattctattcctcaggatttgagggaaaacctgcagaaagaagctgcacgtattggtgagaacgaaaaagatgtgctacaggaaaaaatggaaactaggacagtgcaaaatcgagaggattcataccacaaaagaaggtttgatatgaagtttgagccggattccgatacacaaactgttacgtcttcagaaaatacccaagacgctgtcgtgccaaggaaaagaaaatctcgttgggatgtaaaagggtacgagccacctgatgaatcttcaacagcggtcaaagaaaactctgatagtgctttggttaatgtagaaggaatccatgatttgatgttttttaaaccttctgaccataaatatttcgccgacgttatatccaaaaaacccatagatgagttaaataaggatgaaaagaaagaaagaaccctgtcgatgttacttctgaaaataaaaaatggcaatacagcgagtaggaggacttctatgcggattttaaccgataaagctgttacatttggtccagaaatgatatttaaccgcttattgcccatattactagacagaagtttggaagaccaggaaagacatctaatgatcaagaccatagatcgcgtcctttaccagctaggagatttaacaaaaccttacgttcacaaaatacttgtagtagctgccccattgctaatagatgaagatccaatggttcgttcaacaggccaggagataatcaccaatctgtctacagtcgctggcctaaaaaccattctaacagtaatgagacctgatattgagaatgaggatgagtatgttagaaatgtaacttcaagagcggcggctgtggtggcaaaagcccttggtgttaatcaattgcttcctttcatcaatgcagcatgccactcacggaagtcttggaaagcaaggcatactggcataaaaattgtgcagcaaataggtatacttttgggaataggtgtcttgaatcatcttactgggctgatgagttgtatcaaagactgcctaatggatgatcacgttccggtgcgaattgttacagcacatactttatcaacactagcagaaaattcttatccatatggtatcgaagttttcaacgttgtactggagccattatggaagggtataagaagtcatcgtggtaaagtgctatcttcttttttaaaagctgttggatctatgatcccattgatggacccagagtatgccggttattataccacagaagcaatgagaataattagacgtgaattcgactctcccgatgatgaaatgaaaaagaccattcttttagtattacaaaaatgtagcgctgtagaatccataacgccaaaatttctgagagaagaaatcgcgccagaattctttcaaaaattttgggtcagacgagtggcattggatagaccattaaacaaagttgttacatatactactgttacattagcaaagaaattaggttgttcttataccattgataaattattaacaccattgagagatgaagctgagccgttcagaacaatggctgtccatgctgttactagaacagtaaacttattagggacagcagatttagatgagagattagaaacgaggcttattgatgcgctcttgatagcatttcaagaacaaacaaatagtgattctataatctttaaagggtttggggcagtgacggtgtcacttgacatccgtatgaaaccgtttttagcacccattgtgagtacgattttaaatcatttaaagcataaaactcccttggttcgtcaacatgcagcagatctatgtgccatactaataccagtcatcaagaactgtcacgaattcgaaatgttgaataaattgaacattatattgtatgaatccttaggcgaagtatatccagaggtattaggttctataatcaacgctatgtactgtattactagcgtaatggatttggataaactacaacctcctattaatcaaattttaccaaccttaactccaattttaagaaacaagcatagaaaagtcgaagtaaacactatcaaatttgttggacttattggtaaattagcacctacctatgcacctcctaaagaatggatgagaatatgttttgaactattagaacttttgaaaagtacaaataaagaaataagaagatcagcaaatgccacgtttggattcattgctgaagcaattggacctcacgatgttcttgttgcgttattgaacaatttaaaggttcaagaacgtcagttacgtgtatgcacggctgttgctatcggtatcgttgctaaagtgtgtggtccttacaacgtgctgccagtaatcatgaatgaatacacaacaccagagactaatgttcaaaacggtgttctcaaggccatgtcattcatgtttgagtacattggtaacatgtctaaggattacatatacttcataacaccattattagaagatgcactcaccgatagggatttagttcatcgtcagacagcgtcgaacgtaataacccacttagctttaaactgttcaggtacaggtcacgaagatgccttcattcatttaatgaatcttctaatacccaatatttttgaaacttcaccacatgctattatgcgtattttagaaggtttggaggcactgagtcaagctcttggccctggactattcatgaactacatatgggcaggattgttccatccagcgaagaatgtaaggaaagcattttggagggtgtataataacatgtacgtaatgtaccaggacgccatggtacctttttaccccgttacaccagacaacaatgaagaatatatagaagaactggatttagttctgtga

SEQ ID NO: 8942 - DNA, 2916 bp, Artificial Sequence
  Description of Artificial Sequence: Synthetic polynucleotide
atgagtcatccgattcaatttgtaaacgctaataatagcgataagagccaccaattaggcggtcaatattctattcctcaggatttgagggaaaacttacagaaagaagctgcacgtattggtgagaacgaaaaagatgtgttacaggaaaaaatggaaactaggacagtgcaaaatagagaggattcttaccacaaaagaaggtttgatatgaagtttgagccggattccgatacacaaactgttacgtcttctgaaaatacccaagacgctgtcgtgccaaggaaaagaaaatctcgttgggatgtaaaagggtacgagccacctgatgaatcttctacagcggtcaaagaaaactctgatagtgctttggttaatgtagaaggaatccatgatttgatgttttttaaaccttctgaccataaatatttcgccgacgttatatccaaaaaacccatagatgagttaaataaggatgaaaagaaagaaagaaccttatctatgttacttttgaaaataaaaaatggcaatacagcgagtaggaggacttctatgagaattttaaccgataaagctgttacatttggtccagaaatgatatttaaccgcttattgcccatattattagacagaagtttggaagaccaggaaagacatttaatgatcaagaccatagatcgcgtcctttaccagttaggagatttaacaaaaccttacgttcacaaaatacttgtagtagctgccccattgttaatagatgaagatccaatggttcgttccacaggccaggagataatcaccaatttatctacagtcgctggcttgaaaaccattttaacagtaatgagacctgatattgagaatgaggatgagtatgttagaaatgtaacttccagagcggcggctgtggtggcaaaagcccttggtgttaatcaattgcttcctttcatcaatgcagcatgccactctagaaagtcttggaaagcaaggcatactggcataaaaattgtgcagcaaataggtatacttttgggaataggtgtcttgaatcatcttactgggttgatgagttgtatcaaagactgcttgatggatgatcacgttccggtgagaattgttacagcacatactttatctacattagcagaaaattcttatccatatggtatcgaagttttcaacgttgtattggagccattatggaagggtataagaagtcatcgtggtaaagtgttatcttcttttttaaaagctgttggatctatgatcccattgatggacccagagtatgccggttattataccacagaagcaatgagaataattagacgtgaattcgactctcccgatgatgaaatgaaaaagaccattcttttagtattacaaaaatgtagcgctgtagaatccataacgccaaaatttttaagagaagaaatcgcgccagaattctttcaaaaattttgggtcagaagagtggcattggatagaccattaaacaaagttgttacatatactactgttacattagcaaagaaattaggttgttcttataccattgataaattattaacaccattgagagatgaagctgagccgttcagaacaatggctgtccatgctgttactagaacagtaaacttattagggacagcagatttagatgagagattagaaacgaggcttattgatgcgctcttgatagcatttcaagaacaaacaaatagtgattctataatctttaaagggtttggggcagtgacggtgtctcttgacatccgtatgaaaccgtttttagcacccattgtgagtacgattttaaatcatttaaagcataaaactcccttggttcgtcaacatgcagcagatttatgtgccatattaataccagtcatcaagaactgtcacgaattcgaaatgttgaataaattgaacattatattgtatgaatccttaggcgaagtatatccagaggtattaggttctataatcaacgctatgtactgtattactagcgtaatggatttggataaattacaacctcctattaatcaaattttaccaaccttaactccaattttaagaaacaagcatagaaaagtcgaagtaaacactatcaaatttgttggacttattggtaaattagcacctacctatgcacctcctaaagaatggatgagaatatgttttgaattattagaacttttgaaaagtacaaataaagaaataagaagaagtgcaaatgccacgtttggattcattgctgaagcaattggacctcacgatgttcttgttgcgttattgaacaatttaaaggttcaagaacgtcagttacgtgtatgcacggctgttgctatcggtatcgttgctaaagtgtgtggtccttacaacgtgttaccagtaatcatgaatgaatacacaacaccagagactaatgttcaaaacggtgttctcaaggccatgagtttcatgtttgagtacattggtaacatgtctaaggattacatatacttcataacaccattattagaagatgcactcaccgatagggatttagttcatcgtcagacagcgtccaacgtaataacccacttagctttaaactgttctggtacaggtcacgaagatgccttcattcatttaatgaatcttttgatacccaatatttttgaaacttctccacatgctattatgcgtattttagaaggtttggaggcattaagtcaagctcttggccctggattattcatgaactacatatgggcaggattgttccatccagcgaagaatgtaaggaaagcattttggagggtgtataataacatgtacgtaatgtaccaggacgccatggtacctttttaccccgttacaccagacaacaatgaagaatatatagaagaattagatttagttttatga

SEQ ID NO: 8943 - DNA, 1125 bp, Saccharomyces cerevisiae
atgtcactaatggacaattggaagactgatatggaaagttacgatgaaggaggcctagttgctaatccgaacttcgaggttctggccactttcaggtacgaccctggttttgcacgccagtcagcgtcaaagaaagagatctttgaaactccagaccctcgattaggtttgagagacgaagatattaggcagcagataattaatgaggattactcaagttatttacgagtaagggaggttaattccggcggtgaccttctcgaaaatattcagcatcctgatgcttggaagcatgattgcaagaccattgtgtgccagcgtgtagaagatatgctacaagtcatttatgaacgattttttttattagatgaacaataccaaagaataagaatagcattatcatactttaaaattgacttcagcacgtctctgaatgatttattgaagttattggttgaaaacttgattaattgtaaagaaggaaattcagagtatcacgaaaaaattcaaaaaatgatcaacgaaaggcaatgctataaaatgcgggtacttgtctctaagacaggagatatacgaattgaggcaattccaatgcctatggagcctatcctaaaattaacaaccgattatgacagtgtttccacatacttcatcaaaacgatgctcaatggatttttaattgatagcacaataaattgggatgttgttgtttcatctgaaccattgaacgcatcagctttcaccagttttaaaaccacttcaagagatcattacgctagggcgagagttcgcatgcaaactgctataaataacttaagaggttcagaacctacttcttctgtctcgcaatgcgaaattttattttccaacaaatctggcctgctgatggaaggttcaataacaaacgtggctgtaattcaaaaagatcctaacggttctaaaaagtatgtgacaccaagattagcaactggatgtttgtgcggaacaatgcgtcattatttattgcggctcggccttattgaagagggagatatagatataggaagccttaccgttggcaacgaagttttgcttttcaatggcgtcatgggatgcataaagggaacagtgaagacaaaatattga

SEQ ID NO: 8944 - DNA, 1125 bp, Artificial Sequence
  Description of Artificial Sequence: Synthetic polynucleotide
atgtctttgatggacaattggaagactgatatggaaagttacgatgaaggaggccttgttgctaatccgaacttcgaggttttggccactttcaggtacgaccctggttttgcacgccagtctgcgtctaagaaagagatctttgaaactccagaccctagattaggtttgagagacgaagatattaggcagcagataattaatgaggattactctagttatttaagagtaagggaggttaattccggcggtgaccttctcgaaaatattcagcatcctgatgcttggaagcatgattgcaagaccattgtgtgccagcgtgtagaagatatgttacaagtcatttatgaaagattttttttattagatgaacaataccaaagaataagaatagcattatcttactttaaaattgacttcagcacgtctttgaatgatttattgaagttattggttgaaaacttgattaattgtaaagaaggaaattctgagtatcacgaaaaaattcaaaaaatgatcaacgaaaggcaatgctataaaatgagagtacttgtctctaagacaggagatataagaattgaggcaattccaatgcctatggagcctatcttgaaattaacaaccgattatgacagtgtttccacatacttcatcaaaacgatgctcaatggatttttaattgatagcacaataaattgggatgttgttgtttcttctgaaccattgaacgcatctgctttcaccagttttaaaaccacttccagagatcattacgctagggcgagagttcgcatgcaaactgctataaataacttaagaggttctgaacctacttcttctgtctctcaatgcgaaattttattttccaacaaatctggcttattgatggaaggttccataacaaacgtggctgtaattcaaaaagatcctaacggttctaaaaagtatgtgacaccaagattagcaactggatgtttgtgcggaacaatgcgtcattatttattgaggctcggccttattgaagagggagatatagatataggaagccttaccgttggcaacgaagttttgcttttcaatggcgtcatgggatgcataaagggaacagtgaagacaaaatattga

SEQ ID NO: 8945 - DNA, 1518 bp, Saccharomyces cerevisiae
atggctaccccgtcaaataaacgttctagagattctgaatctacagaagaacctgtagtagatgaaaagagcacttcaaaacaaaacaatgccgcacctgagggagaacaaactacttgtgtggaaaagttcgaagaactaaagttatcacagccaactttaaaggccattgaaaagatgggatttaccactatgacttctgttcaggcaaggactatcccacctcttttggccggtagggatgttcttggtgctgccaagacaggttctggtaaaactctagcgtttctcatccctgctattgaactattgcattctttgaaattcaaaccaagaaatggtaccggtataattgtcattacgcctacaagagagttggctttacagatttttggagtggcaagagagttaatggaattccattcacagacatttggtattgtcattggtggtgcaaatagaagacaggaagccgaaaaattgatgaaaggtgttaacatgttgattgctacccctggaagattattggatcacttacaaaatacaaaaggatttgtattcaagaacttgaaggctttgattatcgatgaagcggacagaatcttagaaattgggtttgaagatgaaatgaggcagataattaagatcttgccaaacgaagataggcaatccatgttattttcagctacacaaacgaccaaagttgaggatttggctagaatctcgctgagaccgggccctcttttcattaatgtcgttcctgaaaccgacaactccaccgcagatggattagaacaaggctatgtggtatgtgacagtgataagagatttttgttgttattttctttcttgaaaagaaatcaaaaaaagaaaattattgtatttttatcatcttgtaactctgtgaaatattacgctgaattattgaactatattgatttgccagtcctcgaattacacggtaagcaaaaacaacaaaagagaacaaatacatttttcgaattctgtaatgcggaaagaggtatcttgatttgtacagatgtcgcagctagagggctagatatccctgctgtggactggatcattcaattcgaccctcctgatgatccaagagattatattcatagagtcggaagaaccgcaagaggcactaaaggtaagggtaaatctttaatgtttttaacacctaatgaattagggtttttaagatatctaaaggcttccaaggtcccattaaatgagtacgaattcccggaaaacaaaattgcaaacgttcaatcacaattagaaaaattaattaaatccaactattatctacatcaaacagccaaggatggttatagatcttatttacaagcgtacgcttcccactctttgaaaactgtctatcaaatcgataagctggatttagccaaagtagcaaagtcttacggttttccagtccctccaaaggttaacattacaattggtgccagtggaaaaacgccaaataccaaaagacgtaaaactcataagtaa

SEQ ID NO: 8946 - DNA, 1518 bp, Artificial Sequence
  Description of Artificial Sequence: Synthetic polynucleotide
atggctaccccgtccaataaacgttctagagattctgaatctacagaagaacctgtagtagatgaaaagagcacttctaaacaaaacaatgccgcacctgagggagaacaaactacttgtgtggaaaagttcgaagaattgaagttatctcagccaactttaaaggccattgaaaagatgggatttaccactatgacttctgttcaggcaaggactatcccacctcttttggccggtagggatgttcttggtgctgccaagacaggttctggtaaaactttggcgtttctcatccctgctattgaattattgcattctttgaaattcaaaccaagaaatggtaccggtataattgtcattacgcctacaagagagttggctttacagatttttggagtggcaagagagttaatggaattccattctcagacatttggtattgtcattggtggtgcaaatagaagacaggaagccgaaaaattgatgaaaggtgttaacatgttgattgctacccctggaagattattggatcacttacaaaatacaaaaggatttgtattcaagaacttgaaggctttgattatcgatgaagcggacagaatcttagaaattgggtttgaagatgaaatgaggcagataattaagatcttgccaaacgaagataggcaatccatgttattttctgctacacaaacgaccaaagttgaggatttggctagaatctctttgagaccgggccctcttttcattaatgtcgttcctgaaaccgacaactccaccgcagatggattagaacaaggctatgtggtatgtgacagtgataagagatttttgttgttattttctttcttgaaaagaaatcaaaaaaagaaaattattgtatttttatcttcttgtaactctgtgaaatattacgctgaattattgaactatattgatttgccagtcctcgaattacacggtaagcaaaaacaacaaaagagaacaaatacatttttcgaattctgtaatgcggaaagaggtatcttgatttgtacagatgtcgcagctagagggttagatatccctgctgtggactggatcattcaattcgaccctcctgatgatccaagagattatattcatagagtcggaagaaccgcaagaggcactaaaggtaagggtaaatctttaatgtttttaacacctaatgaattagggtttttaagatatttgaaggcttccaaggtcccattaaatgagtacgaattcccggaaaacaaaattgcaaacgttcaatctcaattagaaaaattaattaaatccaactattatttgcatcaaacagccaaggatggttatagatcttatttacaagcgtacgcttcccactctttgaaaactgtctatcaaatcgataagttggatttagccaaagtagcaaagtcttacggttttccagtccctccaaaggttaacattacaattggtgccagtggaaaaacgccaaataccaaaagacgtaaaactcataagtga

SEQ ID NO: 8947 - DNA, 1761 bp, Saccharomyces cerevisiae
atgactacagctagttcttctgcttcccagctacaacagcgcctgccggaagaaaaaccttggccgcaactgagtggcagcaatgcagacgctcaaaccttcaaatgtaaatacgtaaccaaccacaactccttgggcgatgggaattttagcgtcgtgaaagaatgtatgaatatacacacaaaggatttgtacgcgatgaagcttattaagaaacaaactgtcaagaacaaaattcaacttattcaaagagagttcgaccttttgaggtcaataagcgagaaaatcagagatatggaaaaaaagaatgaacattctttggacatttttgaggggcatcaccatattttacaacttttcgactattttgagacggcagataacattgtcctgatcactcagctgtgtcagaagggagatttgtatgaaaaaattgttgaaaatcagtgtttagacctcgaaactcaagttacctcgtactgcgcctgtttggtgagcgttctcgagtttttgcattctcaaggtattgttcatagagacttgaaagcagaaaacgtcttattcagattgagagtgaacgaaaacgaaaaaaacctacagggtgaacaccacggagatttcaaatacgatctcttggcacacgacctagttctcgccgattttggtcttgctgctgaatataacacaagtaaggtaaactcgttaaaggagtttgttggaaccatctcgtatattgctccagaaatcgtcaagtgcaaaggtgtcggtgaaatgactcctgatcaagttggcaaactagacaagtatggttgtccggtggatatatgggcccttggtgtactgacatatttcatggccttcggctatacgccctttgactgtaccacagacgacgaaactctggaatgtatttcaaaatgtgactattacgtcgacgaacaaatgatgcacgaccctaaatacgaacaattttggaattttgttcaatgctgttttactattgacccggccgttaggcgttctgctaagaatttgaaacagcatccctttattaaggattattttgctacttcaaattctttgaatactaaggacacgccgaatttctcctttcatccaacaataagaagggtatcttctacagcgtccatgcacacattgaggtctccttccaaatcaagaaagacaactactctagcgtatttaaatatggatggcgggtcctctgaaacttccaccgccttcagcagcaagatggatttgcctgacctttacgttgatagaaccattaattctcgtgaaagatcattgaatagaattcgagacactctgaagaaaacattatccatgacatctcttaagcctgcaggcacattcgactatcttcacgctaacaaaaacggtacttctttatcatcatccaagtcaggcctcgtgaaaaagaattctacttttgtcttggaccctaagccaccaaagaatagcttgatgaacggttgtttcagcaccactccagaatcgcgctcaaatttcaatacccccaaaaccttatcgaggcaaggttcctctactagcgtgaagaaatatgtcaatgaagttgacttacttttaaccccacgtacggcctcgatgagcagcaatgataccacagccattaacgattatgatactactaacgataagaatcctgcaagaaaacacgcagcttcattccaggtgaatgttgatgattctgatggtgatgaaaccatgcagatatag

SEQ ID NO: 8948 - DNA, 1761 bp, Artificial Sequence
  Description of Artificial Sequence: Synthetic polynucleotide
atgactacagctagttcttctgcttcccagttacaacagcgcttaccggaagaaaaaccttggccgcaattgagtggcagcaatgcagacgctcaaaccttcaaatgtaaatacgtaaccaaccacaactccttgggcgatgggaattttagcgtcgtgaaagaatgtatgaatatacacacaaaggatttgtacgcgatgaagcttattaagaaacaaactgtcaagaacaaaattcaacttattcaaagagagttcgaccttttgaggtctataagcgagaaaatcagagatatggaaaaaaagaatgaacattctttggacatttttgaggggcatcaccatattttacaacttttcgactattttgagacggcagataacattgtcttgatcactcagttgtgtcagaagggagatttgtatgaaaaaattgttgaaaatcagtgtttagacctcgaaactcaagttacctcttactgcgcctgtttggtgagcgttctcgagtttttgcattctcaaggtattgttcatagagacttgaaagcagaaaacgtcttattcagattgagagtgaacgaaaacgaaaaaaacttacagggtgaacaccacggagatttcaaatacgatctcttggcacacgacttggttctcgccgattttggtcttgctgctgaatataacacaagtaaggtaaactctttaaaggagtttgttggaaccatcagttatattgctccagaaatcgtcaagtgcaaaggtgtcggtgaaatgactcctgatcaagttggcaaattagacaagtatggttgtccggtggatatatgggcccttggtgtattaacatatttcatggccttcggctatacgccctttgactgtaccacagacgacgaaactttggaatgtatttccaaatgtgactattacgtcgacgaacaaatgatgcacgaccctaaatacgaacaattttggaattttgttcaatgctgttttactattgacccggccgttaggcgttctgctaagaatttgaaacagcatccctttattaaggattattttgctacttccaattctttgaatactaaggacacgccgaatttctcctttcatccaacaataagaagggtatcttctacagcgtccatgcacacattgaggtctccttccaaatctagaaagacaactactttggcgtatttaaatatggatggcgggtcctctgaaacttccaccgccttcagcagcaagatggatttgcctgacctttacgttgatagaaccattaattctcgtgaaagaagtttgaatagaattagagacactttgaagaaaacattatccatgacatctcttaagcctgcaggcacattcgactatcttcacgctaacaaaaacggtacttctttatcttcttccaagtctggcctcgtgaaaaagaattctacttttgtcttggaccctaagccaccaaagaatagcttgatgaacggttgtttcagcaccactccagaatctcgcagtaatttcaatacccccaaaaccttatctaggcaaggttcctctactagcgtgaagaaatatgtcaatgaagttgacttacttttaaccccacgtacggcctctatgagcagcaatgataccacagccattaacgattatgatactactaacgataagaatcctgcaagaaaacacgcagcttctttccaggtgaatgttgatgattctgatggtgatgaaaccatgcagatatga

SEQ ID NO: 8949 - DNA, 417 bp, Saccharomyces cerevisiae
atgtggctcacagaggctcaaaaatttggtgtggccttcactttcggcggttttctcttctttttgtttggtatatttactttttttgatcgtgccctattggccttgggcaatattttgtttttaattggagtattcttaataatcggttcacaaaagacatatattttttttaccaggccaaacaaaaggcgcggttcactatttttcctagttggtgccttcttaatactgttgaaatggacatttttgggctttataattgaatctctaggtattataggtctctttggtgatttttttggcgtcatcgtacaatttttgagatcaatgcccataattggtcccatactttctcacccagcaatcgctccaatagtagataaattagcgggagttagggttctgccagtataa

SEQ ID NO: 8950 - DNA, 417 bp, Artificial Sequence
  Description of Artificial Sequence: Synthetic polynucleotide
atgtggctcacagaggctcaaaaatttggtgtggccttcactttcggcggttttctcttctttttgtttggtatatttactttttttgatcgtgccttattggccttgggcaatattttgtttttaattggagtattcttaataatcggttctcaaaagacatatattttttttaccaggccaaacaaaaggcgcggttctttatttttcttggttggtgccttcttaatattattgaaatggacatttttgggctttataattgaatctttgggtattataggtctctttggtgatttttttggcgtcatcgtacaatttttgagaagtatgcccataattggtcccatactttctcacccagcaatcgctccaatagtagataaattagcgggagttagggttttgccagtatga

SEQ ID NO: 8951 - DNA, 1395 bp, Saccharomyces cerevisiae
atgccactgaaacgctccttaaaagaatcaatcgaaagattatctagttttcaatcaaaatataatattttcactagtatcaatccatctccttattcaatcacaaataaaaaaggtacaaaagaaacattgacaggttgcgttgccagtatcaaggataatatagttacaaaagattttccaaccacatgtgcctcacatatacttgagaatttcaagtctcccttcgatgcaacagtagtgaaactattaaaacaggcaggagtgcatatcttaggcaagacaaatttagatgaatttggaatgggttctgggggagtacattcaataagagggcccgtaattaaccctttatatcctcatgaggacaagaagatcatgggaggttcatcgtctggagccgctgcaagcgttgcttgcgatctagtcgattttgccttgggaacagatactggtggctccgttaggctccccgcatgctatggatctgttttaggattcaagccgtcctatggacggttgtcaagatttggcgtaatagcgtattctcaatctttagacactgttggcatacttagcaaaaagataaacgtcttgcgaaaagtatttcatacgctcgataaatatgacatgaaagatcccacttccttaagtgtggaattgcgtgaattgatagaagggaataaaaaggttaggagacctttaaaggtaggaattgtaaaggaatttagccatgaaagtatgcccattgggttccacagattatatttatccttactagaaaagctgataaatttagggcttgaaatataccctgtatccattccatctgtaaaaaactgtttaccgatttattatacgctatcacccgctgaagcggcttccaatttatcaaggtatgatggtatcagatatggatacagagattcagaactcgatataaaagacggtattttattcgcacctactaggtccaaattcggaacagaagttaagaatagaatcattctaggtaattataatctttgttcagatgcatttaagaacaattttattaaggcagaaaagctacgagttaatttgatcgatgaatttgacgggatcttcagatttccaaatgttttaactaattctaagggaaatccagacggcctagatctactgatagttcccacatcgtccaagcttcctggatccataagggacttcgaagaagaggaagccaaatctccggctaactcgtatataaacgatgtctttactgtcccaatgtcattggctggactaccaagtttatcaatgcctttaaaagagaagaccccgattggcttacaggtagtaggtcaatatggtgatgattccactgtgttagattttgtcgagtcaatatcataa

SEQ ID NO: 8952 - DNA, 1395 bp, Artificial Sequence
  Description of Artificial Sequence: Synthetic polynucleotide
atgccattgaaacgctccttaaaagaaagtatcgaaagattatctagttttcaaagtaaatataatattttcactagtatcaatccatctccttattctatcacaaataaaaaaggtacaaaagaaacattgacaggttgcgttgccagtatcaaggataatatagttacaaaagattttccaaccacatgtgcctctcatatacttgagaatttcaagtctcccttcgatgcaacagtagtgaaattattaaaacaggcaggagtgcatatcttaggcaagacaaatttagatgaatttggaatgggttctgggggagtacattccataagagggcccgtaattaaccctttatatcctcatgaggacaagaagatcatgggaggttcttcttctggagccgctgcaagcgttgcttgcgatttggtcgattttgccttgggaacagatactggtggctccgttaggctccccgcatgctatggatctgttttaggattcaagccgtcctatggaagattgtccagatttggcgtaatagcgtattctcaatctttagacactgttggcatacttagcaaaaagataaacgtcttgagaaaagtatttcatacgctcgataaatatgacatgaaagatcccacttccttaagtgtggaattgcgtgaattgatagaagggaataaaaaggttaggagacctttaaaggtaggaattgtaaaggaatttagccatgaaagtatgcccattgggttccacagattatatttatccttattggaaaagttaataaatttagggcttgaaatataccctgtatccattccatctgtaaaaaactgtttaccgatttattatacgttatctcccgctgaagcggcttccaatttatctaggtatgatggtatcagatatggatacagagattctgaactcgatataaaagacggtattttattcgcacctactaggtccaaattcggaacagaagttaagaatagaatcattttgggtaattataatctttgttctgatgcatttaagaacaattttattaaggcagaaaagttaagagttaatttgatcgatgaatttgacgggatcttcagatttccaaatgttttaactaattctaagggaaatccagacggcttggatttattgatagttcccacatcttccaagcttcctggatccataagggacttcgaagaagaggaagccaaatctccggctaacagttatataaacgatgtctttactgtcccaatgtctttggctggattaccaagtttatctatgcctttaaaagagaagaccccgattggcttacaggtagtaggtcaatatggtgatgattccactgtgttagattttgtcgagagtatatcttga

SEQ ID NO: 8953 - DNA, 1122 bp, Saccharomyces cerevisiae
atgaacgtcatagatttaagtgatcctgccatcaatgtggattatgatagcttgattggcattgacaatgaggaatctcaagaaatttttgaaaatgaagtgaaggaagatggacaacaagaagagcaggaagaagcatcttcaagaaaagatgggctcatcgttgaaccagggagagatgttgagagtttgagaagggctattcgagatcagttgcttttcaagatacatagacaaaaccaatcagactgtgcagatgcgagaaagttgagtaacgatgaagaagatgaaagtcggcaacagaaattagaaagaataagagaagaattggaggagttgaaaatagaaaatttaacatctgaaatgcaaactgaaatcaaggaattgtgcgaaattcaatcaaaattggcgacggaatcatctagtagattgacaaatttgaggaagaagcttctcgaaacatatgaaggccaagataccgtcatattgccaaacataattcttgatacgagtaatatcaaaagattgcaaaagttagatcagaaaatatccctaatggaacgttttgttggcataccagaagctttggaggcagaagaagataggaaatcggttcatagtaaagtcaatgaactatatagaagtattcaacttttacaaggcgatgataaggcggaaggaaagctgcaaaagttccgggatagactcgtagaactgaacgaggaatttgaaaactcattgttaggcaagaaaatacaacaggacttgaggttgaaagatgacaccgtgagcaagcttgttatgcccgaaaacaaagtaaaggagataaatagtatgtattccatgttcaagcaatatcaagattcactaccactgttggcggagaggatgaaaagtctcaataaaatgaacaacagggtgatcgaggtgtacgaaaccacgaaagggctggattcacaaataaccagcatccaagaacaaggaaaagtttggctaaaggctttaaatgagctggataaaaaattcgatgaacaagaggttaaaattcgcgaaaatatggagcagatcaggcgtaaaattgataccctcgaagacgaagctctacagagaaatagcaaataa

SEQ ID NO: 8954 - DNA, 1122 bp, Artificial Sequence
  Description of Artificial Sequence: Synthetic polynucleotide
atgaacgtcatagatttaagtgatcctgccatcaatgtggattatgatagcttgattggcattgacaatgaggaatctcaagaaatttttgaaaatgaagtgaaggaagatggacaacaagaagagcaggaagaagcatcttctagaaaagatgggctcatcgttgaaccagggagagatgttgagagtttgagaagggctattagagatcagttgcttttcaagatacatagacaaaaccaatctgactgtgcagatgcgagaaagttgagtaacgatgaagaagatgaaagtagacaacagaaattagaaagaataagagaagaattggaggagttgaaaatagaaaatttaacatctgaaatgcaaactgaaatcaaggaattgtgcgaaattcaaagtaaattggcgacggaaagctctagtagattgacaaatttgaggaagaagcttctcgaaacatatgaaggccaagataccgtcatattgccaaacataattcttgatacgagtaatatcaaaagattgcaaaagttagatcagaaaatatccttgatggaacgttttgttggcataccagaagctttggaggcagaagaagataggaaatctgttcatagtaaagtcaatgaattgtatagaagtattcaacttttacaaggcgatgataaggcggaaggaaagttacaaaagttcagagatagactcgtagaattgaacgaggaatttgaaaactctttgttaggcaagaaaatacaacaggacttgaggttgaaagatgacaccgtgagcaagcttgttatgcccgaaaacaaagtaaaggagataaatagtatgtattccatgttcaagcaatatcaagattctttaccattgttggcggagaggatgaaaagtctcaataaaatgaacaacagggtgatcgaggtgtacgaaaccacgaaagggttagattctcaaataaccagcatccaagaacaaggaaaagtttggttaaaggctttaaatgagttagataaaaaattcgatgaacaagaggttaaaattcgcgaaaatatggagcagatcaggcgtaaaattgataccctcgaagacgaagctttacagagaaatagcaaatga

SEQ ID NO: 8955 - DNA, 594 bp, Saccharomyces cerevisiae
atgatgcattttagaaagaaatccagtatcagtaacacgagtgatcatgacggagcgaaccgtgcctcagatgtcaagatttctgaagatgacaaggcaagattgaagatgcgtactgcttccgttgctgatcctattctagacgctgtgcaggaagcccaaccttttgaacaagctgctgataccttccacgacaacatgaacagacaatcttatttttccaacgaagaaggtcatgttctgtgtgatgttttcggtcaacccatcacacaggcagatatatcgaatccaactagggcaagagacgaaagacctttggacactataagaagtttcgagtatgctgtctccggagacccggtctgggcccaacagttggagactccaacttacgggttccgcgtaagacctgatttccctgtgtttggtgctgctgtgacttacgatgcgaacggtatgccacagcaagtgggtggtgcttccagtcaaatgtatggtgaacaagcagtgtatcagccacaacaacacgtacagactgaggaaaagcaaaagaagaagaagaagggattgtttggtagaatgaagaagaaataa

SEQ ID NO: 8956 - DNA, 594 bp, Artificial Sequence
  Description of Artificial Sequence: Synthetic polynucleotide
atgatgcattttagaaagaaatccagtatcagtaacacgagtgatcatgacggagcgaaccgtgcctctgatgtcaagatttctgaagatgacaaggcaagattgaagatgcgtactgcttccgttgctgatcctattttggacgctgtgcaggaagcccaaccttttgaacaagctgctgataccttccacgacaacatgaacagacaatcttatttttccaacgaagaaggtcatgttttatgtgatgttttcggtcaacccatcacacaggcagatatatccaatccaactagggcaagagacgaaagacctttggacactataagaagtttcgagtatgctgtctccggagacccggtctgggcccaacagttggagactccaacttacgggttccgcgtaagacctgatttccctgtgtttggtgctgctgtgacttacgatgcgaacggtatgccacagcaagtgggtggtgcttccagtcaaatgtatggtgaacaagcagtgtatcagccacaacaacacgtacagactgaggaaaagcaaaagaagaagaagaagggattgtttggtagaatgaagaagaaatga

SEQ ID NO: 8957 - DNA, 1677 bp, Saccharomyces cerevisiae
atggcacacatcccagaggttttacccaaatcaataccgattccggcatttattgttaccacctcatcgtacctatggtactacttcaatctggtgttgactcaaatcccgggaggccaattcatcgtttcgtacatcaagaaatcgcatcatgacgatccatacaggaccacggttgagatagggcttattttatacgggatcatctattacttgtccaagccacaacagaaaaagagtcttcaagcacagaagcccaacctatcgccccaggagattgacgcgctaattgaggactgggagcccgagcctctagtcgacccttctgccaccgatgagcaatcgtggagggtggccaaaacacccgtcaccatggaaatgcccattcagaaccatattactatcaccagaaacaacctgcaggagaagtataccaatgttttcaatttggcctcgaacaactttttgcaattgtccgctacggagcccgtgaaagaagtggtcaagaccactatcaagaattacggtgtgggcgcctgtggtcccgccgggttctacggtaaccaggacgttcattacacgttggaatatgatttagcacagttctttggcacccaaggttccgttctgtacgggcaagacttttgtgccgcaccctctgttctgcctgctttcacaaagcgtggtgatgttatcgtggcagacgaccaggtgtcattaccagtgcaaaatgctctgcaactaagcagatccacagtctactacttcaaccacaacgatatgaattcgctagaatgtttattaaacgagttgaccgaacaggagaaacttgagaaactgcccgccattccaagaaaatttatcgtcactgagggtattttccacaactcgggcgatttagctccgttgcctgagttgactaagctgaagaacaagtacaagttcagactatttgttgacgaaaccttctccattggtgttcttggcgctacgggccgtgggttgtcagagcacttcaacatggatcgcgcaactgccattgacattaccgttgggtccatggccaccgcgttggggtccaccggtggttttgtcctgggtgacagtgttatgtgtttgcaccagcgtattggttccaatgcatattgtttttctgcctgtttgccggcttacaccgtcacatccgtctccaaagtcttgaaattgatggactccaacaacgacgccgtccagacgctgcaaaaactatccaaatctttgcatgattcctttgcatctgacgactccttgcgttcatacgtaatcgtcacgtcctctccagtgtctgctgtcctacatctgcaactgactcccgcatataggtctcgcaagttcggatacacctgcgaacagctattcgaaaccatgtcagctttgcaaaagaagtcccagacaaacaaattcattgagccatacgaagaggaggaaaaatttctgcagtccatagtagatcatgctcttattaactacaacgttctcatcacaagaaacactattgttttaaaacaggagacgctaccaattgtccctagcttgaaaatctgctgtaacgccgccatgtccccagaggaactcaaaaatgcttgcgaaagtgtcaagcagtccatccttgcctgttgccaagaatctaataaataa

SEQ ID NO: 8958 - DNA, 1677 bp, Artificial Sequence
  Description of Artificial Sequence: Synthetic polynucleotide
atggcacacatcccagaggttttacccaaatctataccgattccggcatttattgttaccacctcttcctacttatggtactacttcaatttggtgttgactcaaatcccgggaggccaattcatcgtttcttacatcaagaaatctcatcatgacgatccatacaggaccacggttgagatagggcttattttatacgggatcatctattacttgtccaagccacaacagaaaaagagtcttcaagcacagaagcccaacttatctccccaggagattgacgcgttaattgaggactgggagcccgagcctttggtcgacccttctgccaccgatgagcaaagttggagggtggccaaaacacccgtcaccatggaaatgcccattcagaaccatattactatcaccagaaacaacttacaggagaagtataccaatgttttcaatttggcctccaacaactttttgcaattgtccgctacggagcccgtgaaagaagtggtcaagaccactatcaagaattacggtgtgggcgcctgtggtcccgccgggttctacggtaaccaggacgttcattacacgttggaatatgatttagcacagttctttggcacccaaggttccgttctttacgggcaagacttttgtgccgcaccctctgttttacctgctttcacaaagcgtggtgatgttatcgtggcagacgaccaggtgtctttaccagtgcaaaatgctttacaattgagcagatccacagtctactacttcaaccacaacgatatgaattctttggaatgtttattaaacgagttgaccgaacaggagaaacttgagaaattgcccgccattccaagaaaatttatcgtcactgagggtattttccacaacagtggcgatttagctccgttgcctgagttgactaagttgaagaacaagtacaagttcagattatttgttgacgaaaccttctccattggtgttcttggcgctacgggccgtgggttgagtgagcacttcaacatggatcgcgcaactgccattgacattaccgttgggtccatggccaccgcgttggggtccaccggtggttttgtcttgggtgacagtgttatgtgtttgcaccagcgtattggttccaatgcatattgtttttctgcctgtttgccggcttacaccgtcacatccgtctccaaagtcttgaaattgatggactccaacaacgacgccgtccagacgttacaaaaactttccaaatctttgcatgattcctttgcatctgacgactccttgcgttcttacgtaatcgtcacgtcctctccagtgtctgctgtcttgcatttacaattgactcccgcatataggtctcgcaagttcggatacacctgcgaacagttattcgaaaccatgtctgctttgcaaaagaagtcccagacaaacaaattcattgagccatacgaagaggaggaaaaatttttgcagtccatagtagatcatgctcttattaactacaacgttctcatcacaagaaacactattgttttaaaacaggagacgttaccaattgtccctagcttgaaaatctgctgtaacgccgccatgtccccagaggaactcaaaaatgcttgcgaaagtgtcaagcagtccatccttgcctgttgccaagaatctaataaatga

SEQ ID NO: 8959 - DNA, 1599 bp, Saccharomyces cerevisiae
atgaaagcattcaccagtttactatgtggactaggcctgtccactacactcgctaaggccatctcattgcaaagaccgttgggtctagataaggacgttttgctgcaagctgcggaaaaatttggtttggacctcgacctggatcatctcttgaaggagttggactccaatgtattggacgcttgggcccaaatagagcatttgtacccaaaccaggttatgagccttgaaacttccactaagccaaaattccctgaagcaatcaaaacgaagaaagactgggactttgtggtcaagaatgacgcaattgaaaactatcagcttcgtgtcaacaagattaaggaccctaaaatcctgggcattgacccaaatgtcacacagtacacgggttacttggatgtggaagacgaggacaagcatttcttcttttggacttttgaaagtagaaacgatcctgcaaaggatccggtcatcctttggttgaacgggggtccaggttgttcttcactaaccgggctgttctttgaattaggaccctcatccattggacctgatttgaaacccatcgggaacccttactcttggaacagcaatgccaccgtgatcttccttgaccagcctgtcaacgttgggttctcgtattccgggtcctcaggtgtttccaacactgtcgccgctggtaaggatgtctataacttcttggagttgttcttcgatcagttccctgaatacgtcaacaagggccaagatttccacatcgctggggaatcctacgccggccattacatccctgtttttgcctctgaaattttgtctcacaaggacagaaacttcaacttaacctccgtcttgatcggaaatggcctcactgacccattgactcagtataactattacgaaccaatggcctgtggtgaaggtggcgaaccatctgttttgccctcggaggaatgctctgctatggaagactctttggaacgttgtttgggcttgatcgagtcgtgctatgactcgcaatccgtctggtcctgtgttccagctaccatttattgtaataacgcccaattggctccttaccaacgtaccggcagaaacgtttacgatatcaggaaggattgtgaaggtggcaatttgtgctacccaacgttacaagatatcgacgactacttaaaccaggactacgtcaaagaagctgtcggtgcggaggttgaccactacgaatcctgtaacttcgatatcaacagaaatttcctgtttgcgggtgattggatgaagccttaccacaccgccgtaacagatcttttgaatcaagacctacccattctggtatatgcaggcgataaagatttcatctgtaactggttgggtaataaggcgtggacggatgtcttgccatggaagtacgacgaagaatttgcaagccaaaaagtacgtaactggactgcttctatcaccgacgaggtcgctggtgaagtcaaatcctacaagcacttcacctatttgagagtcttcaatggtggccacatggttccatttgacgtccctgaaaacgccttaagtatggttaacgaatggatccacggtggtttctccttataa

SEQ ID NO: 8960 - DNA, 1599 bp, Artificial Sequence
  Description of Artificial Sequence: Synthetic polynucleotide
atgaaagcattcaccagtttattatgtggattgggcttatccactacactcgctaaggccatctctttgcaaagaccgttgggtttggataaggacgttttgttgcaagctgcggaaaaatttggtttggacctcgacttggatcatctcttgaaggagttggactccaatgtattggacgcttgggcccaaatagagcatttgtacccaaaccaggttatgagccttgaaacttccactaagccaaaattccctgaagcaatcaaaacgaagaaagactgggactttgtggtcaagaatgacgcaattgaaaactatcagcttcgtgtcaacaagattaaggaccctaaaatcttgggcattgacccaaatgtcacacagtacacgggttacttggatgtggaagacgaggacaagcatttcttcttttggacttttgaaagtagaaacgatcctgcaaaggatccggtcatcctttggttgaacgggggtccaggttgttcttctttaaccgggcttttctttgaattaggaccctcttccattggacctgatttgaaacccatcgggaacccttactcttggaacagcaatgccaccgtgatcttccttgaccagcctgtcaacgttgggttctcttattccgggtccagtggtgtttccaacactgtcgccgctggtaaggatgtctataacttcttggagttgttcttcgatcagttccctgaatacgtcaacaagggccaagatttccacatcgctggggaatcctacgccggccattacatccctgtttttgcctctgaaattttgtctcacaaggacagaaacttcaacttaacctccgtcttgatcggaaatggcctcactgacccattgactcagtataactattacgaaccaatggcctgtggtgaaggtggcgaaccatctgttttgccctctgaggaatgctctgctatggaagactctttggaacgttgtttgggcttgatcgagagttgctatgactctcaatccgtctggtcctgtgttccagctaccatttattgtaataacgcccaattggctccttaccaacgtaccggcagaaacgtttacgatatcaggaaggattgtgaaggtggcaatttgtgctacccaacgttacaagatatcgacgactacttaaaccaggactacgtcaaagaagctgtcggtgcggaggttgaccactacgaatcctgtaacttcgatatcaacagaaatttcttatttgcgggtgattggatgaagccttaccacaccgccgtaacagatcttttgaatcaagacttgcccattttagtatatgcaggcgataaagatttcatctgtaactggttgggtaataaggcgtggacggatgtcttgccatggaagtacgacgaagaatttgcaagccaaaaagtacgtaactggactgcttctatcaccgacgaggtcgctggtgaagtcaaatcctacaagcacttcacctatttgagagtcttcaatggtggccacatggttccatttgacgtccctgaaaacgccttaagtatggttaacgaatggatccacggtggtttctccttatga

SEQ ID NO: 8961 - DNA, 453 bp, Saccharomyces cerevisiae
atgtctcaacccactcccatcataactacaaaatcagctgctaagccaaaaccaaaaatttttaatttattccgcgtttgcttcatttcattattgctgatcgctgcggttgaatacttcaagtatggtacaagaattaactatgaatggttccattgtaccccaatcaaagaaccccagtctggctcagtaatcaagctttgggcacgtggtgggccaagttgtgacaaaagaggcgaatataaaactatagtaaagagaatcactagagattatgaaccaaatgatgaacatctctcgttctgtatcatcgagaatgataatgttccacccgtccactacccaattcacgaagataaaggtgaacctggctacgtagcttatgtcgggtacgacacagactctgagctggttcaagaactatgtgctgattccacaatttatcacatgtga

SEQ ID NO: 8962 - DNA, 453 bp, Artificial Sequence
  Description of Artificial Sequence: Synthetic polynucleotide
atgtctcaacccactcccatcataactacaaaatctgctgctaagccaaaaccaaaaatttttaatttattccgcgtttgcttcatttctttattgttgatcgctgcggttgaatacttcaagtatggtacaagaattaactatgaatggttccattgtaccccaatcaaagaaccccagtctggctctgtaatcaagctttgggcacgtggtgggccaagttgtgacaaaagaggcgaatataaaactatagtaaagagaatcactagagattatgaaccaaatgatgaacatctctctttctgtatcatcgagaatgataatgttccacccgtccactacccaattcacgaagataaaggtgaacctggctacgtagcttatgtcgggtacgacacagactctgagttagttcaagaattatgtgctgattccacaatttatcacatgtga

SEQ ID NO: 8963 - DNA, 939 bp, Saccharomyces cerevisiae
atggataattgtaatgcctgggacaaattattgtctcagaatgaatccacaatcaacagcacagagactgctacgataacagcaatcatatattccccatcaagtaaaacactgcatcaatttataaatatctgttttccagagggaagcaattcaatactggataccactttgattaattacgccaccataggatggaccaacgacttaaaggaaaattattctgtcgatgtttacacgctaataagaaacactgacgatgcactagatcttctaaagccgtttttacaagaacatagttcgaaggttcgctggctcatattattagattggacactgaacgaccaaaagttgtggctgaatgaactatcctacgcattcaataaaattaagcaactgaatgacgataatgaattttctgtatggtgcttaaacagtggcgaaatattaaacttacaaagacacactacagtatggcagtcagtacatattgacttcattttgcaaacgttaagatcgttttgctattttaatgatagctcactattctatatatgcgaagaccataccgaagagaaacgagaggaagcacaaaggcttaaataccaagagcttctaaagcatttttgtgaagatagagatatgaaagatcatattgaaatggtcaaacgcagtgagatattaataccgaaggggtgcgattctattggattgataaaaacagtagacgaaagatttgagcctactgaggtgaaagagcaacactttttggcccgatatatggactttataccaacaattgataaaatcagagaagataggaaaacaacctctggtatcgaccttgataaactatatcctttagaagttttcaaagttaatattcaagaggaattaggcaaaatgttcgcaaaatatagggaaaattcgaggatttag

SEQ ID NO: 8964 - DNA, 939 bp, Artificial Sequence
  Description of Artificial Sequence: Synthetic polynucleotide
atggataattgtaatgcctgggacaaattattgtctcagaatgaatccacaatcaacagcacagagactgctacgataacagcaatcatatattccccatctagtaaaacattgcatcaatttataaatatctgttttccagagggaagcaattctatattggataccactttgattaattacgccaccataggatggaccaacgacttaaaggaaaattattctgtcgatgtttacacgttgataagaaacactgacgatgcattggatcttttgaagccgtttttacaagaacatagttccaaggttcgctggctcatattattagattggacattgaacgaccaaaagttgtggttaaatgaattatcctacgcattcaataaaattaagcaattgaatgacgataatgaattttctgtatggtgcttaaacagtggcgaaatattaaacttacaaagacacactacagtatggcagtctgtacatattgacttcattttgcaaacgttaagatctttttgctattttaatgatagctctttattctatatatgcgaagaccataccgaagagaaaagagaggaagcacaaaggcttaaataccaagagcttttgaagcatttttgtgaagatagagatatgaaagatcatattgaaatggtcaaacgcagtgagatattaataccgaaggggtgcgattctattggattgataaaaacagtagacgaaagatttgagcctactgaggtgaaagagcaacactttttggccagatatatggactttataccaacaattgataaaatcagagaagataggaaaacaacctctggtatcgaccttgataaactttatcctttagaagttttcaaagttaatattcaagaggaattaggcaaaatgttcgcaaaatatagggaaaattctaggatttga

SEQ ID NO: 8965 - DNA, 1533 bp, Saccharomyces cerevisiae
atgtgtggtattttaggtattgtattagcaaaccaaaccactccagtagctccggagttatgtgatggatgcatttttctacaacatcgtggacaagatgcagctggtatagctacctgtggttctcgtggtagaatctaccaatgtaaaggtaatggtatggctcgtgacgtatttacccaacaacgtgtttccggtcttgctggttccatgggtattgcccacttgagatatcctacagccgggtcttcggctaattcagaagcgcaaccattttacgtcaatagtccttacggtattaacttggcacataacggtaacttggtgaatactgcatcattgaagagatatatggatgaagacgttcatagacatattaacacggacagtgattcggagttactattgaatatttttgctgctgaactggaaaaacataacaagtacagagttaacaatgaagatgttttccacgcgttagaaggtgtttaccgtttatgccgtggcggttatgcttgcgttggtttacttgccggttttgcattatttggtttcagagatccaaatggtattaggccattattgttcggtgaaagagaaaatccggacggcactaaggactatatgttagcttcagaaagtgttgttttcaaagctcacaactttactaaatatcgtgacttaaagcctggcgaggcagttatcatccctaagaactgtagcaaaggtgaacctgagttcaaacaagtggttcctattaactcttatagacctgatttatttgaatacgtatatttcgccagaccggacagtgtcttggatggaatatcagtttatcacacaagattggctatgggttctaaattagcggaaaatattctaaagcaactgaagccagaagatattgatgttgttattcccgtcccagatactgcaagaacatgtgcactagaatgtgctaatgtgttagggaagccttatagagagggctttgttaaaaacagatacgtgggcaggacatttatcatgccaaaccagagggaaagggtttcttcagtaaggaggaagcttaaccctatggagtctgaatttaagggtaagaaggttctgatagtggatgattctattgtcagaggtactacttcaaaagagattgttaacatggccaaggaatccggtgcaacaaaggtttacttcgcttcagctgccccagccattcgttacaaccatatttatggtattgacttaacagacacaaagaacttgattgcttataacagaaccgatgaagaagtggcggaagtaatcggttgtgaaagagtcatttaccaatcattggaagatttgattgattgttgtaaaactgataaaataaccaaattcgaagatggtgtatttaccggaaattatgtcactggtgttgaagacggttatattcaagaattggaagaaaaacgtgaatcgatcgcaaataattcatcagatatgaaggctgaagtcgatatcggattatataattgtgcagattattga

SEQ ID NO: 8966 - DNA, 1533 bp, Artificial Sequence
  Description of Artificial Sequence: Synthetic polynucleotide
atgtgtggtattttaggtattgtattagcaaaccaaaccactccagtagctccggagttatgtgatggatgcatttttttgcaacatcgtggacaagatgcagctggtatagctacctgtggttctcgtggtagaatctaccaatgtaaaggtaatggtatggctcgtgacgtatttacccaacaacgtgtttccggtcttgctggttccatgggtattgcccacttgagatatcctacagccgggtcttctgctaattctgaagcgcaaccattttacgtcaatagtccttacggtattaacttggcacataacggtaacttggtgaatactgcaagtttgaagagatatatggatgaagacgttcatagacatattaacacggacagtgattctgagttattattgaatatttttgctgctgaattggaaaaacataacaagtacagagttaacaatgaagatgttttccacgcgttagaaggtgtttaccgtttatgccgtggcggttatgcttgcgttggtttacttgccggttttgcattatttggtttcagagatccaaatggtattaggccattattgttcggtgaaagagaaaatccggacggcactaaggactatatgttagcttctgaaagtgttgttttcaaagctcacaactttactaaatatcgtgacttaaagcctggcgaggcagttatcatccctaagaactgtagcaaaggtgaacctgagttcaaacaagtggttcctattaactcttatagacctgatttatttgaatacgtatatttcgccagaccggacagtgtcttggatggaatatctgtttatcacacaagattggctatgggttctaaattagcggaaaatattttgaagcaattgaagccagaagatattgatgttgttattcccgtcccagatactgcaagaacatgtgcattggaatgtgctaatgtgttagggaagccttatagagagggctttgttaaaaacagatacgtgggcaggacatttatcatgccaaaccagagggaaagggtttcttctgtaaggaggaagcttaaccctatggagtctgaatttaagggtaagaaggttttgatagtggatgattctattgtcagaggtactacttctaaagagattgttaacatggccaaggaatccggtgcaacaaaggtttacttcgcttctgctgccccagccattcgttacaaccatatttatggtattgacttaacagacacaaagaacttgattgcttataacagaaccgatgaagaagtggcggaagtaatcggttgtgaaagagtcatttaccaatctttggaagatttgattgattgttgtaaaactgataaaataaccaaattcgaagatggtgtatttaccggaaattatgtcactggtgttgaagacggttatattcaagaattggaagaaaaacgtgaaagtatcgcaaataattcttctgatatgaaggctgaagtcgatatcggattatataattgtgcagattattga

SEQ ID NO: 8967 - DNA, 2073 bp, Saccharomyces cerevisiae
atgctgcttcttccaagatgtcctgtaattgggcgaattgtaagatcaaaatttagatctggtctaatccggaaccattcgcccgttatatttactgtgtctaagttatcaacccagcggcctctgttattcaattcagctgtgaatttatggaatcaagcacaaaaggatattacgcacaaaaaatccgtcgagcaattctcgtcggctccaaaagtgaagactcaggtaaaaaagaccagcaaggccccaaccctctcggaactgaaaatcttgaaagatctatttcgctatatttggcccaaaggcaacaataaagtgaggataagggtactgattgcccttggactgttgatatccgccaaaattttaaatgttcaagtacctttttttttcaagcaaactattgattcaatgaatatagcatgggatgatcctacagtcgcccttccggcagcgattggattaaccattctttgctatggtgttgcaaggttcggctctgttttattcggcgaactgaggaacgccgtatttgccaaagtggcacagaatgccattagaactgtgtcgctacaaactttccagcaccttatgaagttagatttgggatggcacttgagtagacaaacgggtggtctgacgagggccatggatagaggtacaaagggtatatctcaagtgttaacggccatggtattccacattatccctataagttttgaaatatctgtcgtttgtgggattttgacgtatcaattcggtgcgtcatttgccgcaataacattcagtacaatgcttttatactccattttcactataaagacgaccgcatggaggacacattttagaagggatgctaacaaggccgataacaaagctgccagtgtggctttagattctttaattaattttgaggcggtaaaatacttcaacaatgaaaaatatcttgcagataagtataatggctccttgatgaactatcgtgactctcaaattaaagtatcgcaatctctagcatttttgaactccggccaaaatctaatttttactactgccctaactgcaatgatgtatatgggttgcaccggcgttattggtggcaacttgacagttggtgacttggttctaattaatcagttggtttttcaactatcagtaccgctaaattttcttggtagtgtttacagagatttaaagcagtctctgattgatatggaaacgctatttaagttaagaaaaaatgaagtcaagattaaaaatgccgaacgtcccttaatgcttccagaaaatgttccctacgatattacttttgagaacgtcacgtttggatatcatcccgataggaaaattttaaagaatgccagctttaccatcccagcaggctggaaaaccgcaatagttgggtcttcgggcagtgggaagtccaccattttaaaattagtctttagattttatgatcctgaaagcggaaggatcctcataaacggtagagatattaaagaatatgacatcgatgccttgaggaaggtgattggtgtggtaccacaggacacaccacttttcaatgacactatctgggaaaatgtaaagttcggtcgtattgacgcaaccgacgaggaagtgataactgtagttgaaaaagcccagctagcacccttaatcaagaaattaccacaaggttttgacaccatcgtcggggagcgagggttgatgatcagcggtggtgaaaagcaaaggctggcaattgcaagggtactattgaagaatgcaaggatcatgttttttgacgaggccacaagcgccttggacacacacacagaacaagctctcttacgaaccattagagataactttacttcgggttcgagaacgagtgtatacatcgcacatagactgaggacaattgcagatgcagacaagatcatagtccttgacaacggaagagtaagagaggaaggtaagcatcttgaactgttggctatgccagggtcattgtaccgcgaactttggaccatacaagaagatctggatcatttagagaatgaactaaaagaccagcaagaactatga

SEQ ID NO: 8968 - DNA, 2073 bp, Artificial Sequence
  Description of Artificial Sequence: Synthetic polynucleotide
atgttacttcttccaagatgtcctgtaattgggagaattgtaagaagtaaatttagatctggtttgatcagaaaccattctcccgttatatttactgtgtctaagttatctacccagaggcctttattattcaattctgctgtgaatttatggaatcaagcacaaaaggatattacgcacaaaaaatccgtcgagcaattctcttctgctccaaaagtgaagactcaggtaaaaaagaccagcaaggccccaaccctctctgaattgaaaatcttgaaagatttatttcgctatatttggcccaaaggcaacaataaagtgaggataagggtacttattgcccttggattattgatatccgccaaaattttaaatgttcaagtacctttttttttcaagcaaactattgattctatgaatatagcatgggatgatcctacagtcgcccttccggcagcgattggattaaccattctttgctatggtgttgcaaggttcggctctgttttattcggcgaattgaggaacgccgtatttgccaaagtggcacagaatgccattagaactgtgtctttacaaactttccagcaccttatgaagttagatttgggatggcacttgagtagacaaacgggtggtttaacgagggccatggatagaggtacaaagggtatatctcaagtgttaacggccatggtattccacattatccctataagttttgaaatatctgtcgtttgtgggattttgacgtatcaattcggtgcgtcttttgccgcaataacattcagtacaatgcttttatactccattttcactataaagacgaccgcatggaggacacattttagaagggatgctaacaaggccgataacaaagctgccagtgtggctttagattctttaattaattttgaggcggtaaaatacttcaacaatgaaaaatatcttgcagataagtataatggctccttgatgaactatcgtgactctcaaattaaagtatctcaatctttggcatttttgaactccggccaaaatttaatttttactactgccttaactgcaatgatgtatatgggttgcaccggcgttattggtggcaacttgacagttggtgacttggttttgattaatcagttggtttttcaattaagtgtaccgttaaattttcttggtagtgtttacagagatttaaagcagtctttgattgatatggaaacgttgtttaagttaagaaaaaatgaagtcaagattaaaaatgccgaacgtcccttaatgcttccagaaaatgttccctacgatattacttttgagaacgtcacgtttggatatcatcccgataggaaaattttaaagaatgccagctttaccatcccagcaggctggaaaaccgcaatagttgggtcttctggcagtgggaagtccaccattttaaaattagtctttagattttatgatcctgaaagcggaaggatcctcataaacggtagagatattaaagaatatgacatcgatgccttgaggaaggtgattggtgtggtaccacaggacacaccacttttcaatgacactatctgggaaaatgtaaagttcggtcgtattgacgcaaccgacgaggaagtgataactgtagttgaaaaagcccagttagcacccttaatcaagaaattaccacaaggttttgacaccatcgtcggggagagagggttgatgatcagcggtggtgaaaagcaaaggttagcaattgcaagggtacttttgaagaatgcaaggatcatgttttttgacgaggccacaagcgccttggacacacacacagaacaagctctcttaagaaccattagagataactttacttctggttccagaacgagtgtatacatcgcacatagattaaggacaattgcagatgcagacaagatcatagtccttgacaacggaagagtaagagaggaaggtaagcatcttgaattattggctatgccagggtctttgtaccgcgaactttggaccatacaagaagatttggatcatttagagaatgaattgaaagaccagcaagaattgtga

SEQ ID NO: 8969 - DNA, 2553 bp, Saccharomyces cerevisiae
atgttgctagtacgaacgacttccctgaatgtgtcaaggatgccagtgccatgcctcgccagaggaataggcatcctcaagggcaaatatagactagcgaacctgatgaatgcccaaccctcagtgagacatgtgtcgagcgagatccagcaaaaggatcagcaggcaggagagtcaaacaccgccaccgatactggtgttattcacaaatcagatgaagaaactctgatatatttcgataatgtttacgctagaaccacctcggtttggaatccaacactgtggtacaatctcctgctaagaaaccagtcacgggatgcagtgagggagaaaataaggaatttagccagtccacccaataaccccatttatggactggagttgaagtctaccattccagtgaaaagggatggtggtgtatttgccacatttgtcgttccacccaagtatacaaaagctcaggtaaattctctaatccaacagaatacagccagagaatcctctaaaaacttactctcgtacttcactcgagcttctgccttcccagtaaagggttcgccttggattgaggatttaagaagactaccaagtaccactatagtcatcaagttccaagggcccgccttaacagaagaagaaatatactctttattcagaagatatgggacaattattgatattttccctcccactgctgctaacaacaatgtggcaaaggtaagataccgttcattccgtggtgccatttctgccaagaattgtgtttccggtatcgaaattcataataccgtcttacacatacaatacgaaaatatcagaagaggccatctagttagtaattttttcaccaaccatacaaggattgctattccagttttatttgcgctactttcaatctttgctgttttagtgtttgatcctataagagaattttcgattgaacagaagatcactcacaaatattctttatcgtgggacaataagttttggaaacaactgaaaacgctaacctcatctaccatgacttctatcaagtactactggggcggccctgatgataatcaccaaagaaagcatttatgggaggaaagaatagagaaagtgaatgacctgaaaatgtggcttgaagaaaataataatacttttgtggttataagggggcctagaggttcagggaaacatgatttggtcatgcaacacactttgcaaaatagagcaaatgttttgtatttggattgtgataaattgattaagtccagaacagatcctatgtttttaaaaaatgccgctagtcaattgggttatttcccaatattcccatggattgactctgtcacaggtgtccttgatttaacagtgcaaggattaacagggcaaaaaactgggttgtctgagacgaaggaatctcggtttagaaacatgttaactacctcattgatgtccattagacgtattgctctcaagaattacaaggcttttgtttccaccggtgatgggacagttaatgttaaggaagaagattacctacagcaacatccggaagctaaacccgttatcgtcatagataggtttgagggcaagtcggaaataaatggatttgtgtataaggaactatccgattgggcagctatgctagttcaaatgaatattgctcatgtgattttcttaacggaaaccgttgcatccaaccaaagattgagcgaatcactacccaatcaagtcttcaaaaacctaatcctatcagatgcctcaaaagagaattcgaggaactatgtattatcccaattggaggattacttatattacaataaaaaatccaagggtgaaaacgtaaaagaacctgaatcagaaaaggaaactgctgaaaataatgattctgatagtgaggccgatacgagtgtcaaaaaagctgaggttattttaaatgaaaaggaattacaggaaattgacgcttctttagagccattgggtggtaggatgttagacttacaggcatttgtaagaagggtaaagtcaggagaagagccctcggaagcagtagacaaaatgattgaacaggcttctgagcaaataactcaaatgtttttaagtgacaagattgacagcaataaaagtgcacaagcctgggaattaatcgaattattgagtgcgaacccagtcattccattccatgaaatcgttaacaagccattattcaaagccgcaccagaaacgggaatcatggaattggagaataatggtttaataactgtatctagagataggggtgttttacaggaaatcaggcctgccaaaccgctatacagggcagcattcacatacttgatcaacgatcctgaactcgcaaaagtgctaaaaacccgttacttattaaaggttgtgggttttgaaactggtagaatcaagaaatgggaagaagaattaaaacctttggggaaagttcctgatcagaaacttttcaagaccagattggactatttatccggtaaaatcaatgccagtaatgcagtcattaccaaatgtgaagaagaaattaaaaacctatctaagtga

SEQ ID NO: 8970 - DNA, 2553 bp, Artificial Sequence
  Description of Artificial Sequence: Synthetic polynucleotide
atgttgttagtaagaacgacttccttgaatgtgtctaggatgccagtgccatgcctcgccagaggaataggcatcctcaagggcaaatatagattagcgaacttgatgaatgcccaaccctctgtgagacatgtgagtagcgagatccagcaaaaggatcagcaggcaggagagagcaacaccgccaccgatactggtgttattcacaaatctgatgaagaaactttgatatatttcgataatgtttacgctagaaccacctctgtttggaatccaacattatggtacaatctccttttgagaaaccagtctagagatgcagtgagggagaaaataaggaatttagccagtccacccaataaccccatttatggattggagttgaagtctaccattccagtgaaaagggatggtggtgtatttgccacatttgtcgttccacccaagtatacaaaagctcaggtaaattctttgatccaacagaatacagccagagaatcctctaaaaacttactctcttacttcactagagcttctgccttcccagtaaagggttctccttggattgaggatttaagaagattaccaagtaccactatagtcatcaagttccaagggcccgccttaacagaagaagaaatatactctttattcagaagatatgggacaattattgatattttccctcccactgctgctaacaacaatgtggcaaaggtaagataccgttctttccgtggtgccatttctgccaagaattgtgtttccggtatcgaaattcataataccgtcttacacatacaatacgaaaatatcagaagaggccatttggttagtaattttttcaccaaccatacaaggattgctattccagttttatttgcgttactttctatctttgctgttttagtgtttgatcctataagagaattttctattgaacagaagatcactcacaaatattctttatcttgggacaataagttttggaaacaattgaaaacgttgacctcttctaccatgacttctatcaagtactactggggcggccctgatgataatcaccaaagaaagcatttatgggaggaaagaatagagaaagtgaatgacttgaaaatgtggcttgaagaaaataataatacttttgtggttataagggggcctagaggttctgggaaacatgatttggtcatgcaacacactttgcaaaatagagcaaatgttttgtatttggattgtgataaattgattaagtccagaacagatcctatgtttttaaaaaatgccgctagtcaattgggttatttcccaatattcccatggattgactctgtcacaggtgtccttgatttaacagtgcaaggattaacagggcaaaaaactgggttgtctgagacgaaggaatctagatttagaaacatgttaactacctctttgatgtccattagacgtattgctctcaagaattacaaggcttttgtttccaccggtgatgggacagttaatgttaaggaagaagattacttacagcaacatccggaagctaaacccgttatcgtcatagataggtttgagggcaagtctgaaataaatggatttgtgtataaggaattatccgattgggcagctatgcttgttcaaatgaatattgctcatgtgattttcttaacggaaaccgttgcatccaaccaaagattgagcgaatctttacccaatcaagtcttcaaaaacttgatcttaagtgatgcctccaaagagaattctaggaactatgtattatcccaattggaggattacttatattacaataaaaaatccaagggtgaaaacgtaaaagaacctgaaagtgaaaaggaaactgctgaaaataatgattctgatagtgaggccgatacgagtgtcaaaaaagctgaggttattttaaatgaaaaggaattacaggaaattgacgcttctttagagccattgggtggtaggatgttagacttacaggcatttgtaagaagggtaaagagtggagaagagcccagtgaagcagtagacaaaatgattgaacaggcttctgagcaaataactcaaatgtttttaagtgacaagattgacagcaataaaagtgcacaagcctgggaattaatcgaattattgagtgcgaacccagtcattccattccatgaaatcgttaacaagccattattcaaagccgcaccagaaacgggaatcatggaattggagaataatggtttaataactgtatctagagataggggtgttttacaggaaatcaggcctgccaaaccgttgtacagggcagcattcacatacttgatcaacgatcctgaactcgcaaaagtgttgaaaacccgttacttattaaaggttgtgggttttgaaactggtagaatcaagaaatgggaagaagaattaaaacctttggggaaagttcctgatcagaaacttttcaagaccagattggactatttatccggtaaaatcaatgccagtaatgcagtcattaccaaatgtgaagaagaaattaaaaacttatctaagtga

SEQ ID NO: 8971 - DNA, 1047 bp, Saccharomyces cerevisiae
atgtctattccagaaactcaaaaagccattatcttctacgaatccaacggcaagttggagcataaggatatcccagttccaaagccaaagcccaacgaattgttaatcaacgtcaagtactctggtgtctgccacaccgatttgcacgcttggcatggtgactggccattgccaactaagttaccattagttggtggtcacgaaggtgccggtgtcgttgtcggcatgggtgaaaacgttaagggctggaagatcggtgactacgccggtatcaaatggttgaacggttcttgtatggcctgtgaatactgtgaattgggtaacgaatccaactgtcctcacgctgacttgtctggttacacccacgacggttctttccaagaatacgctaccgctgacgctgttcaagccgctcacattcctcaaggtactgacttggctgaagtcgcgccaatcttgtgtgctggtatcaccgtatacaaggctttgaagtctgccaacttgagagcaggccactgggcggccatttctggtgctgctggtggtctaggttctttggctgttcaatatgctaaggcgatgggttacagagtcttaggtattgatggtggtccaggaaaggaagaattgtttacctcgctcggtggtgaagtattcatcgacttcaccaaagagaaggacattgttagcgcagtcgttaaggctaccaacggcggtgcccacggtatcatcaatgtttccgtttccgaagccgctatcgaagcttctaccagatactgtagggcgaacggtactgttgtcttggttggtttgccagccggtgcaaagtgctcctctgatgtcttcaaccacgttgtcaagtctatctccattgtcggctcttacgtggggaacagagctgataccagagaagccttagatttctttgccagaggtctagtcaagtctccaataaaggtagttggcttatccagtttaccagaaatttacgaaaagatggagaagggccaaattgctggtagatacgttgttgacacttctaaataa

SEQ ID NO: 8972 - DNA, 1047 bp, Artificial Sequence
  Description of Artificial Sequence: Synthetic polynucleotide
atgtctattccagaaactcaaaaagccattatcttctacgaatccaacggcaagttggagcataaggatatcccagttccaaagccaaagcccaacgaattgttaatcaacgtcaagtactctggtgtctgccacaccgatttgcacgcttggcatggtgactggccattgccaactaagttaccattagttggtggtcacgaaggtgccggtgtcgttgtcggcatgggtgaaaacgttaagggctggaagatcggtgactacgccggtatcaaatggttgaacggttcttgtatggcctgtgaatactgtgaattgggtaacgaatccaactgtcctcacgctgacttgtctggttacacccacgacggttctttccaagaatacgctaccgctgacgctgttcaagccgctcacattcctcaaggtactgacttggctgaagtcgcgccaatcttgtgtgctggtatcaccgtatacaaggctttgaagtctgccaacttgagagcaggccactgggcggccatttctggtgctgctggtggtttaggttctttggctgttcaatatgctaaggcgatgggttacagagtcttaggtattgatggtggtccaggaaaggaagaattgtttacctctctcggtggtgaagtattcatcgacttcaccaaagagaaggacattgttagcgcagtcgttaaggctaccaacggcggtgcccacggtatcatcaatgtttccgtttccgaagccgctatcgaagcttctaccagatactgtagggcgaacggtactgttgtcttggttggtttgccagccggtgcaaagtgctcctctgatgtcttcaaccacgttgtcaagtctatctccattgtcggctcttacgtggggaacagagctgataccagagaagccttagatttctttgccagaggtttggtcaagtctccaataaaggtagttggcttatccagtttaccagaaatttacgaaaagatggagaagggccaaattgctggtagatacgttgttgacacttctaaatga

SEQ ID NO: 8973 - DNA, 3693 bp, Saccharomyces cerevisiae
atgagctctgaagacgaattgggaagtatcggtactgtgtttcccggaagtcccatagataagagcattgggagtattctcccacaatttgatgaagaagtggagactttgctggaagatagcttcacgtggaacattcctgactggaacgagttaacaaacccgaaatacaattcgcccaggtttagaattggtgatttcgaatgggacattctattattccctcagggaaaccataataaaggtgttgcggtatatctggaacctcatccggaagaaaaattagatgagactacgggagagatggtgccagttgatccggactggtattgttgtgctcagtttgccattggtatatctagacctggtaatggtgacaccatcaatttaattaacaaatcgcatcaccgattcaacgctctagatacagactggggatttgcaaatttgatagatttgaacaacttgaaacatccctcaaaaggaagaccgctttcgttcttaaacgaagggaccttgaacataacagcgtatgtgcgcatattgaaggatcctactggtgtcttgtggcataatttcctgaattatgactcgaagaaagtcacgggctatgttggcttccgaaatcagggtgccacatgctatttgaattcgttattgcaatcttacttctttacaaaatacttcagaaaactggtttacgaaatacccaccgaacatgaaagtccaaacaacagtgtcccattggctttgcaaagagctttctaccaactacaagtatccgatataccattagacactttggaacttaccaggtcattcggttgggacactgcggaatccttcactcaacacgatgtgcaggaattgaataggatattaatggacaggctggaaaataatatgaagggaacacccgtggaggggaagttaaatgaaatatttgtcggaaaaatgaaaagttatattaaatgtatcaatgttgattatgaatctgctagagtggaggacttttgggatctgcaactgaatgtcaaaaatttcaagaatttacaagaatcttttgacaattacattgagatggaactaatgaatggtgaaaatcagtatgctgctcaagactatggtttgcaagatgctcaaaaaggtgttatattcgaatcatttccgccagttttacatctgcagttgaaaagatttgaatacgattttaattatgatcagatggtaaaggttaacgataaatatgaatttcctgaaacaattgacttgtcgcccttcgttgataaagacgtattaaagaaaacgttagactcggagaacaaggataagaatccttatgtttataacttacatggtgtgctagttcattctggtgatatatctaccggccactactatactctgattaaacctggtgttgaagatcaatggtacagatttgatgatgaaagggtttggagggtcacaaagaaacaagttttccaagaaaattttggatgtgataggttgcctgatgaaaaagttcgtacaatgacgagaggtgagtatcagaactatatcattcaacgccatacaagtgcttatatgcttgtttatatacgtcaagaacaagaggaggatttgctgcgtccagttttggaatctgatgttcctaagcatgtaatcacaagagtaagagaagaaatcaaagaacgggaaacaaaagaaaaggaaattagagaagcacacctgtatgtcacgctcagattgcactcaatcaaagagtttattcattatgaaggatttgactatttcgcacatgatgggtttaggttatttgcagaggagctcaatgactctggtttgcagcaaatcaacttaaaagtcttgagaacaactaagttatcggatatttttgcaagcattaaggaaactatgaatattccacaagaaagggacgtcaaatattggaaaatggattatcgcagaaacagcactttgcgtttaacacaacccataaattttgaatccgtaaacatcactttgcaggaggcattaaaaaaggagaagaaaaggactatgcaaacgcaatatggagaggaaggtgttgctagtactgaggaagacgacaaggcacttttagaaactgtatcattcttagatcttttcattgaggagccctatctagagttacaatttttgaacaagctgaaggaagcttctttaatctcaaaggcccagctggatgatgagctgatatcaactataagaacgaatcttccagaactaacaaagggaggaatcgagcctgtttttgccaccgacaataaatctaatttgctattcgtcaagagctacgacccacatacccaaaagctattgggatttggccattttgccgtaaatcaattgcaacagctatcggatatatctgcaattattgaggacagcatttcttccaacgaaaagctgactttctacgaagaagtccaacctggtaccataaatgaaatatatatgaaggagacaatatatgatgctgatatagacacgggtgatatagtttcatttgaggttccaggtgctgttttgccagatacttttccagtttacgcaacaatcaaagatttttactcatatctgaggtatcgtgtaaaattgaagttttctaaatttgacggttcaagtgaggaatatggagttagtaatgaaatcccagagagcttcgaattctggatatccgcttatgcaccttatgatgaccttgctagaatggtgtcgaaatatgcgcacgttaagccagaatatctaaagattattgccctttattctaatggaagatttgtgttaaaatcaacctcacttttgaatgattaccttttgaaagatttcaattgcgatcaaataccgccttttgcatttgaagtattgtctgtgcctttgaaagaattggagcgtttgaggccaattaaattatattggctaaaaaatagttatattcattatcaatgtttcgaattcgaagtcgcaaacgattatacagaatctcaatttcttgaaaaagtgcaacacaagatcggctttaccgatgaagaaaaggagaacatcttactctggaccaacacaaatttccagtttcagggcttattatcggaccaaaacaccttcaaagatgtgagtaaacattctttactctttggtagaattttacccgaggagtctaaattgttcaaagaattaaatcgtctagaaaacgtacaaacatcttcattggaggattttatggatgatgaaaacgcgactgacagaccaatggacgatgagcaagatctaggtatggcgatagaacattctgaagatatgaaagggcgtatagtggttgttcaacaatatttcaaagaccttgagaatagacacggaatatccttcttatttaatttaataccagacgaaacattcccaaagacaaaagatcgtcttcatgcaaaatttggtctcggacaaaaagaattttcaaagatcaaattaagtattggttactccactgaagaaggtacggtgtttagaagtttgcaaggattttcggacgaagaattggacaaagttatattgtatgacattatgtccaacttagattatatctacatggatcatccggatagattgagatcgcattcttcctatgatagaccaatgatcattaaaaactga

SEQ ID NO: 8974 - DNA, 3693 bp, Artificial Sequence
  Description of Artificial Sequence: Synthetic polynucleotide
atgagctctgaagacgaattgggaagtatcggtactgtgtttcccggaagtcccatagataagagcattgggagtattctcccacaatttgatgaagaagtggagactttgttggaagatagcttcacgtggaacattcctgactggaacgagttaacaaacccgaaatacaattctcccaggtttagaattggtgatttcgaatgggacattttattattccctcagggaaaccataataaaggtgttgcggtatatttggaacctcatccggaagaaaaattagatgagactacgggagagatggtgccagttgatccggactggtattgttgtgctcagtttgccattggtatatctagacctggtaatggtgacaccatcaatttaattaacaaatctcatcacagattcaacgctttagatacagactggggatttgcaaatttgatagatttgaacaacttgaaacatccctctaaaggaagaccgctttctttcttaaacgaagggaccttgaacataacagcgtatgtgcgcatattgaaggatcctactggtgtcttgtggcataatttcttgaattatgactccaagaaagtcacgggctatgttggcttcagaaatcagggtgccacatgctatttgaattctttattgcaatcttacttctttacaaaatacttcagaaaattggtttacgaaatacccaccgaacatgaaagtccaaacaacagtgtcccattggctttgcaaagagctttctaccaattacaagtatccgatataccattagacactttggaacttaccaggtctttcggttgggacactgcggaatccttcactcaacacgatgtgcaggaattgaataggatattaatggacaggttagaaaataatatgaagggaacacccgtggaggggaagttaaatgaaatatttgtcggaaaaatgaaaagttatattaaatgtatcaatgttgattatgaatctgctagagtggaggacttttgggatttgcaattgaatgtcaaaaatttcaagaatttacaagaatcttttgacaattacattgagatggaattgatgaatggtgaaaatcagtatgctgctcaagactatggtttgcaagatgctcaaaaaggtgttatattcgaaagttttccgccagttttacatttacagttgaaaagatttgaatacgattttaattatgatcagatggtaaaggttaacgataaatatgaatttcctgaaacaattgacttgagccccttcgttgataaagacgtattaaagaaaacgttagactctgagaacaaggataagaatccttatgtttataacttacatggtgtgcttgttcattctggtgatatatctaccggccactactatactttgattaaacctggtgttgaagatcaatggtacagatttgatgatgaaagggtttggagggtcacaaagaaacaagttttccaagaaaattttggatgtgataggttgcctgatgaaaaagttcgtacaatgacgagaggtgagtatcagaactatatcattcaacgccatacaagtgcttatatgcttgtttatatacgtcaagaacaagaggaggatttgttacgtccagttttggaatctgatgttcctaagcatgtaatcacaagagtaagagaagaaatcaaagaaagagaaacaaaagaaaaggaaattagagaagcacacttgtatgtcacgctcagattgcactccatcaaagagtttattcattatgaaggatttgactatttcgcacatgatgggtttaggttatttgcagaggagctcaatgactctggtttgcagcaaatcaacttaaaagtcttgagaacaactaagttaagtgatatttttgcaagcattaaggaaactatgaatattccacaagaaagggacgtcaaatattggaaaatggattatcgcagaaacagcactttgcgtttaacacaacccataaattttgaatccgtaaacatcactttgcaggaggcattaaaaaaggagaagaaaaggactatgcaaacgcaatatggagaggaaggtgttgctagtactgaggaagacgacaaggcacttttagaaactgtatctttcttagatcttttcattgaggagccctatttggagttacaatttttgaacaagttgaaggaagcttctttaatctccaaggcccagttagatgatgagttgatatctactataagaacgaatcttccagaattaacaaagggaggaatcgagcctgtttttgccaccgacaataaatctaatttgttattcgtcaagagctacgacccacatacccaaaagttgttgggatttggccattttgccgtaaatcaattgcaacagttaagtgatatatctgcaattattgaggacagcatttcttccaacgaaaagttgactttctacgaagaagtccaacctggtaccataaatgaaatatatatgaaggagacaatatatgatgctgatatagacacgggtgatatagtttcttttgaggttccaggtgctgttttgccagatacttttccagtttacgcaacaatcaaagatttttactcctatttgaggtatcgtgtaaaattgaagttttctaaatttgacggtagtagtgaggaatatggagttagtaatgaaatcccagagagcttcgaattctggatatccgcttatgcaccttatgatgaccttgctagaatggtgtctaaatatgcgcacgttaagccagaatatttgaagattattgccctttattctaatggaagatttgtgttaaaatctacctctcttttgaatgattaccttttgaaagatttcaattgcgatcaaataccgccttttgcatttgaagtattgtctgtgcctttgaaagaattggagcgtttgaggccaattaaattatattggttgaaaaatagttatattcattatcaatgtttcgaattcgaagtcgcaaacgattatacagaatctcaatttcttgaaaaagtgcaacacaagatcggctttaccgatgaagaaaaggagaacatcttactctggaccaacacaaatttccagtttcagggcttattaagtgaccaaaacaccttcaaagatgtgagtaaacattctttactctttggtagaattttacccgaggagtctaaattgttcaaagaattaaatcgtttagaaaacgtacaaacatcttctttggaggattttatggatgatgaaaacgcgactgacagaccaatggacgatgagcaagatttaggtatggcgatagaacattctgaagatatgaaagggcgtatagtggttgttcaacaatatttcaaagaccttgagaatagacacggaatatccttcttatttaatttaataccagacgaaacattcccaaagacaaaagatcgtcttcatgcaaaatttggtctcggacaaaaagaattttccaagatcaaattaagtattggttactccactgaagaaggtacggtgtttagaagtttgcaaggattttctgacgaagaattggacaaagttatattgtatgacattatgtccaacttagattatatctacatggatcatccggatagattgagaagccattcttcctatgatagaccaatgatcattaaaaactga

SEQ ID NO: 8975 - DNA, 1170 bp, Saccharomyces cerevisiae
atgcgtttttcaaatttcctaactgtatctgcattattaaccggagctctaggagctcctgctgttcgccataaacatgaaaagcgtgacgttgttactgccacagtccatgcgcaggttactgttgtcgtttccggtaacagcggcgaaactattgttccagtgaacgagaatgctgttgtagctactaccagcagtactgcagttgcttctcaagcaactacatccactttagaaccaacaacttccgctaatgtcgtcacttctcaacaacaaaccagcactcttcaatcttccgaggcagcatctacggttggttcttcgacttcatcctcaccctcatcctcatcctcaacttcatcttcagcttcatcctccgcttcatctagtatctcagcctccggtgctaagggtattacttacagtccttacaatgatgatgggtcctgtaaatctactgctcaagtcgcctcagatttagaacagttgactggttttgacaacatcagattatatggcgttgactgtagtcaggttgagaatgtcttgcaagctaaaacttcaagccagaaattattcttaggcatatattacgttgacaaaattcaagacgccgttgatactattaaatctgcagttgagtcttatggctcctgggatgatattaccactgtttctgtcggtaacgaactggtcaatggcggttctgccactacgacgcaagtcggtgaatacgtttccacggccaagtcagctttaacctctgctggttatacaggctcagtcgtttccgttgataccttcattgctgttataaataaccctgacctgtgtaattattctgactatatggctgtcaacgcccatgcatacttcgatgaaaatactgcggcccaagatgcaggaccatgggtactagaacaaatcgaaagggtttacactgcttgtggtgggaaaaaggacgtcgttattaccgaaactggttggccatctaagggtgatacttacggcgaagctgtcccatctaaagcaaaccaagaagccgccatttcttctatcaaaagctcctgcggctcttcagcttacttatttaccgccttcaatgatctatggaaagatgatgggcaatacggtgttgaaaaatactggggtattctatcaagtgattaa

SEQ ID NO: 8976 - DNA, 1170 bp, Artificial Sequence
  Description of Artificial Sequence: Synthetic polynucleotide
atgcgtttttctaatttcttgactgtatctgcattattaaccggagctttaggagctcctgctgttcgccataaacatgaaaagcgtgacgttgttactgccacagtccatgcgcaggttactgttgtcgtttccggtaacagcggcgaaactattgttccagtgaacgagaatgctgttgtagctactaccagcagtactgcagttgcttctcaagcaactacatccactttagaaccaacaacttccgctaatgtcgtcacttctcaacaacaaaccagcactcttcaatcttccgaggcagcatctacggttggttcttctacttcttcctctccctcttcctcctccagcacttcttcttctgcttcttcctccgcttcttctagtatcagtgcctccggtgctaagggtattacttacagtccttacaatgatgatgggtcctgtaaatctactgctcaagtcgcctctgatttagaacagttgactggttttgacaacatcagattatatggcgttgactgtagtcaggttgagaatgtcttgcaagctaaaacttccagccagaaattattcttaggcatatattacgttgacaaaattcaagacgccgttgatactattaaatctgcagttgagtcttatggctcctgggatgatattaccactgtttctgtcggtaacgaattggtcaatggcggttctgccactacgacgcaagtcggtgaatacgtttccacggccaagtctgctttaacctctgctggttatacaggctctgtcgtttccgttgataccttcattgctgttataaataaccctgacttatgtaattattctgactatatggctgtcaacgcccatgcatacttcgatgaaaatactgcggcccaagatgcaggaccatgggtattggaacaaatcgaaagggtttacactgcttgtggtgggaaaaaggacgtcgttattaccgaaactggttggccatctaagggtgatacttacggcgaagctgtcccatctaaagcaaaccaagaagccgccatttcttctatcaaaagctcctgcggctcttctgcttacttatttaccgccttcaatgatttatggaaagatgatgggcaatacggtgttgaaaaatactggggtattttatccagtgattga

SEQ ID NO: 8977 - DNA, 5358 bp, Saccharomyces cerevisiae
atggattttatgagtcccaagttttcgctaactgacgttgagtatcctgcttggtgccaagacgatgaagtcccaataacaatgcaggaaattagagaaatttttgtggagctcatggataagtttggcttccagaaatcttctatggaaaatatgtatcaacatttaatgggacagctggactccagggcaagtcgtacaggtgctcaaaatgctttagtatcgctacatgtttcatatattggaggcgaacacgcaaattatagaaaatggtattttgccgctcagctcgatttagatgaagagatcgggtttcaaaacatgcgactacatggaaaggcacgccaaagaaacgtaaaaatggcgaagaaaagaggcgtatcgataaaggaacaaattaagcaatggaatgagaaggagcaagagttcatcaataaccatccaaagatcacactgactcaagaacaattggaagatcagacaaacttgaaaagtgcagactacaaatggaaattgaaaatgaaaaaattgacgcccgaaaatatgataagacagctggccctttatttgctttgctggggtgaagccaatcaagtcagattcgccccagaatgcctttgctttattttcaaatgtgcacttgattatgatattagtacgtcaagtagcgaaaaaacggtgaaatcacctgagtattcatacttaaatgacgttattactcccttatacgaattcctaaggggccaagtatacaaaaaagacgcaaaggggaactggaaacgaagagaaaaagaccacaagaatattattggttacgacgacatcaatcaattattttggtacccggaaggatttgaacgtattattttaaacaatggagaacgattagttgacaagccattggaggagagatatctttactttaaagacgttgcatggtctaaagtattttataagacatatagagaaaccagaagttggaagcattgttttaccaatttcaatagattctggattatccattttgcaccgttttggttcttcaccacatttaattcccccactttgtacaccaagaattatatacagttattgaataaccagcctacaccccaagttagactatcagtgattgcctttggaggcacaattgcatgtttagttcaaattttagccaccgtgttcgagtggggatttgtacctcgagaatggccaggcgctcagcatttatcgagtagaatgattggcttacttttttgtcttgcaatcaatttgggaccttccgtgtatgttctggggtttttcgaatgggatgttcattcaaaatctgcgtatatcgtgtccatcgtccaactaatcattgcatttttaaccacttttttttttgctgtcagacctttgggcggcttatttcgtccatatttgaataaagacaaaaaacatcggaggtacatctcatcgcaaacctttaccgcttcatttcctaagctgacaggacgcagcaaatggttttcttatgggttatgggtatttgtgtatttggcgaaatatattgagtcctatttttttttgaccttgtccctcagggaccccatcagggtcctctctattatggatttgtccagatgtcaaggtgaatatttgttgggtcctattctatgtaaatggcaagccaaaattacattagttctcatgctgctttctgacttgggcctgttttttctcgacacttacctttggtacattatttgcaactgtattttttccattgtactgtcattttctcttggtacttcaattctcacgccatggaagaatgtatactctcgattgccaaaaaggatatattccaaaatccttgctacttcagagatggatgtaaaatttaaagcaaaaatactgatatcgcaggtttggaatgccattgttatatcaatgtatagggaacatcttctctccattgaacatttacaaagactcttgtttcagcaagttgactccttaatgggagacacaagaaccctgaaatcgcctacatttttcgttgcacaagatgattcaacgttcaagtcaatggaattttttccatcaaattcagaggcaaaaagaaggatatccttttttgcccaatccctggcgacccccatttcagaacctgttccagtggattgtatgccaacttttaccgttttggtaccccattattcagaaaagattctgttgggcttgaaggaaattatcagggaagaatctcctaaaagtaaaatcacggtgcttgagtatttgaagcatctacaccctacagaatgggaatgttttgttaaggataccaaactactaagcatggaaaagagctttttgaaagaggcagagagcagtcatgatgaagatagattggaaattccggatgctctgtacgatccaaggtctagcccgctttctgaccatactgagtcccggaagttgcccacagaagacgatcttattaaggagaaaattaatgatttgccattttcttactttggcttcaactcatcagaaccatcgtacaccctgagaacaagaatctgggcatcattgcggacgcagactttgtaccgaaccctttcagggtttatgaactattccaaagctattaagctactgtatcgaattgaaaacccctctttagttagcttgtatcgtggcaataatgaagcattggagaatgacttagaaaatatggctagcaggaaatttaggatggttgttgctatgcagagatatgcaaaatttaataaggatgaagtggaggcaacagaactacttttaagagcctatccaaatatgtttatatcttaccttttggaagaattagagcaaaatgaatctgagaaaacgtactattcgtgcctgactaatggctatgctgagtttgacgaagaaagtggattaaggaagccaatattcaaaattcgcctgtcgggcaatccaatacttggcgatggaaaatcggataatcagaaccattctattatattttatcgtggtgagtatattcaggtgattgatgcaaaccaagataattatttggaggaatgcctaaagatacggtctgttttaagtgagttcgaagagcttgagcttaatcccacaatcccatacattcctggcattgaatatgaagaagaaccaccgcccatcgctattgttggttcaagagagtatattttttcagaaaatattggagtgttaggtgatattgctgcaggtaaagaacagacttttggaaccttatttgctagaacgttggctgaaattggtggtaaattgcactatgggcatcccgattttctcaatggcatttttatgaccactcgtggtggcctgtctaaggcacaaagaggattgcatttaaacgaggatatatatgctggaatgaacgcaatctgccgtggtggaaagataaaacatagtgattactaccaatgtggtaagggtagagatttgggatttgggtccatcctgaatttcactactaaaataggtgcaggtatgggggaacagctactatcaagggagtactattatttggggacacaacttcccatggatagatttttatcgtttttttatgcacatcctggtttccatctgaataatctttttatttccttttcggttcaactgttcttcgttctgcttttaaacttgggtgcgttgaaccatgaaattatagcctgcttttacgacaaggatgcaccaattacaaatcttgagacacccgttggttgttataatattcagcctgcattgcattgggtatcgatattcgtactatcaatcttcattgttttctttattgcctttgcccctttgctgattcaagaagttttggaaaagggtatttggagagcagcttcaaggttcctacatcatcttctttcaatggccccattatttgaagtattcgtctgccaagtttattcgaattctctattgatggacttgacctttgggggagcaaagtacatatctacaggtcgtgggtttgcaataacacgcctcgatttttttacgctctattccagatttgttaatatatcgatatattctggtttccaagtgttcttcatgttattattcgcgattatttccatgtggcaacccgccttattatggttttggattacagtcatttcgatgtgcttcgcaccttttattttcaatccacatcagttcgcattcatggatttcttcattgattataaaacctttatccactggttattctcaggtaacacgaaatatcaaaaagaatcgtgggcaaactttgtcaagagttctcgatcaagatttacgggctataaaagtaaaactgtagatgatatttccgaagattcaggccatgattcaaagaaagcgaggttttggaacgtcttctttgcagaactatttctacctttctgtgtgttcctcttcaacttcaccgctttttctttcattaatgcacaaacaggggtctctgactcaacaccaactagcgctgttttccgtttgttgctcgtaacttttttgccaatctttcttaactcaatagtgctttttctattattttgggtttcactttttgtggttcctggattgtcatattgttgtaaagacgcaggtgccgtgattgcgtttattgcacacactttctcggttttggtctatcttttagatttcgaactgatgtggttcttacaaggttggaactttacccgtacattgatactgcttattacgtgcatcaatatgcatctgattcttttcaaggtctttacgacgatattcttgacaagggagtataaaaacaataaggcacatttggcatggtggaatggtaaatggtacaatacgggcatgggctggtctatcattttacagcccatacgagaatacttcgtgaagattatggaatctagttattttgcagcagatttctttcttggtcacttcctcttatttatacaaacgcccataatattgttaccatttatcgattactggcatacaatggtgctattttggatgaatccaagaagtattatcgcgcataaaagaattttgactcgaaagcagagagcattaagaagtaggatagtttcaaaatatttctctctatattttgtgatgctaggtgtgctcctttttatgctcatcgcgccattctttgctggtgatttcgtatctagtccgcaagaattgctggaaggcacccttttcgaaggaatcttccaacctaacaaccaaaacaacaacgatactggtccaaatgctccatcgacaatcctgactacaacaccaactttacctacctttaggactgtcgcatag

SEQ ID NO: 8978 - DNA, 5358 bp, Artificial Sequence
  Description of Artificial Sequence: Synthetic polynucleotide
atggattttatgagtcccaagttttctttgactgacgttgagtatcctgcttggtgccaagacgatgaagtcccaataacaatgcaggaaattagagaaatttttgtggagctcatggataagtttggcttccagaaatcttctatggaaaatatgtatcaacatttaatgggacagttagactccagggcaagtcgtacaggtgctcaaaatgctttagtatctttgcatgtttcttatattggaggcgaacacgcaaattatagaaaatggtattttgccgctcagctcgatttagatgaagagatcgggtttcaaaacatgagattacatggaaaggcacgccaaagaaacgtaaaaatggcgaagaaaagaggcgtatctataaaggaacaaattaagcaatggaatgagaaggagcaagagttcatcaataaccatccaaagatcacattgactcaagaacaattggaagatcagacaaacttgaaaagtgcagactacaaatggaaattgaaaatgaaaaaattgacgcccgaaaatatgataagacagttggccctttatttgctttgctggggtgaagccaatcaagtcagattcgccccagaatgcctttgctttattttcaaatgtgcacttgattatgatattagtacgtccagtagcgaaaaaacggtgaaatctcctgagtattcttacttaaatgacgttattactcccttatacgaattcttgaggggccaagtatacaaaaaagacgcaaaggggaactggaaaagaagagaaaaagaccacaagaatattattggttacgacgacatcaatcaattattttggtacccggaaggatttgaacgtattattttaaacaatggagaaagattagttgacaagccattggaggagagatatctttactttaaagacgttgcatggtctaaagtattttataagacatatagagaaaccagaagttggaagcattgttttaccaatttcaatagattctggattatccattttgcaccgttttggttcttcaccacatttaattcccccactttgtacaccaagaattatatacagttattgaataaccagcctacaccccaagttagattatctgtgattgcctttggaggcacaattgcatgtttagttcaaattttagccaccgtgttcgagtggggatttgtacctagagaatggccaggcgctcagcatttatccagtagaatgattggcttacttttttgtcttgcaatcaatttgggaccttccgtgtatgttttggggtttttcgaatgggatgttcattctaaatctgcgtatatcgtgtccatcgtccaattgatcattgcatttttaaccacttttttttttgctgtcagacctttgggcggcttatttcgtccatatttgaataaagacaaaaaacatagaaggtacatctcttctcaaacctttaccgcttcttttcctaagttaacaggacgcagcaaatggttttcttatgggttatgggtatttgtgtatttggcgaaatatattgagtcctatttttttttgaccttgtccctcagggaccccatcagggtcctctctattatggatttgtccagatgtcaaggtgaatatttgttgggtcctattctttgtaaatggcaagccaaaattacattagttctcatgttactttctgacttgggcttattttttctcgacacttacctttggtacattatttgcaactgtattttttccattgtattatctttttctcttggtacttctattctcacgccatggaagaatgtatactctagattgccaaaaaggatatattccaaaatccttgctacttccgagatggatgtaaaatttaaagcaaaaatattaatatctcaggtttggaatgccattgttatatccatgtatagggaacatcttctctccattgaacatttacaaagactcttgtttcagcaagttgactccttaatgggagacacaagaaccttgaaatctcctacatttttcgttgcacaagatgattctacgttcaagtctatggaattttttccatccaattctgaggcaaaaagaaggatatccttttttgcccaatccttagcgacccccatttctgaacctgttccagtggattgtatgccaacttttaccgttttggtaccccattattctgaaaagattttattgggcttgaaggaaattatcagggaagaatctcctaaaagtaaaatcacggtgcttgagtatttgaagcatttgcaccctacagaatgggaatgttttgttaaggataccaaattattaagcatggaaaagagctttttgaaagaggcagagagcagtcatgatgaagatagattggaaattccggatgctttgtacgatccaaggtctagcccgctttctgaccatactgagtccagaaagttgcccacagaagacgatcttattaaggagaaaattaatgatttgccattttcttactttggcttcaactcttctgaaccatcttacaccttgagaacaagaatctgggcaagtttgagaacgcagactttgtacaggaccctttccgggtttatgaactattccaaagctattaagttattatatagaattgaaaacccctctttagttagcttgtatcgtggcaataatgaagcattggagaatgacttagaaaatatggctagcaggaaatttaggatggttgttgctatgcagagatatgcaaaatttaataaggatgaagtggaggcaacagaattgcttttaagagcctatccaaatatgtttatatcttaccttttggaagaattagagcaaaatgaatctgagaaaacgtactattcttgcttgactaatggctatgctgagtttgacgaagaaagtggattaaggaagccaatattcaaaattcgcttaagtggcaatccaatacttggcgatggaaaatctgataatcagaaccattctattatattttatcgtggtgagtatattcaggtgattgatgcaaaccaagataattatttggaggaatgcttgaagataagatctgttttaagtgagttcgaagagcttgagcttaatcccacaatcccatacattcctggcattgaatatgaagaagaaccaccgcccatcgctattgttggttccagagagtatattttttctgaaaatattggagtgttaggtgatattgctgcaggtaaagaacagacttttggaaccttatttgctagaacgttggctgaaattggtggtaaattgcactatgggcatcccgattttctcaatggcatttttatgaccactcgtggtggcttatctaaggcacaaagaggattgcatttaaacgaggatatatatgctggaatgaacgcaatctgccgtggtggaaagataaaacatagtgattactaccaatgtggtaagggtagagatttgggatttgggtccatcttgaatttcactactaaaataggtgcaggtatgggggaacagttgttatctagggagtactattatttggggacacaacttcccatggatagatttttatcttttttttatgcacatcctggtttccatttgaataatctttttatttccttttctgttcaattattcttcgttttacttttaaacttgggtgcgttgaaccatgaaattatagcctgcttttacgacaaggatgcaccaattacaaatcttgagacacccgttggttgttataatattcagcctgcattgcattgggtatctatattcgtattatctatcttcattgttttctttattgcctttgcccctttgttaattcaagaagttttggaaaagggtatttggagagcagcttccaggttcttacatcatcttctttctatggccccattatttgaagtattcgtctgccaagtttattctaattctttgttgatggacttgacctttgggggagcaaagtacatatctacaggtcgtgggtttgcaataacacgcctcgatttttttacgctctattccagatttgttaatatatccatatattctggtttccaagtgttcttcatgttattattcgcgattatttccatgtggcaacccgccttattatggttttggattacagtcatttccatgtgcttcgcaccttttattttcaatccacatcagttcgcattcatggatttcttcattgattataaaacctttatccactggttattctctggtaacacgaaatatcaaaaagaaagttgggcaaactttgtcaagagttctagatctagatttacgggctataaaagtaaaactgtagatgatatttccgaagattctggccatgattctaagaaagcgaggttttggaacgtcttctttgcagaattatttttacctttctgtgtgttcctcttcaacttcaccgctttttctttcattaatgcacaaacaggggtctctgactctacaccaactagcgctgttttccgtttgttgctcgtaacttttttgccaatctttcttaacagcatagtgctttttttattattttgggtttccctttttgtggttcctggattgagttattgttgtaaagacgcaggtgccgtgattgcgtttattgcacacactttctctgttttggtctatcttttagatttcgaattgatgtggttcttacaaggttggaactttacccgtacattgatattacttattacgtgcatcaatatgcatttgattcttttcaaggtctttacgacgatattcttgacaagggagtataaaaacaataaggcacatttggcatggtggaatggtaaatggtacaatacgggcatgggctggtctatcattttacagcccataagagaatacttcgtgaagattatggaatctagttattttgcagcagatttctttcttggtcacttcctcttatttatacaaacgcccataatattgttaccatttatcgattactggcatacaatggtgcttttttggatgaatccaagaagtattatcgcgcataaaagaattttgactagaaagcagagagcattaagaagtaggatagtttccaaatatttctctttgtattttgtgatgttgggtgtgctcctttttatgctcatcgcgccattctttgctggtgatttcgtatctagtccgcaagaattgttggaaggcacccttttcgaaggaatcttccaacctaacaaccaaaacaacaacgatactggtccaaatgctccatctacaatcttgactacaacaccaactttacctacctttaggactgtcgcatga

SEQ ID NO: 8979 - DNA, 1680 bp, Saccharomyces cerevisiae
atgttgtttaaatccctttcaaagttagcaaccgctgctgctttttttgctggcgtcgcaactgcggacgatgttccagcgattgaagttgttggtaataagtttttctactccaacaacggtagtcagttctacataagaggtgttgcttatcaggctgataccgctaatgaaactagcggatctactgtcaacgatcctttggccaattatgagagttgttccagagatattccatacctcaaaaaattgaacacaaatgttatccgtgtctacgctatcaataccactctagatcactccgaatgtatgaaggctttgaatgatgctgacatctatgtcatcgctgatttagcagctccagccacctctatcaatagagacgatccaacttggactgttgacttgttcaacagctacaaaaccgttgttgacacttttgctaattacaccaacgttttgggtttcttcgccggtaatgaagttactaacaattacaccaacacagatgcatctgctttcgtgaaggcagctattagagacgtcagacaatacatcagcgacaagaactacagaaaaattccagttggctactcttccaatgatgacgaagataccagagttaagatgactgattatttcgcttgtggtgatgatgatgttaaggctgatttttacggtattaatatgtatgaatggtgtggtaaatctgacttcaaaacttctggttatgctgatagaactgcagaattcaaaaacttatctattcctgttttcttctctgaatacggttgtaacgaagtaacaccaagactatttactgaggttgaagccttgtacggttctaatatgacagatgtctggtctggtggtatcgtatacatgtacttcgaagagactaacaaatacggtttagttagcatcgatggtaatgatgttaaaactttggatgacttcaacaactattcttctgaaatcaacaaaatatcaccaacttccgccaacacaaagtcttacagtgcaacaacaagtgatgttgcttgtccagctactggtaagtactggtccgctgcaacagaattaccaccaactccaaacggaggcttgtgttcatgtatgaatgcagccaatagttgtgttgtttccgatgacgttgattctgatgattacgaaaccttatttaactggatctgtaatgaagtcgactgtagcggtatttcagcaaacggtaccgccggtaagtatggtgcttactctttctgtacaccaaaggaacagctatctttcgttatgaatttgtactacgagaagagtggtggtagcaaatctgactgtagcttcagcggttctgccactctacaaactgccaccacgcaagctagttgctcctccgctttgaaagagattggtagtatgggtaccaactctgcatcaggtagtgttgatttgggttccggaactgaatccagtactgcctcttctaacgcttcggggtcttcttccaagtctaactccggctcttctggttcttccagttcttcttcttcttcttcagcttcatcttcatcttctagcaagaagaatgctgccaccaacgttaaagctaacttagcacaagtggtctttacctccatcatttccttatccattgccgctggtgtcggttttgctttggtttaa

SEQ ID NO: 8980 - DNA, 1680 bp, Artificial Sequence
  Description of Artificial Sequence: Synthetic polynucleotide
atgttgtttaaatccctttccaagttagcaaccgctgctgctttttttgctggcgtcgcaactgcggacgatgttccagcgattgaagttgttggtaataagtttttctactccaacaacggtagtcagttctacataagaggtgttgcttatcaggctgataccgctaatgaaactagcggatctactgtcaacgatcctttggccaattatgagagttgttccagagatattccatacctcaaaaaattgaacacaaatgttatccgtgtctacgctatcaataccactttagatcactccgaatgtatgaaggctttgaatgatgctgacatctatgtcatcgctgatttagcagctccagccacctctatcaatagagacgatccaacttggactgttgacttgttcaacagctacaaaaccgttgttgacacttttgctaattacaccaacgttttgggtttcttcgccggtaatgaagttactaacaattacaccaacacagatgcatctgctttcgtgaaggcagctattagagacgtcagacaatacatcagcgacaagaactacagaaaaattccagttggctactcttccaatgatgacgaagataccagagttaagatgactgattatttcgcttgtggtgatgatgatgttaaggctgatttttacggtattaatatgtatgaatggtgtggtaaatctgacttcaaaacttctggttatgctgatagaactgcagaattcaaaaacttatctattcctgttttcttctctgaatacggttgtaacgaagtaacaccaagattatttactgaggttgaagccttgtacggttctaatatgacagatgtctggtctggtggtatcgtatacatgtacttcgaagagactaacaaatacggtttagttagcatcgatggtaatgatgttaaaactttggatgacttcaacaactattcttctgaaatcaacaaaatatctccaacttccgccaacacaaagtcttacagtgcaacaacaagtgatgttgcttgtccagctactggtaagtactggtccgctgcaacagaattaccaccaactccaaacggaggcttgtgttcttgtatgaatgcagccaatagttgtgttgtttccgatgacgttgattctgatgattacgaaaccttatttaactggatctgtaatgaagtcgactgtagcggtatttctgcaaacggtaccgccggtaagtatggtgcttactctttctgtacaccaaaggaacagctttctttcgttatgaatttgtactacgagaagagtggtggtagcaaatctgactgtagcttcagcggttctgccactttacaaactgccaccacgcaagctagttgctcctccgctttgaaagagattggtagtatgggtaccaactctgcatctggtagtgttgatttgggttccggaactgaatccagtactgcctcttctaacgcttctgggtcttcttccaagtctaactccggctcttctggttcttccagttcttcttcttcttcttctgcttcttcttcttcttctagcaagaagaatgctgccaccaacgttaaagctaacttagcacaagtggtctttacctccatcatttccttatccattgccgctggtgtcggttttgctttggtttga

SEQ ID NO: 8981 - DNA, 3270 bp, Saccharomyces cerevisiae
atgtctgctttaccggaagaagttaatagaacattacttcagattgtccaggcgtttgcttcccctgacaatcaaatacgttctgtagctgagaaggctcttagtgaagaatggattaccgaaaacaatattgagtatcttttaacttttttggctgaacaagccgctttctcccaagatacaacagttgcagcattatctgctgttctgtttagaaaattagcattaaaagctcccccttcttcgaagcttatgattatgtccaaaaatatcacacatattaggaaagaagttcttgcacaaattcgttcttcattgttaaaagggtttttgtcggaaagagctgattcaattaggcacaaactatctgatgctattgctgagtgtgttcaagacgacttaccagcatggccagaattactacaagctttaatagagtctttaaaaagcggtaacccaaattttagagaatccagttttagaattttgacgactgtaccttatttaattaccgctgttgacatcaacagtatcttaccaatttttcaatcaggctttactgatgcaagtgataatgtcaaaattgctgcagttacggctttcgtgggttattttaagcaactaccaaaatctgagtggtccaagttaggtattttattaccaagtcttttgaatagtttaccaagatttttagatgatggtaaggacgatgcccttgcatcagtttttgaatcgttaattgagttggtggaattggcaccaaaactattcaaggatatgtttgaccaaataatacaattcactgatatggttataaaaaataaggatttagaacctccagcaagaaccacagcactcgaactgctaaccgttttcagcgagaacgctccccaaatgtgtaaatcgaaccagaattacgggcaaactttagtgatggttactttaatcatgatgacggaggtatccatagatgatgatgatgcagcagaatggatagaatctgacgataccgatgatgaagaggaagttacatatgaccacgctcgtcaagctcttgatcgtgttgctttaaagctgggtggtgaatatttggctgcaccattgttccaatatttacagcaaatgatcacatcaaccgaatggagagaaagattcgcggccatgatggcactttcctctgcagctgagggttgtgctgatgttctgatcggcgagatcccaaaaatcctggatatggtaattcccctcatcaacgatcctcatccaagagtacagtatggatgttgtaatgttttgggtcaaatatctactgatttttcaccattcattcaaagaactgcacacgatagaattttgccggctttaatatctaaactaacgtcagaatgcacctcaagagttcaaacgcacgccgcagcggctctggttaacttttctgaattcgcttcgaaggatattcttgagccttacttggatagtctattgacaaatttattagttttattacaaagcaacaaactttacgtacaggaacaggccctaacaaccattgcatttattgctgaagctgcaaagaataaatttatcaagtattacgatactctaatgccattattattaaatgttttgaaggttaacaataaagataatagtgttttgaaaggtaaatgtatggaatgtgcaactctgattggttttgccgttggtaaggaaaaatttcatgagcactctcaagagctgatttctatattggtcgctttacaaaactcagatatcgatgaagatgatgcgctcagatcatacttagaacaaagttggagcaggatttgccgaattctgggtgatgattttgttccgttgttaccgattgttataccacccctgctaattactgccaaagcaacgcaagacgtcggtttaattgaagaagaagaagcagcaaatttccaacaatatccagattgggatgttgttcaagttcagggaaaacacattgctattcacacatccgtccttgacgataaagtatcagcaatggagctattacaaagctatgcgacacttttaagaggccaatttgctgtatatgttaaagaagtaatggaagaaatagctctaccatcgcttgacttttacctacatgacggtgttcgtgctgcaggagcaactttaattcctattctattatcttgtttacttgcagccaccggtactcaaaacgaggaattggtattgttgtggcataaagcttcgtctaaactaatcggaggcttaatgtcagaaccaatgccagaaatcacgcaagtttatcacaactcgttagtgaatggtattaaagtcatgggtgacaattgcttaagcgaagaccaattagcggcatttactaagggtgtctccgccaacttaactgacacttacgaaaggatgcaggatcgccatggtgatggtgatgaatataatgaaaatattgatgaagaggaagactttactgacgaagatcttctcgatgaaatcaacaagtctatcgcggccgttttgaaaaccacaaatggtcattatctaaagaatttggagaatatatggcctatgataaacacattccttttagataatgaaccaattttagtcatttttgcattagtagtgattggtgacttgattcaatatggtggcgaacaaactgctagcatgaagaacgcatttattccaaaggttaccgagtgcttgatttctcctgacgctcgtattcgccaagctgcttcttatataatcggtgtttgtgcccaatacgctccatctacatatgctgacgtttgcataccgactttagatacacttgttcagattgtcgattttccaggctccaaactggaagaaaatcgttcttcaacagagaatgccagtgcagccatcgccaaaattctttatgcatacaattccaacattcctaacgtagacacgtacacggctaattggttcaaaacgttaccaacaataactgacaaagaagctgcctcattcaactatcaatttttgagtcaattgattgaaaataattcgccaattgtgtgtgctcaatctaatatctccgctgtagttgattcagtcatacaagccttgaatgagagaagtttgaccgaaagggaaggccaaacggtgataagttcagttaaaaagttgttgggatttttgccttctagtgatgctatggcaattttcaatagatatccagctgatattatggagaaagtacataaatggtttgcataa

SEQ ID NO: 8982 - DNA, 3270 bp, Artificial Sequence
  Description of Artificial Sequence: Synthetic polynucleotide
atgtctgctttaccggaagaagttaatagaacattacttcagattgtccaggcgtttgcttcccctgacaatcaaatacgttctgtagctgagaaggctcttagtgaagaatggattaccgaaaacaatattgagtatcttttaacttttttggctgaacaagccgctttctcccaagatacaacagttgcagcattatctgctgttttatttagaaaattagcattaaaagctcccccttcttccaagcttatgattatgtccaaaaatatcacacatattaggaaagaagttcttgcacaaattcgttcttctttgttaaaagggtttttgagtgaaagagctgattctattaggcacaaattatctgatgctattgctgagtgtgttcaagacgacttaccagcatggccagaattattacaagctttaatagagtctttaaaaagcggtaacccaaattttagagaatccagttttagaattttgacgactgtaccttatttaattaccgctgttgacatcaacagtatcttaccaatttttcaaagtggctttactgatgcaagtgataatgtcaaaattgctgcagttacggctttcgtgggttattttaagcaattaccaaaatctgagtggtccaagttaggtattttattaccaagtcttttgaatagtttaccaagatttttagatgatggtaaggacgatgcccttgcatctgtttttgaatctttaattgagttggtggaattggcaccaaaattattcaaggatatgtttgaccaaataatacaattcactgatatggttataaaaaataaggatttagaacctccagcaagaaccacagcactcgaattattaaccgttttcagcgagaacgctccccaaatgtgtaaaagtaaccagaattacgggcaaactttagtgatggttactttaatcatgatgacggaggtatccatagatgatgatgatgcagcagaatggatagaatctgacgataccgatgatgaagaggaagttacatatgaccacgctcgtcaagctcttgatcgtgttgctttaaagttgggtggtgaatatttggctgcaccattgttccaatatttacagcaaatgatcacatctaccgaatggagagaaagattcgcggccatgatggcactttcctctgcagctgagggttgtgctgatgttttgatcggcgagatcccaaaaatcttagatatggtaattcccctcatcaacgatcctcatccaagagtacagtatggatgttgtaatgttttgggtcaaatatctactgatttttctccattcattcaaagaactgcacacgatagaattttgccggctttaatatctaaattaacgagtgaatgcacctccagagttcaaacgcacgccgcagcggctttggttaacttttctgaattcgcttccaaggatattcttgagccttacttggatagtttattgacaaatttattagttttattacaaagcaacaaactttacgtacaggaacaggccttaacaaccattgcatttattgctgaagctgcaaagaataaatttatcaagtattacgatactttaatgccattattattaaatgttttgaaggttaacaataaagataatagtgttttgaaaggtaaatgtatggaatgtgcaactttgattggttttgccgttggtaaggaaaaatttcatgagcactctcaagagttgatttctatattggtcgctttacaaaacagtgatatcgatgaagatgatgcgctcagatcttacttagaacaaagttggagcaggatttgccgtattttgggtgatgattttgttccgttgttaccgattgttataccacccttattgattactgccaaagcaacgcaagacgtcggtttaattgaagaagaagaagcagcaaatttccaacaatatccagattgggatgttgttcaagttcagggaaaacacattgctattcacacatccgtccttgacgataaagtatctgcaatggagttattacaaagctatgcgacacttttaagaggccaatttgctgtatatgttaaagaagtaatggaagaaatagctttgccaagtcttgacttttacttgcatgacggtgttcgtgctgcaggagcaactttaattcctattttattatcttgtttacttgcagccaccggtactcaaaacgaggaattggtattgttgtggcataaagcttcttctaaattaatcggaggcttaatgtctgaaccaatgccagaaatcacgcaagtttatcacaactctttagtgaatggtattaaagtcatgggtgacaattgcttaagcgaagaccaattagcggcatttactaagggtgtctccgccaacttaactgacacttacgaaaggatgcaggatcgccatggtgatggtgatgaatataatgaaaatattgatgaagaggaagactttactgacgaagatcttctcgatgaaatcaacaagtctatcgcggccgttttgaaaaccacaaatggtcattatttgaagaatttggagaatatatggcctatgataaacacattccttttagataatgaaccaattttagtcatttttgcattagtagtgattggtgacttgattcaatatggtggcgaacaaactgctagcatgaagaacgcatttattccaaaggttaccgagtgcttgatttctcctgacgctcgtattcgccaagctgcttcttatataatcggtgtttgtgcccaatacgctccatctacatatgctgacgtttgcataccgactttagatacacttgttcagattgtcgattttccaggctccaaattagaagaaaatcgttcttctacagagaatgccagtgcagccatcgccaaaattctttatgcatacaattccaacattcctaacgtagacacgtacacggctaattggttcaaaacgttaccaacaataactgacaaagaagctgcctctttcaactatcaatttttgagtcaattgattgaaaataattctccaattgtgtgtgctcaatctaatatctccgctgtagttgattctgtcatacaagccttgaatgagagaagtttgaccgaaagggaaggccaaacggtgataagttctgttaaaaagttgttgggatttttgccttctagtgatgctatggcaattttcaatagatatccagctgatattatggagaaagtacataaatggtttgcatga

SEQ ID NO: 8983 - DNA, 2439 bp, Saccharomyces cerevisiae
atgtcccgtttcttttcgtctaattacgaatacgatgtagccagttcttcatccgaagaagatcttttatcttcgtctgaagaagatttgttaagctcttcctcctctgagtctgaattggaccaagaatctgacgactcctttttcaatgaaagtgaaagtgaaagtgaagctgatgtagactctgatgattctgatgcaaagccttatggtcctgactggttcaagaaatctgagttcagaaaacaaggtggaggttcaaataaatttttgaaaagctctaactatgattccagtgatgaagaatccgatgaagaagatggcaagaaggtagtcaagtctgccaaagaaaaactattggatgaaatgcaagacgtttataataagatctctcaagctgagaactctgatgactggttgactatttctaatgagtttgatttgatctcgcgtctcttagttagggctcaacaacaaaactgggggactccaaatattttcatcaaggttgttgcccaagtggaggacgctgtgaataatacacaacaagctgatttgaagaataaagctgttgcaagagcttataacactacaaagcaaagagtcaagaaagtttctagagaaaatgaagactcaatggctaaattcagaaatgatcctgaatcatttgataaggaaccaaccgcagatttggatatttctgctaatggattcacaatttcttcgtctcaaggcaatgaccaagcggtacaagaagatttcttcactagattacaaacaataattgactcaagaggtaagaagactgtcaatcaacaatccttgatttctactttggaggagttattaactgtagctgaaaaaccatatgaattcataatggcttatttgactttgattccatcaagattcgatgcctcagctaacctatcttaccaaccaattgatcaatggaaatcttcattcaacgatattagtaaattattgtctattttagaccagacaattgacacctaccaagttaatgaatttgctgatccaatcgatttcattgaagatgaacctaaagaagattctgatggtgtcaagaggattctgggttccattttctcatttgttgaaagattagatgacgaattcatgaaatccctgttaaacatcgatcctcattccagtgattatttgatccgtttaagggatgaacaatcaatctataatttgatcctaagaactcaattgtactttgaagcgactttgaaagatgaacacgacctagaaagagcattgacacgtccattcgtcaagagattggatcatatctactataaatccgaaaatttgataaaaattatggaaactgctgcttggaatatcatacctgctcaattcaaatctaaatttacttcaaaagaccagctcgattctgctgattatgtcgacaatttaatagacggattatcgacaatcttatccaagcaaaacaacattgctgttcaaaaacgtgctattttatacaacatttactacactgcattaaacaaagatttccaaactgctaaagatatgttactaacttcccaagttcaaacaaatatcaaccaattcgattcatccctacaaattttattcaacagggttgttgttcaattgggtctatccgcctttaaattatgtttgattgaagaatgtcatcaaattttgaatgatcttctgtcaagttctcacttaagagaaattttgggccaacaatccctacacagaatatctctcaattctagtaacaatgcttcagctgatgagcgtgctagacaatgtttgccatatcaccaacacatcaatctcgatttaatcgatgtcgtcttcttaacatgttccttattgatcgaaattccaagaatgactgccttctattccggtattaaggtcaagagaattccttactctccaaaatccattcgtcgttccttagaacattacgacaagttaagtttccaaggtccaccagaaactttaagagattatgtcttgtttgctgccaaatcaatgcaaaaaggtaactggagagactctgttaaatacttaagagaaataaaatcttgggctttattaccaaacatggaaacggtgttgaatagtttaacggaaagagtacaagttgaatctttgaagacttatttcttttctttcaagaggttctattcaagtttttctgttgctaaactagccgaattatttgatcttccagaaaataaggtggttgaagttttgcaatctgttatcgcagaattggaaatcccagccaaattaaacgacgagaagaccatctttgttgtcgaaaagggtgatgaaattactaaattggaagaagcaatggtaaaattgaacaaagaatataaaatcgctaaagaacgtcttaacccaccatcaaatcgtcgttga

SEQ ID NO: 8984 - DNA, 2439 bp, Artificial Sequence
  Description of Artificial Sequence: Synthetic polynucleotide
atgtcccgtttcttttcttctaattacgaatacgatgtagccagttcttcttccgaagaagatcttttatcttcttctgaagaagatttgttaagctcttcctcctctgagtctgaattggaccaagaatctgacgactcctttttcaatgaaagtgaaagtgaaagtgaagctgatgtagactctgatgattctgatgcaaagccttatggtcctgactggttcaagaaatctgagttcagaaaacaaggtggaggtagtaataaatttttgaaaagctctaactatgattccagtgatgaagaatccgatgaagaagatggcaagaaggtagtcaagtctgccaaagaaaaacttttggatgaaatgcaagacgtttataataagatctctcaagctgagaactctgatgactggttgactatttctaatgagtttgatttgatctctcgtctcttagttagggctcaacaacaaaactgggggactccaaatattttcatcaaggttgttgcccaagtggaggacgctgtgaataatacacaacaagctgatttgaagaataaagctgttgcaagagcttataacactacaaagcaaagagtcaagaaagtttctagagaaaatgaagactccatggctaaattcagaaatgatcctgaaagttttgataaggaaccaaccgcagatttggatatttctgctaatggattcacaatttcttcttctcaaggcaatgaccaagcggtacaagaagatttcttcactagattacaaacaataattgacagtagaggtaagaagactgtcaatcaacaatccttgatttctactttggaggagttattaactgtagctgaaaaaccatatgaattcataatggcttatttgactttgattccatctagattcgatgcctctgctaacttatcttaccaaccaattgatcaatggaaatcttctttcaacgatattagtaaattattgtctattttagaccagacaattgacacctaccaagttaatgaatttgctgatccaatcgatttcattgaagatgaacctaaagaagattctgatggtgtcaagaggattttgggttccattttctcctttgttgaaagattagatgacgaattcatgaaatccttattaaacatcgatcctcattccagtgattatttgatccgtttaagggatgaacaatccatctataatttgatcttaagaactcaattgtactttgaagcgactttgaaagatgaacacgacttggaaagagcattgacacgtccattcgtcaagagattggatcatatctactataaatccgaaaatttgataaaaattatggaaactgctgcttggaatatcatacctgctcaattcaaatctaaatttacttctaaagaccagctcgattctgctgattatgtcgacaatttaatagacggattatctacaatcttatccaagcaaaacaacattgctgttcaaaaacgtgctattttatacaacatttactacactgcattaaacaaagatttccaaactgctaaagatatgttattaacttcccaagttcaaacaaatatcaaccaattcgattcttccttacaaattttattcaacagggttgttgttcaattgggtttatccgcctttaaattatgtttgattgaagaatgtcatcaaattttgaatgatcttttatccagttctcacttaagagaaattttgggccaacaatccttgcacagaatatctctcaattctagtaacaatgcttctgctgatgagcgtgctagacaatgtttgccatatcaccaacacatcaatctcgatttaatcgatgtcgtcttcttaacatgttccttattgatcgaaattccaagaatgactgccttctattccggtattaaggtcaagagaattccttactctccaaaatccattcgtcgttccttagaacattacgacaagttaagtttccaaggtccaccagaaactttaagagattatgtcttgtttgctgccaaatctatgcaaaaaggtaactggagagactctgttaaatacttaagagaaataaaatcttgggctttattaccaaacatggaaacggtgttgaatagtttaacggaaagagtacaagttgaatctttgaagacttatttcttttctttcaagaggttctattctagtttttctgttgctaaattggccgaattatttgatcttccagaaaataaggtggttgaagttttgcaatctgttatcgcagaattggaaatcccagccaaattaaacgacgagaagaccatctttgttgtcgaaaagggtgatgaaattactaaattggaagaagcaatggtaaaattgaacaaagaatataaaatcgctaaagaacgtcttaacccaccatccaatcgtcgttga

SEQ ID NO: 8985 - DNA, 954 bp, Saccharomyces cerevisiae
atgagcagcacgaggaagttcaaaaaggttgagaaacctctatcacaaaccagacattattcactctgtatccccacgacattggtatcggactgtcgcaacctctctcaaatcacgcataaggtgtaccaagtggccaagtttgcatcgctgtttaatgtttctgaggttgtcattcttgaggacaattcccaggtcgatgccaccaaaaaaaaaatctccactgctaaattaatactggcacttttacaatacttcgtcacgcctccatatcttcgcaatactgtcttcaacgaaaaattcagaccttatttgaccgccgcttcaaaattaccaagattatccacacttcctttcaccaggtaccaaaagcaagatcacggtcggtacagagaaggcctcactatcaagatgcagaaacccaccttggctcgcaaaaagattggtaaggtattcaagcaaaccaaatatattaatatagggaaaagcaaagcactggctctacaaagtcagctggtgccgataaacgcaagggtcaccatcgacacaataacgaggaaaattgtatctcctcaggaagcttacggtgatttcaccggattggactcgcagtatggctactatactcgtatagcgtcatcgttcacagacttgtttatgaaggggcctttaaaagagggttatacacaatcagtatatgttcccttaaccacgagagacacctctattcccgagttatcatcactgcctaccgccgaaactaatccccacatcttattggtattctcaacgtgggacactcttgctcgagcattcaaactggatcaagatcaattcgtagattgtcaaggtcctcaagagttctttgatgctcagctaccatgccccgtatccaattcggacgttgcagatgcaatccccatgacactgacaactctttcaactgtattttaa

SEQ ID NO: 8986 - DNA, 954 bp, Artificial Sequence
  Description of Artificial Sequence: Synthetic polynucleotide
atgagcagcacgaggaagttcaaaaaggttgagaaacctttatctcaaaccagacattattccctctgtatccccacgacattggtaagtgactgtcgcaacctctctcaaatcacgcataaggtgtaccaagtggccaagtttgcatctttatttaatgtttctgaggttgtcattcttgaggacaattcccaggtcgatgccaccaaaaaaaaaatctccactgctaaattaatattggcacttttacaatacttcgtcacgcctccatatcttcgcaatactgtcttcaacgaaaaattcagaccttatttgaccgccgcttccaaattaccaagattatccacacttcctttcaccaggtaccaaaagcaagatcacggtagatacagagaaggcctcactatcaagatgcagaaacccaccttggctcgcaaaaagattggtaaggtattcaagcaaaccaaatatattaatatagggaaaagcaaagcattggctttacaaagtcagttggtgccgataaacgcaagggtcaccatcgacacaataacgaggaaaattgtatctcctcaggaagcttacggtgatttcaccggattggactctcagtatggctactatactcgtatagcgtcttctttcacagacttgtttatgaaggggcctttaaaagagggttatacacaaagtgtatatgttcccttaaccacgagagacacctctattcccgagttatcttctttgcctaccgccgaaactaatccccacatcttattggtattcagtacgtgggacactcttgctagagcattcaaattggatcaagatcaattcgtagattgtcaaggtcctcaagagttctttgatgctcagttaccatgccccgtatccaatagtgacgttgcagatgcaatccccatgacattaacaactctttctactgtattttga

SEQ ID NO: 8987 - DNA, 690 bp, Saccharomyces cerevisiae
atgggaggtatacttaaaaacccgctagccttatcgccggagcagctggcgcaacaggatccagaaacgcttgaagagtttagaagacaagtttacgaaaatacgcagaaaaatgccaaattgacatcacataaaaggaatataccgggactagataatacaaaagaggagggggagataattggaacatcgagtaccttccttccaaaggacacactgtcactgaaacatgagcaagacatgttggccaagatgacaccagaagagcgagttcaatggaaccaaagaaatttagcagaaaatgaaataacaaaaaagcagttccaagatattcacatagacgagcccaagaccccctaccaaggtgctgtggaccctcacggggaatactacagagtagatgatgatgaagatgaggataatagtgataaaaaaccatgccaggtggcaaacgatgacatcgacgatttgtccctgggcgaaccggaatttgaaatcaaagagaacaaacaaccggattttgagaccaacgacgagaatgatgaagactcaccggaggctagacataagaaatttgaagaaatgagaaagaagcattacgacgtaagggcaattttcaacaaaaagtcccgtgaagcgctaaaggacgaagacgaagacgaagatgatagtacgacaaaagaaccatga

SEQ ID NO: 8988 - DNA, 690 bp, Artificial Sequence
  Description of Artificial Sequence: Synthetic polynucleotide
atgggaggtatacttaaaaacccgttagccttatctccggagcagcttgcgcaacaggatccagaaacgcttgaagagtttagaagacaagtttacgaaaatacgcagaaaaatgccaaattgacatctcataaaaggaatataccgggattagataatacaaaagaggagggggagataattggaacatctagtaccttccttccaaaggacacattatctttgaaacatgagcaagacatgttggccaagatgacaccagaagagagagttcaatggaaccaaagaaatttagcagaaaatgaaataacaaaaaagcagttccaagatattcacatagacgagcccaagaccccctaccaaggtgctgtggaccctcacggggaatactacagagtagatgatgatgaagatgaggataatagtgataaaaaaccatgccaggtggcaaacgatgacatcgacgatttgtccttgggcgaaccggaatttgaaatcaaagagaacaaacaaccggattttgagaccaacgacgagaatgatgaagactctccggaggctagacataagaaatttgaagaaatgagaaagaagcattacgacgtaagggcaattttcaacaaaaagtcccgtgaagcgttaaaggacgaagacgaagacgaagatgatagtacgacaaaagaaccatga

SEQ ID NO: 8989 - DNA, 822 bp, Saccharomyces cerevisiae
atgggtagtgttcaacgacaagatttggtcctattcagcgaccaatcagtgcttcctgcccactttttccaagacagcaactctcataacttattcttcatcacccatcaatcctgtactcaaccactatggatgataaacgcactagtagaaacgcacgtgttaggttccccaagttcccttaatgaatcttcttcatcgatgctaccttcgtcaactcgctcccatgcagtccttgcgtcgtttatccacgaacagaactattttacaaattcattaaacaagctaaagatcccatctaataactacaatgttttagacttcctgtccgacttcatcgttaataatatccataataagccaagagacaaaatactaagtgacgtactcgcaaagttctccgctgctatacaaaataacccaactgacaccattgttatcatcgaacaaccagaattactgttgtcgctagtaagcggcctaacttgttcagaattaaacaataagttcatcacacctcttttgaggcaatgcaaagtgctaatcattgtttccaattcggacatatttaatatagatgaatacgatgcttctgttcattcctcgaatctgcaaaatttctacaaatcttcctttatcaaatcaatgattaatttgaacttgaatcctctgaagaccggttttgcaaaggacgtaaccggctcattgcacgtttgcaggggcggcgcacccattgcaacttcaaacacaagcctacacgtcgttgaaaatgaatacctatatctgaatgagaaggagtcaacaaaactattttatcgctaa

SEQ ID NO: 8990 - DNA, 822 bp, Artificial Sequence
  Description of Artificial Sequence: Synthetic polynucleotide
atgggtagtgttcaaagacaagatttggtccttttcagcgaccaatctgtgcttcctgcccactttttccaagacagcaactctcataacttattcttcatcacccatcaatcctgtactcaaccattatggatgataaacgcattggtagaaacgcacgtgttaggttccccaagttcccttaatgaatcttcttcttctatgttgccttcttctactcgctcccatgcagtccttgcgtcttttatccacgaacagaactattttacaaattctttaaacaagttgaagatcccatctaataactacaatgttttagacttcttatccgacttcatcgttaataatatccataataagccaagagacaaaatattgagtgacgtactcgcaaagttctccgctgctatacaaaataacccaactgacaccattgttatcatcgaacaaccagaattattattgtccttagtaagcggcttaacttgttctgaattaaacaataagttcatcacacctcttttgaggcaatgcaaagtgttaatcattgtttccaatagtgacatatttaatatagatgaatacgatgcttctgttcattcctctaatttacaaaatttctacaaatcttcctttatcaaatctatgattaatttgaacttgaatcctttgaagaccggttttgcaaaggacgtaaccggctctttgcacgtttgcaggggcggcgcacccattgcaacttctaacacaagcttgcacgtcgttgaaaatgaatacttatatttgaatgagaaggagtctacaaaattattttatcgctga

SEQ ID NO: 8991 - DNA, 1929 bp, Saccharomyces cerevisiae
atgaaggaaacggcgcaggaatacaaggtgtctgctgtaataccgacccttttgaaaaactggatactgcgtgtagtgtatgccacattggaccatatacctccttttgtgtgggaaattctacatgtcatcaccgatatttatttcttctgggttcaaaagctgattaactatgtgcggccacactcaagagtcatttattataacgctattaagaagttagatgagtgtgatacgtatcaaatgtggtgtcagcaagcgtccgtagtggatgaaataacaggcgcaaatttatggcggcggaatttcttttcgaggaggtacgacttcaattctgtcattgaacaatatagcatattggaaaatatgttaagggaggagaagtatgatgtagttaaggagaagttttcgactacaggcccttgtatgttgaggaactttgcgggtattggagataaaaagttgttcacaaaatctttgatgggtacaaagctacttattgaacaatatttgacccgaattctagaaggcttggatatattaaataatcaaactttaactccaacatcctttttccaaagatgtaagttgtcactgggcacaacagcattaatcttgcaaggtggttcattgtttgggctgtttcaccttggggtgattagaggtttattgttacaggacctgatgcctaatattataagtggtagctctatgggggcatgcgttgcaagtttattcggttgcttgtccaatgagcaactaaagcaattattgaccgatgacaacctcttgaatatcatcaagaatgatgtagatttattaaaaagctgtggatacggtaatttagagcagcacctaaacctggggactttgattcagaacctaatacaccacggttattctcaagacgtttatctttttatccggtttgttatgaaatatattgttaaggaaaaaacttttgaagaagtttatcaaattactggaaaagttttcaatattgttattcatccaactgataaatcatgccctaatttactaaattatgtgacaaccccaaacgtattaatcaagtcagccattgaatgctcacttggttctggtgtaatttcagaggatacatcactattatgtaaaaatttagaaaatgaaattgagccttttcttaacatcaataaaaataaacaagtcaaatttcttaccccagaaaatgccaacaatccgagcataacggagagcccctatactaggttaacggaactattcaatgttaataacttcattgtttctttggcgagaccatacttggcaccattggtggtaaatgatttgaagcatgaaataaaaacgtcaaaatattactattataagcattatccaaatatgcctcctataaacgcgaatacagtaagaaaaacacagagatcctcttcgcaatcacccataaaggcaggaactgtcgaggatcttgagccagagcctttaatgagccctgtgcccccaagttcggcagtcaacgattcagcagagtacataatcccagaattgggcataccgcagttgaactttactgaaatggaaccgctggcgtttaaatttaagtatcatctggaaagaaaattaaaaaatattgccactatggaatttcgacataggatggaggtattggataatttaggcctgttgtgctcattaataaaaagactaataattgatgaaaagactcccagatcagctacggagattgctgtggtaccaaggatgaaaagtctatcattaacaaggattattgaaggtcaactaaacaacattccatactggataaaatctggtgaacgaagtacatggcccgcactagctttaattaagacaagatgtgcagtcgaatttaaattagacgacataataagagcaagacggagtaggtag

SEQ ID NO: 8992 - DNA, 1929 bp, Artificial Sequence
  Description of Artificial Sequence: Synthetic polynucleotide
atgaaggaaacggcgcaggaatacaaggtgtctgctgtaataccgacccttttgaaaaactggatattacgtgtagtgtatgccacattggaccatatacctccttttgtgtgggaaattttgcatgtcatcaccgatatttatttcttctgggttcaaaagttgattaactatgtgagaccacactccagagtcatttattataacgctattaagaagttagatgagtgtgatacgtatcaaatgtggtgtcagcaagcgtccgtagtggatgaaataacaggcgcaaatttatggaggagaaatttctttagcaggaggtacgacttcaattctgtcattgaacaatatagcatattggaaaatatgttaagggaggagaagtatgatgtagttaaggagaagttttccactacaggcccttgtatgttgaggaactttgcgggtattggagataaaaagttgttcacaaaatctttgatgggtacaaagcttcttattgaacaatatttgaccagaattttggaaggcttggatatattaaataatcaaactttaactccaacatcctttttccaaagatgtaagttgtctttaggcacaacagcattaatcttgcaaggtggttctttgtttgggttgtttcaccttggggtgattagaggtttattgttacaggacttgatgcctaatattataagtggtagctctatgggggcatgcgttgcaagtttattcggttgcttgtccaatgagcaattgaagcaattattgaccgatgacaacctcttgaatatcatcaagaatgatgtagatttattaaaaagctgtggatacggtaatttagagcagcacttgaacttggggactttgattcagaacttgatacaccacggttattctcaagacgtttatctttttatcagatttgttatgaaatatattgttaaggaaaaaacttttgaagaagtttatcaaattactggaaaagttttcaatattgttattcatccaactgataaaagttgccctaatttattgaattatgtgacaaccccaaacgtattaatcaagtctgccattgaatgcagccttggttctggtgtaatttctgaggatacatctttattatgtaaaaatttagaaaatgaaattgagccttttcttaacatcaataaaaataaacaagtcaaatttcttaccccagaaaatgccaacaatccgagcataacggagagcccctatactaggttaacggaattattcaatgttaataacttcattgtttctttggcgagaccatacttggcaccattggtggtaaatgatttgaagcatgaaataaaaacgtccaaatattactattataagcattatccaaatatgcctcctataaacgcgaatacagtaagaaaaacacagagatcctcttctcaatctcccataaaggcaggaactgtcgaggatcttgagccagagcctttaatgagccctgtgcccccaagttctgcagtcaacgattctgcagagtacataatcccagaattgggcataccgcagttgaactttactgaaatggaaccgttagcgtttaaatttaagtatcatttggaaagaaaattaaaaaatattgccactatggaatttagacataggatggaggtattggataatttaggccttttgtgctctttaataaaaagattaataattgatgaaaagactcccagatctgctacggagattgctgtggtaccaaggatgaaaagtttatctttaacaaggattattgaaggtcaattgaacaacattccatactggataaaatctggtgaaagaagtacatggcccgcattggctttaattaagacaagatgtgcagtcgaatttaaattagacgacataataagagcaagaagaagtaggtga

SEQ ID NO: 8993 - DNA, 705 bp, Saccharomyces cerevisiae
atgttcaggaacaattacgacggggacacagtcactttttctcctacaggccgtctgttccaagtggaatacgccttggaagctattaaacaagggagcgtcactgtggggttacgttcgaacactcatgctgttttagtagcgttgaaaagaaatgcagacgaattgtcatcataccagaaaaaaatcatcaaatgtgacgagcacatggggctctcgttagccgggttggctccagatgctagagttttaagtaattatttgagacaacagtgtaattactccagcttagtttttaacagaaagcttgccgtcgagagagcaggtcatttgctttgcgataaagcacagaaaaatacacaatcctatgggggcagaccctacggtgttggtttgttgatcatcgggtatgacaagagcggtgctcatcttttagaattccaaccttccggaaatgtcacagaactatatggtacagctattggcgcaagaagccaaggggcaaagacttatctagagagaactttagacacgtttataaaaattgacgggaacccggatgaactaatcaaagctggcgtcgaggctatcagccagtctctaagggacgaatccttgactgtagacaatctttcaatcgccatcgtgggtaaggatacgccttttacaatttacgatggagaagctgttgctaaatacatctag

SEQ ID NO: 8994 - DNA, 705 bp, Artificial Sequence
  Description of Artificial Sequence: Synthetic polynucleotide
atgttcaggaacaattacgacggggacacagtcactttttctcctacaggccgtttattccaagtggaatacgccttggaagctattaaacaagggagcgtcactgtggggttacgttctaacactcatgctgttttagtagcgttgaaaagaaatgcagacgaattgagtagttaccagaaaaaaatcatcaaatgtgacgagcacatggggctctctttagccgggttggctccagatgctagagttttaagtaattatttgagacaacagtgtaattactccagcttagtttttaacagaaagcttgccgtcgagagagcaggtcatttgctttgcgataaagcacagaaaaatacacaatcctatgggggcagaccctacggtgttggtttgttgatcatcgggtatgacaagagcggtgctcatcttttagaattccaaccttccggaaatgtcacagaattgtatggtacagctattggcgcaagaagccaaggggcaaagacttatttggagagaactttagacacgtttataaaaattgacgggaacccggatgaattgatcaaagctggcgtcgaggctatcagccagtctttgagggacgaatccttgactgtagacaatctttctatcgccatcgtgggtaaggatacgccttttacaatttacgatggagaagctgttgctaaatacatctga

SEQ ID NO: 8995 - DNA, 1050 bp, Saccharomyces cerevisiae
atgtccccattgaacgtcggtatagttggtacaggtatttttgccagagatagacatctcccatcctaccaggaatttcctgacaaattcaaagtcattgccgccttcaacagacataaggcaaaagctttggattttgcaaaggttgctgacatacctgaaaataaggtttacgacaatctagatgaaattttgaatgaccctcatgtcgactacattgacgctttgctacctgctcaatttaatgctgatattgtcgagaaggcagttaaagcaggtaagccagttattttggaaaaaccaattgcggccaacttagaccaagcaaaggagattgtcaagatagcagaatccaccccattgcccgttggtgtggctgaaaattggttatatttaccatgtattaaaatcgcaaaggagcagatcgagaaaattggtcctgtagtagcattcacccacaattctaccggtccatttgttactcaaaataaatatttgaccacaacctggagacaaaaaccagagcacattggcggatttctatctgatggtggtgtccaccaattagctctcgttatttccctactcggtgaatttggatctgtttctgcattaacgagacaggtgcgtgaacgttccggtgcagatgatattgtctttgctactgtccagttgaaaaataaagaggttatcggaagttttacttatgggtctgcctttggtgctaccgaaaagtcggttttcttgaaagtctatggtaagaatggtaccgttaccgttgacttatcagacaaaaaagaccccgttgtaaaagtcaaattagggggttcagctgaagataacggtgacgaacaaatttttaaagtcgataatgatgaaagtttcggcgtcaacgctgaatttttgaattttcacgaagctgtcagcaagaaggacaaatccttatacctaggcacacccagaactgcatttcaccatttggcttgtgtggacgcgtttttaaaatcttctgccaagaatggtgactacgttaaaattgagcagccatga

SEQ ID NO: 8996 - DNA, 1050 bp, Artificial Sequence
  Description of Artificial Sequence: Synthetic polynucleotide
atgtccccattgaacgtcggtatagttggtacaggtatttttgccagagatagacatctcccatcctaccaggaatttcctgacaaattcaaagtcattgccgccttcaacagacataaggcaaaagctttggattttgcaaaggttgctgacatacctgaaaataaggtttacgacaatttggatgaaattttgaatgaccctcatgtcgactacattgacgctttgttacctgctcaatttaatgctgatattgtcgagaaggcagttaaagcaggtaagccagttattttggaaaaaccaattgcggccaacttagaccaagcaaaggagattgtcaagatagcagaatccaccccattgcccgttggtgtggctgaaaattggttatatttaccatgtattaaaatcgcaaaggagcagatcgagaaaattggtcctgtagtagcattcacccacaattctaccggtccatttgttactcaaaataaatatttgaccacaacctggagacaaaaaccagagcacattggcggatttttatctgatggtggtgtccaccaattagctctcgttatttccttactcggtgaatttggatctgtttctgcattaacgagacaggtgcgtgaacgttccggtgcagatgatattgtctttgctactgtccagttgaaaaataaagaggttatcggaagttttacttatgggtctgcctttggtgctaccgaaaagtctgttttcttgaaagtctatggtaagaatggtaccgttaccgttgacttaagtgacaaaaaagaccccgttgtaaaagtcaaattagggggttctgctgaagataacggtgacgaacaaatttttaaagtcgataatgatgaaagtttcggcgtcaacgctgaatttttgaattttcacgaagctgtcagcaagaaggacaaatccttatacttgggcacacccagaactgcatttcaccatttggcttgtgtggacgcgtttttaaaatcttctgccaagaatggtgactacgttaaaattgagcagccatga

SEQ ID NO: 8997 - DNA, 108 bp, Saccharomyces cerevisiae
atgaccgaaagaaagctattgcagctgctacggcgtcctttcatctccctttctttattcacggccttaagagcttgtccgcttcgccccaaaagcctaattgcttag

SEQ ID NO: 8998 - DNA, 108 bp, Artificial Sequence
  Description of Artificial Sequence: Synthetic polynucleotide
atgaccgaaagaaagttgttgcagttgttgagacgtcctttcatctccctttctttattcacggccttaagagcttgtccgcttcgccccaaaagcttaattgcttga

SEQ ID NO: 8999 - DNA, 1011 bp, Saccharomyces cerevisiae
atgggttcaataagtagataccttcttaagaaagcagcagatgggcttaaagatgagcagagattgaagattgaaatgtccgatagcaaaagtgtcccagagtgctttcattttaatagggaaagaagaatgcccatagccgagataaacggcgaggatgggtttttcatgtttccgtctcagcaatcgcttgaaaattttgaaaacactaaaaagtattcgaatgagctgagtccagatgcaattggtattccattattccaaattatcaattgcactctaccgtttggtaaaagaggtcatagcaatactgtggtcggcaatgtcccatattataaaattttcaaatttattttaagaacggcagacgaacctccgccttatactgtggcaaaaatcgtttgctcaaacaacggattaatattgtataaagtgcctctttacgacatatataaaaatgtcagccaagcaaacgtaacttacagcttcgtagggactacgtctacggagcccaacttactagcaatggctcaccgagaaggacacagggatttggacactaaagtgaataatttaaatctcaggtggcatgtcacttattcgcccgtagttaccaacgatcattataaattaattctgttagcagattatgaagtgaatcgtttggatgaagatgtcattagagccgctaaaaataagatgtccatcgaccaaaaggatcaaaaagttcagaggttcgtggcagctcattatactagagaatttgaaacatctctttttaggtgggtcgctcaagagggccacttaattcttggcgagtattccacagatcaaggatcatttggattgaataatatcccaccattgacggaagaactcgggtgtcagagcctgctcatacattacatagagtacatgaagagacaacgtaaaaaaattgcgaaagaggcaaggagacaaaataaaagaaacgttgcaaacacgactaacatgaacatgaacctcatgtaa

SEQ ID NO: 9000 - DNA, 1011 bp, Artificial Sequence
  Description of Artificial Sequence: Synthetic polynucleotide
atgggttccataagtagataccttcttaagaaagcagcagatgggcttaaagatgagcagagattgaagattgaaatgtccgatagcaaaagtgtcccagagtgctttcattttaatagggaaagaagaatgcccatagccgagataaacggcgaggatgggtttttcatgtttccgtctcagcaatctcttgaaaattttgaaaacactaaaaagtattctaatgagttgagtccagatgcaattggtattccattattccaaattatcaattgcactttaccgtttggtaaaagaggtcatagcaatactgtggtcggcaatgtcccatattataaaattttcaaatttattttaagaacggcagacgaacctccgccttatactgtggcaaaaatcgtttgcagcaacaacggattaatattgtataaagtgcctctttacgacatatataaaaatgtcagccaagcaaacgtaacttacagcttcgtagggactacgtctacggagcccaacttattggcaatggctcacagagaaggacacagggatttggacactaaagtgaataatttaaatctcaggtggcatgtcacttattctcccgtagttaccaacgatcattataaattaattttattagcagattatgaagtgaatcgtttggatgaagatgtcattagagccgctaaaaataagatgtccatcgaccaaaaggatcaaaaagttcagaggttcgtggcagctcattatactagagaatttgaaacatctctttttaggtgggtcgctcaagagggccacttaattcttggcgagtattccacagatcaaggaagttttggattgaataatatcccaccattgacggaagaactcgggtgtcagagcttactcatacattacatagagtacatgaagagacaacgtaaaaaaattgcgaaagaggcaaggagacaaaataaaagaaacgttgcaaacacgactaacatgaacatgaacctcatgtga

SEQ ID NO: 9001 - DNA, 312 bp, Saccharomyces cerevisiae
atgacagggtttaaagtttcttcttttttttatattctggcattgtcccgctttttcaacgcaggaagggaacgagcttgtgataagttaaaaattacagttacacatctatactggtttattatacgcaaacttttgttacatgaggttcatgttcatgttagtcgtgtttgcaacgtttcttttattttgtctccttgcctctttcgcaatttttttacgttgtctcttcatgtactctatgtaatgtatgagcaggctctgacacccgagttcttccgtcaatggtgggatattattcaatccaaatga

SEQ ID NO: 9002 - DNA, 312 bp, Artificial Sequence
  Description of Artificial Sequence: Synthetic polynucleotide
atgacagggtttaaagtttcttcttttttttatattttggcattgtcccgctttttcaacgcaggaagggaaagagcttgtgataagttaaaaattacagttacacatctttactggtttattatacgcaaacttttgttacatgaggttcatgttcatgttagtcgtgtttgcaacgtttcttttattttgtctccttgcctctttcgcaatttttttacgttgtctcttcatgtactctatgtaatgtatgagcaggctttaacacccgagttcttccgtcaatggtgggatattattcaatccaaatga

SEQ ID NO: 9003 - DNA, 3423 bp, Saccharomyces cerevisiae
atgggttcatctggttcaaaatcgaccacagccactaccacatcgcatagtagcacgactactactagtagcacaaccagtacaactacgcctactaccactagcacgacaagcacgacaagcactaaagttacaactagcccagaaattattgtcagtagttctagcacattagtttcttctgttgtacccgagtttacttctagctcgtcgctctcctctgatacaattgcctcaattctatcatcggagtcattggtttccattttttcttctctttcttacacatcatccgatatttctagtacatcagtcaacgatgtcgaatcatcaacctctggcccctcaaactcatacagtgcgctttcctccacaaatgcacaactgtccagctccactacagagactgactccataagtagtagtgctattcaaacatcttccccgcaaaccagttcatcaaatggaggtggttcctcttcggagccattgggaaagtcctctgtccttgaaactactgcttcatcttctgatacaactgcagtcacatcctccacatttaccacgcttactgacgtttcatcttctccaaagataagttcctcaggatcggctgtcacttcagttggtactacttccgatgcctcaaaggaagtttttagttcaagcacgtccgatgtttcttccctactatcaagtacttccagccccgcaagctctactatttctgaaaccctaccattttcctctacaattttatccatcacttccagcccagtaagttcagaagctccatcggcaacgtctagcgtaattagttcagaagcttcatgggcaacgtctagctcagtgagctcggaagctccattggcaacgtctagcgtagtgagttcagaagctccatcgtcaacgtctagcgtagtgagttcagaagctccatcgtcaacatctagctcagtgagttccgaaatttcgtcaacaacatctagctcagtaagttcagaagctccattggcaacgtctagcgtagtgagttcagaagctccatcgtcaacatctagctcagtgagttccgaaatttcgtcaacaacatctagctcagtaagttcggaagctccattggcaacgtctagcgtagtgagttcagaagctccatcgtcaacatctagctcagtgagttcagaagctccatcgtcaacatctagctcagtgagttcagaagctccatcgtcaacgtctagctcagtgagttcggaaatttcgtcaacaaaatctagcgtaatgagttcagaagtttcatcggcaacgtctagcctagtgagttcggaagctccatcggcaatttccagcttagcaagttctagactgtttagctctaaaaatacatcagttacttctactttggttgctacagaagcttcgtcagtaacttctagcctaagaccttctagtgagacattagcaagcaattcaatcattgaaagctctttgtcgacgggttacaattcgaccgtttctaccacaacatccgccgcatctagtacacttggatctaaggtttcgtcaagtaattccagaatggccacttccaaaacctcatctacttcctccgacttgagtaagtctagtgtaatattcggcaatagttctaccgttacaacctctccatcagcgtctatcagtttaaccgcatctccacttccatcggtctggtctgatatcacctcttcggaagcttcatcaatttcctctaacctggctagctccagtgcgccatctgacaataattccaccattgcaagtgcctcgctgattgtcaccaaaacaaaaaactcagtcgtttcatcaattgtctctagtataacttcttctgaaactacaaacgaatccaatttggccacatctagtacatcgcttttgagtaataaagctactgcccgttctttatcaacatccaacgctacaagtgcttctaacgttccaacaggcacatttagctccatgagctctcatacttcggtgataactcccggcttttccaccagtagtgcgtcactcgcaattaattcaactgtcgttagctcatcattggcaggttatagtttctcgacacctgaaagctctccaactacttccactttggttacttcagaggctccttcaaccgtttccagtatgaccacaagtgccccatttataaataattctacctctgctagaccttcgccaagtacagctagtttcattactgaatccacttcaagcatttccagcgtgccattagcgagtggcgacgtcacttcctcattagcggcccacaatttaactactttcagtgctccttcaacatccagtgcacaacttgtaagcaaatcaactacctctagctccatcctggtcacacccagaatcgacaggtctggaaattcctcaactgcctctagaattgcaacatcactccctaacaaaactacatttgtttcttccctaagttcaacatccgctcatgccagaaatatctttaattcaactgttctagctactgctaaacaaattgaaactttaacttcaacagtcaattgcagcaaccctactcctaattacaacataaccaaaacagtaatcgtaagtagggagactactgccataggaactgttacaagttgttcgggtggttgcaccaagaatagaaagtcaaccacacttattactataacagatattgatgcttctactgttactacttgcccagaaaaagaagtaacatcgaccacaagtggagatgaggcagaacataccactagcactaaaataagtaatttcgaaacgtccacgttttcggaaagttttaaggatatgaagacttctcaggaaactaaaaaagctaaaccaggatcagaaacggtgaggagctcgtcatcttttgtcgaaaaaacctcaccaacaacaaaggcttctccatcaacttccccatcagaaagtaaagctgcaggaaatacatccgttgcaacgaatgcttcaccatcaacttccccatcagaaagtcaaggtacaggaagcacatctgtagagggagcaaaaagcaagtcaactaaaaattcagaaggagtatcaaccactaaagcgaaaaacacatcaactgttgcgaaatcttcaactgaaagtccgatcgggaggggtgaaactacccttgaaacgataattgtctcgagccaaaagtcgctattaacatcacaactaagttcatccactgaaaaggtaaacagatctaccaccaaacctacggcagcgattcatggaacatcctcatccgctaaacaaagcacaacatatactgtcagcacggcaaaagaaaataccggtgcatccctgaacattaacatgaaagcttttgttattggcgctattgctttggtagcttag

SEQ ID NO: 9004 - DNA, 3423 bp, Artificial Sequence
  Description of Artificial Sequence: Synthetic polynucleotide
atgggttcttctggttccaaatctaccacagccactaccacatctcatagtagcacgactactactagtagcacaaccagtacaactacgcctactaccactagcacgacaagcacgacaagcactaaagttacaactagcccagaaattattgtcagtagttctagcacattagtttcttctgttgtacccgagtttacttctagctcctctctctcctctgatacaattgcctctattttatcttctgagtctttggtttccattttttcttctctttcttacacatcttccgatatttctagtacatctgtcaacgatgtcgaatcttccacctctggcccctctaactcttacagtgcgctttcctccacaaatgcacaattatccagctccactacagagactgactccataagtagtagtgctattcaaacatcttccccgcaaaccagttcttccaatggaggtggttcctcttctgagccattgggaaagtcctctgtccttgaaactactgcttcttcttctgatacaactgcagtcacatcctccacatttaccacgcttactgacgtttcttcttctccaaagataagttccagtggatctgctgtcacttctgttggtactacttccgatgcctccaaggaagtttttagtagtagcacgtccgatgtttcttccttattatccagtacttccagccccgcaagctctactatttctgaaaccttgccattttcctctacaattttatccatcacttccagcccagtaagttctgaagctccatctgcaacgtctagcgtaattagttctgaagcttcttgggcaacgtctagctctgtgagctctgaagctccattggcaacgtctagcgtagtgagttctgaagctccatcttctacgtctagcgtagtgagttctgaagctccatcttctacatctagctctgtgagttccgaaatttcttctacaacatctagctctgtaagttctgaagctccattggcaacgtctagcgtagtgagttctgaagctccatcttctacatctagctctgtgagttccgaaatttcttctacaacatctagctctgtaagttctgaagctccattggcaacgtctagcgtagtgagttctgaagctccatcttctacatctagctctgtgagttctgaagctccatcttctacatctagctctgtgagttctgaagctccatcttctacgtctagctctgtgagttctgaaatttcttctacaaaatctagcgtaatgagttctgaagtttcttctgcaacgtctagcttggtgagttctgaagctccatctgcaatttccagcttagcaagttctagattatttagctctaaaaatacatctgttacttctactttggttgctacagaagcttcttctgtaacttctagcttaagaccttctagtgagacattagcaagcaattccatcattgaaagctctttgagcacgggttacaattctaccgtttctaccacaacatccgccgcatctagtacacttggatctaaggtttcttccagtaattccagaatggccacttccaaaacctcttctacttcctccgacttgagtaagtctagtgtaatattcggcaatagttctaccgttacaacctctccatctgcgtctatcagtttaaccgcatctccacttccaagtgtctggtctgatatcacctcttctgaagcttcttccatttcctctaacttggctagctccagtgcgccatctgacaataattccaccattgcaagtgccagtttgattgtcaccaaaacaaaaaactctgtcgtttcttccattgtctctagtataacttcttctgaaactacaaacgaatccaatttggccacatctagtacatctcttttgagtaataaagctactgcccgttctttatctacatccaacgctacaagtgcttctaacgttccaacaggcacatttagctccatgagctctcatacttctgtgataactcccggcttttccaccagtagtgcgtctctcgcaattaattctactgtcgttagctcttctttggcaggttatagtttcagtacacctgaaagctctccaactacttccactttggttacttccgaggctccttctaccgtttccagtatgaccacaagtgccccatttataaataattctacctctgctagaccttctccaagtacagctagtttcattactgaatccacttccagcatttccagcgtgccattagcgagtggcgacgtcacttcctctttagcggcccacaatttaactactttcagtgctccttctacatccagtgcacaacttgtaagcaaatctactacctctagctccatcctcgtcacacccagaatcgacaggtctggaaattccagcactgcctctagaattgcaacatctctccctaacaaaactacatttgtttcttccttgagttctacatccgctcatgccagaaatatctttaattctactgttttggctactgctaaacaaattgaaactttaacttctacagtcaattgcagcaaccctactcctaattacaacataaccaaaacagtaatcgtaagtagggagactactgccataggaactgttacaagttgttctggtggttgcaccaagaatagaaagtctaccacacttattactataacagatattgatgcttctactgttactacttgcccagaaaaagaagtaacatctaccacaagtggagatgaggcagaacataccactagcactaaaataagtaatttcgaaacgtccacgttttctgaaagttttaaggatatgaagacttctcaggaaactaaaaaagctaaaccaggatctgaaacggtgaggagctcttcttcttttgtcgaaaaaacctctccaacaacaaaggcttctccatctacttccccatctgaaagtaaagctgcaggaaatacatccgttgcaacgaatgcttctccatctacttccccatctgaaagtcaaggtacaggaagcacatctgtagagggagcaaaaagcaagtctactaaaaattctgaaggagtatctaccactaaagcgaaaaacacatctactgttgcgaaatcttctactgaaagtccgatcgggaggggtgaaactacccttgaaacgataattgtctccagccaaaagtctttattaacatctcaattgagttcttccactgaaaaggtaaacagatctaccaccaaacctacggcagcgattcatggaacatcctcctccgctaaacaaagcacaacatatactgtcagcacggcaaaagaaaataccggtgcatccttgaacattaacatgaaagcttttgttattggcgctattgctttggtagcttga

SEQ ID NO: 9005 - DNA, 1083 bp, Saccharomyces cerevisiae
atgtcttatcctgagaaatttgaaggtatcgctattcaatcacacgaagattggaaaaacccaaagaagacaaagtatgacccaaaaccattttacgatcatgacattgacattaagatcgaagcatgtggtgtctgcggtagtgatattcattgtgcagctggtcattggggcaatatgaagatgccgctagtcgttggtcatgaaatcgttggtaaagttgtcaagctagggcccaagtcaaacagtgggttgaaagtcggtcaacgtgttggtgtaggtgctcaagtcttttcatgcttggaatgtgaccgttgtaagaatgataatgaaccatactgcaccaagtttgttaccacatacagtcagccttatgaagacggctatgtgtcgcagggtggctatgcaaactacgtcagagttcatgaacattttgtggtgcctatcccagagaatattccatcacatttggctgctccactattatgtggtggtttgactgtgtactctccattggttcgtaacggttgcggtccaggtaaaaaagttggtatagttggtcttggtggtatcggcagtatgggtacattgatttccaaagccatgggggcagagacgtatgttatttctcgttcttcgagaaaaagagaagatgcaatgaagatgggcgccgatcactacattgctacattagaagaaggtgattggggtgaaaagtactttgacaccttcgacctgattgtagtctgtgcttcctcccttaccgacattgacttcaacattatgccaaaggctatgaaggttggtggtagaattgtctcaatctctataccagaacaacacgaaatgttatcgctaaagccatatggcttaaaggctgtctccatttcttacagtgctttaggttccatcaaagaattgaaccaactcttgaaattagtctctgaaaaagatatcaaaatttgggtggaaacattacctgttggtgaagccggcgtccatgaagccttcgaaaggatggaaaagggtgacgttagatatagatttaccttagtcggctacgacaaagaattttcagactag

SEQ ID NO: 9006 - DNA, 1083 bp, Artificial Sequence
  Description of Artificial Sequence: Synthetic polynucleotide
atgtcttatcctgagaaatttgaaggtatcgctattcaatctcacgaagattggaaaaacccaaagaagacaaagtatgacccaaaaccattttacgatcatgacattgacattaagatcgaagcatgtggtgtctgcggtagtgatattcattgtgcagctggtcattggggcaatatgaagatgccgttagtcgttggtcatgaaatcgttggtaaagttgtcaagttagggcccaagtctaacagtgggttgaaagtcggtcaacgtgttggtgtaggtgctcaagtcttttcttgcttggaatgtgaccgttgtaagaatgataatgaaccatactgcaccaagtttgttaccacatacagtcagccttatgaagacggctatgtgtcccagggtggctatgcaaactacgtcagagttcatgaacattttgtggtgcctatcccagagaatattccatctcatttggctgctccattattatgtggtggtttgactgtgtactctccattggttcgtaacggttgcggtccaggtaaaaaagttggtatagttggtcttggtggtatcggcagtatgggtacattgatttccaaagccatgggggcagagacgtatgttatttctcgttcttctagaaaaagagaagatgcaatgaagatgggcgccgatcactacattgctacattagaagaaggtgattggggtgaaaagtactttgacaccttcgacttgattgtagtctgtgcttcctcccttaccgacattgacttcaacattatgccaaaggctatgaaggttggtggtagaattgtctccatctctataccagaacaacacgaaatgttaagtttgaagccatatggcttaaaggctgtctccatttcttacagtgctttaggttccatcaaagaattgaaccaactcttgaaattagtctctgaaaaagatatcaaaatttgggtggaaacattacctgttggtgaagccggcgtccatgaagccttcgaaaggatggaaaagggtgacgttagatatagatttaccttagtcggctacgacaaagaattttctgactga

SEQ ID NO: 9007 - DNA, 1659 bp, Saccharomyces cerevisiae
atgggtaaaattgcagagtttctcgggaatccaggtgctaggcctgacgttcatcatagagcacctactgttgactgcaaacagtacgaagaattcggtgattctaacgattacaaaaatgatgatgtggtcagagtagtcagccatagcgatgagagtactgatgacgaactttgtaatgtgaatttaacagaaacaggggcaatcttcacgagtaaaggttttaccgggttaagcaaaggtttcacagataagaccctggatttcctggtacgagtggccggttcgcaggcggttttttttattgtttggatcatcctcataatttgggtggttattggtattgtttataacgcacctttcaattggcaagttgttatgcaggacggacagtctattcaaagttatgtttgggacacactgttgatgagacaacagttgatgagtacgcatgaacaaattttgatctgcggtagattgaagtcgagattggcttccttcaaaaactatctaacaagaagcaccccagaggaagaaaaagcagactgcacagttgaagctaatgaagtcagctctgttgaaaatcatatagacccatctgccattaacggagaactgcctgtggaaaattggtacgaccgtttatctaacgtagcaagtaggtatatgggttcaattgcagcaatggtgatattttggataggtattttcgtttggattggttgcggtgctatcccaaaagatgcgggcaacactccaccttacaccggagaaactacaggtagtaatccaagattgaaaaagttcagtgacgcttggcagatgtatattaacactgcagttgcagtttcccttctaatttgcactactttcttacaaaatataagggctagacatgattatttcacggggaggtttttagttgatatctttgatatggacgagaaaatcgactatcgtataagaaagcattttaacgattttgaaacacctcacccagttgttactattgaatctaaaaaaaggtcgacagggagaaagatgattgattggtatgctgatattattggtactggtattggtgtcctgattggtgtggcagtgttcgccacatggattggtattggttcgccaatgaagtgggatgataattggtggttgattatcggtacatacacaggtttaattgggtttttggacggtttcgttttgagagaagtgtacttccgaatcgttcaacatgaagagaaaaattattctgatgtggctaaagaagaccttgaattattccaagaattaggtattgaatgtcccgaagaatttagtggtaaagctcctgaaattaacactattggttacagaacatcccaatatattaataggatctgctcaactccatggagtgttcttgtatccgtcatcatcatcattggtttaatttgtattgcttccggtttgcgttggagtacaacaggtcaattgattgctaacacgccaactatgattatcgaagaatttttcttgctagttttgttgcaagcacataattgggccgatcgtcaaagaagagtggaggttaccgctttgtacgcacgtaggcgcatacttctatcatacgtagaaaagcgtttcccagaggttatgatgttggaaaaatag

SEQ ID NO: 9008 - DNA, 1659 bp, Artificial Sequence
  Description of Artificial Sequence: Synthetic polynucleotide
atgggtaaaattgcagagtttctcgggaatccaggtgctaggcctgacgttcatcatagagcacctactgttgactgcaaacagtacgaagaattcggtgattctaacgattacaaaaatgatgatgtggtcagagtagtcagccatagcgatgagagtactgatgacgaactttgtaatgtgaatttaacagaaacaggggcaatcttcacgagtaaaggttttaccgggttaagcaaaggtttcacagataagaccttggatttcttagtaagagtggccggttctcaggcggttttttttattgtttggatcatcctcataatttgggtggttattggtattgtttataacgcacctttcaattggcaagttgttatgcaggacggacagtctattcaaagttatgtttgggacacattattgatgagacaacagttgatgagtacgcatgaacaaattttgatctgcggtagattgaagtctagattggcttccttcaaaaactatttgacaagaagcaccccagaggaagaaaaagcagactgcacagttgaagctaatgaagtcagctctgttgaaaatcatatagacccatctgccattaacggagaattacctgtggaaaattggtacgaccgtttatctaacgtagcaagtaggtatatgggttccattgcagcaatggtgatattttggataggtattttcgtttggattggttgcggtgctatcccaaaagatgcgggcaacactccaccttacaccggagaaactacaggtagtaatccaagattgaaaaagttcagtgacgcttggcagatgtatattaacactgcagttgcagtttcccttttgatttgcactactttcttacaaaatataagggctagacatgattatttcacggggaggtttttagttgatatctttgatatggacgagaaaatcgactatcgtataagaaagcattttaacgattttgaaacacctcacccagttgttactattgaatctaaaaaaaggtctacagggagaaagatgattgattggtatgctgatattattggtactggtattggtgtcttgattggtgtggcagtgttcgccacatggattggtattggttctccaatgaagtgggatgataattggtggttgattatcggtacatacacaggtttaattgggtttttggacggtttcgttttgagagaagtgtacttcagaatcgttcaacatgaagagaaaaattattctgatgtggctaaagaagaccttgaattattccaagaattaggtattgaatgtcccgaagaatttagtggtaaagctcctgaaattaacactattggttacagaacatcccaatatattaataggatctgctctactccatggagtgttcttgtatccgtcatcatcatcattggtttaatttgtattgcttccggtttgcgttggagtacaacaggtcaattgattgctaacacgccaactatgattatcgaagaatttttcttgttggttttgttgcaagcacataattgggccgatcgtcaaagaagagtggaggttaccgctttgtacgcacgtaggcgcatacttttatcttacgtagaaaagcgtttcccagaggttatgatgttggaaaaatga

SEQ ID NO: 9009 - DNA, 306 bp, Saccharomyces cerevisiae
atgcgtagatttggaaagccatgtattgtttcacatgaaatttcggccaggcctcacatattacagccttgtaattataagatggtgctgagttgtaaggtaaaaaaacccattgagttattgcaccttcaagagttaatactttacacttttatgaaaatttgccttcacgtaaacttgatccagcaaaacatcaataagttgtcatatatttctcgaaaatatccaagggcacctgcttttatcagctgcgacaatagagccacggagccaacaaaaaaaggctttttagtttgccgcatgtaa

SEQ ID NO: 9010 - DNA, 306 bp, Artificial Sequence
  Description of Artificial Sequence: Synthetic polynucleotide
atgcgtagatttggaaagccatgtattgtttctcatgaaatttctgccaggcctcacatattacagccttgtaattataagatggtgttgagttgtaaggtaaaaaaacccattgagttattgcaccttcaagagttaatactttacacttttatgaaaatttgccttcacgtaaacttgatccagcaaaacatcaataagttgagttatatttctagaaaatatccaagggcacctgcttttatcagctgcgacaatagagccacggagccaacaaaaaaaggctttttagtttgccgcatgtga

SEQ ID NO: 9011 - DNA, 318 bp, Saccharomyces cerevisiae
atgatggacttgggcgacaaaataaatcctaacctctcgttcttaggaatcaactgcgtcagcttcaaccaatcacccgacattcttgagtctctacatcaagcactgccaaatatggccttgcttgcttatccaaacagtggtgaagtttatgatactgaaaagaagatatggttgccaaatagcgataagctgaacagttgggatacggttgttaaacagtacattagcagcggtgcccgtatcattggtggttgttgcagaacaagtccaaaagacatccaagagatttctgcagccgtcaagaaatacacgtaa

SEQ ID NO: 9012 - DNA, 318 bp, Artificial Sequence
  Description of Artificial Sequence: Synthetic polynucleotide
atgatggacttgggcgacaaaataaatcctaacctctctttcttaggaatcaactgcgtcagcttcaaccaatctcccgacattcttgagtctttgcatcaagcattgccaaatatggccttgcttgcttatccaaacagtggtgaagtttatgatactgaaaagaagatatggttgccaaatagcgataagttgaacagttgggatacggttgttaaacagtacattagcagcggtgcccgtatcattggtggttgttgcagaacaagtccaaaagacatccaagagatttctgcagccgtcaagaaatacacgtga

SEQ ID NO: 9013 - DNA, 714 bp, Saccharomyces cerevisiae
atgactccaaaaagagcgctaatatctcttacttcataccacggtcccttctataaagatggtgcgaaaacaggcgtttttgtagttgagattttgcggtcgttcgatactttcgaaaagcatggtttcgaagtggacttcgtttctgagactggtggatttggctgggatgaacattacttgccaaagagctttattggtggcgaagataagatgaactttgaaacgaaaaattccgccttcaataaggcgttagcgaggatcaagaccgcaaatgaagtcaacgccagcgactataaaatattctttgcatctgctggacatggtgctctatttgactatcccaaagctaaaaatctgcaagatattgcatccaagatatatgccaatgggggtgtgatcgccgccatctgtcatggaccgctccttttcgatggattaatagatatcaaaacaacaagaccattaatcgaaggcaaagctataacaggtttcccactcgagggtgaaatcgccctgggagttgacgacatcttgaggagcagaaaattgacaacggttgaacgcgttgcaaacaagaatagagccaagtacttggcgccaattcatccctgggatgactactctattaccgatggaaagctagttacgggtgttaacgcaaattcttcctattcgaccacaattagagctataaacgcattatatagctga

SEQ ID NO: 9014 - DNA, 714 bp, Artificial Sequence
  Description of Artificial Sequence: Synthetic polynucleotide
atgactccaaaaagagcgttaatatctcttacttcttaccacggtcccttctataaagatggtgcgaaaacaggcgtttttgtagttgagattttgagatctttcgatactttcgaaaagcatggtttcgaagtggacttcgtttctgagactggtggatttggctgggatgaacattacttgccaaagagctttattggtggcgaagataagatgaactttgaaacgaaaaattccgccttcaataaggcgttagcgaggatcaagaccgcaaatgaagtcaacgccagcgactataaaatattctttgcatctgctggacatggtgctttgtttgactatcccaaagctaaaaatttacaagatattgcatccaagatatatgccaatgggggtgtgatcgccgccatctgtcatggaccgctccttttcgatggattaatagatatcaaaacaacaagaccattaatcgaaggcaaagctataacaggtttcccactcgagggtgaaatcgccttaggagttgacgacatcttgaggagcagaaaattgacaacggttgaacgcgttgcaaacaagaatagagccaagtacttggcgccaattcatccctgggatgactactctattaccgatggaaagttggttacgggtgttaacgcaaattcttcctattctaccacaattagagctataaacgcattatatagctga

SEQ ID NO: 9015 - DNA, 1314 bp, Saccharomyces cerevisiae
atgtccatcacgaaggtacatgctagaacggtgtatgattctcgcggtaatccgactgttgaggttgaaattacaacagagaatggtctcttcagagcgatcgtcccatctggtgcctccaccggcattcacgaagctgttgaacttagagacgggaacaagtccgaatggatgggaaaaggggtgaccaaggcagtcagtaacgtcaatagtatcatagggcctgctttaatcaagtccgacttatgtgtaaccaatcagaagggcatagacgagctcatgatatcgttagacggaacttctaacaagtcaaggttgggcgccaatgctatccttggtgtttccttgtgcgttgctcgagctgctgccgcacaaaagggaattactctctacaagtatatagccgagttagcggatgctagacaggacccctttgttattcctgttccttttttcaatgttttgaatggtggagcccacgccggtggctctttagctatgcaagaattcaagatcgcgccagtcggggctcagagctttgcagaagccatgaggatgggttcggaggtttaccatcatttgaagatattggcgaaggagcaatatggaccttccgctggaaatgttggtgacgagggtggagtcgcccccgatatcgacactgccgaggacgccttggacatgattgtgaaagccattaacatatgcggttacgagggtagagtgaaagtaggaatcgatagtgctccttctgttttttataaggacgggaaatacgacctaaatttcaaggaaccgaactctgacccatctcactggctcagtccagctcagttagcagaatattatcattcattgctaaagaaatacccaatcatttccctggaagacccctacgccgaagatgattggtcctcgtggtctgccttcctaaagactgtcaatgttcagataattgcagatgacctgacatgcaccaacaagaccaggatcgcccgtgctatagaggagaaatgtgcgaatactctgttgctgaaactcaaccagatcggtactctgactgagtctattgaagccgccaatcaggctttcgatgctggatggggtgtaatgatatcacatagatcaggtgaaaccgaagatccgtttatcgctgatttggtcgttggtttaagatgtggtcaaattaaatcgggcgctttgtcgagatcagaaagactggccaagtataatgaacttttgcgtatcgaagaggaactgggggacgattgtatatatgctggtcataggtttcatgatggaaacaaactataa

SEQ ID NO: 9016 - DNA, 1314 bp, Artificial Sequence
  Description of Artificial Sequence: Synthetic polynucleotide
atgtccatcacgaaggtacatgctagaacggtgtatgattctcgcggtaatccgactgttgaggttgaaattacaacagagaatggtctcttcagagcgatcgtcccatctggtgcctccaccggcattcacgaagctgttgaacttagagacgggaacaagtccgaatggatgggaaaaggggtgaccaaggcagtcagtaacgtcaatagtatcatagggcctgctttaatcaagtccgacttatgtgtaaccaatcagaagggcatagacgagctcatgatatctttagacggaacttctaacaagtccaggttgggcgccaatgctatccttggtgtttccttgtgcgttgctagagctgctgccgcacaaaagggaattactctctacaagtatatagccgagttagcggatgctagacaggacccctttgttattcctgttccttttttcaatgttttgaatggtggagcccacgccggtggctctttagctatgcaagaattcaagatcgcgccagtcggggctcagagctttgcagaagccatgaggatgggttctgaggtttaccatcatttgaagatattggcgaaggagcaatatggaccttccgctggaaatgttggtgacgagggtggagtcgcccccgatatcgacactgccgaggacgccttggacatgattgtgaaagccattaacatatgcggttacgagggtagagtgaaagtaggaatcgatagtgctccttctgttttttataaggacgggaaatacgacttgaatttcaaggaaccgaactctgacccatctcactggctcagtccagctcagttagcagaatattatcattctttgttgaagaaatacccaatcatttccttagaagacccctacgccgaagatgattggtcctcttggtctgccttcttgaagactgtcaatgttcagataattgcagatgacttgacatgcaccaacaagaccaggatcgcccgtgctatagaggagaaatgtgcgaatactttattgttgaaactcaaccagatcggtactttaactgagtctattgaagccgccaatcaggctttcgatgctggatggggtgtaatgatatctcatagatctggtgaaaccgaagatccgtttatcgctgatttggtcgttggtttaagatgtggtcaaattaaatctggcgctttgtccagaagtgaaagattggccaagtataatgaacttttgcgtatcgaagaggaattgggggacgattgtatatatgctggtcataggtttcatgatggaaacaaattgtga

SEQ ID NO: 9017 - DNA, 375 bp, Saccharomyces cerevisiae
atggtcaaattaacttcaatcgctgccggtgttgccgccatcgctgccggtgttgccgctgctccagccactaccactctatctccatctgacgaaagagtcaacttggtcgaattgggtgtttacgtctccgatatcagagctcatttggctcaatactacttgtttcaagcagctcatccaactgagacctacccagttgagattgctgaagctgttttcaactatggtgacttcaccaccatgttgactggtattccagctgaacaagtcaccagagtcatcactggtgtcccatggtactccactagattgagaccagctatttccagtgctctatctaaggacggtatctacactgctattccaaaatag

SEQ ID NO: 9018 - DNA, 375 bp, Artificial Sequence
  Description of Artificial Sequence: Synthetic polynucleotide
atggtcaaattaacttctatcgctgccggtgttgccgccatcgctgccggtgttgccgctgctccagccactaccactttatctccatctgacgaaagagtcaacttggtcgaattgggtgtttacgtctccgatatcagagctcatttggctcaatactacttgtttcaagcagctcatccaactgagacctacccagttgagattgctgaagctgttttcaactatggtgacttcaccaccatgttgactggtattccagctgaacaagtcaccagagtcatcactggtgtcccatggtactccactagattgagaccagctatttccagtgctttatctaaggacggtatctacactgctattccaaaatga

SEQ ID NO: 9019 - DNA, 5580 bp, Saccharomyces cerevisiae
atggaaattgaaaacgaacagatttgcacctgcatagcgcagattctgcatcttctcaatagcttaattattacattcttagatgatgataagacggaaactggacaatcttttgtttatattgatggatttcttgtcaaaaagcataacaatcaacatactattgttaatttcgaaacttacaaaaataaaatgaaagtttccgataggcgtaagtttgaaaaagcaaactttgacgagtttgagtcggctctaaataacaaaaacgacttggtacattgtccctcaataactttatttgaatcgatccccacggaagtgcggtcattctacgaagacgaaaagtctggtctaatcaaagtggtaaaattcagaactggtgcaatggataggaaaaggtcttttgaaaaaattgtcgtttccgtcatggtcgggaaaaatgtacaaaagttcctgacgtttgttgaagacgaaccagatttccagggcggaccaatcccttcaaagtatcttattcccaagaaaatcaacttgatggtctacacgttgtttcaagtgcatactttgaaattcaatagaaaggattacgataccctttctcttttttacctcaacagaggatactataatgagttgagtttccgtgtcctggaacgttgttacgaaatagcgagtgccaggccgaacgacagctctacgatgcgtactttcactgactttgtttctggcacacctattgtaaggggtcttcagaaaagcaccataaggaaatatggatacaatttggcaccctacatgtttttgttactacacgtagatgagctatcgattttttctgcataccaagcaagtttacctggcgaaaagaaagtcgacacagagcggctgaagcgtgatctatgcccacgtaaacccactgagataaagtacttttcacagatatgtaacgatatgatgaacaaaaaggaccgattgggtgatattttgcatattatcttgcgagcatgtgcgctcaatttcggggcgggtccccgtggtggcgctggtgacgaagaggatcgatccattacgaatgaagaacccattattccctctgtggacgagcatggcttgaaagtatgtaagttgcgcagtcctaacactccacgaagactcagaaaaacactagatgccgtgaaagctttattggtgtcgtcttgtgcttgtaccgcaagggatttagatatatttgatgacaacaacggcgttgcgatgtggaaatggatcaaaattctgtaccacgaagtagcgcaggaaaccgcgctgaaggactcttatagaataactttggtaccttcttctgatggtgtatcagtatgtggaaaactgtttaatcgcgagtatgtccgcggcttttactttgcatgcaaggctcagtttgataacctttgggaagaattgaacgactgcttttatatgcctacagtggttgatattgccagcctcattttgcgtaatcgagaagttttgttcagagagccaaagcgaggaattgacgagtatctggagaacgattctttccttcaaatgatacctgttaaatatcgtgaaattgtgctgcccaagttgagaagagatactaacaaaatgaccgcggctcttaaaaataaagtcactgttgcaattgacgagcttacggtgccacttatgtggatgatccattttgccgtaggatacccttaccgttatccagagcttcagctactcgcttttgccggtcctcagcgcaacgtatacgtcgatgatacaacaagacgcatccaactgtacactgattacaacaagaacggttcatcggagcctcgacttaagacgcttgacggactcacttcagattacgtgttttattttgtcactgtgctaaggcaaatgcaaatatgtgcgcttggtaacagttatgacgcttttaatcatgatccttggatggatgtggtgggatttgaggatccagatcaagtaacaaatcgagacatttcgaggatagttttgtattcctacatgtttctgaataccgcgaagggctgtctggttgaatacgcaacttttcggcagtacatgagggaacttccgaagaatgcacctcagaagctgaattttcgggagatgcgtcaggggttgattgccctaggacggcactgcgtaggtagcagatttgaaacagatttgtacgagtcggcgacgagtgaactcatggccaatcattccgttcaaacagggcgaaatatttacggtgtggattccttttcgttaactagtgtcagtgggacgaccgccactttattgcaggaacgagcttccgagcgctggattcaatggttaggccttgaaagcgactaccattgttcattctctagtactcggaatgcggaagacgtagtggcaggtgaggcggcgagttcagatcatcatcaaaaaatttcaagagtaacgcgaaaaaggccccgagagcccaagagtacaaacgatatcctcgtcgcaggccagaaactctttggcagctcctttgaattcagggacttgcatcagttgcgcttatgtcatgaaatatacatggcagacacaccctctgtggcagtacaggccccaccgggctatggtaagacggagttatttcatctccccttgatagcactggcgtctaagggcgacgtgaaatatgtgtcgtttctgtttgtaccgtacacagtgttgcttgctaattgcatgatcaggttgagccgatgcggttgcttgaatgtggcccctgtaagaaactttattgaagaaggttgcgatggcgttactgatttatacgtggggatctacgatgatcttgctagcactaatttcacagacaggatagctgcgtgggagaatattgttgagtgcacctttaggaccaacaacgtaaaattgggttacctcattgtagatgagtttcacaactttgaaacggaggtctaccggcagtcgcaatttgggggcataactaaccttgattttgacgcttttgagaaagcaatctttttgagcggcacagcacctgaggctgtagctgatgctgcgttgcagcgtattgggcttacgggactggccaagaagtcgatggacatcaacgagctcaaacggtcggaagatctcagcagaggtctatccagctatccaacacggatgtttaatctaatcaaggagaaatccgaggtgcctttagggcatgttcataaaatttggaagaaagtggaatcacagcccgaagaagcactgaagcttcttttagccctctttgaaattgaaccagagtcgaaggccattgtagttgcaagcacaaccaacgaagtggaagaattggcctgctcttggagaaagtattttagggtggtatggatacacgggaagctgggtgctgcagaaaaggtgtctcgcacaaaggagtttgtcactgacggtagcatgcgagttctcatcggaacgaaattagtgactgaaggaattgacattaagcaattgatgatggtgatcatgcttgataatagacttaatattattgagctcattcaaggcgtagggagactaagagatgggggcctctgttatctattatctagaaaaaacagttgggcggcaaggaatcgtaagggtgaattaccaccgattaaggaaggctgtataaccgaacaggtacgcgagttctatggacttgaatcaaagaaaggaaaaaagggccagcatgttggatgctgtggctccaggacagacctgtctgctgacacagtggaactgatagaaagaatggacagattggctgaaaaacaggcgacagcttccatgtcgatcgttgcgttaccgtctagcttccaggagagcaatagcagtgacaggtgcagaaagtattgcagcagtgatgaggacagcgacacgtgcattcatggtagtgctaatgccagtaccaatgcgactaccaactccagcactaatgctactaccactgccagcaccaacgtcaggactagtgctactaccactgccagcatcaacgtcaggactagtgcgactaccactgaaagtaccaactccagcactaatgctactaccactgccagcaccaacgtcaggactagtgctactaccactgccagcatcaacgtcaggactagtgcgactaccactgaaagtaccaactccaacactagtgctactaccaccgaaagtaccgactccaacactagtgctactaccaccgaaagtaccgactccaacactagtgctactaccactgctagcaccaactccagcactaatgccactaccactgctagcaccaactccagcactaatgccactaccactgaaagtaccaacgctagtgccaaggaggacgccaataaagatggcaatgctgaggataatagattccatccagtcaccgacattaacaaagagtcgtataagcggaaagggagtcaaatggttttgctagagagaaagaaactgaaagcacaatttcccaatacttccgagaatatgaatgtcttacagtttcttggatttcggtctgacgaaattaaacatcttttcctctatggtattgacgtatacttctgcccagagggagtattcacacaatacggattatgcaagggctgtcaaaagatgttcgagctctgtgtctgttgggctggccagaaagtatcgtatcggaggatggcttgggaagcactagctgtggagagaatgctgcgaaatgacgaggaatacaaagaatacttggaagacatcgagccatatcatggggaccctgtagggtatttgaaattttttagcgtaaaaaggggagagatctactctcagatacagagaaattatgcttggtacctggccattactagaagaagagaaacaattagtgtattggattcgacaagaggcaagcaagggagccaagttttccgcatgtctggaaggcagatcaaagagttgtattataaagtatggagcaacttgcgtgaatcgaagacagaggtgctgcagtactttttgaactgggacgaaaaaaagtgccgggaagaatgggaggcaaaagacgatacggtctttgtggaagcgctcgagaaagttggagtttttcagcgtttgcgttccatgacgagcgctggactgcagggtccgcagtacgtcaagctgcagtttagcaggcatcatcgacagttgaggagcagatatgaattaagtctaggaatgcacttgcgagatcagcttgcgctgggagttaccccatctaaagtgccgcattggacggcattcctgtcgatgctgatagggctgttctgcaataaaacatttcggcagaaactggaatatcttttggagcagatttcggaggtgtggttgttaccacattggcttgatttggcaaacgttgaagttctcgctgcagataacacgagggtaccgctgtacatgctgatggtagcggttcacaaagagctggatagcgatgatgttccagacggtagatttgatatattattatgtagagattcgagcagagaagttggagagtga

SEQ ID NO: 9020 - DNA, 5580 bp, Artificial Sequence
  Description of Artificial Sequence: Synthetic polynucleotide
atggaaattgaaaacgaacagatttgcacctgcatagcgcagattttgcatcttctcaatagcttaattattacattcttagatgatgataagacggaaactggacaatcttttgtttatattgatggatttcttgtcaaaaagcataacaatcaacatactattgttaatttcgaaacttacaaaaataaaatgaaagtttccgataggcgtaagtttgaaaaagcaaactttgacgagtttgagtctgctttgaataacaaaaacgacttggtacattgtccctccataactttatttgaaagtatccccacggaagtgagatctttctacgaagacgaaaagtctggtttgatcaaagtggtaaaattcagaactggtgcaatggataggaaaaggtcttttgaaaaaattgtcgtttccgtcatggtcgggaaaaatgtacaaaagttcttgacgtttgttgaagacgaaccagatttccagggcggaccaatcccttctaagtatcttattcccaagaaaatcaacttgatggtctacacgttgtttcaagtgcatactttgaaattcaatagaaaggattacgataccctttctcttttttacctcaacagaggatactataatgagttgagtttccgtgtcttggaacgttgttacgaaatagcgagtgccaggccgaacgacagctctacgatgcgtactttcactgactttgtttctggcacacctattgtaaggggtcttcagaaaagcaccataaggaaatatggatacaatttggcaccctacatgtttttgttattacacgtagatgagttatccattttttctgcataccaagcaagtttacctggcgaaaagaaagtcgacacagagaggttaaagcgtgatttatgcccacgtaaacccactgagataaagtacttttcccagatatgtaacgatatgatgaacaaaaaggacagattgggtgatattttgcatattatcttgagagcatgtgcgctcaatttcggggcgggtccccgtggtggcgctggtgacgaagaggatagatccattacgaatgaagaacccattattccctctgtggacgagcatggcttgaaagtatgtaagttgcgcagtcctaacactccaagaagactcagaaaaacattagatgccgtgaaagctttattggtgtcttcttgtgcttgtaccgcaagggatttagatatatttgatgacaacaacggcgttgcgatgtggaaatggatcaaaattttataccacgaagtagcgcaggaaaccgcgttaaaggactcttatagaataactttggtaccttcttctgatggtgtatctgtatgtggaaaattatttaatcgcgagtatgtccgcggcttttactttgcatgcaaggctcagtttgataacctttgggaagaattgaacgactgcttttatatgcctacagtggttgatattgccagcctcattttgcgtaatagagaagttttgttcagagagccaaagagaggaattgacgagtatttggagaacgattctttccttcaaatgatacctgttaaatatcgtgaaattgtgttacccaagttgagaagagatactaacaaaatgaccgcggctcttaaaaataaagtcactgttgcaattgacgagcttacggtgccacttatgtggatgatccattttgccgtaggatacccttaccgttatccagagcttcagttgctcgcttttgccggtcctcagcgcaacgtatacgtcgatgatacaacaagacgcatccaattgtacactgattacaacaagaacggttcttctgagcctcgtcttaagacgcttgacggactcacttctgattacgtgttttattttgtcactgtgttaaggcaaatgcaaatatgtgcgcttggtaacagttatgacgcttttaatcatgatccttggatggatgtggtgggatttgaggatccagatcaagtaacaaatagagacatttctaggatagttttgtattcctacatgtttttgaataccgcgaagggctgtttggttgaatacgcaacttttagacagtacatgagggaacttccgaagaatgcacctcagaagttgaattttagagagatgcgtcaggggttgattgccttaggaagacactgcgtaggtagcagatttgaaacagatttgtacgagtctgcgacgagtgaactcatggccaatcattccgttcaaacagggagaaatatttacggtgtggattccttttctttaactagtgtcagtgggacgaccgccactttattgcaggaaagagcttccgagcgctggattcaatggttaggccttgaaagcgactaccattgttctttctctagtactagaaatgcggaagacgtagtggcaggtgaggcggcgagttctgatcatcatcaaaaaatttctagagtaacgagaaaaaggcccagagagcccaagagtacaaacgatatcctcgtcgcaggccagaaactctttggcagctcctttgaattcagggacttgcatcagttgcgcttatgtcatgaaatatacatggcagacacaccctctgtggcagtacaggccccaccgggctatggtaagacggagttatttcatctccccttgatagcattagcgtctaagggcgacgtgaaatatgtgtcctttttgtttgtaccgtacacagtgttgcttgctaattgcatgatcaggttgagcagatgcggttgcttgaatgtggcccctgtaagaaactttattgaagaaggttgcgatggcgttactgatttatacgtggggatctacgatgatcttgctagcactaatttcacagacaggatagctgcgtgggagaatattgttgagtgcacctttaggaccaacaacgtaaaattgggttacctcattgtagatgagtttcacaactttgaaacggaggtctacagacagtctcaatttgggggcataactaaccttgattttgacgcttttgagaaagcaatctttttgagcggcacagcacctgaggctgtagctgatgctgcgttgcagcgtattgggcttacgggattggccaagaagtctatggacatcaacgagctcaaaagaagtgaagatctcagcagaggtttatccagctatccaacaagaatgtttaatttgatcaaggagaaatccgaggtgcctttagggcatgttcataaaatttggaagaaagtggaatctcagcccgaagaagcattgaagcttcttttagccctctttgaaattgaaccagagtctaaggccattgtagttgcaagcacaaccaacgaagtggaagaattggcctgctcttggagaaagtattttagggtggtatggatacacgggaagttgggtgctgcagaaaaggtgtctcgcacaaaggagtttgtcactgacggtagcatgagagttctcatcggaacgaaattagtgactgaaggaattgacattaagcaattgatgatggtgatcatgcttgataatagacttaatattattgagctcattcaaggcgtagggagattgagagatgggggcctctgttatcttttatctagaaaaaacagttgggcggcaaggaatcgtaagggtgaattaccaccgattaaggaaggctgtataaccgaacaggtacgcgagttctatggacttgaatccaagaaaggaaaaaagggccagcatgttggatgctgtggctccaggacagacttgtctgctgacacagtggaattgatagaaagaatggacagattggctgaaaaacaggcgacagcttccatgtccatcgttgcgttaccgtctagcttccaggagagcaatagcagtgacaggtgcagaaagtattgcagcagtgatgaggacagcgacacgtgcattcatggtagtgctaatgccagtaccaatgcgactaccaactccagcactaatgctactaccactgccagcaccaacgtcaggactagtgctactaccactgccagcatcaacgtcaggactagtgcgactaccactgaaagtaccaactccagcactaatgctactaccactgccagcaccaacgtcaggactagtgctactaccactgccagcatcaacgtcaggactagtgcgactaccactgaaagtaccaactccaacactagtgctactaccaccgaaagtaccgactccaacactagtgctactaccaccgaaagtaccgactccaacactagtgctactaccactgctagcaccaactccagcactaatgccactaccactgctagcaccaactccagcactaatgccactaccactgaaagtaccaacgctagtgccaaggaggacgccaataaagatggcaatgctgaggataatagattccatccagtcaccgacattaacaaagagtcttataagagaaaagggagtcaaatggttttgttggagagaaagaaattgaaagcacaatttcccaatacttccgagaatatgaatgtcttacagtttcttggatttagatctgacgaaattaaacatcttttcctctatggtattgacgtatacttctgcccagagggagtattcacacaatacggattatgcaagggctgtcaaaagatgttcgagctctgtgtctgttgggctggccagaaagtatcttatagaaggatggcttgggaagcattggctgtggagagaatgttaagaaatgacgaggaatacaaagaatacttggaagacatcgagccatatcatggggaccctgtagggtatttgaaattttttagcgtaaaaaggggagagatctactctcagatacagagaaattatgcttggtacttggccattactagaagaagagaaacaattagtgtattggattctacaagaggcaagcaagggagccaagttttccgcatgtctggaaggcagatcaaagagttgtattataaagtatggagcaacttgcgtgaatccaagacagaggtgttacagtactttttgaactgggacgaaaaaaagtgcagagaagaatgggaggcaaaagacgatacggtctttgtggaagcgctcgagaaagttggagtttttcagcgtttgcgttccatgacgagcgctggattacagggtccgcagtacgtcaagttacagtttagcaggcatcatagacagttgaggagcagatatgaattaagtttgggaatgcacttgagagatcagcttgcgttgggagttaccccatctaaagtgccgcattggacggcattcttgtccatgttgatagggcttttctgcaataaaacatttagacagaaattagaatatcttttggagcagatttctgaggtgtggttgttaccacattggcttgatttggcaaacgttgaagttctcgctgcagataacacgagggtaccgttgtacatgttaatggtagcggttcacaaagagttagatagcgatgatgttccagacggtagatttgatatattattatgtagagattctagcagagaagttggagagtga

SEQ ID NO: 9021 - DNA, 1146 bp, Saccharomyces cerevisiae
atgaaagagaatgaacttaaaaatgagaagagtgtagatgtattatccttcaaacagctcgaatcccaaaagattgttctacctcaagatcttttcagaagcagctttacctggttttgttatgaaatttacaagtccttagcgtttcgcatctggatgctattatggctaccacttagcgtctggtggaaactttccaacaattgtatttacccacttatagtttcacttctggtcctgtttctgggaccaatatttgtccttgttatttgtggactttctcgtaagcgttccttatcgaaacaactcattcagttttgcaaagaggttactgaaaacacaccaagttctgatcctcatgattgggaagttgttgcagcaaatctaaattcgtacttatatgaaaataaggcttggaatactaagtactttttcttcaatgccatggtctgtcaagaagcgttcagaacaacccttctcgaaccattttctttgaaaaaagacgaagctgccaaggttaagtcatttaaggattccgtcccttacattgaagaagcattgggagtttattttagagaagttgaaaaacaatggaagttgtttaattctgagaaatcatggagccctgttggcctggaagatgctaaacttcccaaagaagcttaccgatttaagcttacttggtttttaaagaggatttccaatatttttatgttgataccattccttaattttttgtgctgcatatatgtgtcacggggaatgtgccttctattacgcaccttttatctcgggtggattcttttcatgttggtacaaggtttccaaaacatgaggatgatcgttttatccgtgaaaatggaacacaagatgcagttcttgtcgactattataaatgagcaagaaagtggtgcgaatggatgggacgaaattgcaaaaaaaatgaataggtacttgtttgagaaaaaagtctggaagaatgaagagtttttctttgacgggattgactgtgaatggttttttagccacttcttctaccgcgttctctctgcaaagaaatctatgcgggctctatcattgaatgtggaactatggccatatattaaagaagcgcaattatcctgcagtgaggagtccttagcgtaa

SEQ ID NO: 9022 - DNA, 1146 bp, Artificial Sequence
  Description of Artificial Sequence: Synthetic polynucleotide
atgaaagagaatgaacttaaaaatgagaagagtgtagatgtattatccttcaaacagctcgaatcccaaaagattgttttacctcaagatcttttcagaagcagctttacctggttttgttatgaaatttacaagtccttagcgtttcgcatctggatgcttttatggttaccacttagcgtctggtggaaactttccaacaattgtatttacccacttatagtttcccttttggtcttgtttttgggaccaatatttgtccttgttatttgtggactttctcgtaagcgttccttatccaaacaactcattcagttttgcaaagaggttactgaaaacacaccaagttctgatcctcatgattgggaagttgttgcagcaaatttgaattcttacttatatgaaaataaggcttggaatactaagtactttttcttcaatgccatggtctgtcaagaagcgttcagaacaacccttctcgaaccattttctttgaaaaaagacgaagctgccaaggttaagagctttaaggattccgtcccttacattgaagaagcattgggagtttattttagagaagttgaaaaacaatggaagttgtttaattctgagaaaagttggagccctgttggccttgaagatgctaaacttcccaaagaagcttacagatttaagcttacttggtttttaaagaggatttccaatatttttatgttgataccattccttaattttttgtgctgcatatatgtgtccagaggaatgtgccttttattacgcaccttttatctcgggtggattcttttcatgttggtacaaggtttccaaaacatgaggatgatcgttttatccgtgaaaatggaacacaagatgcagttcttgtctactattataaatgagcaagaaagtggtgcgaatggatgggacgaaattgcaaaaaaaatgaataggtacttgtttgagaaaaaagtctggaagaatgaagagtttttctttgacgggattgactgtgaatggttttttagccacttcttctaccgcgttctctctgcaaagaaatctatgagagctttatctttgaatgtggaattatggccatatattaaagaagcgcaattatcctgcagtgaggagtccttagcgtga

SEQ ID NO: 9023 - DNA, 678 bp, Saccharomyces cerevisiae
atgtcacagtacggatttgtaagagttcctagagaggtagaaaaggccattccagtggtgaatgcacctagaccacgggccgttgttccgcctccaaacagtgaaactgctaggcttgttcgggaatatgccgctaaagaattgactgcccccgttctaaaccactctttgcgtgtttttcaatatagtgtagctatcataagagaccaatttccagcatgggacttggatcaggaagttttgtacgtcacctgcttacttcatgatattgcaacaacagataagaatatgagagccacgaagatgtcatttgagtattatggtggcatactttcaagggagcttgtatttaatgcgacaggtggaaatcaggactacgcagatgcagtaactgaggccatcattcgtcaccaggatttgactgggactggctacattaccaccttggggctcattctgcagattgctactacgcttgacaatgtcggatccaataccgatctgattcatatcgatacagttagtgccattaacgagcaatttccaagactgcactggttatcatgttttgctacggtggtggacactgaaaactcgagaaaaccgtggggccacaccagttctttgggtgatgatttttcaaagaaagtcatatgcaatacatttgggtataactaa

SEQ ID NO: 9024 - DNA, 678 bp, Artificial Sequence
  Description of Artificial Sequence: Synthetic polynucleotide
atgtctcagtacggatttgtaagagttcctagagaggtagaaaaggccattccagtggtgaatgcacctagaccaagagccgttgttccgcctccaaacagtgaaactgctaggcttgttagagaatatgccgctaaagaattgactgcccccgttttgaaccactctttgcgtgtttttcaatatagtgtagctatcataagagaccaatttccagcatgggacttggatcaggaagttttgtacgtcacctgcttacttcatgatattgcaacaacagataagaatatgagagccacgaagatgagttttgagtattatggtggcatactttctagggagcttgtatttaatgcgacaggtggaaatcaggactacgcagatgcagtaactgaggccatcattcgtcaccaggatttgactgggactggctacattaccaccttggggctcattttacagattgctactacgcttgacaatgtcggatccaataccgatttgattcatatcgatacagttagtgccattaacgagcaatttccaagattgcactggttaagttgttttgctacggtggtggacactgaaaactctagaaaaccgtggggccacaccagttctttgggtgatgatttttccaagaaagtcatatgcaatacatttgggtataactga

SEQ ID NO: 9025 - DNA, 669 bp, Saccharomyces cerevisiae
atgaccgtcgttatcggagtcttggcattacagggtgcgttcattgaacatgtgcgacacgtagaaaaatgcatcgtcgaaaacagggatttctatgaaaaaaaactatctgtgatgacagtgaaggataaaaatcaactagctcaatgtgatgcattgatcatacctgggggagagtcgactgcaatgtcccttattgcagaaagaacaggattttacgacgatctctacgcattcgtacacaacccaagcaaggtaacctggggtacttgtgcaggtatgatttatatttcacaacaattatctaacgaagaaaaactggtcaagacgctgaatttactaaaggttaaagtaaaaagaaatgcatttgggagacaagctcagtcttctacccggatttgcgacttttcaaactttattcctcactgcaatgattttcctgctacttttataagagccccagtaatagaagaggtgctggatcctgaacatgtgcaggtcctgtacaaattagatgggaaggataatggtggtcaagaactaattgttgccgctaagcaaaaaaacaatattcttgcgacatcatttcatccggaattggcagaaaacgatatacggtttcacgactggttcatcagagaatttgttcttaaaaactacagtaaataa

SEQ ID NO: 9026 - DNA, 669 bp, Artificial Sequence
  Description of Artificial Sequence: Synthetic polynucleotide
atgaccgtcgttatcggagtcttggcattacagggtgcgttcattgaacatgtgagacacgtagaaaaatgcatcgtcgaaaacagggatttctatgaaaaaaaattatctgtgatgacagtgaaggataaaaatcaattggctcaatgtgatgcattgatcatacctgggggagagtctactgcaatgtcccttattgcagaaagaacaggattttacgacgatctctacgcattcgtacacaacccaagcaaggtaacctggggtacttgtgcaggtatgatttatatttctcaacaattatctaacgaagaaaaattggtcaagacgttgaatttattgaaggttaaagtaaaaagaaatgcatttgggagacaagctcagtcttctaccagaatttgcgacttttccaactttattcctcactgcaatgattttcctgctacttttataagagccccagtaatagaagaggtgttggatcctgaacatgtgcaggtcttgtacaaattagatgggaaggataatggtggtcaagaattgattgttgccgctaagcaaaaaaacaatattcttgcgacatcttttcatccggaattggcagaaaacgatataagatttcacgactggttcatcagagaatttgttcttaaaaactacagtaaatga

SEQ ID NO: 9027 - DNA, 897 bp, Saccharomyces cerevisiae
atgtcagaattcaaggttaaaactgggcttgcccaaatgttaaagggcggtgtgattatggacgtcgtcacacctgaacaggctattatcgcagaaagagcgggcgcttgtgctgtaatggcattggaacgcattccagctgacatgcgcaagtctggccaagtatgccgtatgtcagatcctcgcatgatcaaagaaattatggaagctgtttcaattccggtgatggcaaaggtccgtattggacacttcgtggaggcacagatcctggaagagctgcaagtagactacattgacgaaagcgaggttttgactccagctgattggacacatcacattgagaagcataacttcaaggtgccatttgtttgcggtgccaaggatctaggtgaggctttgagaagaataaacgaaggtgctgcaatgatccgtaccaaaggtgaagcaggtaccggtgacgtttccgaggccgtcaagcacatcaccaagattaaggcggagatccagcagtataaagagaatttgaagaccgaatccgattttgcagctaaggccacagaattacgcgtccctgtcgacttgctgaagacaacactatcagagggaaagctacctgtagtcaattttgctgctggtggagttgctactccagcagacgctgctctattgatgcaattgggttgtgaaggtgttttcgtcggttcaggtatattcaaatcgtcagatcctgagaagttagcatgtgctattgttgaagccacgactcactacgataatccagcaaaactgttgcaaatttccagcgatttgggtgacttgatgggtggtatttccatccaatcaattaatgaagcaggaggcaaaaacggtgcaagactttctgaaatcggatggtag

SEQ ID NO: 9028 - DNA, 897 bp, Artificial Sequence
  Description of Artificial Sequence: Synthetic polynucleotide
atgtctgaattcaaggttaaaactgggcttgcccaaatgttaaagggcggtgtgattatggacgtcgtcacacctgaacaggctattatcgcagaaagagcgggcgcttgtgctgtaatggcattggaacgcattccagctgacatgcgcaagtctggccaagtatgccgtatgagtgatcctcgcatgatcaaagaaattatggaagctgtttctattccggtgatggcaaaggtccgtattggacacttcgtggaggcacagatcttggaagagttacaagtagactacattgacgaaagcgaggttttgactccagctgattggacacatcacattgagaagcataacttcaaggtgccatttgtttgcggtgccaaggatttaggtgaggctttgagaagaataaacgaaggtgctgcaatgatccgtaccaaaggtgaagcaggtaccggtgacgtttccgaggccgtcaagcacatcaccaagattaaggcggagatccagcagtataaagagaatttgaagaccgaatccgattttgcagctaaggccacagaattacgcgtccctgtcgacttgttgaagacaacattatctgagggaaagttacctgtagtcaattttgctgctggtggagttgctactccagcagacgctgctttattgatgcaattgggttgtgaaggtgttttcgtcggttctggtatattcaaatcttctgatcctgagaagttagcatgtgctattgttgaagccacgactcactacgataatccagcaaaacttttgcaaatttccagcgatttgggtgacttgatgggtggtatttccatccaatctattaatgaagcaggaggcaaaaacggtgcaagactttctgaaatcggatggtga

SEQ ID NO: 9029 - DNA, 1023 bp, Saccharomyces cerevisiae
atgtctacagacaagatcacatttttgttgaactggcaaccaaccccataccatattccaattttcttggctcaaaccaaaggttacttcaaggagcaaggtctagacatggccatcctagaaccaaccaatccttccgatgtcactgagttaattggatctggtaaggtcgacatgggtttgaaagccatgattcacaccttggctgccaaggcccgtggtttcccagtgacctctgttgcctctttgttggacgaaccatttaccggtgtcttgtacttaaagggcagtggtatcactgaagacttccagtccctaaagggtaagaagatcggttacgttggtgaattcggtaagatccaaatcgatgaattgaccaagcactacggtatgaagccagaagactacaccgcagtcagatgtggtatgaatgtcgccaagtacatcatcgaaggtaagattgatgctggtattggtatcgaatgtatgcaacaagtcgaattggaagagtacttggctaagcaaggcagaccagcttctgatgctaagatgttgagaattgacaagttggcttgcttgggttgctgttgcttctgtaccgttctttacatctgcaacgatgaatttttgaagaagaaccctgaaaaggtcagaaagttcttgaaagccatcaagaaggcaaccgactacgttctagccgaccctgtgaaggcttggaaagaatacatcgacttcaagcctcgattgaacaacgatctatcttacaagcaataccaaagatgttacgcttacttctcttcatctttgtacaatgttcaccgtgactggaagaaggttaccggttacggtaagagattagccatcttgccaccagactatgtctcgaactacactaatgaatacttgtcctggccagaaccagaagaggtttctgatcctttggaagctcaaagattgatggctattcatcaagaaaaatgcagacaggaaggtactttcaagagattggctcttccagcttaa

SEQ ID NO: 9030 - DNA, 1023 bp, Artificial Sequence
  Description of Artificial Sequence: Synthetic polynucleotide
atgtctacagacaagatcacatttttgttgaactggcaaccaaccccataccatattccaattttcttggctcaaaccaaaggttacttcaaggagcaaggtttggacatggccatcttggaaccaaccaatccttccgatgtcactgagttaattggatctggtaaggtcgacatgggtttgaaagccatgattcacaccttggctgccaaggcccgtggtttcccagtgacctctgttgcctctttgttggacgaaccatttaccggtgtcttgtacttaaagggcagtggtatcactgaagacttccagtccttgaagggtaagaagatcggttacgttggtgaattcggtaagatccaaatcgatgaattgaccaagcactacggtatgaagccagaagactacaccgcagtcagatgtggtatgaatgtcgccaagtacatcatcgaaggtaagattgatgctggtattggtatcgaatgtatgcaacaagtcgaattggaagagtacttggctaagcaaggcagaccagcttctgatgctaagatgttgagaattgacaagttggcttgcttgggttgctgttgcttctgtaccgttctttacatctgcaacgatgaatttttgaagaagaaccctgaaaaggtcagaaagttcttgaaagccatcaagaaggcaaccgactacgttttggccgaccctgtgaaggcttggaaagaatacatcgacttcaagcctagattgaacaacgatttatcttacaagcaataccaaagatgttacgcttacttctcttcttctttgtacaatgttcaccgtgactggaagaaggttaccggttacggtaagagattagccatcttgccaccagactatgtctccaactacactaatgaatacttgtcctggccagaaccagaagaggtttctgatcctttggaagctcaaagattgatggctattcatcaagaaaaatgcagacaggaaggtactttcaagagattggctcttccagcttga

SEQ ID NO: 9031 - DNA, 1131 bp, Saccharomyces cerevisiae
atgactgacttgtttaaacctctacctgaaccacctaccgaattgggacgtctcagggttctttctaaaactgccggcataagggtttcaccgctaattctgggaggagcttcaatcggcgacgcatggtcaggctttatgggctctatgaataaggaacaggcctttgaacttcttgatgctttttatgaagctggaggtaattgtattgatactgcaaacagttaccaaaatgaagagtcagagatttggataggtgaatggatggcatcaagaaaactgcgtgaccagattgtaattgccaccaagtttaccggagattataagaagtatgaagtaggtggtggtaaaagtgccaactactgtggtaatcacaagcgtagtttacatgtgagtgtgagggattctctccgcaaattgcaaactgattggattgatatactttacattcactggtgggattatatgagttcaatcgaagaagttatggatagtttgcatattttagttcagcagggcaaggtcctatatttaggagtatctgatacacctgcttgggttgtttctgcggcaaattactacgctacatctcatggtaaaactccttttagcgtctatcaaggtaaatggaatgtattgaacagggactttgagcgtgatattattccaatggctaggcattttggtatggctctagccccatgggatgtcatgggaggtggaagatttcagagtaaaaaagcaatggaagaacggaagaagaatggagagggtctgcgtacttttgtgggtggccccgaacaaacagaattggaggttaaaatcagcgaagcattgactaaaattgctgaggaacatggaacagagtctgttactgctatcgctattgcctatgttcgctctaaagcgaaaaatgttttcccattgattggaggaaggaaaattgaacatctcaagcagaacattgaggctttgagtattaaattaacaccggaacaaatagaatacctggaaagtattgttccttttgatgttggctttcccaaaagtttaataggagatgacccagcggtaaccaagaagctttcacccctcacatcgatgtctgccaggatagcttttgacaattag

SEQ ID NO: 9032 - DNA, 1131 bp, Artificial Sequence
  Description of Artificial Sequence: Synthetic polynucleotide
atgactgacttgtttaaacctttgcctgaaccacctaccgaattgggacgtctcagggttctttctaaaactgccggcataagggtttctccgttgattttaggaggagcttctatcggcgacgcatggtctggctttatgggctctatgaataaggaacaggcctttgaacttcttgatgctttttatgaagctggaggtaattgtattgatactgcaaacagttaccaaaatgaagagagtgagatttggataggtgaatggatggcatctagaaaattacgtgaccagattgtaattgccaccaagtttaccggagattataagaagtatgaagtaggtggtggtaaaagtgccaactactgtggtaatcacaagcgtagtttacatgtgagtgtgagggattctctccgcaaattgcaaactgattggattgatatactttacattcactggtgggattatatgagttctatcgaagaagttatggatagtttgcatattttagttcagcagggcaaggtcctttatttaggagtatctgatacacctgcttgggttgtttctgcggcaaattactacgctacatctcatggtaaaactccttttagcgtctatcaaggtaaatggaatgtattgaacagggactttgagcgtgatattattccaatggctaggcattttggtatggctttggccccatgggatgtcatgggaggtggaagatttcagagtaaaaaagcaatggaagaaagaaagaagaatggagagggtttacgtacttttgtgggtggccccgaacaaacagaattggaggttaaaatcagcgaagcattgactaaaattgctgaggaacatggaacagagtctgttactgctatcgctattgcctatgttcgctctaaagcgaaaaatgttttcccattgattggaggaaggaaaattgaacatctcaagcagaacattgaggctttgagtattaaattaacaccggaacaaatagaatacttggaaagtattgttccttttgatgttggctttcccaaaagtttaataggagatgacccagcggtaaccaagaagctttctcccctcacatctatgtctgccaggatagcttttgacaattga

SEQ ID NO: 9033 - DNA, 1302 bp, Saccharomyces cerevisiae
atggtatatgaagcaacaccttttgatccgatcacggtcaagccaagcgataaaagacgcgttgcatatttttacgatgcagacgttgggaactatgcatatggagcaggtcacccgatgaagccgcatagaataagaatggcacattcccttattatgaattatggcttgtacaagaagatggaaatttacagagctaagccggcaacgaaacaagaaatgtgtcagttccatactgatgaatacattgattttttatcgagggttactccagataatttagaaatgtttaaaagagaaagtgtcaagtttaatgtcggagatgattgtcctgtctttgatgggctctatgagtactgtagcatatctggtggtggctctatggaaggagctgctcgtctgaatagaggcaaatgtgatgttgctgtcaactatgcgggtggtttgcatcatgcaaaaaaatcggaagcttctgggttttgttatttaaatgacatagtactgggcattattgagctactacgataccaccccagagttctgtatattgatattgatgtgcaccatggtgatggtgtagaggaagcgttttatacaacggatcgtgtcatgacatgttctttccacaaatatggtgagtttttccctggcacaggtgaactgagagatataggggtgggtgcaggaaaaaactacgcggtcaatgtgccattaagagacggtattgacgatgctacgtatagatctgtgtttgaacctgtgataaaaaaaattatggaatggtatcaaccttctgctgtcgtgttacagtgtggtggggactccttgtccggcgatcgtcttggttgctttaatctttccatggaaggccatgctaattgtgtaaactatgtgaaatcctttgggatcccaatgatggttgttggtggaggaggctatactatgagaaatgttgcaaggacatggtgctttgaaacaggtctactaaataacgttgtcttggataaagatttaccgtacaatgaatattacgaatattacggtccagattataagttaagtgttagaccttcgaatatgttcaatgtaaatactcccgaatatcttgacaaggtaatgaccaatatatttgctaatttggaaaacacaaagtatgcccctagtgttcagttgaatcacacacctagggatgccgaagatttgggtgatgttgaagaagattctgccgaggctaaagatacgaagggtggttcgcaatatgcgagggacctacatgttgagcatgacaatgaattctattga

SEQ ID NO: 9034 - DNA, 1302 bp, Artificial Sequence
  Description of Artificial Sequence: Synthetic polynucleotide
atggtatatgaagcaacaccttttgatccgatcacggtcaagccaagcgataaaagacgcgttgcatatttttacgatgcagacgttgggaactatgcatatggagcaggtcacccgatgaagccgcatagaataagaatggcacattcccttattatgaattatggcttgtacaagaagatggaaatttacagagctaagccggcaacgaaacaagaaatgtgtcagttccatactgatgaatacattgattttttatctagggttactccagataatttagaaatgtttaaaagagaaagtgtcaagtttaatgtcggagatgattgtcctgtctttgatgggctctatgagtactgtagcatatctggtggtggctctatggaaggagctgctcgtttgaatagaggcaaatgtgatgttgctgtcaactatgcgggtggtttgcatcatgcaaaaaaaagtgaagcttctgggttttgttatttaaatgacatagtattaggcattattgagttacttcgttaccaccccagagttttatatattgatattgatgtgcaccatggtgatggtgtagaggaagcgttttatacaacggatcgtgtcatgacatgttctttccacaaatatggtgagtttttccctggcacaggtgaattgagagatataggggtgggtgcaggaaaaaactacgcggtcaatgtgccattaagagacggtattgacgatgctacgtatagatctgtgtttgaacctgtgataaaaaaaattatggaatggtatcaaccttctgctgtcgtgttacagtgtggtggggactccttgtccggcgatcgtcttggttgctttaatctttccatggaaggccatgctaattgtgtaaactatgtgaaatcctttgggatcccaatgatggttgttggtggaggaggctatactatgagaaatgttgcaaggacatggtgctttgaaacaggtttattgaataacgttgtcttggataaagatttaccgtacaatgaatattacgaatattacggtccagattataagttaagtgttagaccttccaatatgttcaatgtaaatactcccgaatatcttgacaaggtaatgaccaatatatttgctaatttggaaaacacaaagtatgcccctagtgttcagttgaatcacacacctagggatgccgaagatttgggtgatgttgaagaagattctgccgaggctaaagatacgaagggtggttctcaatatgcgagggacttgcatgttgagcatgacaatgaattctattga

SEQ ID NO: 9035 - DNA, 3093 bp, Saccharomyces cerevisiae
atgaaggcatcgcttacgtttagtctctccggaatatacgccccctgtagcatttctagggatatatatctcgaatacggcgataaaaaagctgaatgtttatatgggacaattagattgcctcagtacggtccaggttgcacgcctggtaaaattgtacattgtgtcctggatgattcactgcccttctgtagcattgttgtaccttccaaactttttgggtttatgccgacacagcccactatggatttttgctattttgaacccatattagacaatgtagtacctgtactggatagcgtaacgtttctgattaatgaacaattgtactcaaaactaatggacctaccgcaagagatgcaacaaatacaatttttgcattacaaatataacatcaactccatggaaaccgtggttcattctcgagatattttaacatctggtctttgccaaattttaaactgctcacctttcccgcagggccttgttgattttacagaaacccaattgatattagtaaatgatactgagcagaaactaagtgctctaaaatatgctaacgaagatgaagaatatgcattacctaaaatagggacaaattctgctttatcaattgatcttgaatctctcccctgcacaatttcaagagatcttttgcgacctgcacctcacatcaatgatgataattcaatatatgcctttacagacgctgaaactctactgcgcctggatgtcacaagtggatcgtttataacagtgtcaaatatgggttgcgtcaggctagttaagctgtttgttttactactccccaacggctttaaaaaaagaacaatatacgcacctcccaaaataatagcaagctttccagactgcagcgtcgtgacaatatcaaagtccaatataggccatacagatattcccattgctaatcaagttttcatctcaagagttggaggctggcttcaatctcagaaatgctttcaaaatattattctaacaaccttgaaaaagttttttagcgagagcaaaaggattctttgtcaaaatgatttaatcccaatcgcttttgattcaagtatggctgatctcaatatagcagaggaaaatgatgagtctgatgacgaagatgagctagggcagtactacaagaacgattcccttgtatggttctttgtcacaagcgcagagctcgattgcttctctaaagataattctcattttattattgatcccaatcggacgaagctaataacaactaatatcactaacagaagaccattacccttgagtagatccaatcttcagagatattacggttttgctgaaactttttactatgatttgcatatcttcccctatgtaagacaattggttaacatattagaaacttccttcaattgttctcaaaggggaatcaccctaaatgcctctgtgttacttcattccactacaaacaatgtgggcaaggctacaatggtgagatttgcttcaaaatatcttggtatacatctactggagatagattgcctttcgctcacttcaaattcaagacaactggattcaacatctaagattattggttacattagggctaaatgtgaaaatgtcctaccgtacgcatcacctgctgtgatttttttggctcatttggattcaattttgcttgacgtaaacgctaatcaagatccagaggcaatcaaattacaaaaatctataaacttcgaaatgtctaaacttctggacgattttacgtttaaattcccaggaactacatttgttggctccgtaaataacatagataacgtgccttccagctttagatcacatatgagatttgagattctcgtacccgttccgtctgaagcacagagactgcgtatctttcagtggtacttatcttcacatgaactaaacagagatgttcaacaaaaggttccagtatcttacatggataatatttcattttcatcactctcttcatattctgctggtttaactcctttagacatcaaatcaattgtggaaacggcacgaatgacggctactgcgcgtttttaccaagaatcaaagaagtgtggatggcttccgcaatcaattttgatcactcaggaggatttatcaaaagctacttcgaaagctaggaacgaattctcggtttcgattggtgccccacaaatccctaacgtaacttgggatgatataggtggtattgattttgttaaaggtgaaatattggacacaatagacatgccgctaaaacatcctgaattatttacctcaggtatgaaaaagagaagcggtattcttttttatggtccaccgggtacaggtaaaactctaatggctaaggccattgcaacaaatttttctttaaatttttttagtgttaaaggccctgaactgttgaatatgtacattggtgagagtgaagctaatgtgcgcagagtgtttcaaaaggcgagagaggctaaaccttgtgtcatatttttcgatgaaatcgattcagtagcacccaaacgtggtaatcaaggtgattcgggtggtgttatggatcgtatcgtttcacagttactagcagagttagatggtatgagtaccgacgctgacggtgtatttgttatcggagcaacaaacagaccagacttattggacgaagcactactaagaccaggacgattcgataaattgttatatttaggcattccggatacggataccaaacaattgaatattttagaggctctgactcgcaaattcgtgctcgacaacgacgtaaagcttattgagttggcaaagctatgtccatttaattacaccggggcagatttttatgctctctgctcagatgcaatgcttaacgccatgtcaagaattgcacgcatggtagaaaaaaaagtttctcagcataacgaattgacgggagagaatatttctacacgtcgctggtttgataagattgcgacaaaagaggatactaaggttgtcgtaaaaatggaagacttcttgaaagcacaagagcagctcaccccaagtgtgtcgcgggctgaactgaatcattatgaagcggtgagagctaattttgaaggtgcttaa

SEQ ID NO: 9036 - DNA, 3093 bp, Artificial Sequence
  Description of Artificial Sequence: Synthetic polynucleotide
atgaaggcatctcttacgtttagtctctccggaatatacgccccctgtagcatttctagggatatatatctcgaatacggcgataaaaaagctgaatgtttatatgggacaattagattgcctcagtacggtccaggttgcacgcctggtaaaattgtacattgtgtcttggatgattctttacccttctgtagcattgttgtaccttccaaactttttgggtttatgccgacacagcccactatggatttttgctattttgaacccatattagacaatgtagtacctgtattggatagcgtaacgtttttgattaatgaacaattgtactctaaattaatggacttgccgcaagagatgcaacaaatacaatttttgcattacaaatataacatcaactccatggaaaccgtggttcattctagagatattttaacatctggtctttgccaaattttaaactgctctcctttcccgcagggccttgttgattttacagaaacccaattgatattagtaaatgatactgagcagaaattaagtgctttgaaatatgctaacgaagatgaagaatatgcattacctaaaatagggacaaattctgctttatccattgatcttgaatctctcccctgcacaatttctagagatcttttgagacctgcacctcacatcaatgatgataattctatatatgcctttacagacgctgaaactttacttcgcttagatgtcacaagtggaagttttataacagtgagtaatatgggttgcgtcaggttggttaagttatttgttttacttctccccaacggctttaaaaaaagaacaatatacgcacctcccaaaataatagcaagctttccagactgcagcgtcgtgacaatatccaagtccaatataggccatacagatattcccattgctaatcaagttttcatctccagagttggaggctggcttcaatctcagaaatgctttcaaaatattattttaacaaccttgaaaaagttttttagcgagagcaaaaggattctttgtcaaaatgatttaatcccaatcgcttttgattctagtatggctgatctcaatatagcagaggaaaatgatgagtctgatgacgaagatgagttagggcagtactacaagaacgattcccttgtatggttctttgtcacaagcgcagagctcgattgcttctctaaagataattctcattttattattgatcccaatagaacgaagttaataacaactaatatcactaacagaagaccattacccttgagtagatccaatcttcagagatattacggttttgctgaaactttttactatgatttgcatatcttcccctatgtaagacaattggttaacatattagaaacttccttcaattgttctcaaaggggaatcaccttgaatgcctctgtgttacttcattccactacaaacaatgtgggcaaggctacaatggtgagatttgcttccaaatatcttggtatacatttattggagatagattgcctttctctcacttccaattctagacaattggattctacatctaagattattggttacattagggctaaatgtgaaaatgtcttgccgtacgcatctcctgctgtgatttttttggctcatttggattctattttgcttgacgtaaacgctaatcaagatccagaggcaatcaaattacaaaaatctataaacttcgaaatgtctaaacttttggacgattttacgtttaaattcccaggaactacatttgttggctccgtaaataacatagataacgtgccttccagctttagaagccatatgagatttgagattctcgtacccgttccgtctgaagcacagagattacgtatctttcagtggtacttatcttctcatgaattgaacagagatgttcaacaaaaggttccagtatcttacatggataatatttccttttcttctctctcttcttattctgctggtttaactcctttagacatcaaatccattgtggaaacggcaagaatgacggctactgcgcgtttttaccaagaatccaagaagtgtggatggcttccgcaatctattttgatcactcaggaggatttatccaaagctacttctaaagctaggaacgaattctctgtttctattggtgccccacaaatccctaacgtaacttgggatgatataggtggtattgattttgttaaaggtgaaatattggacacaatagacatgccgttaaaacatcctgaattatttacctctggtatgaaaaagagaagcggtattcttttttatggtccaccgggtacaggtaaaactttaatggctaaggccattgcaacaaatttttctttaaatttttttagtgttaaaggccctgaattattgaatatgtacattggtgagagtgaagctaatgtgcgcagagtgtttcaaaaggcgagagaggctaaaccttgtgtcatatttttcgatgaaatcgattctgtagcacccaaacgtggtaatcaaggtgattctggtggtgttatggatcgtatcgtttctcagttattggcagagttagatggtatgagtaccgacgctgacggtgtatttgttatcggagcaacaaacagaccagacttattggacgaagcattattaagaccaggaagattcgataaattgttatatttaggcattccggatacggataccaaacaattgaatattttagaggctttgactcgcaaattcgtgctcgacaacgacgtaaagcttattgagttggcaaagttatgtccatttaattacaccggggcagatttttatgctctctgctctgatgcaatgcttaacgccatgagtagaattgcacgcatggtagaaaaaaaagtttctcagcataacgaattgacgggagagaatatttctacacgtcgctggtttgataagattgcgacaaaagaggatactaaggttgtcgtaaaaatggaagacttcttgaaagcacaagagcagctcaccccaagtgtgtccagagctgaattgaatcattatgaagcggtgagagctaattttgaaggtgcttga

SEQ ID NO: 9037 - DNA, 441 bp, Saccharomyces cerevisiae
atggttttgcctataataattggtttgggcgtgacaatggttgctctaagtgtcaagtctggtctcaatgcatggaccgtctacaagaccctgtcccctttaactattgcaaaactaaataacattcgcatagaaaacccgacggcgggctaccgcgatgcacttaagttcaaaagctcactgatagacgaagaactgaaaaatagattaaaccagtaccagggaggctttgcaccgcgaatgacagagcccgaagccttgctcatcttggatatctccgccagagagattaatcacttggatgaaaaattactgaaaaaaaagcacaggaaggctatggttcgtaaccacccagacagaggagggagtccctacatggcggccaagataaatgaggcgaaagaagttctcgaaagaagtgttttactaagaaagagataa

SEQ ID NO: 9038 - DNA, 441 bp, Artificial Sequence
  Description of Artificial Sequence: Synthetic polynucleotide
atggttttgcctataataattggtttgggcgtgacaatggttgctttaagtgtcaagtctggtctcaatgcatggaccgtctacaagaccttatcccctttaactattgcaaaattgaataacattcgcatagaaaacccgacggcgggctaccgcgatgcacttaagttcaaaagcagtttgatagacgaagaattgaaaaatagattaaaccagtaccagggaggctttgcaccgaggatgacagagcccgaagccttgctcatcttggatatctccgccagagagattaatcacttggatgaaaaattattgaaaaaaaagcacaggaaggctatggttcgtaaccacccagacagaggagggagtccctacatggcggccaagataaatgaggcgaaagaagttctcgaaagaagtgttttattaagaaagagatga

SEQ ID NO: 9039 - DNA, 3126 bp, Saccharomyces cerevisiae
atgaataaactattgttacatctagtacgagtcatttcgatactcggcctagcaaacgctctcacacaaacgcaaccgattttaaaagatattcaaataacagatagttataccaaaacaaaagaatgtacggatccagatcattggttcataatagaagggcaactgtctattccaaagggaagtcagcaaaatataacattccaagtaccagatgctttcagctcattccctcaagaacccttcagcataaaacataattctaacagtgttgccacgatatcacgcccagataaatcgacgaacaatttcaccatttctattccagaaaagagttcagaagatataactactacatttaacttccttgcacagcttacatcagatgctaaatccaaagttacagaaccaaaaagcatcgtttacagtttctattcagaaaatactatgtttaatgacgttattgattacgtcgctaaaaatacttctgctataacaacagatggtggtatatacaaaactaataataccgcctggtttaccgttgacttaccaatgagaacgttcagaaatcccgtttatttgacttctcagacatcttcctcctcagattacgtattcgatacttcgttaactaagtttgaggttgtcactgccgttgattcttttaacgaacctattaatgctatcccatatacaactgttcatgactactccacagaagatgaaattagatgtttatttaattctacaatcagcggtgggctatacttccgtgtgacttatttcacaaagaagctatctacctcgtccatatcaaatactgtcgaattaacatatcccgatgaaggtacatctgtcagacttttaggaaagagagatacttcaaccaccctagcctcagaattatattctgagtcagctgctaacattgattccaccaccagtgatgacacaactagctctgatgctgctataacaccaacatactcaaattcaacgctttcttcttatacttcgcaatcatccgctatccctgaagttgcggttactgcatcattgagtagcgggatcctttcttctacagttgacggtgctagcacctcggcggacgcttccatgtccgctgtctctacggtttcttctagcagtgaacaagcttcttcttcaagtatttctttatcggctccaagttcttcaaactcaacctttactactccttcatcttctctgtctgctactgaaacatatagtattatcagttcagctagtatatctgtcacacaggcttcctacattgataattctacaactaccgctgttacccaatctacttctactatagcagtttcatctgctgaaaaattgtcaagcactctatcatacaccagtaacgtcacaatatcagtatcatcagctacccaacatactactactccttcatatgttagtaactccactacactctcatcctcatctgttcttgaatctgtaattagctctccatacctggcaaacactactgtttcaggagcttcatctgcaagtcaatctactaatccgccatatgtctccaactccacaacatcatccgcaactcaattagccaccattgctccgttcgcgattaacataacaggaacaagtatttcttctagtatcactaatacttcttcagttagttctactacgtccagtttatcatccggcccatttgtttcaaacacaacggttgcctctgggtcttatattctaaccactactacagagtctgcacaacttactgaaatagggagtttgataccaatctcgactattactactagtaccaccacttctggtaccgataaaactggtagtaataaggtggcctcttcaactgaaatagcgcaatctatcgtaaacaacagttcactttcggtgtcaacaatcaacactaacgctgcgacagcagctgctaatgccagaaatgctactttcactcatgcaacccattctggttcgcttcaaccctcatatcatagcagctcactattatcgtccacaattgacaccaaggtaactactgctactacaagcaccagtagagacggtagttcgagtttggctttcaccactgggctcaatcaatccgtagttaccggtacagataaaagtgatacctatagtgtaatttcatccacagaatcagcccaggttacggagtacgacagcttacttccaatttccaccctgaagcctacagtcgttacaggtacaagtagaaacagtacctttagtatggtgtcctccaccaaattgaccgaagctactgcaacggataaaggtgatgcgtatagtgtaatttcatctacacagtcggctcaagttactgaatatggaagtatgcttccaatttctacgctggaaacaccaacagtcattatgagtaccgatgaaagcggctattttactttaactacatgtactgagtctgggcaagctacagaatatggtagtctgattccaatttccacactagatggttcagttatatatacatttactggcgaaagtgtagtggtgggttacagtaccacagtgggtgccgcccaatatgcacaacatacaagtttagtcccagtatctaccatcaagggttccaaaacttctctttcaaccgaggaaagcgtagtggctggctacagtactacagtgggtgccgcccaatatgcacaacatacaagtttagtcccggtatctaccattaagggttccaaaacttctctttcaaccgaggaaagcgtagtggctggctacagtaccacagtagattctgcccaatacgccgagcacacaaatttagttgccatagatacattgaaaactagcacattccaaaaagcaacagcaactgaggtttgtgtcacatgtaccgccctttcttcccctcattctgcaactttagatgcaggtactactatttcattgccaacaagttccagcacatctctatctacaataattacctggtattcctcatctactattaagcctccttcaatttctacatactcgggcgccgctggtcaattaaccatccgtattggcagtttgttgctagggttaatctcatttctgctgtaa

SEQ ID NO: 9040 - DNA, 3126 bp, Artificial Sequence
  Description of Artificial Sequence: Synthetic polynucleotide
atgaataaacttttgttacatttggtaagagtcatttctatactcggcttggcaaacgctctcacacaaacgcaaccgattttaaaagatattcaaataacagatagttataccaaaacaaaagaatgtacggatccagatcattggttcataatagaagggcaattatctattccaaagggaagtcagcaaaatataacattccaagtaccagatgctttcagctctttccctcaagaacccttcagcataaaacataattctaacagtgttgccacgatatctcgcccagataaatctacgaacaatttcaccatttctattccagaaaagagttctgaagatataactactacatttaacttccttgcacagcttacatctgatgctaaatccaaagttacagaaccaaaaagcatcgtttacagtttctattctgaaaatactatgtttaatgacgttattgattacgtcgctaaaaatacttctgctataacaacagatggtggtatatacaaaactaataataccgcctggtttaccgttgacttaccaatgagaacgttcagaaatcccgtttatttgacttctcagacatcttcctccagtgattacgtattcgatacttctttaactaagtttgaggttgtcactgccgttgattcttttaacgaacctattaatgctatcccatatacaactgttcatgactactccacagaagatgaaattagatgtttatttaattctacaatcagcggtgggttatacttccgtgtgacttatttcacaaagaagttatctacctcttccatatccaatactgtcgaattaacatatcccgatgaaggtacatctgtcagacttttaggaaagagagatacttctaccaccttggccagtgaattatattctgagtctgctgctaacattgattccaccaccagtgatgacacaactagctctgatgctgctataacaccaacatactctaattctacgctttcttcttatacttctcaatcttccgctatccctgaagttgcggttactgcaagtttgagtagcgggatcctttcttctacagttgacggtgctagcacctctgcggacgcttccatgtccgctgtctctacggtttcttctagcagtgaacaagcttcttcttccagtatttctttatctgctccaagttcttccaactctacctttactactccttcttcttctttatctgctactgaaacatatagtattatcagttctgctagtatatctgtcacacaggcttcctacattgataattctacaactaccgctgttacccaatctacttctactatagcagtttcttctgctgaaaaattgagtagcactttatcttacaccagtaacgtcacaatatctgtatcttctgctacccaacatactactactccttcttatgttagtaactccactacactctcttcctcttctgttcttgaatctgtaattagctctccatacttggcaaacactactgtttctggagcttcttctgcaagtcaatctactaatccgccatatgtctccaactccacaacatcttccgcaactcaattagccaccattgctccgttcgcgattaacataacaggaacaagtatttcttctagtatcactaatacttcttctgttagttctactacgtccagtttatcttccggcccatttgtttctaacacaacggttgcctctgggtcttatattttgaccactactacagagtctgcacaacttactgaaatagggagtttgataccaatctctactattactactagtaccaccacttctggtaccgataaaactggtagtaataaggtggcctcttctactgaaatagcgcaatctatcgtaaacaacagttctctttctgtgtctacaatcaacactaacgctgcgacagcagctgctaatgccagaaatgctactttcactcatgcaacccattctggttctcttcaaccctcttatcatagcagctctttattatcttccacaattgacaccaaggtaactactgctactacaagcaccagtagagacggtagtagtagtttggctttcaccactgggctcaatcaatccgtagttaccggtacagataaaagtgatacctatagtgtaatttcttccacagaaagtgcccaggttacggagtacgacagcttacttccaatttccaccttgaagcctacagtcgttacaggtacaagtagaaacagtacctttagtatggtgtcctccaccaaattgaccgaagctactgcaacggataaaggtgatgcgtatagtgtaatttcttctacacagtctgctcaagttactgaatatggaagtatgcttccaatttctacgttagaaacaccaacagtcattatgagtaccgatgaaagcggctattttactttaactacatgtactgagtctgggcaagctacagaatatggtagtttgattccaatttccacattagatggttctgttatatatacatttactggcgaaagtgtagtggtgggttacagtaccacagtgggtgccgcccaatatgcacaacatacaagtttagtcccagtatctaccatcaagggttccaaaacttctctttctaccgaggaaagcgtagtggctggctacagtactacagtgggtgccgcccaatatgcacaacatacaagtttagtcccggtatctaccattaagggttccaaaacttctctttctaccgaggaaagcgtagtggctggctacagtaccacagtagattctgcccaatacgccgagcacacaaatttagttgccatagatacattgaaaactagcacattccaaaaagcaacagcaactgaggtttgtgtcacatgtaccgccctttcttcccctcattctgcaactttagatgcaggtactactatttctttgccaacaagttccagcacatctttatctacaataattacctggtattcctcttctactattaagcctccttctatttctacatactctggcgccgctggtcaattaaccatccgtattggcagtttgttgttggggttaatctcttttttattatga

SEQ ID NO: 9041 - DNA, 1011 bp, Saccharomyces cerevisiae
atgaatgacaggctttcgttgacaagtctgtttcccaggtgtttgaccacatgtttgtatatttggactgcatacataacattgacaaggattcatcaaatacctaggtggtttctcgcgctaacaatagttccgacattggcagtggctctatacacttattataaggttattgctagaggtcccggttctcctctagatttccctgatttgttagtccacgatttaaaggcagcggaaaatggacttgaacttcctccggagtatatgtcaaaaaggtgtttgaccttaaaacatgatggaagatttcgggtgtgccaagtatgccatgtttggaagcccgatcgctgtcatcattgttcatcatgcgatgtttgcatattgaaaatggatcatcattgcccttggttcgctgaatgcactggttttaggaatcaaaaattttttattcaattcttaatgtacacaacattatacgcgttcttagtcctaatttatacttgctatgagcttgggacgtggtttaactccggtagtttcaaccgtgaattgatagattttcatctattaggggtggccctattggcggttgctgttttcatttctgttttagcatttacctgtttcagcatttatcaggtttgtaaaaaccaaactactatcgaggtacacggaatgagaaggtatcgaagggatcttgaaatcctcaatgacagctatggaacaaatgagcatttagagaatatatttgacttgggttcttcaatggccaactggcaagatataatgggtacatcttggttagagtggatacttcctattgagaccttcaagtacaaaaagtctaaacacacaaaggatgaaaaaggtttatattttaatgtaagacctcaagtacaagaccgactgctaagtagtagatgtttagaagatcaattactgagaagagtaacaccaagaccctcattagaagccgatagggcgtctgtagaaattatcgatgcaaattag

SEQ ID NO: 9042 - DNA, 1011 bp, Artificial Sequence
  Description of Artificial Sequence: Synthetic polynucleotide
atgaatgacaggctttctttgacaagtttatttcccaggtgtttgaccacatgtttgtatatttggactgcatacataacattgacaaggattcatcaaatacctaggtggtttctcgcgttaacaatagttccgacattggcagtggctttgtacacttattataaggttattgctagaggtcccggttctcctttggatttccctgatttgttagtccacgatttaaaggcagcggaaaatggacttgaacttcctccggagtatatgtccaaaaggtgtttgaccttaaaacatgatggaagatttagggtgtgccaagtatgccatgtttggaagcccgatcgctgtcatcattgttctagttgcgatgtttgcatattgaaaatggatcatcattgcccttggttcgctgaatgcactggttttaggaatcaaaaattttttattcaattcttaatgtacacaacattatacgcgttcttagtcttgatttatacttgctatgagcttgggacgtggtttaactccggtagtttcaaccgtgaattgatagattttcatcttttaggggtggccttattggcggttgctgttttcatttctgttttagcatttacctgtttcagcatttatcaggtttgtaaaaaccaaactactatcgaggtacacggaatgagaaggtatagaagggatcttgaaatcctcaatgacagctatggaacaaatgagcatttagagaatatatttgacttgggttcttctatggccaactggcaagatataatgggtacatcttggttagagtggatacttcctattgagaccttcaagtacaaaaagtctaaacacacaaaggatgaaaaaggtttatattttaatgtaagacctcaagtacaagacagattattaagtagtagatgtttagaagatcaattattaagaagagtaacaccaagaccctctttagaagccgatagggcgtctgtagaaattatcgatgcaaattga

SEQ ID NO: 9043 - DNA, 2640 bp, Saccharomyces cerevisiae
atgaacaatgatgcaatggagcatacccttggtggaggtatacttaccacatctgggtctaagcagagaaagacctctaagtttgtaatgggtaaatatacgttatacgaaaccaaagatcgaatgtatattgttggaagcaataaaagggaaaccatgtttcgtattctagaaattgatcttactgtaccccgtggagaattaactgtgttggaggataatgtcttcttcaccagaaatgaaatcatgaatgtactagcaagtttagaagaagcaactgaagatggtctacataagaaaattacaggatacggtcttctgggattcattaaattcacctgttggtactatttaataatggttaccaagtatagccaagttgcagtgattggcggtcatggtatttatcacattgatggtattgatattattcctattacgaacaactataaaaaacctgaaaaaagttcagatgaggcaaggctattgaatatatttaaggatttagacctaacaaaaaccttttatttcagttatacctacgatatcacaaatactttacaaaccaatatattgcgagagaaattaaaagcggttgaccgatgtgatattacaataccttgcgggataaccgactataacgaaatgtttgtttggaataacaatttattatctcctatttttgcttgtattgacactgtttttgattggttccaatgcattatacatggatttattgaccaggttaatgtttcagttttgggtaagtccatatatattactttaatcgcaagaagatcccaccattttgctggtgcacgctttctaaagcgtggtgttaacaataaaggtcatgttgctaacgaagtcgaaactgaacagattgtaacagatatgattttgactccattccatcaaccgggaaatggattttttgatagtgatcgatacacttcttttgtacagcatcgtggctcaatccccttatactggacccaggatgcgtccaatttaaccacaaagccacctataagaatcaatgtggtagatccatttttttctccggctgcgttgcattttgataacttgtttcaaagatatggtggcggaaccattcaaatactgaacttaattaaaaccaaagaaaagacgccaagagaaactaagttactctgggaatttgaacaatgtatagattatctgaatgaatttttaccaacactaaagaaattagattacacctcttgggatatgagcagggcttctaaacaagatggtcaaggtgttattgaattcttagagaagtacgcggtaaacactgtcacgacgacaggaatatttcataatggtccagactttgcttctacaaagatccaggaaggaatatgtcgaagtaattgtattgactgtcttgataggaccaacgccgcccaattcgtcattggcaagagagcacttggttgccagctcaaatctttaggaattatcgataatagttatttagagtacgactctgatatcgtcaacatactaactgaattgtttcatgatctgggagatactattgcattacaatatggcggttcgcatttggttaacaccatggagacatatagaaaaataaatcagtggagctcccattcaagggatatgatcgaaagtataaaaagattctacagtaattcattcgttgatgcacaaaggcaagatgcgattaatttattcctgggtcactactcctggagagaaggatttccctctttatgggaaatgaataccgatttctacttgcataatgcttatagtcttaatatgcctaaaaggagctatattcattggtggaatgattacaacatcaaaagtgtaaaagaattgattaatgaagaacttattgcaacaggtaatgatgtgacaagagagaaaattataaaaaacgtaagaggttatcctggtgcctttgacaattactggaatgaatattatctgccaagatcagtaacttggattcgcgatctctttgcatataatatgaattcaacaagaagatatcataatgctttgtccaaacaagacaaggctatgtcgccgttcacttctaggaagcaaagttggctgaataataagctaaagatgatcacatccagtaagagtttagaaaaggctgaaggtagggtagttgagactaccgatttagacagagatacatctccaaagcaagaattagaattgtatgaacattacctgcacataatatctgacagaagccaaaagttggaagagaaaatgaattcattttcgtattcaaaatatccaatttttatcagtcatgaaagtagtgagattccaccaatgagaaaagtaataggagaaccactagttgatattgcagaagatttcactgatgtatacgatgatgatgatgatggcgacgatgagaatgacgagatgacaacagaagcacttcttattgctcctgatcatgtgtctgttgacgaaaaattttacgaaaaagtcctcaatgtcgatgattataaacctgctcttgatgactattctgctgttatacacattaagcccgacaatttgcagctttacagggatttgtgcttttctaaagatatacaacttgattttcaataa

SEQ ID NO: 9044 - DNA, 2640 bp, Artificial Sequence
  Description of Artificial Sequence: Synthetic polynucleotide
atgaacaatgatgcaatggagcatacccttggtggaggtatacttaccacatctgggtctaagcagagaaagacctctaagtttgtaatgggtaaatatacgttatacgaaaccaaagatagaatgtatattgttggaagcaataaaagggaaaccatgtttcgtattttggaaattgatcttactgtaccccgtggagaattaactgtgttggaggataatgtcttcttcaccagaaatgaaatcatgaatgtattggcaagtttagaagaagcaactgaagatggtttgcataagaaaattacaggatacggtcttttgggattcattaaattcacctgttggtactatttaataatggttaccaagtatagccaagttgcagtgattggcggtcatggtatttatcacattgatggtattgatattattcctattacgaacaactataaaaaacctgaaaaaagttctgatgaggcaaggttattgaatatatttaaggatttagacttgacaaaaaccttttatttcagttatacctacgatatcacaaatactttacaaaccaatatattgagagagaaattaaaagcggttgacagatgtgatattacaataccttgcgggataaccgactataacgaaatgtttgtttggaataacaatttattatctcctatttttgcttgtattgacactgtttttgattggttccaatgcattatacatggatttattgaccaggttaatgtttctgttttgggtaagtccatatatattactttaatcgcaagaagatcccaccattttgctggtgcacgctttttgaagcgtggtgttaacaataaaggtcatgttgctaacgaagtcgaaactgaacagattgtaacagatatgattttgactccattccatcaaccgggaaatggattttttgatagtgatagatacacttcttttgtacagcatcgtggctccatccccttatactggacccaggatgcgtccaatttaaccacaaagccacctataagaatcaatgtggtagatccatttttttctccggctgcgttgcattttgataacttgtttcaaagatatggtggcggaaccattcaaatattaaacttaattaaaaccaaagaaaagacgccaagagaaactaagttactctgggaatttgaacaatgtatagattatttgaatgaatttttaccaacattgaagaaattagattacacctcttgggatatgagcagggcttctaaacaagatggtcaaggtgttattgaattcttagagaagtacgcggtaaacactgtcacgacgacaggaatatttcataatggtccagactttgcttctacaaagatccaggaaggaatatgtaggagtaattgtattgactgtcttgataggaccaacgccgcccaattcgtcattggcaagagagcacttggttgccagctcaaatctttaggaattatcgataatagttatttagagtacgactctgatatcgtcaacatattgactgaattgtttcatgatttgggagatactattgcattacaatatggcggttctcatttggttaacaccatggagacatatagaaaaataaatcagtggagctcccattccagggatatgatcgaaagtataaaaagattctacagtaattctttcgttgatgcacaaaggcaagatgcgattaatttattcttgggtcactactcctggagagaaggatttccctctttatgggaaatgaataccgatttctacttgcataatgcttatagtcttaatatgcctaaaaggagctatattcattggtggaatgattacaacatcaaaagtgtaaaagaattgattaatgaagaacttattgcaacaggtaatgatgtgacaagagagaaaattataaaaaacgtaagaggttatcctggtgcctttgacaattactggaatgaatattatttaccaagatctgtaacttggattcgcgatctctttgcatataatatgaattctacaagaagatatcataatgctttgtccaaacaagacaaggctatgtctccgttcacttctaggaagcaaagttggttaaataataagttgaagatgatcacatccagtaagagtttagaaaaggctgaaggtagggtagttgagactaccgatttagacagagatacatctccaaagcaagaattagaattgtatgaacattacttgcacataatatctgacagaagccaaaagttggaagagaaaatgaattctttttcttattctaaatatccaatttttatcagtcatgaaagtagtgagattccaccaatgagaaaagtaataggagaaccattagttgatattgcagaagatttcactgatgtatacgatgatgatgatgatggcgacgatgagaatgacgagatgacaacagaagcacttcttattgctcctgatcatgtgtctgttgacgaaaaattttacgaaaaagtcctcaatgtcgatgattataaacctgctcttgatgactattctgctgttatacacattaagcccgacaatttgcagctttacagggatttgtgcttttctaaagatatacaacttgattttcaatga

SEQ ID NO: 9045 - DNA, 1245 bp, Saccharomyces cerevisiae
atggtaaatttcgatttgggccaagttggtgaagtattccgtagaaaggacaaaggagctatagtgtccggagacaacccagaagaagaagaagacgtcgatgcttctgagtttgaagaggatgaagtaaagcctgtgcgtacaaagaacagaagacccaaagaggatgcattcactcaacaaagattagcggctataaacccggtgttaacgccgaggacagttttgcctctttatctgttaattgctgttgtatttgttattgtaggagggtgcatattagcacagaactccaaagtggatgaagtaaccatatattaccaggactgtatgactaacgcaacctcatcatggagcgacatcccttctgaacattggcaatttgtatttcacaaatataaaacatataatactgcaccacaatggaggtttgtggatgatgaatcagatgacttcacaaaacaaagaggtacatgccaaatcaggttcactactccaagtgatatgaaaaataacgtatatttgaattatgtgctggaaaaatttgctgccaatcacagaagatatgtactatcttttagcgaagatcagatacgtggggaggacgcctcttatgagacggtgcatgatgcaaccggtataaattgtaagccactatctaagaacgccgatggtaaaatatactatccatgtggcctaattgcgaactcaatgttcaacgacacgttccccctgcagttaacaaatgtaggggatacgtctaacaactattcattgacaaataaaggaatcaattgggaatctgataaaaaaaggtacaaaaaaaccaaatacaattatacacagatagcacctccaccatattgggaaaagatgtatccagatggatacaacgagacgaatattcctgatattcaggattgggaagagttccaaaactggatgaggccaggtgcttttgataaaattacaaaactgatcagaatcaataaaaacgatactttgccagcgggtgaataccagttggatatcggtctgcattggccagtattggagtttaatggtaagaagggaatctacttgactcacggttctcaccttggcggtagaaatccatttttaggtatagtttacctgattggaggctgtatttgtgctgccatggcattgatattattaacgttttggctcttcggcggtagaaagattgctgatgcatcaagtttgtcatggaatatgaaatag

SEQ ID NO: 9046 - DNA, 1245 bp, Artificial Sequence
  Description of Artificial Sequence: Synthetic polynucleotide
atggtaaatttcgatttgggccaagttggtgaagtattccgtagaaaggacaaaggagctatagtgtccggagacaacccagaagaagaagaagacgtcgatgcttctgagtttgaagaggatgaagtaaagcctgtgcgtacaaagaacagaagacccaaagaggatgcattcactcaacaaagattagcggctataaacccggtgttaacgccgaggacagttttgcctctttatcttttaattgctgttgtatttgttattgtaggagggtgcatattagcacagaactccaaagtggatgaagtaaccatatattaccaggactgtatgactaacgcaacctcttcttggagcgacatcccttctgaacattggcaatttgtatttcacaaatataaaacatataatactgcaccacaatggaggtttgtggatgatgaaagtgatgacttcacaaaacaaagaggtacatgccaaatcaggttcactactccaagtgatatgaaaaataacgtatatttgaattatgtgttggaaaaatttgctgccaatcacagaagatatgtattatcttttagcgaagatcagatacgtggggaggacgcctcttatgagacggtgcatgatgcaaccggtataaattgtaagccattatctaagaacgccgatggtaaaatatactatccatgtggcttaattgcgaactccatgttcaacgacacgttccccttgcagttaacaaatgtaggggatacgtctaacaactattctttgacaaataaaggaatcaattgggaatctgataaaaaaaggtacaaaaaaaccaaatacaattatacacagatagcacctccaccatattgggaaaagatgtatccagatggatacaacgagacgaatattcctgatattcaggattgggaagagttccaaaactggatgaggccaggtgcttttgataaaattacaaaattaatcagaatcaataaaaacgatactttgccagcgggtgaataccagttggatatcggtttgcattggccagtattggagtttaatggtaagaagggaatctacttgactcacggttctcaccttggcggtagaaatccatttttaggtatagtttacttgattggaggctgtatttgtgctgccatggcattgatattattaacgttttggctcttcggcggtagaaagattgctgatgcaagtagtttgtcctggaatatgaaatga

SEQ ID NO: 9047 - DNA, 942 bp, Saccharomyces cerevisiae
atgatgcgtcgcacgctattacattcattcgctacgctgctactttctttgtcgttgtggtcagctgcggtcatggcagctgtgacaactcaggttacagtggtaacaaatgtcgcaggggccctggttacggagaccacaatatgggaccctgccaccgctgctgctgctgctacaactaccgctcaaacaggtttcttcactacggtattcactaccactaacgatgtcggaaccaccgtcactcttactcagacagtcaacagagccactatgctaccaaccacgacgacttctacctcatctactggtaagacaaccaccactgttcctaccgcaacttcatcgttgtcttcgggactgtatttatctacagttaccacgacaaacgatttgggtaccacagttacattgactcaaacgttcacacattctagcaccagtgctacttcatccgcctcctcgtctgtgtcctcgtctgtatcttcgtctggttcatcctccagtgtaaagacgaccacatcgacagggagcgcagtagctgaaacaggcaccaggccagacccctccacagacttcacagaacctcctgtgtctgctgtcactagtctatctattgactcatacattaccatcactgaaggtacaacctccacttacacaaccacacgtgcgccaacgtccatgtgggtcactgttgttagacagggcaacactatcactgtgcaaactacttttgtccagcgtttctcctcccagtacgtaacagtcgcttctccctccgtggggtctattgggatgggtactttaaccggtactgtaggcgttattaaatctgcaataaagaaaacagtttcgcataatgaggcccagcatctaggtatgagttcgtttacttcaattttgggtgggctattaacggttttaatttggttcttataa

SEQ ID NO: 9048 - DNA, 942 bp, Artificial Sequence
  Description of Artificial Sequence: Synthetic polynucleotide
atgatgcgtcgcacgttattacattctttcgctacgttattactttctttgtctttgtggagtgctgcggtcatggcagctgtgacaactcaggttacagtggtaacaaatgtcgcaggggccttagttacggagaccacaatatgggaccctgccaccgctgctgctgctgctacaactaccgctcaaacaggtttcttcactacggtattcactaccactaacgatgtcggaaccaccgtcactcttactcagacagtcaacagagccactatgcttccaaccacgacgacttctacctcttctactggtaagacaaccaccactgttcctaccgcaacttcttctttgtcttctggattgtatttatctacagttaccacgacaaacgatttgggtaccacagttacattgactcaaacgttcacacattctagcaccagtgctacttcttccgcctcctcttctgtgtcctcttctgtatcttcttctggttcttcctccagtgtaaagacgaccacatctacagggagcgcagtagctgaaacaggcaccaggccagacccctccacagacttcacagaacctcctgtgtctgctgtcactagtttatctattgactcttacattaccatcactgaaggtacaacctccacttacacaaccacacgtgcgccaacgtccatgtgggtcactgttgttagacagggcaacactatcactgtgcaaactacttttgtccagcgtttctcctcccagtacgtaacagtcgcttctccctccgtggggtctattgggatgggtactttaaccggtactgtaggcgttattaaatctgcaataaagaaaacagtttctcataatgaggcccagcatttaggtatgagttcttttacttctattttgggtgggttattaacggttttaatttggttcttatga

SEQ ID NO: 9049 - DNA, 2727 bp, Saccharomyces cerevisiae
atggccaaaaataaccacatttctgccagtggtaacagtacctctggagaccatcgtcttaaagaggaggttctgaccccaactacatctgcctcgactcctcatagaatatttagcgtggacgatgatccaaaggagatccaaaacgatatcaggtatcttgagggtctgcatgaagggttgaagttcgccctgcatgccaataaatccaagcgatctgtaagctcgcaatcaccaatcgtacatagcagcaacaacacgctgcaccaccacgagcaccaacaacacttgccgcccacactagagtcgctatcctccaagtcgcactctgtgccagacttaaatacagctactcccagctctccgaaacgaatgcattcatctatccgggaattacctcatgatgacaatgatgacgaggacgccaatgatgacagtcggttcattatacacgactcgcacggccatgatttacttatagacgagatcaattgccagtcgccttcacacttggaaaacaatgaccaggcgtctaatgcttcgtccacagagtcattcactttacgagaaagacaggacgccatcaacgagacccaccccttcggtatcaggatatggaagcctgctttatataagaaacaccgttcagttcaaagaaccgcggcgcaagacattcacgagactcagttgaagactattacctgggaggtgacttgttccaatgtgctatggtttattttgttcggtttccccattgcgatactcttctactcggcggctattgtggtatttttactaggcggcggaggactggtaacgaactctgcgaaggagtactccaagtgtctgtataaactcgccaattatttcctttggccttttggcaaaatggtatacttgttgcaggacgagcaatatttacaagaagataaggatgaaggtattagtatgcagcaattctacaattgggtgacttcatactccaacaggctggtcttccaccagtctcaggccaagtttcagcaaagagaggaccatccggcccctgcaacggaatcttcgtctttgatgccgcccgctaacacaacagcaacaccgcttaactcgaaccatccatcatataattctattagacacgaaattccgcacgcagcggctcaaagacggtactttgggagaggaaaatggagctggggtcgtgttcttttctatacaatcttccatctcgtcttgcaacccatccttgccgtcttatctctttgcctctggctcctggtgtttaccattcccatgagtaatgttctttggcaaattatgtatcattgcagaagacatccgcttgcattaggcttcaaatatgtcgagaactcctcccaatcgcacgaaaatgaaataacccagcagcaattgaacaaaaatatcctcttatgtacgttccgtgccgctggctggcattactacaagtacacagttgatggtacaaatgttattgttgtgaatttaatatccatcgttttctttacaatttttgacttttatgttttgaaaaatttcctgcattggaaaacgtggttcacatacgaatcctcaatattcattctttgtttgacatccaccatcccactagcattttacattggacaagcagtcgcatcgatctctgctcaaacttccatgggtgtcggtgctgtcattaatgcatttttctcgaccattgtggaaattttcttgtactgcgttgcattgcaacaaaaaaagggtcttctagtggaaggatccatgattggttccattctaggtgccgttctattattaccaggtctgtccatgtgcggtggtgctctaaataggaaaacacaaagatacaaccctgctagcgctggtgtctcttccgcattgttaatattttccatgattgtaatgtttgtccccaccgttttatacgagatatatggcggctactcggtaaactgtgcagacggtgctaacgaccgtgactgtactttctcgcatcctcccctgaagttcaaccgtttattcactcatgttattcaacctatgtccatatcttgtgccattgttctcttctgtgcttatatcattggcttgtggttcacccttagaacacatgcaaagatgatttggcaattgcctattgcggacccaacctcgaccgcaccagaacaacaggaacaaaattctcacgatgcacccaattggtcaagaagcaagtctacttgtattttacttatgtctacgctcctgtacgcaataattgcagaaatccttgtttcctgtgttgatgctgtcctagaagatattccctccttgaatccaaagtttctaggtctcaccatttttgctctgatccccaatacgacagagtttttgaatgccatttcatttgccatccatggtaatgtagcgttatcaatggaaatcggtagtgcttatgctttacaggtttgtcttttacaaatcccatccttagtcatttattccattttctatacgtggaatgttaaaaagtcgatgattaatatcagaacacagatgttcccattagtctttccccgttgggacatatttggtgctatgacgagtgttttcatgttcacctatttgtatgctgagggtaaaagtaactatttcaagggttccatgttgatattactatatatcattattgttgtaggattctacttccagggagctctttcggagtag

SEQ ID NO: 9050 - DNA, 2727 bp, Artificial Sequence
  Description of Artificial Sequence: Synthetic polynucleotide
atggccaaaaataaccacatttctgccagtggtaacagtacctctggagaccatcgtcttaaagaggaggttttaaccccaactacatctgcctctactcctcatagaatatttagcgtggacgatgatccaaaggagatccaaaacgatatcaggtatcttgagggtttgcatgaagggttgaagttcgccttgcatgccaataaatccaagagatctgtaagctctcaatctccaatcgtacatagcagcaacaacacgttgcaccaccacgagcaccaacaacacttgccgcccacattagagtctttatcctccaagtctcactctgtgccagacttaaatacagctactcccagctctccgaaaagaatgcattcttctatcagagaattacctcatgatgacaatgatgacgaggacgccaatgatgacagtcgtttcattatacacgactctcacggccatgatttacttatagacgagatcaattgccagtctccttctcacttggaaaacaatgaccaggcgtctaatgcttcttccacagagagtttcactttaagagaaagacaggacgccatcaacgagacccaccccttcggtatcaggatatggaagcctgctttatataagaaacaccgttctgttcaaagaaccgcggcgcaagacattcacgagactcagttgaagactattacctgggaggtgacttgttccaatgtgttgtggtttattttgttcggtttccccattgcgatactcttctactctgcggctattgtggtatttttattaggcggcggaggattagtaacgaactctgcgaaggagtactccaagtgtttgtataaactcgccaattatttcctttggccttttggcaaaatggtatacttgttgcaggacgagcaatatttacaagaagataaggatgaaggtattagtatgcagcaattctacaattgggtgacttcttactccaacaggttggtcttccaccagtctcaggccaagtttcagcaaagagaggaccatccggcccctgcaacggaatcttcttctttgatgccgcccgctaacacaacagcaacaccgcttaactccaaccatccatcttataattctattagacacgaaattccgcacgcagcggctcaaagaagatactttgggagaggaaaatggagctggggtcgtgttcttttctatacaatcttccatctcgtcttgcaacccatccttgccgtcttatctctttgcctctggctcttggtgtttaccattcccatgagtaatgttctttggcaaattatgtatcattgcagaagacatccgcttgcattaggcttcaaatatgtcgagaactcctcccaatctcacgaaaatgaaataacccagcagcaattgaacaaaaatatcctcttatgtacgttccgtgccgctggctggcattactacaagtacacagttgatggtacaaatgttattgttgtgaatttaatatccatcgttttctttacaatttttgacttttatgttttgaaaaatttcttacattggaaaacgtggttcacatacgaatcctccatattcattctttgtttgacatccaccatcccattggcattttacattggacaagcagtcgcatctatctctgctcaaacttccatgggtgtcggtgctgtcattaatgcatttttctccaccattgtggaaattttcttgtactgcgttgcattgcaacaaaaaaagggtcttttagtggaaggatccatgattggttccattttgggtgccgttttattattaccaggtttatccatgtgcggtggtgctttgaataggaaaacacaaagatacaaccctgctagcgctggtgtctcttccgcattgttaatattttccatgattgtaatgtttgtccccaccgttttatacgagatatatggcggctacagtgtaaactgtgcagacggtgctaacgaccgtgactgtactttctctcatcctcccttgaagttcaaccgtttattcactcatgttattcaacctatgtccatatcttgtgccattgttctcttctgtgcttatatcattggcttgtggttcacccttagaacacatgcaaagatgatttggcaattgcctattgcggacccaacctccaccgcaccagaacaacaggaacaaaattctcacgatgcacccaattggtccagaagcaagtctacttgtattttacttatgtctacgctcttatacgcaataattgcagaaatccttgtttcctgtgttgatgctgtcttggaagatattccctccttgaatccaaagtttttaggtctcaccatttttgctttgatccccaatacgacagagtttttgaatgccatttcctttgccatccatggtaatgtagcgttatctatggaaatcggtagtgcttatgctttacaggtttgtcttttacaaatcccatccttagtcatttattccattttctatacgtggaatgttaaaaagtctatgattaatatcagaacacagatgttcccattagtctttccccgttgggacatatttggtgctatgacgagtgttttcatgttcacctatttgtatgctgagggtaaaagtaactatttcaagggttccatgttgatattattatatatcattattgttgtaggattctacttccagggagctctttctgagtga

SEQ ID NO: 9051 - DNA, 855 bp, Saccharomyces cerevisiae
atgttgtggaaagtttctaagatgttcttgggtggcttggtagcgctaacaacaatatcggttgcgaccctttatcactaccaaaatcgcctagtctacccatcatgggctcaaggcgccaggaatcatgttgacactcctgattcccgtggaatcccttatgaaaagctaaccctaattacacaagaccacattaaactcgaggcatgggatatcaagaatgaaaactcaacaagtactgtgttgatcttatgtcccaatgccggtaatattggatactttatactaataattgacattttctatcgtcagtttggaatgagtgtatttatttattcgtatcgtggttatggtaactcagaaggttcacccagcgaaaagggtttgaaattggacgctgattgtgtcatatcgcatttgtcaacggattctttccattcaaagagaaaactagtattgtatggtagatctctaggtggtgctaatgctctttacattgcttcaaaatttcgggatctatgcgatggcgttatactggagaatacatttttgagtattcgaaaagttatcccatatattttcccccttttgaaacgctttacgcttttatgtcacgaaatctggaattcagaaggccttatgggaagctgtagttcagagacgccattcttgtttttaagtggattaaaagatgaaatcgttccacccttccacatgaggaaactgtacgaaacatgtcctagttcgaacaaaaagattttcgaatttccacttggttcacacaatgatactattattcaagatgggtactgggatataataagagattttctaatagagaagggttttatctaa

SEQ ID NO: 9052 - DNA, 855 bp, Artificial Sequence
  Description of Artificial Sequence: Synthetic polynucleotide
atgttgtggaaagtttctaagatgttcttgggtggcttggtagcgttaacaacaatatctgttgcgaccctttatcactaccaaaatcgcttggtctacccatcttgggctcaaggcgccaggaatcatgttgacactcctgattcccgtggaatcccttatgaaaagttgaccttgattacacaagaccacattaaactcgaggcatgggatatcaagaatgaaaactccacaagtactgtgttgatcttatgtcccaatgccggtaatattggatactttatattaataattgacattttctatcgtcagtttggaatgagtgtatttatttattcttatcgtggttatggtaactctgaaggttctcccagcgaaaagggtttgaaattggacgctgattgtgtcatatctcatttgagcacggattctttccattctaagagaaaattagtattgtatggtagatctttgggtggtgctaatgctctttacattgcttccaaatttagagatttatgcgatggcgttatattggagaatacatttttgagtattagaaaagttatcccatatattttcccccttttgaaacgctttacgcttttatgtcacgaaatctggaattctgaaggccttatgggaagctgtagtagtgagacgccattcttgtttttaagtggattaaaagatgaaatcgttccacccttccacatgaggaaactttacgaaacatgtcctagtagtaacaaaaagattttcgaatttccacttggttctcacaatgatactattattcaagatgggtactgggatataataagagattttttaatagagaagggttttatctga

SEQ ID NO: 9053 - DNA, 1623 bp, Saccharomyces cerevisiae
atgactgctcagattccgtatcaacatagctcgggatacatctctcattttcacaataatgagcttgatgcaggcaggggaagggattataatgtaaccattaagtatctagatgataaagaagaaaatatagaaggccaagcagcaaagattagtcacaatgcgagtctgcatattcccgttttattgtgcttggtaatctcgcttggtggctttatttttggatgggacattggaaccatcggtggaatgacaaatatggttagctttcaagaaaaatttggcacaactaatattatccatgacgatgaaacaatttttgtatctactaagaaacttactgatctgcaaataggcctaattatcagtatttttaacatcagttgtggcgtaggggctttaactctgtcaaaaatcggtgattggattggtaggaaaggtggtatatggtttgccttagtagtgtactgcatcggtataaccattcaaattctctcctatggaaggtggtattttttgacattgggaagagccgtaacgggaatcggtgtgggagtaaccactgtcttggtgccaatgtttctctccgagaattctccactaaaaatcagaggctccatggtatctacgtatcaattgattgtaacatttggcatactaatgggaaacattttaaatttcatatgcgaaagatgttataaagatcctacacaaaatatagcctggcaattgccattgttcttgggatacatttgggcaattataattggaatgtcacttgtttacgttcctgaatctccacagtacttggcaaaaatcaaaaatgatgtgccctctgctaaatactcttttgcgaggatgaatggcatccctgcgacggatagcatggtaattgaattcatcgatgatttgctggaaaataactataataatgaggaaactaacaacgaatcaaaaaagcaaagcttagttaaaagaaacacatttgaatttattatgggaaagccaaagttatggttgagactgattattggtatgatgataatggcatttcaacagctgtccggaataaattatttcttttattacggaacgtctgttttcaaaggtgtcgggattaaggatccttatattacttcaatcatactgtcaagtgttaacttcctttctacgatattaggcatatattacgtggagaaatggggccacaagacatgtttattatatggttcaacaaatttattattttatatgatgacatatgctactgtggggacatttggaagagaaacggacttctcaaatattgttttaattatcgtgacttgttgttttattttttggtttgcaataacattgggcccagttacatttgtactagtgtccgaattgttccctctaagaacgagggccatatcaatggctatttgcacatttatcaattggatgttcaatttcttaatatcacttttaacaccaatgattgtatccaaaattgatttcaaactaggatacatatttgctgcttgcctattagcgttgataatattcagttggatactagttcctgaaacgaggaaaaagaatgagcaagagatcaataaaatatttgaaccggagtag

SEQ ID NO: 9054 - DNA, 1623 bp, Artificial Sequence
  Description of Artificial Sequence: Synthetic polynucleotide
atgactgctcagattccgtatcaacatagcagtggatacatctctcattttcacaataatgagcttgatgcaggcaggggaagggattataatgtaaccattaagtatttggatgataaagaagaaaatatagaaggccaagcagcaaagattagtcacaatgcgagtttgcatattcccgttttattgtgcttggtaatctctcttggtggctttatttttggatgggacattggaaccatcggtggaatgacaaatatggttagctttcaagaaaaatttggcacaactaatattatccatgacgatgaaacaatttttgtatctactaagaaacttactgatttgcaaataggcttaattatcagtatttttaacatcagttgtggcgtaggggctttaactttatccaaaatcggtgattggattggtaggaaaggtggtatatggtttgccttagtagtgtactgcatcggtataaccattcaaattctctcctatggaaggtggtattttttgacattgggaagagccgtaacgggaatcggtgtgggagtaaccactgtcttggtgccaatgtttctctccgagaattctccattgaaaatcagaggctccatggtatctacgtatcaattgattgtaacatttggcatattaatgggaaacattttaaatttcatatgcgaaagatgttataaagatcctacacaaaatatagcctggcaattgccattgttcttgggatacatttgggcaattataattggaatgtctcttgtttacgttcctgaatctccacagtacttggcaaaaatcaaaaatgatgtgccctctgctaaatactcttttgcgaggatgaatggcatccctgcgacggatagcatggtaattgaattcatcgatgatttgttggaaaataactataataatgaggaaactaacaacgaaagtaaaaagcaaagcttagttaaaagaaacacatttgaatttattatgggaaagccaaagttatggttgagattgattattggtatgatgataatggcatttcaacagttgtccggaataaattatttcttttattacggaacgtctgttttcaaaggtgtcgggattaaggatccttatattacttctatcatattatccagtgttaacttcctttctacgatattaggcatatattacgtggagaaatggggccacaagacatgtttattatatggttctacaaatttattattttatatgatgacatatgctactgtggggacatttggaagagaaacggacttcagtaatattgttttaattatcgtgacttgttgttttattttttggtttgcaataacattgggcccagttacatttgtattggtgtccgaattgttccctttgagaacgagggccatatccatggctatttgcacatttatcaattggatgttcaatttcttaatatctcttttaacaccaatgattgtatccaaaattgatttcaaattaggatacatatttgctgcttgccttttagcgttgataatattcagttggatattagttcctgaaacgaggaaaaagaatgagcaagagatcaataaaatatttgaaccggagtga

SEQ ID NO: 9055 - DNA, 1398 bp, Saccharomyces cerevisiae
atggacgggcataatcagaaccagtaccagaatcagaatcaaattcagcagtcacaacaaccacctctgaagaaatatgtgacacagagacgatcggtagacgtgagttctccgtatattaacctatattacaacagacgacatggattaccgaacctagtggtagagccagaaacttcatacacaatagatataatgccgcctaatgcctacagaggtcgagatcgagtcataaatttgcccagcaaatttacgcatttaagctcgaataaagtgaaacatgtgatacccgccatccaatggaccccagaaggcagaagacttgtagtagcaacttatagcggagaattttctctatggaacgcatcttcgtttacgtttgaaaccctcatgcaagcacatgattcggctgtgactacaatgaaatattctcacgacagtgattggatgattagtggggacgcagatggaatgattaagatatggcaaccaaactttagtatggttaaagaaattgatgctgcacacacggaaagtattagggatatggcattcagtagtaacgactcgaaatttgttacctgttcagatgataatatcttgaagatttggaacttcagcaatggcaaacaagaaagagtattatcggggcaccactgggacgtgaaaagttgtgattggcatcccgagatggggttaattgcctccgcatctaaggacaatttagtaaaactgtgggatccgcgttccggaaactgcatatcatcaattctgaagttcaaacatactgtcttgaagacgcgatttcaacccaccaagggaaatctattaatggcgatttcaaaagataaatcgtgtcgtgtgttcgacattagatacagtatgaaggaactaatgtgtgtaagagatgaaacggattatatgacactagaatggcacccaataaatgaatctatgttcactctggcgtgctatgacggctcgctaaagcattttgatcttttacaaaatctaaacgaacctattttgactattccatacgcccatgataagtgtatcacctcgttatcatataatccagtaggacatatatttgccacagcagctaaggatagaaccataagattttggactagagcgaggccaattgatcctaatgcatatgatgatccaacttataacaataagaagataaatggatggttttttggcatcaataacgacatcaatgctgtgagagagaagagtgaattcggtgcggccccgccaccaccagctacacttgaaccacatgcgttaccaaacatgaatggattcatcaacaagaaaccgcgtcaagaaatcccaggcatcgattcaaacatcaagagttccacattgccaggtttaagcatataa

SEQ ID NO: 9056 - DNA, 1398 bp, Artificial Sequence
  Description of Artificial Sequence: Synthetic polynucleotide
atggacgggcataatcagaaccagtaccagaatcagaatcaaattcagcagtctcaacaaccacctttgaagaaatatgtgacacagagaagatctgtagacgtgagttctccgtatattaacttatattacaacagaagacatggattaccgaacttggtggtagagccagaaacttcttacacaatagatataatgccgcctaatgcctacagaggtagagatagggtcataaatttgcccagcaaatttacgcatttaagcagtaataaagtgaaacatgtgatacccgccatccaatggaccccagaaggcagaagacttgtagtagcaacttatagcggagaattttctctttggaacgcatcttcttttacgtttgaaaccctcatgcaagcacatgattctgctgtgactacaatgaaatattctcacgacagtgattggatgattagtggggacgcagatggaatgattaagatatggcaaccaaactttagtatggttaaagaaattgatgctgcacacacggaaagtattagggatatggcattcagtagtaacgactctaaatttgttacctgttctgatgataatatcttgaagatttggaacttcagcaatggcaaacaagaaagagtattaagtgggcaccactgggacgtgaaaagttgtgattggcatcccgagatggggttaattgcctccgcatctaaggacaatttagtaaaattatgggatccgcgttccggaaactgcatatcttccattttgaagttcaaacatactgtcttgaagacgagatttcaacccaccaagggaaatttattaatggcgatttccaaagataaaagttgtcgtgtgttcgacattagatacagtatgaaggaattgatgtgtgtaagagatgaaacggattatatgacattagaatggcacccaataaatgaatctatgttcactttggcgtgctatgacggctccttgaagcattttgatcttttacaaaatttgaacgaacctattttgactattccatacgcccatgataagtgtatcaccagtttatcttataatccagtaggacatatatttgccacagcagctaaggatagaaccataagattttggactagagcgaggccaattgatcctaatgcatatgatgatccaacttataacaataagaagataaatggatggttttttggcatcaataacgacatcaatgctgtgagagagaagagtgaattcggtgcggccccgccaccaccagctacacttgaaccacatgcgttaccaaacatgaatggattcatcaacaagaaaccgcgtcaagaaatcccaggcatcgattccaacatcaagagttccacattgccaggtttaagcatatga

SEQ ID NO: 9057 - DNA, 1005 bp, Saccharomyces cerevisiae
atggccagcaagactttgagggttctttttctgggtcccaaaggtacgtattcccatcaagctgcattacaacaatttcaatcaacatctgatgttgagtacctcccagcagcctctatcccccaatgttttaaccaattggagaacgacactagtatagattattcagtggtaccgttggaaaattccaccaatggacaagtagttttttcctatgatctcttgcgtgataggatgatcaaaaaagccctatccttacctgctccagcagatactaatagaattacaccagatatagaagttatagcggagcaatatgtacccattacccattgtctaatcagcccaatccaactaccaaatggtattgcatcccttggaaattttgaagaagtcataatacactcacatccgcaagtatggggccaggttgaatgttacttaaggtccatggcagaaaaatttccgcaggtcacctttataagattggattgttcttccacatctgaatcagtgaaccaatgcattcggtcatcaacggccgattgcgacaacattctgcatttagccattgctagtgaaacagctgcccaattgcataaggcgtacatcattgaacattcgataaatgataagctaggaaatacaacaagatttttagtattgaagagaagggagaacgcaggcgacaatgaagtagaagacactggattactacgggttaacctactcacctttactactcgtcaagatgaccctggttctttggtagatgttttgaacatactaaaaatccattcactcaacatgtgttctataaactctagaccattccatttggacgaacatgatagaaactggcgatatttatttttcattgaatattacaccgagaagaataccccaaagaataaagaaaaattctatgaagatatcagcgacaaaagtaaacagtggtgcctgtggggtacattccccagaaatgagagatattatcacaaataa

SEQ ID NO: 9058 - DNA, 1005 bp, Artificial Sequence
  Description of Artificial Sequence: Synthetic polynucleotide
atggccagcaagactttgagggttctttttttaggtcccaaaggtacgtattcccatcaagctgcattacaacaatttcaaagtacatctgatgttgagtacctcccagcagcctctatcccccaatgttttaaccaattggagaacgacactagtatagattattctgtggtaccgttggaaaattccaccaatggacaagtagttttttcctatgatctcttgcgtgataggatgatcaaaaaagccctttccttacctgctccagcagatactaatagaattacaccagatatagaagttatagcggagcaatatgtacccattacccattgtttaatcagcccaatccaattaccaaatggtattgcatcccttggaaattttgaagaagtcataatacactctcatccgcaagtatggggccaggttgaatgttacttaaggtccatggcagaaaaatttccgcaggtcacctttataagattggattgttcttccacatctgaatctgtgaaccaatgcattagaagttccacggccgattgcgacaacattttgcatttagccattgctagtgaaacagctgcccaattgcataaggcgtacatcattgaacattccataaatgataagttgggaaatacaacaagatttttagtattgaagagaagggagaacgcaggcgacaatgaagtagaagacactggattattaagagttaacttactcacctttactactcgtcaagatgaccctggttctttggtagatgttttgaacatattgaaaatccattctctcaacatgtgttctataaactctagaccattccatttggacgaacatgatagaaactggagatatttatttttcattgaatattacaccgagaagaataccccaaagaataaagaaaaattctatgaagatatcagcgacaaaagtaaacagtggtgcctctggggtacattccccagaaatgagagatattatcacaaatga

SEQ ID NO: 9059 - DNA, 957 bp, Saccharomyces cerevisiae
atgtggagactaaccagaaaaatcggcactagaatccatatttctaatcagctgtcgcccatttttaacaaggcaattggaacagttcctgtttttcgtttttattcttccagcccagagcagaagtatagaaagaaacttttggaagaggctcaaaaacaaggttttaacagcatagaagagttgaaaaatcatttgaaagagactatagagtctaagaagcgggaatttaataaaatcgaccccctgaaagaactagaggattaccaacaaaaaactcaaatggaaaataacaactccaagcatttgatgacgaaatcaagaagtcctctcgatccaagtgctcctaaagttcccttcaaaacattggactcttttttggatgttggaaaactgaaggacttatcgaaacaggaagtagagtttctttggagagcaagatgggcacaaaaagataatacattatgcgctgtgattcctgtctccgtttatgataagatgatggcaaatgccaggaataaccctatattcgtgttgccacttcctagacaagttcaatctgaggatgcaaaaccgaacgaagaacagggaatggaactacactacatccaatggcagtttgtcggaccccaaacaacacattgtatgatgacttccctagcagaatacaaactacaccaggaatttgcaaggccacatactaccttgcagttccattctgatttggtcaaggataagggaattgtttttatgaatggccatgttgaaccggatacaaacgtgaatgtacaggatgcacagctgttattgctaaacgtgcaaaggttttatggtgcaatgggtgaagaaactccagttgctaaacagagagtgcagttgttaagagatttctctaaggcctctccgggattcaccgtcgagaaattgatttcgctatcacagtccatggaaaattaa

SEQ ID NO: 9060 - DNA, 957 bp, Artificial Sequence
  Description of Artificial Sequence: Synthetic polynucleotide
atgtggagattgaccagaaaaatcggcactagaatccatatttctaatcagttatctcccatttttaacaaggcaattggaacagttcctgtttttcgtttttattcttccagcccagagcagaagtatagaaagaaacttttggaagaggctcaaaaacaaggttttaacagcatagaagagttgaaaaatcatttgaaagagactatagagtctaagaagagagaatttaataaaatcgaccccttgaaagaattagaggattaccaacaaaaaactcaaatggaaaataacaactccaagcatttgatgacgaaatctagaagtcctctcgatccaagtgctcctaaagttcccttcaaaacattggactcttttttggatgttggaaaattgaaggacttatccaaacaggaagtagagtttctttggagagcaagatgggcacaaaaagataatacattatgcgctgtgattcctgtctccgtttatgataagatgatggcaaatgccaggaataaccctatattcgtgttgccacttcctagacaagttcaatctgaggatgcaaaaccgaacgaagaacagggaatggaattgcactacatccaatggcagtttgtcggaccccaaacaacacattgtatgatgacttccttggcagaatacaaattacaccaggaatttgcaaggccacatactaccttgcagttccattctgatttggtcaaggataagggaattgtttttatgaatggccatgttgaaccggatacaaacgtgaatgtacaggatgcacagcttttattgttgaacgtgcaaaggttttatggtgcaatgggtgaagaaactccagttgctaaacagagagtgcagttgttaagagatttctctaaggcctctccgggattcaccgtcgagaaattgatttctttatctcagtccatggaaaattga

SEQ ID NO: 9061 - DNA, 768 bp, Saccharomyces cerevisiae
atggatgaatcggtggatcctgtggagctgcttctacgactactgatacggcacaaacctcatctgaaaccatatgcctacagacaagatagctggcaaagggtgctcgatgagtacaacagacagactgggtcaagatatagacaatcaaggacgttaaaaaccaaatttcgtcgactgaaggacctcttcagcgcagatcgagcccaattctctccttcccagttgaagctgatgggagcactcttggacgaagcaccagaacatccaagaccaagaactaaattcggaaatgaatcatcttcatccttatcatcatcttctttcattaaaagtcatccggggcctgatccgtttcaacaattatcatccgctgaacatccgaataaccacagctccgacgatgagcattcaggctcacaaccgctgcccctggattcaataacgattggaattccgcctactcttcacacaatccccatgattctgtctaaggataacgacgtcgggaaagtcatcaaaagccctaagataaacaagggtacaaataggttcagcgagacagtactgcctccacaaatggctgctgagcaatcgtggtcggactctaatatggaattggaaatatgtctagattatcttcacaacgaactcgaggtgataaagaaaaggcaagaagattttgagtgtaaagttttaaacaagctcaacataattgaggctctcctttcacagatgagaccacccagccaaggagataaaatataa

SEQ ID NO: 9062 - DNA, 768 bp, Artificial Sequence
  Description of Artificial Sequence: Synthetic polynucleotide
atggatgaatctgtggatcctgtggagttgcttttaaggttattgatacgtcacaaacctcatttgaaaccatatgcctacagacaagatagctggcaaagggtgctcgatgagtacaacagacagactgggtccagatatagacaatccaggacgttaaaaaccaaatttcgtaggttaaaggacctcttcagcgcagatagagcccaattctctccttcccagttgaagttgatgggagcactcttggacgaagcaccagaacatccaagaccaagaactaaattcggaaatgaaagctcttcttccttatcttcttcttctttcattaaaagtcatccggggcctgatccgtttcaacaattatcttccgctgaacatccgaataaccacagctccgacgatgagcattctggctctcaaccgttgcccttagattctataacgattggaattccgcctactcttcacacaatccccatgattttatctaaggataacgacgtcgggaaagtcatcaaaagccctaagataaacaagggtacaaataggttcagcgagacagtattacctccacaaatggctgctgagcaaagttggtctgactctaatatggaattggaaatatgtttggattatcttcacaacgaactcgaggtgataaagaaaaggcaagaagattttgagtgtaaagttttaaacaagctcaacataattgaggctctcctttctcagatgagaccacccagccaaggagataaaatatga

SEQ ID NO: 9063 - DNA, 2715 bp, Saccharomyces cerevisiae
atggagacgttattgcatgcaaaattattgctgtctgcagaagtagaatctctgaaaagtggttctttcgaccagacatatgtgaaaaaggctgaacatatcatcagtggtgaatcataccagctagtacagcaatttgtggacaaatttaagggaaaaattagtatttcgggagaaatatccacatctagtgttattgctgctctaaatgactttcttaacgttgaggttttcaaaatgggccaagaaaatgagatgctatttttggctattgccctcttacagacctttattcaaaataactacaccggcccagcagctaggttgaaagcaatctcaggtttgtttggcaaaactggaattgaaataggagcagttaatacagccctttcccgctcattagccattatgggccagcctgcctacgaatttatggatgatccattgtatttggttttatcactattattacttgaaaggataaccggccaaaaaagcttatttgatgttaccccggatcaagaaattccgctacctattatctctgctgagtctactcctggattattagctgtagcttattggtggtgggcaagagctcttttgacgcaattgtcactgattccagaaccttctgggttccaagctagtgttgcatctgcaatatatcagtctgctgaccttgcatatgcgataactaaggaattaccggagagtattcacgaagatttcaaaagagaactttgtgcaatgtactatctagagaatgtcaaatgttcattggccatcaacacagaacatttgtgcctgccatccttgaccagagcgaaaaagataacaaattttgaatttgtaatgacgggtgcacgcgctactagaactaaatatcagcaaaaggctcatgccggtttgatcattcttgccaaatccttcacatttcaaaattttgctttgagaacgacatctgctacaccagaaacatttgctttagagtccgatctattattggagaagcctcattttgagtccattgctgatgaacctctagacgagcaaatttatagtaaaagacaaaaggtagacctaaatgaaggttatgaagaagataaactattgccattggcactacgtcaagaaaatattccaaagttgttgctggatttgaaccctaacgatcaacctaccctatctgattacgacaacatccagttgctgttacgtctttacaccataaagaacacaactccggccaaggatcctcttgtggaagaagaacttactgctttgctttctagaatattatatcaaaacggtgacaaaaattggtctattttcgcccgatcattatgggaaaggtcaattattgagacaacaaaggctaaaactattgaaagaggacttttacaaatgcaatccctcgtagaagaattggatttgaagattaagagtaaattggttccaagttcaagcgaaatcaatgttgctagcaggctgtcatacatccaccagctgccgttcatccctaggtggcaattggatgccaccttagctgaaaaatatatgtcgctgggtattttgaagtccgctgtggaaatttatgaaagacttggtatggcatgcgagactgcattatgttatgccgctgttggagatgaaaaaaaggcagaagaaatccttcttcaaagaataaatgaaaatgattcggatgccagggcttactccattttgggtgatataaaacaggatccatccctatgggaaaaaagttgggagattggaaaatacgtcaacgcaaaaaattcccttgcaaagtattactttaatcctcctccaaagtctggagcacaaccaaattactctgctaccttgaaacatttaaatgactcgttaaggcaatacccattaagctttgaaacgtggtatttttatggttgcgttggattacaatgtggtaaaatgcagatagctgcggaggcatttaccagatgtgtttcattagacccttatcatgctctttcatggtcaaatttgagcgctgcatatacgaaaatggataaattgaaagaagcttatagttgtttgaaaagagccatttcatgtgacgctcaaaagaactggaaaatttgggagaattacatgcttgttgctgttaagttgaatgagtgggaggatgtcttaactgcatgtaaacaattagtcagtattaggagggacaaatctggcgaaggttccatcgacttaccaattattgaaaaactagtagaactattagtgactagtgaatatccagaggagccgcagcaattatcttattttcaaaagagctgtactgagtttatctgtaacactttacctcaggtaattacaaccagtgcaagatgttggcgactggtcgcaagagtagaactttggaggaagagaccatgggccgccctagaatgccacgagaaggcttatagggccatttctcacaatcctgatttagaagttgaagaaaaggtttggaatgatacagtggatgcttgtgaagatttggtggctgcctatgaatcacttggtgaaatggaaggtaaatatgggccaggcagtctggtttgcaaagactggaaatacaaatgtagatctactatcaaagctctaatgagtaaaggcaaaggcagatgggatgactctcctggttgggataggctagtggaagcaagaagccaaatatga

SEQ ID NO: 9064 - DNA, 2715 bp, Artificial Sequence
  Description of Artificial Sequence: Synthetic polynucleotide
atggagacgttattgcatgcaaaattattgttatctgcagaagtagaatctttgaaaagtggttctttcgaccagacatatgtgaaaaaggctgaacatatcatcagtggtgaatcttaccagttggtacagcaatttgtggacaaatttaagggaaaaattagtatttctggagaaatatccacatctagtgttattgctgctttgaatgactttcttaacgttgaggttttcaaaatgggccaagaaaatgagatgttatttttggctattgccctcttacagacctttattcaaaataactacaccggcccagcagctaggttgaaagcaatcagtggtttgtttggcaaaactggaattgaaataggagcagttaatacagccctttcccgctctttagccattatgggccagcctgcctacgaatttatggatgatccattgtatttggttttaagtttgttattacttgaaaggataaccggccaaaaaagcttatttgatgttaccccggatcaagaaattccgttgcctattatctctgctgagtctactcctggattattagctgtagcttattggtggtgggcaagagctcttttgacgcaattgtctttgattccagaaccttctgggttccaagctagtgttgcatctgcaatatatcagtctgctgaccttgcatatgcgataactaaggaattaccggagagtattcacgaagatttcaaaagagaactttgtgcaatgtactatttggagaatgtcaaatgttctttggccatcaacacagaacatttgtgcttaccatccttgaccagagcgaaaaagataacaaattttgaatttgtaatgacgggtgcacgcgctactagaactaaatatcagcaaaaggctcatgccggtttgatcattcttgccaaatccttcacatttcaaaattttgctttgagaacgacatctgctacaccagaaacatttgctttagagtccgatttattattggagaagcctcattttgagtccattgctgatgaacctttggacgagcaaatttatagtaaaagacaaaaggtagacttgaatgaaggttatgaagaagataaacttttgccattggcattgcgtcaagaaaatattccaaagttgttgttggatttgaaccctaacgatcaacctaccctttctgattacgacaacatccagttgttattacgtctttacaccataaagaacacaactccggccaaggatcctcttgtggaagaagaacttactgctttgctttctagaatattatatcaaaacggtgacaaaaattggtctattttcgcccgttccttatgggaaaggtctattattgagacaacaaaggctaaaactattgaaagaggacttttacaaatgcaatccctcgtagaagaattggatttgaagattaagagtaaattggttccaagtagtagcgaaatcaatgttgctagcaggttatcttacatccaccagttaccgttcatccctaggtggcaattggatgccaccttagctgaaaaatatatgtctttgggtattttgaagtccgctgtggaaatttatgaaagacttggtatggcatgcgagactgcattatgttatgccgctgttggagatgaaaaaaaggcagaagaaatccttcttcaaagaataaatgaaaatgattctgatgccagggcttactccattttgggtgatataaaacaggatccatccttatgggaaaaaagttgggagattggaaaatacgtcaacgcaaaaaattcccttgcaaagtattactttaatcctcctccaaagtctggagcacaaccaaattactctgctaccttgaaacatttaaatgactctttaaggcaatacccattaagctttgaaacgtggtatttttatggttgcgttggattacaatgtggtaaaatgcagatagctgcggaggcatttaccagatgtgtttctttagacccttatcatgctctttcttggtctaatttgagcgctgcatatacgaaaatggataaattgaaagaagcttatagttgtttgaaaagagccattagttgtgacgctcaaaagaactggaaaatttgggagaattacatgcttgttgctgttaagttgaatgagtgggaggatgtcttaactgcatgtaaacaattagtcagtattaggagggacaaatctggcgaaggttccatcgacttaccaattattgaaaaattagtagaattattagtgactagtgaatatccagaggagccgcagcaattatcttattttcaaaagagctgtactgagtttatctgtaacactttacctcaggtaattacaaccagtgcaagatgttggagattggtcgcaagagtagaactttggaggaagagaccatgggccgccttggaatgccacgagaaggcttatagggccatttctcacaatcctgatttagaagttgaagaaaaggtttggaatgatacagtggatgcttgtgaagatttggtggctgcctatgaatctcttggtgaaatggaaggtaaatatgggccaggcagtttggtttgcaaagactggaaatacaaatgtagatctactatcaaagctttgatgagtaaaggcaaaggcagatgggatgactctcctggttgggataggttggtggaagcaagaagccaaatatga

SEQ ID NO: 9065 - DNA, 822 bp, Saccharomyces cerevisiae
atggcaacctatcaaccatataacgaatattcatcagtaacgggcggtggctttgagaactctgagtcccgcccaggtagtggggagtcggaaactaacactagagttaacaccttgacacctgtgacgatcaaacaaattctagagtccaaacaggatattcaggacggccccttcgtttcgcataaccaagaacttcatcacgtttgttttgtaggtgtggtgagaaacattacagaccatactgcaaatatttttttaactattgaggatggaactggtcaaatagaagtgagaaaatggagcgaagatgcaaatgacttggctgccggtaacgatgactcttctggtaaaggttatggttcgcaagtcgcccaacaatttgaaattggcggttacgtaaaagtttttggtgctttgaaagagtttggtggtaagaaaaatatacagtatgcggtgattaagcccatagattcattcaatgaagtgttgacgcatcacttggaagtcatcaaatgtcattccatagccagtggaatgatgaaacaacctttggagagtgcatccaacaacaatgggcaatcattatttgtcaaggatgataacgatacatcttccggctccagtccgttacaaagaattctagaattttgtaagaagcaatgtgagggcaaagacgctaattcattcgctgttcccattccattgatctcgcaatccttgaatttggatgaaactaccgtcagaaactgctgtacgaccttgactgaccagggttttatctacccaacttttgatgacaataacttctttgccctatga

SEQ ID NO: 9066 - DNA, 822 bp, Artificial Sequence
  Description of Artificial Sequence: Synthetic polynucleotide
atggcaacctatcaaccatataacgaatattcttctgtaacgggcggtggctttgagaactctgagtcccgcccaggtagtggggagagtgaaactaacactagagttaacaccttgacacctgtgacgatcaaacaaattttagagtccaaacaggatattcaggacggccccttcgtttctcataaccaagaacttcatcacgtttgttttgtaggtgtggtgagaaacattacagaccatactgcaaatatttttttaactattgaggatggaactggtcaaatagaagtgagaaaatggagcgaagatgcaaatgacttggctgccggtaacgatgactcttctggtaaaggttatggttctcaagtcgcccaacaatttgaaattggcggttacgtaaaagtttttggtgctttgaaagagtttggtggtaagaaaaatatacagtatgcggtgattaagcccatagattctttcaatgaagtgttgacgcatcacttggaagtcatcaaatgtcattccatagccagtggaatgatgaaacaacctttggagagtgcatccaacaacaatgggcaatctttatttgtcaaggatgataacgatacatcttccggctccagtccgttacaaagaattttggaattttgtaagaagcaatgtgagggcaaagacgctaattctttcgctgttcccattccattgatctctcaatccttgaatttggatgaaactaccgtcagaaactgctgtacgaccttgactgaccagggttttatctacccaacttttgatgacaataacttctttgccttatga

SEQ ID NO: 9067 - DNA, 2292 bp, Saccharomyces cerevisiae
atgaaacggttgcaattgtttggtagatcaaaatatttctcgctggtctccagtgctgcgaaggaggaagaagaagaggaagagggctgtgctgatgccaaaagccttctacatagtacgagccatgatatcaaatcgagatcactacgcttcaacgataaatcgtccctcatgtgtttgccaacaaaagttctactgttaatactgcgaactttggacttcaatacattagtaacactatgccaagtcaattcgaggttctacaatttgattacgaatgagttccttttccaaaacgttattttggactcaaaactttcgttgttaaagttcaatgctttgatacactccgagttccacacgtcgaacattgtcacacacagcggtgattgtagcacacaatctagatcacaaaatgcaaggttcctcgtaagatccatcgaattcaaaaatcctcagtcccaagactcgttgttaaaatacagtaagttctataataagagtggccaagattctattattgctggatcttataaactcgattcgtatgataaagacgtaaaaaaactgaataacatcagactaaacgatgagactcccatcataacttcagaacgaatcaaactgcttgataaattggaaagcaactacttccattatacttatattgagctaatgcttgatattatagactatctaccgaacctgaccagagtgattctgagtgatgtggaaccgaattttaaaattcctttatggtactctgtattcaacgatggatctagagattttttcaagaaaataatcaagggccagcaatccatcacaaacgaagatttgaggactttccaactatccaaaaaatttgtcaaagaatacgaatccaagtattattctctgccaaggttgaaaatactggaaatcaaagctaataataaaagacaaagaacctttaatcgtcaacgccatcaccaaaagctcgtactaagaccgagtttattctgctgtttcggcataattaatgaacttaaactagaaaatgtaacgatagacaccgaatcgctagatactccaatggaattcttaccactatttctaaagaacgaagataatgaactgtacagtttacagtctcctatcactgcacttactttagattcatgtgatgtagttcctggaaatggaatattacgtttgtttcactcttactttaaaatggtcaaacatctatccttactgaagattaacagtaaattcgacttattgttatgcagttgtttcccatcgttatccaatctaacaattgattgtaatagcaaatgtttcactaacgaacaggtagtcggcgaatcatattatttccaacagcgaagtttggatacagaagatgattttgatgactgcaattccatgacagaaacattatttgaagcgccatcagattcgaagataattactcctccgccgacatcttcagttgtattgtccttaaatctgaactatatttctagaactacaggaaatgatgtttcaaataacccatcaccagacaataacaaaaagcccgccatgttaactgcggcacagctacaaaattttcaacgacaaagaatccctgaatttcattctttctaccattattaccgcttactttgggagagacttccaagtaaaaatatttctattaacgtaatcaatatcccctttaccaatgtgtatcctttatcccctctatcgttttgggaacatctagcaagaacaattactagtgttgatgagacagatgaggatgttggcgacgagaacgatcaagaaacattaatcggttacgaaaataattccataagagataacataccaaatgctaatgcagttccaaatttaagtacagtaatgagccctgaatcagacattcaccacacttactattggaacaactctgtaaggcgttgcctaagagatagtttaatcaaattgaagaaccgaaccatcgaatatagagatttagatgtggaggagttcttacaaaatgtgacattggaaaattttttcaatgatttccaagatccagagaattttaaagatattccaaatattaacctctggtgtttcctgagaaatttgtcaaaattcaaagctgtcaaaataagaatgctgagacatttttcattatgtacacctagaaccagatacgactgggaactattattgaagcccgtactgcgtgtaaatgttcccattgaagtcagagataaggacggattcgttctttattcttacgggcaaaaataa

SEQ ID NO: 9068 - DNA, 2292 bp, Artificial Sequence
  Description of Artificial Sequence: Synthetic polynucleotide
atgaaaagattgcaattgtttggtagaagtaaatatttctccttggtctccagtgctgcgaaggaggaagaagaagaggaagagggctgtgctgatgccaaaagccttttacatagtacgagccatgatatcaaatctagatccttacgcttcaacgataaatcttccctcatgtgtttgccaacaaaagttttattattaatattaagaactttggacttcaatacattagtaacattgtgccaagtcaattctaggttctacaatttgattacgaatgagttccttttccaaaacgttattttggactctaaactttctttgttaaagttcaatgctttgatacactccgagttccacacgtccaacattgtcacacacagcggtgattgtagcacacaatctagatctcaaaatgcaaggttcctcgtaagatccatcgaattcaaaaatcctcagtcccaagactctttgttaaaatacagtaagttctataataagagtggccaagattctattattgctggatcttataaactcgattcttatgataaagacgtaaaaaaattgaataacatcagattgaacgatgagactcccatcataacttctgaaagaatcaaattacttgataaattggaaagcaactacttccattatacttatattgagttgatgcttgatattatagactatttaccgaacttgaccagagtgattttaagtgatgtggaaccgaattttaaaattcctttatggtactctgtattcaacgatggatctagagattttttcaagaaaataatcaagggccagcaatccatcacaaacgaagatttgaggactttccaattatccaaaaaatttgtcaaagaatacgaatccaagtattattctttaccaaggttgaaaatattggaaatcaaagctaataataaaagacaaagaacctttaatcgtcaacgccatcaccaaaagctcgtattaagaccgagtttattctgctgtttcggcataattaatgaacttaaattagaaaatgtaacgatagacaccgaatctttagatactccaatggaattcttaccattatttttgaagaacgaagataatgaattatacagtttacagtctcctatcactgcacttactttagattcttgtgatgtagttcctggaaatggaatattacgtttgtttcactcttactttaaaatggtcaaacatttgtccttattgaagattaacagtaaattcgacttattgttatgcagttgtttcccatctttatccaatttgacaattgattgtaatagcaaatgtttcactaacgaacaggtagtcggcgaaagttattatttccaacagagaagtttggatacagaagatgattttgatgactgcaattccatgacagaaacattatttgaagcgccaagtgattctaagataattactcctccgccgacatcttctgttgtattgtccttaaatttgaactatatttctagaactacaggaaatgatgtttctaataacccatctccagacaataacaaaaagcccgccatgttaactgcggcacagttacaaaattttcaaagacaaagaatccctgaatttcattctttctaccattattaccgcttactttgggagagacttccaagtaaaaatatttctattaacgtaatcaatatcccctttaccaatgtgtatcctttatcccctttatctttttgggaacatttagcaagaacaattactagtgttgatgagacagatgaggatgttggcgacgagaacgatcaagaaacattaatcggttacgaaaataattccataagagataacataccaaatgctaatgcagttccaaatttaagtacagtaatgagccctgaaagtgacattcaccacacttactattggaacaactctgtaaggcgttgcttgagagatagtttaatcaaattgaagaacagaaccatcgaatatagagatttagatgtggaggagttcttacaaaatgtgacattggaaaattttttcaatgatttccaagatccagagaattttaaagatattccaaatattaacctctggtgtttcttaagaaatttgagtaaattcaaagctgtcaaaataagaatgttgagacatttttctttatgtacacctagaaccagatacgactgggaattattattgaagcccgtattacgtgtaaatgttcccattgaagtcagagataaggacggattcgttctttattcttacgggcaaaaatga

SEQ ID NO: 9069 - DNA, 525 bp, Saccharomyces cerevisiae
atgattccgaggactagaacactactgcaaagtaaaataccaattaccaggtactttgccagatgttgggcgcctcgcgtacgctacaacgtgtgccgtactctacccgcagcagcgttgcataccaatatcatcgcacataatgaagtgaaaaaggacgataagaaggttcatttggggtcttttaaggtagacaagcctaagatgatgatagctttcacctgcaagaaatgtaacacccgatcttcacacacaatgtccaagcaggcgtacgagaaaggtactgtcttgatctcttgtccgcactgcaaagtgagacatttgatagcagaccatctgaaaatattccatgatcatcatgttaccgtggaacagttaatgaaagctaacggagaacaagttagccaagacgtgggcgacttggagtttgaagacatcccagattcgctaaaggacgtcctgggaaaatatgccaagaacaactcagaaaatgcatcccagctccctcacccttcccagaaatga

SEQ ID NO: 9070 - DNA, 525 bp, Artificial Sequence
  Description of Artificial Sequence: Synthetic polynucleotide
atgattccgaggactagaacattattacaaagtaaaataccaattaccaggtactttgccagatgttgggcgcctcgcgtacgctacaacgtgtgccgtactttacccgcagcagcgttgcataccaatatcatcgcacataatgaagtgaaaaaggacgataagaaggttcatttggggtcttttaaggtagacaagcctaagatgatgatagctttcacctgcaagaaatgtaacaccaggtcttctcacacaatgtccaagcaggcgtacgagaaaggtactgtcttgatctcttgtccgcactgcaaagtgagacatttgatagcagaccatttgaaaatattccatgatcatcatgttaccgtggaacagttaatgaaagctaacggagaacaagttagccaagacgtgggcgacttggagtttgaagacatcccagattctttgaaggacgtccttggaaaatatgccaagaacaactctgaaaatgcatcccagctccctcacccttcccagaaatga

SEQ ID NO: 9071 - DNA, 1263 bp, Saccharomyces cerevisiae
atgtctcaaccccagatgtcccctgaaaaagagcaagaattggcctccaagattttgcatagagctgagttggctcagatgacgcgtcaattaaagcttggtttaagtaatgtcccatcaacaaaacgaaaacaggactctacaacaaagaaaagaagcggagaggatgccgaagatgttgatgaggaccacaaaactcttttggaagccatatcgcctgcgaaaaagcctctccacgatgatacaaataaaatgactgttatatcgcccgtaaaatttgtagagaagccaaatactcccccaagttcacgccaacgaaaagccgaagaccgctcacagcagatcaagcctaggaaggaggacactccatctactccgagggcttctgctacacctataatcttaccacacgcttcgtcacactaccagcgcccccatgataagaatttcatgacgccaaaacgtaataataacaacagcagtaaccatagcaataacaataataatatcaagaagaaggcagcaggctctaaggatgctccacaggacagcgacaacactgcgggcgctgatctcttaatgtatttagccacaagtccatataataagtcatcacatcatggaacaccgatggccgtaaggatgcccactactccacgctcttatcattacgcgtcgcaattgagtttgaacggtaatacagcaagcacatcaaacgatgcagtaagattctctcatatcaaaccttcagcgtcttctccgcagtccactttcaaatctaatctgttaccgaattttccggacgaatctctcatggattctccatcactatacttgagcaataataacggtagtgtccaggcgacactatcgccacagcagagaagaaagcccaccacaaacacattgcatccacctagtaacgtacctaccacgccttcaagagaattgaacggtaccaattttaacttactcaggacgcccaacttcaacatgggagactatctgcataatcttttcagcccttcaccaagggtccccgcccagcagggagcgtcaaacacgtcagcttcaattccttctgttccagcgatggtgcccggatcatcttccaacacttctgcgatagcaacagctgctatatcaagccacaccacaaacaattttctagatatgaacgcaaacgggatcccgctcattgtaggacccggcaccgaccgtataggcgaaggggagtccattgatgacaaactcactgattga

SEQ ID NO: 9072 - DNA, 1263 bp, Artificial Sequence
  Description of Artificial Sequence: Synthetic polynucleotide
atgtctcaaccccagatgtcccctgaaaaagagcaagaattggcctccaagattttgcatagagctgagttggctcagatgacgcgtcaattaaagcttggtttaagtaatgtcccatctacaaaaagaaaacaggactctacaacaaagaaaagaagcggagaggatgccgaagatgttgatgaggaccacaaaactcttttggaagccatatctcctgcgaaaaagcctctccacgatgatacaaataaaatgactgttatatctcccgtaaaatttgtagagaagccaaatactcccccaagttctcgccaaagaaaagccgaagaccgctctcagcagatcaagcctaggaaggaggacactccatctactccgagggcttctgctacacctataatcttaccacacgcttcttctcactaccagcgcccccatgataagaatttcatgacgccaaaacgtaataataacaacagcagtaaccatagcaataacaataataatatcaagaagaaggcagcaggctctaaggatgctccacaggacagcgacaacactgcgggcgctgatctcttaatgtatttagccacaagtccatataataagagttctcatcatggaacaccgatggccgtaaggatgcccactactccacgctcttatcattacgcgtctcaattgagtttgaacggtaatacagcaagcacaagtaacgatgcagtaagattctctcatatcaaaccttctgcgtcttctccgcagtccactttcaaatctaatttattaccgaattttccggacgaatctctcatggattctccatctttgtacttgagcaataataacggtagtgtccaggcgacattatctccacagcagagaagaaagcccaccacaaacacattgcatccacctagtaacgtacctaccacgccttccagagaattgaacggtaccaattttaacttactcaggacgcccaacttcaacatgggagactatttgcataatcttttcagcccttctccaagggtccccgcccagcagggagcgtccaacacgagcgcttccattccttctgttccagcgatggtgcccggatcttcttccaacacttctgcgatagcaacagctgctatatctagccacaccacaaacaattttttggatatgaacgcaaacgggatcccgctcattgtaggacccggcaccgaccgtataggcgaaggggagtccattgatgacaaactcactgattga

SEQ ID NO: 9073 - DNA, 1776 bp, Saccharomyces cerevisiae
atgccaagaaaaaagtctgccgctaaaagagctagagaacaagcaaaaaaagaagcggccgtacctgcaacggatactgctaccataaaaacttctgaaacctctgcgacgacagttaagcctgcaatcgaagcaagcaaatcgtacgttcctagtgaagatgaggaagaagacgaagaggaagaagaggaggaagatgattacggtgaattgattactgatgaagtggaaaacggtattaatcaagtgctagatgccatcaaaaacaataagacggacaaactactagatcctaaagtcaaattcttcgaggatcccgaatctgctgctgccaaactggccaatcgtgaggggaagcataaacctatttacctaaaagattatcaccgtatgaacatactttctggtgatgccttaaaggaggatgacgaagaatacgaacatgcaactgttgacggaaagcaatctttcgtctcgcaacaacgtgaagagaaaactcagcttttaaatgaaatcaagagtgcctttagcgatgaagaaaatgaagagtctagcggagatgaagacgatgggtttttgaagaaaaaggaaccttctacgaagaaggaaggaaaaaatttaccggatccaaccgtaaatgaagaaaatttcttggaagaatttgtgaatcaacaggcctggattcctaagaagggggacaaggtgatttctcttgacctcaacaataatgaagaggacgatgaagaatttgaagatgctgcagaaaaatttgagaatgcctacaattttaggtacgaggacccaaacgcagctgaaattatatcttatgcacgtagtcaagctacactaagaagatccgatgactcttcacgcagaagaaaaagagaggaaaaaagaaaaattaaagagcaaataaaagcagagaaggagacagctcttcagaaaaagaagactaaaaaattgaataaattgactgacattttagagcaactaacaaaggaatatggtgctgaaattaatgccgacatggtgaaaaaaatcactgacaccctattgaagaacgatttcaaagaagaagagtgggataacgtggtagctgaattatttaatgaagaattttatcaacaagagggaaagcctacctggaacgaggatgacgaaataatgggtgacttttatgcagacgccgatggtgatgaccaaacagaagaaggtgaagtggaaaaagaacaaaaagaagaagacgaggaagaaggtccaaaaagaaagaagagcaagaaagaagagaaactgcaaaagaagaaagaaaagagaaaggtaaatgaattagtggaaaatgctttggaacaaaacaaactagcactaatagaggaggttgaaaaagaagaagaagaaagaaagagtagaagccgtacaaaagaggagcaagatttgaagtttcgttaccgtgaagtttctcctgagagtttcggtttgaccgcaagagagattttcgccgccgatgatactgatttaaatgaatttattggtttgaagaaatttgcaccttatcgttccaaggaactaagagcgaaggataaaaggaaagtgatgaaggcaagaagattaagagagtggaggaagaaaacttttaagaacgaaaatgggttagctccagtcgaagcagaggcaggggagaaggatgaggacaccatactgatacctgtagagaaagcctctaaaagcaaacacaagagggggcacagtcataaacataaaggccaccagaaaaagtaa

SEQ ID NO: 9074 - DNA, 1776 bp, Artificial Sequence
  Description of Artificial Sequence: Synthetic polynucleotide
atgccaagaaaaaagtctgccgctaaaagagctagagaacaagcaaaaaaagaagcggccgtacctgcaacggatactgctaccataaaaacttctgaaacctctgcgacgacagttaagcctgcaatcgaagcaagcaaatcttacgttcctagtgaagatgaggaagaagacgaagaggaagaagaggaggaagatgattacggtgaattgattactgatgaagtggaaaacggtattaatcaagtgttggatgccatcaaaaacaataagacggacaaattattagatcctaaagtcaaattcttcgaggatcccgaatctgctgctgccaaattggccaatcgtgaggggaagcataaacctatttacttgaaagattatcaccgtatgaacatactttctggtgatgccttaaaggaggatgacgaagaatacgaacatgcaactgttgacggaaagcaatctttcgtctctcaacaacgtgaagagaaaactcagcttttaaatgaaatcaagagtgcctttagcgatgaagaaaatgaagagtctagcggagatgaagacgatgggtttttgaagaaaaaggaaccttctacgaagaaggaaggaaaaaatttaccggatccaaccgtaaatgaagaaaatttcttggaagaatttgtgaatcaacaggcctggattcctaagaagggggacaaggtgatttctcttgacctcaacaataatgaagaggacgatgaagaatttgaagatgctgcagaaaaatttgagaatgcctacaattttaggtacgaggacccaaacgcagctgaaattatatcttatgcacgtagtcaagctacattaagaagatccgatgactcttctcgcagaagaaaaagagaggaaaaaagaaaaattaaagagcaaataaaagcagagaaggagacagctcttcagaaaaagaagactaaaaaattgaataaattgactgacattttagagcaattgacaaaggaatatggtgctgaaattaatgccgacatggtgaaaaaaatcactgacacccttttgaagaacgatttcaaagaagaagagtgggataacgtggtagctgaattatttaatgaagaattttatcaacaagagggaaagcctacctggaacgaggatgacgaaataatgggtgacttttatgcagacgccgatggtgatgaccaaacagaagaaggtgaagtggaaaaagaacaaaaagaagaagacgaggaagaaggtccaaaaagaaagaagagcaagaaagaagagaaattacaaaagaagaaagaaaagagaaaggtaaatgaattagtggaaaatgctttggaacaaaacaaattggcattaatagaggaggttgaaaaagaagaagaagaaagaaagagtagaagccgtacaaaagaggagcaagatttgaagtttcgttaccgtgaagtttctcctgagagtttcggtttgaccgcaagagagattttcgccgccgatgatactgatttaaatgaatttattggtttgaagaaatttgcaccttatcgttccaaggaattgagagcgaaggataaaaggaaagtgatgaaggcaagaagattaagagagtggaggaagaaaacttttaagaacgaaaatgggttagctccagtcgaagcagaggcaggggagaaggatgaggacaccatattaatacctgtagagaaagcctctaaaagcaaacacaagagggggcacagtcataaacataaaggccaccagaaaaagtga

SEQ ID NO: 9075 - DNA, 1128 bp, Saccharomyces cerevisiae
atgtctacggaagagcagaatggtgttcctctgcaaaggggatctgaattcattgcagacgatgtaacctcgaataaatcgaacaacacgaggcggatgctggtgaaagagtacaggaaaatcggtagaggtgcctttgggactgttgtacaagcatatttaacccaggataagaaaaactggttgggcccctttgcaattaaaaaagtccctgctcataccgagtacaagtccagggaattacagattctgaggattgccgaccatccaaatatcgttaaattgcagtatttctttactcatttgtccccgcaagataataaagtttatcaacaccttgccatggaatgcttaccagaaactctacaaatcgagattaatcgttatgtgacaaacaagctagaaatgccattaaaacatatcaggctatacacttatcagattgcccgcgggatgctttatttacacggtcttggcgtttgtcatcgtgatatcaaaccatccaatgttcttgtagacccggaaaccggtgtcttgaaaatctgcgattttgggtctgccaaaaaattggaacataaccagccttcaattagttacatctgttcaagattttatagagcgcctgaattgatcattggttgtacccaatataccacccagatcgatatatgggggcttggttgtgtcatgggcgagatgcttatcggcaaagccatatttcaaggtcaagaaccccttctacagctaagggaaattgctaaattgttaggtcctcccgataaaagattcattttcttttcgaatccggcctacgatggccctctattttccaaaccactgttctcgggctcttcgcaacagaggtttgagaagtattttggccattccggtccagatggtatcgatcttttgatgaaaatattggtctacgaaccacaacaaagactgtctccaagaagaatccttgcccatcagttctttaatgaattaaggaatgatgacactttcttaccaagaggtttcactgaaccaatcaagctaccaaatttgtttgattttaatgattttgagttacaaattctgggtgaatttgctgataaaattaaacctacgaaagttgctgaataa

SEQ ID NO: 9076 - DNA, 1128 bp, Artificial Sequence
  Description of Artificial Sequence: Synthetic polynucleotide
atgtctacggaagagcagaatggtgttcctttacaaaggggatctgaattcattgcagacgatgtaacctctaataaaagtaacaacacgaggagaatgttggtgaaagagtacaggaaaatcggtagaggtgcctttgggactgttgtacaagcatatttaacccaggataagaaaaactggttgggcccctttgcaattaaaaaagtccctgctcataccgagtacaagtccagggaattacagattttaaggattgccgaccatccaaatatcgttaaattgcagtatttctttactcatttgtccccgcaagataataaagtttatcaacaccttgccatggaatgcttaccagaaactttacaaatcgagattaatcgttatgtgacaaacaagttggaaatgccattaaaacatatcaggttgtacacttatcagattgcccgcgggatgctttatttacacggtcttggcgtttgtcatcgtgatatcaaaccatccaatgttcttgtagacccggaaaccggtgtcttgaaaatctgcgattttgggtctgccaaaaaattggaacataaccagccttctattagttacatctgttccagattttatagagcgcctgaattgatcattggttgtacccaatataccacccagatcgatatatgggggcttggttgtgtcatgggcgagatgcttatcggcaaagccatatttcaaggtcaagaaccccttttacagttgagggaaattgctaaattgttaggtcctcccgataaaagattcattttcttttctaatccggcctacgatggccctttattttccaaaccattattcagtggctcttctcaacagaggtttgagaagtattttggccattccggtccagatggtatcgatcttttgatgaaaatattggtctacgaaccacaacaaagattatctccaagaagaatccttgcccatcagttctttaatgaattaaggaatgatgacactttcttaccaagaggtttcactgaaccaatcaagttaccaaatttgtttgattttaatgattttgagttacaaattttgggtgaatttgctgataaaattaaacctacgaaagttgctgaatga

SEQ ID NO: 9077 - DNA, 654 bp, Saccharomyces cerevisiae
atgctgttacaacctgtttggaaaggctgccgatggacgcagtttgtcaggcctatcagaagatggaattctaccggcacgaatagaggagttcctttttcatttaaggatatttcaaatcaggaggatatcacgaatatctcgtatccttcgtcctctgactcagttttgacaaagtcaaatggtagtagtgaggtttacaagcccaaagaggaagtagttaagtacattctacatggcaagtttactaaaaataacacgcatttgacattttcaagcgttgtggaggacaagaactttcataagaataagggacttacgtataatgatacaatgctgtactatttgaacttaccccagaaagtgaagatttcgctatctacaggttgtttagggtttaggaaggcagcaagaggggagtatgaagctgcatttcaaaccagtggtagaatgtttgaattgattaaggaaaagaacatgctgaacaaagatatcgaagtggtgatggacgactttgggaagggcagagctgcttttatttccgctcttgttggtaaggaaggggccagtgtggtgaaaaaggttgtgaagatcagcgatgccaccaaattgaagtttggtggtgtaagatcaccaaagatgagaagactatga

SEQ ID NO: 9078 - DNA, 654 bp, Artificial Sequence
  Description of Artificial Sequence: Synthetic polynucleotide
atgcttttacaacctgtttggaaaggctgcagatggacgcagtttgtcaggcctatcagaagatggaattctaccggcacgaatagaggagttcctttttcttttaaggatatttctaatcaggaggatatcacgaatatcagttatccttcttcctctgactctgttttgacaaagagcaatggtagtagtgaggtttacaagcccaaagaggaagtagttaagtacattttgcatggcaagtttactaaaaataacacgcatttgacattttctagcgttgtggaggacaagaactttcataagaataagggacttacgtataatgatacaatgctttactatttgaacttaccccagaaagtgaagatttctttatctacaggttgtttagggtttaggaaggcagcaagaggggagtatgaagctgcatttcaaaccagtggtagaatgtttgaattgattaaggaaaagaacatgttgaacaaagatatcgaagtggtgatggacgactttgggaagggcagagctgcttttatttccgctcttgttggtaaggaaggggccagtgtggtgaaaaaggttgtgaagatcagcgatgccaccaaattgaagtttggtggtgtaagatctccaaagatgagaagattatga

SEQ ID NO: 9079 - DNA, 894 bp, Saccharomyces cerevisiae
atgtcaggtcctccacctccttacgaagagcaaagctcacatctttacggccagcctgcgagcagccaggatggaaacgctttcatcccggaagactttaaatattccacggtggttatctcgtgcgaacccatcattcgccagcggtttatgcacaaggtttactctctgctgtcatgccagttactggccagtttgtcgttctgctactgggctagcgtttccacttctttgcagaactttatcatgtcgcatatcgccctcttctacatctgcatggtggtatcgctagtatcgtgcatttggctggcagtaagtcctcgtcccgaagactacgaggccagtgttcccgaaccgttgctcacgggcagcagcgaagagccggcacaagagcaaaggcgtctgccttggtacgtcttgtcctcgtacaagcaaaagctcacgctgctctccattttcactctttccgaggcttactgtctgtcgctggtaaccttagcgtacgataaggatacagtactttcggctctgctgatcaccaccatcgtcgtagtcggcgtttccttgaccgcactatcagagagattcgagaacgtgctgaattccgcaacgtcaatatactattggttaaactggggtctatggattatgatcggaatgggtctcacggccttgcttttcggctggaatacccactcttccaagtttaatctgctttacggctggcttggtgccattttatttaccgcgtatcttttcatcgatacgcaactgatttttaggaaagtgtatcctgatgaagaagttagatgcgccatgatgctttacctggacatcgtcaatttgtttttgtctattttaaggattttggccaactctaacgacgacaattaa

SEQ ID NO: 9080 - DNA, 894 bp, Artificial Sequence
  Description of Artificial Sequence: Synthetic polynucleotide
atgagtggtcctccacctccttacgaagagcaaagctctcatctttacggccagcctgcgagcagccaggatggaaacgctttcatcccggaagactttaaatattccacggtggttatcagttgcgaacccatcattcgccagagatttatgcacaaggtttactctttattaagttgccagttattagccagtttgagtttctgctactgggctagcgtttccacttctttgcagaactttatcatgtcccatatcgccctcttctacatctgcatggtggtatctttagtaagttgcatttggttggcagtaagtcctcgtcccgaagactacgaggccagtgttcccgaaccgttgctcacgggcagcagcgaagagccggcacaagagcaaaggcgtttaccttggtacgtcttgtcctcttacaagcaaaagctcacgcttctctccattttcactctttccgaggcttactgtctttctttagtaaccttagcgtacgataaggatacagtactttctgctttattgatcaccaccatcgtcgtagtcggcgtttccttgaccgcattatctgagagattcgagaacgtgttgaattccgcaacgtctatatactattggttaaactggggtttatggattatgatcggaatgggtctcacggccttgcttttcggctggaatacccactcttccaagtttaatttactttacggctggcttggtgccattttatttaccgcgtatcttttcatcgatacgcaattgatttttaggaaagtgtatcctgatgaagaagttagatgcgccatgatgctttacttggacatcgtcaatttgtttttgtctattttaaggattttggccaactctaacgacgacaattga

SEQ ID NO: 9081 - DNA, 1254 bp, Saccharomyces cerevisiae
atgtcccagagaaagcgatactcattgaacgtcgtcacgtccccgtcgataccgtcaccgacacccagtgcaccgatacggactaacgaatccaattgggaagctgcttcgccagcgagtgctgcatcttcatttctcccgaatgttcatcatggtggcacggttttgaatcctgggttgggcataatgaggtcaccttcgttgaacaagtctggtgcgtttggccggtccggcagcagtggttccagtacagtaatagaaccgtccaacataaagttgctgctaattggagatgcaaacgtagggaagacagctatgattttgagctattgccgggaactgttgacacgagcggaaatgtcacgatcggcgcgactgaggcaccagcagcagcaacagcataaagacttaggattgaagaaaactgtggtgaaccatagattaagcatgaaagagaaaagaaaacggtacagctctaacgattttgaaaaggagttcaaagatattaatcattttgcagacgaaacaagcgatttcggaaacccgaacatcggtgatgataacaaccacgaaatggcggatcctaatgagattgtcatcgaaaccagaagtactatcggaatagacatcaagacgaacttggtcaacatagataaccggttttttaatgtcatactgtgggacactgcgggacaagaacggtaccaaaacgcaatcattccatcactgtacaagaagactaatgcggtgatattaacttacgatataacaaatgcgaagtccttccaaagctgtatggagcggtggatagttcaggcgttggaaaacttttcttcccaggatttgttaaaagcaagattttttctggtgggtaacaagattgacctttataaggaaaggcaggtaacccattatgatgtggtgcaaatggttcaggaaatgcaactgaaacatggtattaaaatttcgggaaactttgaagtaagctgtaaatgggtcaacgtggtggagagaaccatgaatatgataatactagacctggttgagaacggatgtttcgaaaacaatgatccttgtgtgtcgattacaacatctgacgacgtccagggacatgagcaagaattccacgatacagtagaagagcctttcaatttcactcggcaacgtcaacaccaacttgaaaaaaataacacagtggatattacaaaacctaatgacgacattgcaaataatcaatcaatttgttgcgtttag

SEQ ID NO: 9082 - DNA, 1254 bp, Artificial Sequence
  Description of Artificial Sequence: Synthetic polynucleotide
atgtcccagagaaagagatactctttgaacgtcgtcacgtccccgagcataccgtctccgacacccagtgcaccgataagaactaacgaatccaattgggaagctgcttctccagcgagtgctgcatcttcttttctcccgaatgttcatcatggtggcacggttttgaatcctgggttgggcataatgaggtctccttctttgaacaagtctggtgcgtttggccgttccggcagcagtggttccagtacagtaatagaaccgtccaacataaagttgttattgattggagatgcaaacgtagggaagacagctatgattttgagctattgcagagaattattgacaagagcggaaatgtctaggtctgcgagattaaggcaccagcagcagcaacagcataaagacttaggattgaagaaaactgtggtgaaccatagattaagcatgaaagagaaaagaaaaagatacagctctaacgattttgaaaaggagttcaaagatattaatcattttgcagacgaaacaagcgatttcggaaacccgaacatcggtgatgataacaaccacgaaatggcggatcctaatgagattgtcatcgaaaccagaagtactatcggaatagacatcaagacgaacttggtcaacatagataacagattttttaatgtcatattatgggacactgcgggacaagaaagataccaaaacgcaatcattccatctttgtacaagaagactaatgcggtgatattaacttacgatataacaaatgcgaagtccttccaaagctgtatggagcgctggatagttcaggcgttggaaaacttttcttcccaggatttgttaaaagcaagattttttttagtgggtaacaagattgacctttataaggaaaggcaggtaacccattatgatgtggtgcaaatggttcaggaaatgcaattgaaacatggtattaaaatttctggaaactttgaagtaagctgtaaatgggtcaacgtggtggagagaaccatgaatatgataatattggacttggttgagaacggatgtttcgaaaacaatgatccttgtgtgtccattacaacatctgacgacgtccagggacatgagcaagaattccacgatacagtagaagagcctttcaatttcactaggcaacgtcaacaccaacttgaaaaaaataacacagtggatattacaaaacctaatgacgacattgcaaataatcaatctatttgttgcgtttga

SEQ ID NO: 9083 - DNA, 435 bp, Saccharomyces cerevisiae
atggcaggtgtttccgttagagacgttgcagctcaagatttcatcaatgcttacgcttctttcttgcaaagacaaggtaaattagaagtcccaggttacgttgacattgtcaagacctcttctggtaatgaaatgccaccacaagacgctgaaggttggttctacaagcgtgctgcctccgttgctagacacatttacatgagaaagcaagtcggtgttggtaagttgaacaaattgtacggtggtgccaagagcagaggtgtcagaccatacaagcacattgatgcttccggttctatcaacagaaaggtcttgcaagctttggaaaaaatcggtattgtcgaaatctctccaaagggtggtagaagaatctctgaaaacggtcaaagagatttggatcgtattgccgctcaaactttggaagaagacgaataa

SEQ ID NO: 9084 - DNA, 435 bp, Artificial Sequence
  Description of Artificial Sequence: Synthetic polynucleotide
atggcaggtgtttccgttagagacgttgcagctcaagatttcatcaatgcttacgcttctttcttgcaaagacaaggtaaattagaagtcccaggttacgttgacattgtcaagacctcttctggtaatgaaatgccaccacaagacgctgaaggttggttctacaagcgtgctgcctccgttgctagacacatttacatgagaaagcaagtcggtgttggtaagttgaacaaattgtacggtggtgccaagagcagaggtgtcagaccatacaagcacattgatgcttccggttctatcaacagaaaggtcttgcaagctttggaaaaaatcggtattgtcgaaatctctccaaagggtggtagaagaatctctgaaaacggtcaaagagatttggatcgtattgccgctcaaactttggaagaagacgaatga

SEQ ID NO: 9085 - DNA, 561 bp, Saccharomyces cerevisiae
atgggtattgatcacacttccaagcaacacaaaagatccggtcatagaaccgctccaaaatccgataacgtctatttgaaattattggtcaaactatacactttcctagctcgtcgtactgatgctccattcaacaaggttgttttgaaggctttgttcttgtctaagatcaacagaccacctgtttcagtctccagaattgctagagctttgaagcaagaaggtgctgccaacaagactgttgtcgttgttggtaccgttactgacgatgccaggatcttcgaattcccaaagaccactgttgctgctttgagattcactgctggtgccagagccaagatcgttaaggctggcggtgaatgtatcactttagatcaattagctgtcagagctcctaagggtcaaaacactttgatcttgagaggtccaagaaactccagagaagcggtcagacacttcggtatgggtccacacaagggtaaggctccaagaatcttgtccaccggtagaaagttcgaaagagctagaggtagaagaagatctaagggtttcaaggtgtaa

SEQ ID NO: 9086 - DNA, 561 bp, Artificial Sequence
  Description of Artificial Sequence: Synthetic polynucleotide
atgggtattgatcacacttccaagcaacacaaaagatccggtcatagaaccgctccaaaatccgataacgtctatttgaaattattggtcaaactttacactttcttggctcgtcgtactgatgctccattcaacaaggttgttttgaaggctttgttcttgtctaagatcaacagaccacctgtttctgtctccagaattgctagagctttgaagcaagaaggtgctgccaacaagactgttgtcgttgttggtaccgttactgacgatgccaggatcttcgaattcccaaagaccactgttgctgctttgagattcactgctggtgccagagccaagatcgttaaggctggcggtgaatgtatcactttagatcaattagctgtcagagctcctaagggtcaaaacactttgatcttgagaggtccaagaaactccagagaagcggtcagacacttcggtatgggtccacacaagggtaaggctccaagaatcttgtccaccggtagaaagttcgaaagagctagaggtagaagaagatctaagggtttcaaggtgtga

SEQ ID NO: 9087 - DNA, 309 bp, Saccharomyces cerevisiae
atgaaattctctactctctccaccgttgctgccattgccgcatttgcttccgcagattccacctctgatggtgtcacttacgtagatgttaccaccaccccacaaagtactacatctatggtctccaccgtgaaaactacttccactccatacactacaagtaccattgccactctatccactaaatctatcagtagccaagctaacaccaccacccatgagatcagcacatacgtcggcgctgccgttaaaggctccgttgcgggtatgggtgccatcatgggtgctgctgcctttgctttgttataa

SEQ ID NO: 9088 - DNA, 309 bp, Artificial Sequence
  Description of Artificial Sequence: Synthetic polynucleotide
atgaaattctctactctctccaccgttgctgccattgccgcatttgcttccgcagattccacctctgatggtgtcacttacgtagatgttaccaccaccccacaaagtactacatctatggtctccaccgtgaaaactacttccactccatacactacaagtaccattgccactttatccactaaatctatcagtagccaagctaacaccaccacccatgagatcagcacatacgtcggcgctgccgttaaaggctccgttgcgggtatgggtgccatcatgggtgctgctgcctttgctttgttatga

SEQ ID NO: 9089 - DNA, 1929 bp, Saccharomyces cerevisiae
atgacaaggctcaaagcaaaatattcacctacaaaaggtaaaagaaaagaagataaacatacaaaacgtatgcgtaaatcatccttcacaagaacgcaaaaaatgcttgaagtatttaacgataatcgctcgcattttaacaagtacgagagcctcgctatcgacgttgaagacgatgacactttcggaaacctagtcttaatggaaaatgataaaagtgatgtcgacatacctgtaatagaagaagtcacatcaagtgaagatgaacaaagggcagaatctagcaaaagaaacaattctctcgaagataatcaagattttattgctttttcggacagctctgaagatgaaacagaacaaataaaggaagatgatgatgaaagaagcagttttctgttgaccgatgaacatgaagtttctaagcttacttcacagcaatctctgaacactgaaagcgcttgcaatgtggagtatccttggataagaaatcattgtcattcgaaacaaaggagaatagcagattggctaacttcagaaatcaaagatttcgttcattatatctctccaagcaagaacgaaatcaagtgcagaaatagaacgatcgataaactacgccgggcggtcaaggaactgtggtcggatgcagatttgcatgtgtttggttcttttgccaccgatttatatttgccgggttctgacattgactgtgtcgtaaacagccggaatcgcgataaagaggacagaaattacatttatgaattggcgagacatttgaaaaacaaagggctagctataagaatggaggttattgttaaaacgcgagtgcctattatcaaattcatagagccccaatcacagttacatatcgacgtttcatttgaaagaacgaacgggttagaggctgcaaaactcatcagggaatggctaagagactctccagggttacgtgaactggtactgataataaaacaatttttgcattcaagacgattgaacaatgtgcacacaggaggattgggaggtttcacagtaatctgtttggtttattcttttttaaatatgcatccgcgaataaaatcaaacgatatcgacgttctagataacctgggtgttctactgattgacttcttcgaactttacggaaaaaattttggttatgatgacgttgctataagcatatctgatggttacgcctcttatattcctaaatcgtgttggagaactttggaaccttcaaggagtaaattctcgctagctattcaagatcctggtgatcctaacaataatataagcagaggctcctttaatatgaaggatataaaaaaggcctttgctggtgccttcgaactgttggtcaataaatgctgggaattgaattctgctacattcaaagaccgcgttggaaaaagtatactcggaaacgtgatcaaataccgtgggcaaaagagagatttcaacgacgaaagagatttagtgcagaataaagccatcattgaaaacgagcgctaccacaagaggcgcacgaggatagttcaagaagatttatttataaacgacaccgaagacttgccagtagaggagatctacaaacttgacgaacctgcaaagaagaaacagaaggcaaaaaaggataagagagaaggggaaatcaaaaagagtgccattccatctccacctccggattttggagtgagcagaagcaaattgaaacgcaaagtgaaaaaaactgatcagggctctctcctacaccaaaacaacctcagcatagatgacttgatgggactttctgagaatgatcaagaatccgatcaagatcaaaaaggaagagataccccttcgggacaagatgagaaatcaccactggaaactaagacagtagatgctcaaacgagaagggactactggctctctaaaggccaggctctttaa

SEQ ID NO: 9090 - DNA, 1929 bp, Artificial Sequence
  Description of Artificial Sequence: Synthetic polynucleotide
atgacaaggctcaaagcaaaatattctcctacaaaaggtaaaagaaaagaagataaacatacaaaacgtatgcgtaaatcttccttcacaagaacgcaaaaaatgcttgaagtatttaacgataatcgctctcattttaacaagtacgagagcctcgctatcgacgttgaagacgatgacactttcggaaacttggtcttaatggaaaatgataaaagtgatgtcgacatacctgtaatagaagaagtcacatctagtgaagatgaacaaagggcagaatctagcaaaagaaacaattctctcgaagataatcaagattttattgctttttctgacagctctgaagatgaaacagaacaaataaaggaagatgatgatgaaagaagcagttttttattgaccgatgaacatgaagtttctaagcttacttctcagcaatctttgaacactgaaagcgcttgcaatgtggagtatccttggataagaaatcattgtcattctaaacaaaggagaatagcagattggttgacttctgaaatcaaagatttcgttcattatatctctccaagcaagaacgaaatcaagtgcagaaatagaacgatcgataaattgcgcagagcggtcaaggaattatggtctgatgcagatttgcatgtgtttggttcttttgccaccgatttatatttgccgggttctgacattgactgtgtcgtaaacagcagaaatcgcgataaagaggacagaaattacatttatgaattggcgagacatttgaaaaacaaagggttggctataagaatggaggttattgttaaaacgagagtgcctattatcaaattcatagagccccaatctcagttacatatcgacgtttcttttgaaagaacgaacgggttagaggctgcaaaactcatcagggaatggttgagagactctccagggttacgtgaattggtattaataataaaacaatttttgcattccagaagattgaacaatgtgcacacaggaggattgggaggtttcacagtaatctgtttggtttattcttttttaaatatgcatccgaggataaaaagtaacgatatcgacgttttggataacttgggtgttttattgattgacttcttcgaactttacggaaaaaattttggttatgatgacgttgctataagcatatctgatggttacgcctcttatattcctaaaagttgttggagaactttggaaccttctaggagtaaattctctttggctattcaagatcctggtgatcctaacaataatataagcagaggctcctttaatatgaaggatataaaaaaggcctttgctggtgccttcgaattattggtcaataaatgctgggaattgaattctgctacattcaaagaccgcgttggaaaaagtatactcggaaacgtgatcaaataccgtgggcaaaagagagatttcaacgacgaaagagatttagtgcagaataaagccatcattgaaaacgagcgctaccacaagaggcgcacgaggatagttcaagaagatttatttataaacgacaccgaagacttgccagtagaggagatctacaaacttgacgaacctgcaaagaagaaacagaaggcaaaaaaggataagagagaaggggaaatcaaaaagagtgccattccatctccacctccggattttggagtgagcagaagcaaattgaaacgcaaagtgaaaaaaactgatcagggctctctcttacaccaaaacaacctcagcatagatgacttgatgggactttctgagaatgatcaagaatccgatcaagatcaaaaaggaagagataccccttctggacaagatgagaaatctccattggaaactaagacagtagatgctcaaacgagaagggactactggctctctaaaggccaggctctttga

SEQ ID NO: 9091 - DNA, 2529 bp, Saccharomyces cerevisiae
atgtctctttcagctgcagcgaataagatatctgacaacgatttccaaaatatcggaccggcacctagacctcccagttcaaatagccagggccgtacttgctataatcaaacgcaacctataaccaaacttatgagtcaactggatttaacatcagcgtcccatttaggtacaagtacctccaaaaaaaaaagcgggtgggtgtcctacaaagatgacggtatactttcatttatatggcaaaagagatacctgatgctacacgattcgtatgtagccctttacaagaacgataaacaaaatgacgatgcgatcttgaagataccactaactagtattataagtgtaagcaggacacagttgaaacaatattgttttgagttggtgcgctgcagtgaccgaaattctgtatcatcaggatcctcgtcctctttgaatgtatcatcagacagtaactccaaaaaatcaatatacattgctacaaagacagaaagcgatttgcatagttggttagacgccatttttgctaaatgtccattattaagtggtgtatcttctccaacaaacttcacacataaagttcacgttggttttgatccagaaacaggtagttttgttggtatgcccaccaactgggaaaaattattaaagcactccagaattacaggagaagattggaacaataattctgcggctgtcattcaagtgttgcagttttatcaagagtataatggagccggaaatcccacaaatactttagacaagcctcaaagtggtgaaacttcctcctctcaaaaatcgctgccaaacagctataatgataacaaactcagaaataattcagtaaattcaaagtcatcttcaggcgtttcttcaagtatggtatcacagaggaaaacctcacaaccaccaaataccaaatcgcctgtttctctaggaagcggctcactgccaccaataaatacaaaattgcccactagtcagtcaaatattccaagacacttacaaaatgttcccaaccaacaatatcctaagatgagaaacggacactccccaaccaatggccaatttcctaggggacctatgcatccaaacaattctcaacgatctttgcagcagcagcagcagcagcagcagcaacaaaaacaacagcatcaacaatatccataccaccatcaaggaccatctccatctccatccccatctccgtctccattaaacccttataggccacatcacaatatgataaatccttattccaaacaacctcaatcgccattaagttcacagtcgacccaaaaccaagcaattccacgttatgcacaaaactcaagtcctacagccgcacactttcaacctcaaagaacagctccaaagccaccaatatcagctccaagggcgccatacccatcaaatcaaaatgctactagtaacacacatgtacagcctgttgcacctaagaatgaccagtcaaccccacaaacaatgaggcaggccccaaagagaccggatgcagatgtcgcacaaccgggtggtgtggccaaaccgaagaagccagcaaggcctaccatgtcaactgcagaaataatgagtaagctgaagaaagtcaccgtaaatgcggatccatctcaatgctttaaagtgatcgagaaggccggtcaaggtgcaagtgggtccgtctaccttgcagagaggacgcatattccgacagaaagtaatatgatcgaactcataaacaatgatattgatgagccgcacgtaggagataaagttgctatcaagcaaatggtcttatctaaacaacctcgtaaagaactcatagtgaatgaaattttggttatgaaggattcacgtcataaaaatatcgtcaattttctcgaggcttatttgagaacagacgatgacctatgggttgtgatggagtttatggaaggaggttcactaacagacattatcgagaatagtcccaccaacgataattcacattcaccactaacagaaccccaaattgcatatatcgtacgagaaacttgccaaggcttgaaatttctacacgacaagcatatcattcatagggatattaaatcagataatgtcttgctggacactagagctagggtgaaaattaccgattttgggttttgcgccagattaactgataaaagaagcaaaagagccactatggttgggacaccttactggatggcacctgaagttgtcaaacaacgtgaatacgatgaaaagattgacgtatggtctttgggtatcatgaccattgaaatgctggagggtgaaccaccatatttaaatgaagatccactaaaggcgttgtacttaattgcaactaatggtacaccaaagctcaagcatccagaaagtttgtctttagaaattaaacgctttctaagcgtttgcctttgcgtagatgttagatatagggcatcaaccgaagagcttttacaccacggttttttcaatatggcatgtgatccaaaggatttgacatcactgttggagtggaaggaatga

SEQ ID NO: 9092 - DNA, 2529 bp, Artificial Sequence
  Description of Artificial Sequence: Synthetic polynucleotide
atgtctctttctgctgcagcgaataagatatctgacaacgatttccaaaatatcggaccggcacctagacctcccagtagtaatagccagggccgtacttgctataatcaaacgcaacctataaccaaacttatgagtcaattggatttaacatctgcgtcccatttaggtacaagtacctccaaaaaaaaaagcgggtgggtgtcctacaaagatgacggtatactttcttttatatggcaaaagagatacttgatgttgcacgattcttatgtagccctttacaagaacgataaacaaaatgacgatgcgatcttgaagataccattgactagtattataagtgtaagcaggacacagttgaaacaatattgttttgagttggtgcgctgcagtgacagaaattctgtatcttctggatcctcctcctctttgaatgtatcttctgacagtaactccaaaaaatctatatacattgctacaaagacagaaagcgatttgcatagttggttagacgccatttttgctaaatgtccattattaagtggtgtatcttctccaacaaacttcacacataaagttcacgttggttttgatccagaaacaggtagttttgttggtatgcccaccaactgggaaaaattattaaagcactccagaattacaggagaagattggaacaataattctgcggctgtcattcaagtgttgcagttttatcaagagtataatggagccggaaatcccacaaatactttagacaagcctcaaagtggtgaaacttcctcctctcaaaaatctttaccaaacagctataatgataacaaactcagaaataattctgtaaattctaagtcttcttctggcgtttcttccagtatggtatctcagaggaaaacctctcaaccaccaaataccaaatctcctgtttctttgggaagcggctctttaccaccaataaatacaaaattgcccactagtcagtctaatattccaagacacttacaaaatgttcccaaccaacaatatcctaagatgagaaacggacactccccaaccaatggccaatttcctaggggacctatgcatccaaacaattctcaaagatctttgcagcagcagcagcagcagcagcagcaacaaaaacaacagcatcaacaatatccataccaccatcaaggaccatctccatctccatccccatctccgtctccattaaacccttataggccacatcacaatatgataaatccttattccaaacaacctcaatctccattaagttctcagtctacccaaaaccaagcaattccacgttatgcacaaaacagtagtcctacagccgcacactttcaacctcaaagaacagctccaaagccaccaatatctgctccaagggcgccatacccatccaatcaaaatgctactagtaacacacatgtacagcctgttgcacctaagaatgaccagtctaccccacaaacaatgaggcaggccccaaagagaccggatgcagatgtcgcacaaccgggtggtgtggccaaaccgaagaagccagcaaggcctaccatgtctactgcagaaataatgagtaagttgaagaaagtcaccgtaaatgcggatccatctcaatgctttaaagtgatcgagaaggccggtcaaggtgcaagtgggtccgtctaccttgcagagaggacgcatattccgacagaaagtaatatgatcgaactcataaacaatgatattgatgagccgcacgtaggagataaagttgctatcaagcaaatggtcttatctaaacaacctcgtaaagaactcatagtgaatgaaattttggttatgaaggattctcgtcataaaaatatcgtcaattttctcgaggcttatttgagaacagacgatgacttatgggttgtgatggagtttatggaaggaggttctttaacagacattatcgagaatagtcccaccaacgataattctcattctccattaacagaaccccaaattgcatatatcgtaagagaaacttgccaaggcttgaaatttttgcacgacaagcatatcattcatagggatattaaatctgataatgtcttgttggacactagagctagggtgaaaattaccgattttgggttttgcgccagattaactgataaaagaagcaaaagagccactatggttgggacaccttactggatggcacctgaagttgtcaaacaacgtgaatacgatgaaaagattgacgtatggtctttgggtatcatgaccattgaaatgttagagggtgaaccaccatatttaaatgaagatccattgaaggcgttgtacttaattgcaactaatggtacaccaaagctcaagcatccagaaagtttgtctttagaaattaaacgctttttgagcgtttgcctttgcgtagatgttagatatagggcatctaccgaagagcttttacaccacggttttttcaatatggcatgtgatccaaaggatttgacatctttgttggagtggaaggaatga

SEQ ID NO: 9093 - DNA, 4911 bp, Saccharomyces cerevisiae
atggccatgaacactggagggtttgactccatgcaaaggcaacttgaagcagaattgcgttctttatcttccgaatcgaaaagaagaaattcaaccattcgccatgctagtgataaatccattgagatattgaaaagagtacatagttttgaggagctagaaagacatccggatttcgcactccctttcgtgttggcttgccaatcaaggaatgctaaaatgacgaccctggcaatgcaatgcctacagggactgtcaaccgttccatctattcctcgaagccggctgtctgaaattttggatgccttcattgaggctactcatctcgcgatggagattcaattaaaagttttacaggtggtacccattttttttaagacatacgggaagttcatctatgggccgctttgtaagaagttgttgctgtgttgctcaaatctgctgcatgtacctaataaggcacccgtagtagttggtactgcgagtgccactttacagcagcttatcgatgaaatatttgataggctttccattgaatctgtagtggatgataaacaatatgaagtcctcataagtaatagtgagtcaattaaggtcaatgtttatagatacgatgctaacaaattgttcgataatatctgttcattaaatgaaataagctcaaatggggcagttagtgacgaggagatgctgttagacattggggacatcccaatagactatggcctggaaatccttgaatcgattttgaagaatagtcagaaaaatcttttagaatgccaagatttacaatatctactgagagttaaggcgattccattgcttctacgttgcatatcttcttcgagacacttctccaccgctgtaaggagttgtcgttgtttgaagttgttgataagaaaagagtacctaagcatactcgagttagaattagaggtcatcttgtcgctgttaatccatggcatatctgtcgaatccaatttaagtggatggcaaagagtactatctctagaacttttcaaggatttatcacaagaccccgaaatcgtcaatacactctatatggactatgataattatccagataaaaaacatgtgttcaaatatcttttgaaagaatgtattgtcttattaaattcgccagagtatattactttcttggcgccatcaaaagtagtcgagaaaatggattctcccttgataactactgaaaactctacagttaaaacaaagtttatgcatttattggacaaatcaaacgctccgtccattaatattacttacattatatcattaattctgaccatctgtaaccacttatgcgaggggttgaacaaatcggctctggaaagctctcccctagagaagaaaattgaggacaaagaacgtgaagagggaactggaaatgattcgacagttgtaaaggtttatagcggcctgttttctggcctatttgagctaaacaaactctttttatattcgacctccttagagacatcgatattccacttggtggttagagcttttcaaaaattagctcatagtgccggcgttctgtcactaaaggacaaattaagggcatgcatgaaattgttttcgattttgataacaaacaacgttacatcatccaatcaatattcttttaatgatacaagtaagtcagcaaaaaatcaacatacaagaaatatatccacatctagtgtcacgaccagtcccgtagaatcaacaaaaaatccaagtaggtcgattgcagattctgcgcaaaataaggaaatgaaaaggcgtttgcaccccaggaatattagttcaagacaagttagtttactaagggcattaatatcattatcaatatcactaggtcctattttcgattcagaaagctggaggtacacttttttaacctggcaatggataacttactacatatatggtccatcagcagatttcaaagagagcttttactctgaagatattccaccacctccaatactgactaaatcagacgttacatctattgaaagctctctaacgaaattttttgaaagtacaagcagctattcttgctcaacttttcatttggtattaaccagattaattttggactcaaaaaataccctcactttagaacaaacgaacctcaacctgaataatgacattggctatcatcctttagatgcaaaagatgaaattataccatgcatttacaacaaggcgttttttgttaacaaaattggtgaactggcaacttataattgcaaaaaatttctctttggaaaaaatggtaaagaactttggagtttgatttccacctatatgatcaaattgatatcaaaccgtgaaatggataacgattctttacgtttatacacagtgagagtgtttacagatatcatcaaaaaggctactaatgaggttggtaattccgatgagcaagataataaagtgaaacagtttggtacattggaaaacttagtcatcgatagcttgatggcaacgataaactcgataaaacagttggatattggtaagcaggaaatatacaatgggacgatcaatgttgaatcagatattctttttcaattgctactaactttaaaagagattctgaacgaatttggtgaactgttaatgaactcttggaccaatattttcaacatcattaattcaccattcgagtggacagttgaggatactgatttttccgtgaatgaggatatagatgattcatctttatttgaaggtatcgttcagaagcataagaacatgatccaagtgtcatacgatgtttttaaactaatttctgatgatttcttacagagtttacctatgagtgtcattaaattcgttattgatacgcttgtcaatttcgtaagtcagaagcgaaatcttaatatctccttttcttctattagtcagttctggttagttggagattatctcagagtccgcttcaatcccgaaacattaaatttaagtgatgagaaacgtagaagtctctccgaaaagattaataatcaaaaattaattgaaatcattacatccagttcatctcatgattgggaactttacaacggattatggatatatcttttgaaaaatttgatcaattgtactaatgatgatagagtagaagttaaaaacggtgctgtgcagacttttttcagaatcatcgactcccattctgtttgcttccccccatgggacctaattttcttagaggttattgaaccactgcttaccaaggaatggtccactgaagaactcgaaaatgaaactgattttataaatgtaacattgcaaggattaattaagctttatccggaacactttaaggacttcaaaaacaacactacctgcgccaaggaatggtcaatgttattagattttttgaaaagattgttgtcttccacttctaataataccaagaatgctgtaatattaaattatcaaaccctgctgaaagaaatcatcactattgaggacgttccatcagatatattgaaaaagtgctgcgaaatatttaccgactacaatattacgtacagtgatctctccacaaacgcatcgagcaaaactgaatacgattgtatatacgaactaataaccggatttcctcctctttaccaattaatatcgaaatacgatgcgatgacagatgaatttgtggaaaaagttcttcttttattcaattctgccataaaatatcctctcttacctgagtttgtccaagacaaaactaaaccgtcctctatgcaaaaggccatattgtctggacttgatatatttatgacaaatgattctaaagatacagaaattttgattcttctccagttaagtacaatatcgatattggcttttgatacaagggaaaaaataacaaaaaaacttggaccaaagcttccaaaagcatcacttaacaggttaccaacttttgaggcaatcagctatatgtcatgttctaacctgagaaatagaatagcaaaaatagatcaatttggtatatccacactgaaagcaaagcatattttaagaatattgaaaaatttggctgaaatcatcaagcgaaaatcgcttattacagggtcagagagtgatgaaatccccatatgggttcttgcttccaattgcttctgtgatttgtcgaacaaaattttcaaatcactccaagaagatgcagaaaatccattaaaggataacttttgtgatttatttataaatgttattgttgtcacattacaaagaatcaacccagagctcgataatttaaccgagatagacgatttgaatgagtattccaaatatagggagatattgctggaaaacagaatcattgatctcttcaatgaaaggcaattagacactttcatttatgccgtctgggattgttcatttttatatgaattcgatgaattagaaaatgctttgatgcaagactgtggtacgttttctgaattgtctcaaaaactatcttcgttcgatttttcatgtatatttggatccaccacaaatcctcgctttcagacaaaatataagtgctctttagagtgcttgcaagatttggttaattttatgttgaacacaaacgagaaattaagaaagttaactgctccttatctttctgcaagaattgcccttgctcttagaagatatatctcagatgaatacttgattgggcgagcaccaataccaaaattgcgtaaaacagaactagctactctattaaatgggctatgcgtgattttaagaggtgttctagatcaaaattcgacccttggcaacaaacaaattggagttgaaaacctacaaacattaagtccgttgattttaagaaccatcccagtatctcataaaatggatggcctccaagataaagttttggaattatcacttggatttacgaaactagactag

SEQ ID NO: 9094 - DNA, 4911 bp, Artificial Sequence
  Description of Artificial Sequence: Synthetic polynucleotide
atggccatgaacactggagggtttgactccatgcaaaggcaacttgaagcagaattgcgttctttatcttccgaaagtaaaagaagaaattctaccattcgccatgctagtgataaatccattgagatattgaaaagagtacatagttttgaggagttagaaagacatccggatttcgcactccctttcgtgttggcttgccaatccaggaatgctaaaatgacgaccttggcaatgcaatgcttacagggattatctaccgttccatctattcctcgtagcaggttatctgaaattttggatgccttcattgaggctactcatctcgcgatggagattcaattaaaagttttacaggtggtacccattttttttaagacatacgggaagttcatctatgggccgctttgtaagaagttgttgttatgttgctccaatttattacatgtacctaataaggcacccgtagtagttggtactgcgagtgccactttacagcagcttatcgatgaaatatttgataggctttccattgaatctgtagtggatgataaacaatatgaagtcctcataagtaatagtgagtctattaaggtcaatgtttatagatacgatgctaacaaattgttcgataatatctgttctttaaatgaaataagcagtaatggggcagttagtgacgaggagatgcttttagacattggggacatcccaatagactatggccttgaaatccttgaaagtattttgaagaatagtcagaaaaatcttttagaatgccaagatttacaatatttattaagagttaaggcgattccattgcttttgcgttgcatatcttcttctagacacttctccaccgctgtaaggagttgtcgttgtttgaagttgttgataagaaaagagtacttgagcatactcgagttagaattagaggtcatcttgtctttattaatccatggcatatctgtcgaatccaatttaagtggatggcaaagagtattatctttggaacttttcaaggatttatctcaagaccccgaaatcgtcaatacactctatatggactatgataattatccagataaaaaacatgtgttcaaatatcttttgaaagaatgtattgtcttattaaattctccagagtatattactttcttggcgccatctaaagtagtcgagaaaatggattctcccttgataactactgaaaactctacagttaaaacaaagtttatgcatttattggacaaaagtaacgctccgtccattaatattacttacattatatctttaattttgaccatctgtaaccacttatgcgaggggttgaacaaatctgctttggaaagctctcccttggagaagaaaattgaggacaaagaacgtgaagagggaactggaaatgattctacagttgtaaaggtttatagcggcttattttctggcttatttgagttgaacaaactctttttatattctacctccttagagacatctatattccacttggtggttagagcttttcaaaaattagctcatagtgccggcgttttaagtttgaaggacaaattaagggcatgcatgaaattgttttctattttgataacaaacaacgttacatcttccaatcaatattcttttaatgatacaagtaagtctgcaaaaaatcaacatacaagaaatatatccacatctagtgtcacgaccagtcccgtagaatctacaaaaaatccaagtaggtctattgcagattctgcgcaaaataaggaaatgaaaaggcgtttgcaccccaggaatattagtagtagacaagttagtttattgagggcattaatatctttatctatatctttgggtcctattttcgattctgaaagctggaggtacacttttttaacctggcaatggataacttactacatatatggtccatctgcagatttcaaagagagcttttactctgaagatattccaccacctccaatattgactaaaagtgacgttacatctattgaaagctctttgacgaaattttttgaaagtacaagcagctattcttgctctacttttcatttggtattaaccagattaattttggactctaaaaataccctcactttagaacaaacgaacctcaacttgaataatgacattggctatcatcctttagatgcaaaagatgaaattataccatgcatttacaacaaggcgttttttgttaacaaaattggtgaattggcaacttataattgcaaaaaatttctctttggaaaaaatggtaaagaactttggagtttgatttccacctatatgatcaaattgataagcaaccgtgaaatggataacgattctttacgtttatacacagtgagagtgtttacagatatcatcaaaaaggctactaatgaggttggtaattccgatgagcaagataataaagtgaaacagtttggtacattggaaaacttagtcatcgatagcttgatggcaacgataaacagcataaaacagttggatattggtaagcaggaaatatacaatgggacgatcaatgttgaaagtgatattctttttcaattgttattaactttaaaagagattttgaacgaatttggtgaattattaatgaactcttggaccaatattttcaacatcattaattctccattcgagtggacagttgaggatactgatttttccgtgaatgaggatatagatgattcttctttatttgaaggtatcgttcagaagcataagaacatgatccaagtgtcttacgatgtttttaaattgatttctgatgatttcttacagagtttacctatgagtgtcattaaattcgttattgatacgcttgtcaatttcgtaagtcagaagagaaatcttaatatctccttttcttctattagtcagttctggttagttggagattatctcagagtccgcttcaatcccgaaacattaaatttaagtgatgagaaacgtagaagtctctccgaaaagattaataatcaaaaattaattgaaatcattacatccagttcttctcatgattgggaactttacaacggattatggatatatcttttgaaaaatttgatcaattgtactaatgatgatagagtagaagttaaaaacggtgctgtgcagacttttttcagaatcatcgactcccattctgtttgcttccccccatgggacttgattttcttagaggttattgaaccattacttaccaaggaatggtccactgaagaactcgaaaatgaaactgattttataaatgtaacattgcaaggattaattaagctttatccggaacactttaaggacttcaaaaacaacactacctgcgccaaggaatggtctatgttattagattttttgaaaagattgttgtcttccacttctaataataccaagaatgctgtaatattaaattatcaaaccttattgaaagaaatcatcactattgaggacgttccaagtgatatattgaaaaagtgctgcgaaatatttaccgactacaatattacgtacagtgatctctccacaaacgcaagtagcaaaactgaatacgattgtatatacgaattgataaccggatttcctcctctttaccaattaatatccaaatacgatgcgatgacagatgaatttgtggaaaaagttcttcttttattcaattctgccataaaatatcctctcttacctgagtttgtccaagacaaaactaaaccgtcctctatgcaaaaggccatattgtctggacttgatatatttatgacaaatgattctaaagatacagaaattttgattcttctccagttaagtacaatatccatattggcttttgatacaagggaaaaaataacaaaaaaacttggaccaaagcttccaaaagcatctcttaacaggttaccaacttttgaggcaatcagctatatgtcctgttctaacttgagaaatagaatagcaaaaatagatcaatttggtatatccacattaaaagcaaagcatattttaagaatattgaaaaatttggctgaaatcatcaagagaaaatctcttattacagggagtgagagtgatgaaatccccatatgggttcttgcttccaattgcttctgtgatttgtctaacaaaattttcaaatctctccaagaagatgcagaaaatccattaaaggataacttttgtgatttatttataaatgttattgttgtcacattacaaagaatcaacccagagctcgataatttaaccgagatagacgatttgaatgagtattccaaatatagggagatattgttggaaaacagaatcattgatctcttcaatgaaaggcaattagacactttcatttatgccgtctgggattgttcctttttatatgaattcgatgaattagaaaatgctttgatgcaagactgtggtacgttttctgaattgtctcaaaaattatcttctttcgatttttcttgtatatttggatccaccacaaatcctcgctttcagacaaaatataagtgctctttagagtgcttgcaagatttggttaattttatgttgaacacaaacgagaaattaagaaagttaactgctccttatctttctgcaagaattgcccttgctcttagaagatatatcagtgatgaatacttgattgggcgcgcaccaataccaaaattgcgtaaaacagaattggctactttattaaatgggttatgcgtgattttaagaggtgttttggatcaaaattctacccttggcaacaaacaaattggagttgaaaacttacaaacattaagtccgttgattttaagaaccatcccagtatctcataaaatggatggcctccaagataaagttttggaattatctcttggatttacgaaattagactga

SEQ ID NO: 9095 - DNA, 1575 bp, Saccharomyces cerevisiae
atggaacaccaagcacttcgaaggcttgtactgtactgccccaatttcatccgacgtggtgctcttaggcaaaatatgactagagtgagctgtagacatatgtcaggcaagggtggagggagagatgagaaaggtgattgcaatgaagaaaaggattcttccaaagatttggggagggtaccgtcgaagatgaaacgagcatatgatggtgaaacagttattaaagagggagattcgcatgctgagtcgctagcgcagcagggaaagcagcccacagacctcgcatataacagcagatcgaagatatctggttctaatttgcatttattggttcctagagttgcgtctacagactatatttcgaataaagaggttcacacggagggcctgtttgccggctatcgacccttgtttctggggaactcaggttttccgtctgatgcaagaaagggtaaaaactttcatgagttagacgacgttcttcccaatatacaggtagtggacgcttccgagaaagatggcaaactcaatgtgcaggagattattgaggacttacaaagaacaagtttgagagaaagcattcatagtatggaacagttaccatcttcgcacaaacgtaaacccgtaataccgtgggacgcatctataagtggcatggtttataatgacatgcctttcaaatatgtgcccaaaaatattattctgaaaatgaagccatttaaacttttgcgtattgagagaaaaagtcaagcgaagaatgcaagaaagcctactatgataaaacttcagtttcacaatcgaagaatcaatgacaccccagagttagtgaatttataccataataaatcccgtttgcacgagtcactttacaatacaaaaccccttcaagaatctggatattcaagtgcaaatacaagtaaaagacagaaaatgttaaaagcaagaagcgactttgaacataaacagaaaaattatgcatacaaacacacatttatcaaaaatgatcaggaactgttccgcaatgaactaactaagttaaataagatacttgctagagaattcaaaaaattgacaaagctatccatacataatgagttcaagagagaacacttgcccctggccgtttatgtgagcaaatcaaagggcacaaagaaactgtttagaagatcactgaagatgaaaatcatggaccacatatacccagtttataccacgatattgtcaactttaacaaattccagagactctaagaaatttgaaaacaaaatcaaggcgtatattgaaaaaatcatagtgcggttatcagatgaagtaccatccacatattttttccaagatggcgtagattgtattattcaaccaagtccgattcataatttcaagagaatgcattggttaagatacaccaagaggcacaataccttttgggggaggactatacataaggacgttcaagtcagcttcaatgacaagtatgttgttactaggagcggcgtgaggtatacgaggtatcccactaatttgaatacacaattattggaaactgcatttgaagaatgggactactatgagtga

SEQ ID NO: 9096 - DNA, 1575 bp, Artificial Sequence
  Description of Artificial Sequence: Synthetic polynucleotide
atggaacaccaagcacttagaaggcttgtattgtactgccccaatttcatcagacgtggtgctcttaggcaaaatatgactagagtgagctgtagacatatgagtggcaagggtggagggagagatgagaaaggtgattgcaatgaagaaaaggattcttccaaagatttggggagggtaccgtccaagatgaaaagagcatatgatggtgaaacagttattaaagagggagattctcatgctgagtctttagcgcagcagggaaagcagcccacagacctcgcatataacagcagatccaagatatctggttctaatttgcatttattggttcctagagttgcgtctacagactatatttctaataaagaggttcacacggagggcttatttgccggctatagacccttgtttttggggaacagtggttttccgtctgatgcaagaaagggtaaaaactttcatgagttagacgacgttcttcccaatatacaggtagtggacgcttccgagaaagatggcaaactcaatgtgcaggagattattgaggacttacaaagaacaagtttgagagaaagcattcatagtatggaacagttaccatcttctcacaaacgtaaacccgtaataccgtgggacgcatctataagtggcatggtttataatgacatgcctttcaaatatgtgcccaaaaatattattttgaaaatgaagccatttaaacttttgcgtattgagagaaaaagtcaagcgaagaatgcaagaaagcctactatgataaaacttcagtttcacaatagaagaatcaatgacaccccagagttagtgaatttataccataataaatcccgtttgcacgagtctctttacaatacaaaaccccttcaagaatctggatattctagtgcaaatacaagtaaaagacagaaaatgttaaaagcaagaagcgactttgaacataaacagaaaaattatgcatacaaacacacatttatcaaaaatgatcaggaattattccgcaatgaattgactaagttaaataagatacttgctagagaattcaaaaaattgacaaagttatccatacataatgagttcaagagagaacacttgcccttagccgtttatgtgagcaaatccaagggcacaaagaaattatttagaagatctttgaagatgaaaatcatggaccacatatacccagtttataccacgatattgtctactttaacaaattccagagactctaagaaatttgaaaacaaaatcaaggcgtatattgaaaaaatcatagtgagattaagtgatgaagtaccatccacatattttttccaagatggcgtagattgtattattcaaccaagtccgattcataatttcaagagaatgcattggttaagatacaccaagaggcacaataccttttgggggaggactatacataaggacgttcaagtcagcttcaatgacaagtatgttgttactaggagcggcgtgaggtatacgaggtatcccactaatttgaatacacaattattggaaactgcatttgaagaatgggactactatgagtga

SEQ ID NO: 9097 - DNA, 1602 bp, Saccharomyces cerevisiae
atgaacttgtggagacatagtccagaagaattggctgcttacaatagctgtcatccaatgaagctaggttcaggggtgctgatacaattgcctctttatgacaattcggcagtatatgcagaagatattacttttaggagtttctgctgtgaaagagtgcccgtttatgtatctacggtgctaagaaactcttccccatataggtatcttgatgaggtgatcaatgactggcaaaaattcattcaagtaagcgattatgtcggcggttctgctgagtatgcgatttatgctgtgattttgtcgataacttctaattttgtcatcacagtgttcctgactgtgatatgctgtataaatatcagcgggcgcgcatataagagaattctacaactactgaggatagcctcgttgttagcctcgttgaacttaacgatttttatcacgaaggtgttgcggagattggaaaaagagcacaatgtctatggtgtcgttcgggctcattccattatgcacatcttttccgatgatatgacatttgttgtcttggatttcttggctactttaatgttccaattttgccaagtcggcattgtcattaggctatttcaaagagctcaggaaaagagaataattttttttattggggtgatattaacaataaccgcaaatattttatgggtaattccaccgtttgctaaccatactacaaaacacagaaatgactggcagattctgcggccatttgtttaccttttccgtattgccatcgccacgtcatatgcatcaatcgtcatttatcacatctggcagaaaaaaaaattgtggtttaaattcaatcaaatgggtttacttacgctattgactattcttgtggtgcttctattaccgggtttcttccttgccgatgtgtcgaacttatggatatcggaactgggtgaagtgtttaacacgacatgctatgtcacttcgaccgtgatcacatgggagtggctggatagattaaatgttttggaaagaaaagaggaagcgcaaagcattttgggaagacctatcttcgaggaagagcaacaagactatcggtttgccaagtacgccttaagggttcaaaacgctttaaccaggagggaatctcaggacgcatcaacggatcggcacgatacgtcaagtaattcggaagtatgtgatttacagaccatatcacgctacgacccagaagatcagatatcagtgggcagaagcattgatcgaatgcatttcaatgataggggaacttataaagatgtagcgctgaagaaattaggctatgcgcgtgataaaattttatactttacagaccaaatcgtccagaaaagcgtaggccacaataatagcagcagctcgaaaaatgaaaaaaccaaacagagaaaggccatggtcaggaaacggttgggattagacaaaccaggcatatacatttattcgacaaaggatgtcgttttcaattcagatgaagatgacgatgagaacgcggaagatgaagatgacgatgaatatgaagttggcagtgaaggcaataacaatagctctgccacttttaccagcgaccatataggccatatttga

SEQ ID NO: 9098 - DNA, 1602 bp, Artificial Sequence
  Description of Artificial Sequence: Synthetic polynucleotide
atgaacttgtggagacatagtccagaagaattggctgcttacaatagctgtcatccaatgaagttgggttctggggtgttgatacaattgcctctttatgacaattctgcagtatatgcagaagatattacttttaggagtttctgctgtgaaagagtgcccgtttatgtatctacggtgttgagaaactcttccccatataggtatcttgatgaggtgatcaatgactggcaaaaattcattcaagtaagcgattatgtcggcggttctgctgagtatgcgatttatgctgtgattttgagcataacttctaattttgtcatcacagtgttcttgactgtgatatgctgtataaatatcagcgggcgcgcatataagagaattttacaattattgaggatagcctctttgttagcctctttgaacttaacgatttttatcacgaaggtgttgagaagattggaaaaagagcacaatgtctatggtgtcgttagagctcattccattatgcacatcttttccgatgatatgacatttgttgtcttggatttcttggctactttaatgttccaattttgccaagtcggcattgtcattaggttatttcaaagagctcaggaaaagagaataattttttttattggggtgatattaacaataaccgcaaatattttatgggtaattccaccgtttgctaaccatactacaaaacacagaaatgactggcagattttaagaccatttgtttaccttttccgtattgccatcgccacgtcctatgcatctatcgtcatttatcacatctggcagaaaaaaaaattgtggtttaaattcaatcaaatgggtttacttacgttattgactattcttgtggtgcttttattaccgggtttcttccttgccgatgtgtctaacttatggatatctgaattgggtgaagtgtttaacacgacatgctatgtcacttctaccgtgatcacatgggagtggcttgatagattaaatgttttggaaagaaaagaggaagcgcaaagcattttgggaagacctatcttcgaggaagagcaacaagactataggtttgccaagtacgccttaagggttcaaaacgctttaaccaggagggaatctcaggacgcaagcacggatcgtcacgatacgtccagtaattctgaagtatgtgatttacagaccatatctcgctacgacccagaagatcagatatctgtgggcagaagcattgatagaatgcatttcaatgataggggaacttataaagatgtagcgttaaagaaattaggctatgcgcgtgataaaattttatactttacagaccaaatcgtccagaaaagcgtaggccacaataatagcagcagcagtaaaaatgaaaaaaccaaacagagaaaggccatggtcaggaaaagattgggattagacaaaccaggcatatacatttattctacaaaggatgtcgttttcaattctgatgaagatgacgatgagaacgcggaagatgaagatgacgatgaatatgaagttggcagtgaaggcaataacaatagctctgccacttttaccagcgaccatataggccatatttga

SEQ ID NO: 9099 - DNA, 1902 bp, Saccharomyces cerevisiae
atgcagaacgatcaacagaggttctccctgcaaaataggacggtactggcgcatccatacaaaaggctaggaggggcatttacggtgaaatcaccgtctgttcctaactttcatgataaaatgcattcagatcatagttctagcgactcagctctggtgaacggaagctttagagcgaatgatcatcgctctgtggaaccaagttgtttgggccaagcatccccctctgaacatgatgggaatttaagcgttattgacctgtatggagacgaagtggaatcccaacgtgccgaaggagaggatgatgatgataataatggcgataatggtaacgaagatctggaggaagtgcacagtgatgacctcgatttggttcctgatgatgacaaccgtcagcgtgtagaattggagggtgccgctagtgccacaagtgcgaattccaatggaatcaacaatacccattttgatcgatacggtttcaaaaaacagaataattacatatctgaagcagaatacgataagtggtgggtagaatattcgcagtactgcgttcgccgtaagcacaaatggcaattgctgttggagaaaagtgggttgccagtgaccgatgattctccttcacgatttccatcaaagagtgaacggttaaaaaggtatgtcagaaagggcattccagcggaatggagaggaaatgcatggtggcatttcgctagagggcaagagaagttaaacaagaataaaggcgtctattcacaacttttacgaaagatgaagcagatcaagaaacaaaaccctaatgaaaaacaagttcaagacttggatattattgaacgtgacttgaatagaacatttccggacaatatacatttccaaagtagcttgcataacaaagagggacctccgattataaaatctttacgccgggtgcttgttgcgttctctctctacaatccgaagattggctattgtcaatctatgaactttcttgcaggcttgctattgttatttttagacgaggaaagggccttttggatgctagtgattattacttcaagatacctaccgggggtgcataatatcaatctagaaggtgttaacatcgaccaaggggtactgatgctatgtgtcaaagaatatattccagaagtttggtcgtacattaagccttccattgaccaccaccaaaaaaataacaaaactttttctccgtcaaataaaaaagttttattcaatatgcaaaagaatgagttcttgtacagacttccgcccattactttgtgcacggcgagctggttcatgagttgctttgtcggtgtagtgccgatagagaccacgcttagaatatgggattgtctgttttacgaggaatcacattttctattcaaagtttcgttggctgtcttaaaattgagcgagcatgacctttcgaaaataaaacctcgtaacaattcgttgaattattcttggggctctaacttaaaccagagaggcggatcaatgggccaagaagatagcgatatggaaatttttcaggtcatacagacattccctaagacattattgaacccaaatgagatctttgagaaaatcattttcaaaaggagatttaatttaaataggttagatcaggatgaaatagacaggtgtcgaaaatttgttgccgctcagcgtctcaaatttaagacatatggtgaacttcttggaaattcaacatcagaggcagatttgccaattaatgataatacagataataaaggtatccacataacaagtgatgcagtcaatgaagcattatcttcagaggtatatgggtttaaaaagagcctagctggagttcattggaataatagcatcaaggagaaagtgaagcagatgaggaagaaaaaagacaagggtgactaa

SEQ ID NO: 9100 - DNA, 1902 bp, Artificial Sequence
  Description of Artificial Sequence: Synthetic polynucleotide
atgcagaacgatcaacagaggttctccttacaaaataggacggtattggcgcatccatacaaaaggttaggaggggcatttacggtgaaatctccgtctgttcctaactttcatgataaaatgcattctgatcatagttctagcgactctgctttggtgaacggaagctttagagcgaatgatcatcgctctgtggaaccaagttgtttgggccaagcatccccctctgaacatgatgggaatttaagcgttattgacctttatggagacgaagtggaatcccaacgtgccgaaggagaggatgatgatgataataatggcgataatggtaacgaagatttagaggaagtgcacagtgatgacctcgatttggttcctgatgatgacaaccgtcagcgtgtagaattggagggtgccgctagtgccacaagtgcgaattccaatggaatcaacaatacccattttgatagatacggtttcaaaaaacagaataattacatatctgaagcagaatacgataagtggtgggtagaatattctcagtactgcgttcgccgtaagcacaaatggcaattgttgttggagaaaagtgggttgccagtgaccgatgattctccttctagatttccatctaagagtgaaagattaaaaaggtatgtcagaaagggcattccagcggaatggagaggaaatgcatggtggcatttcgctagagggcaagagaagttaaacaagaataaaggcgtctattctcaacttttaagaaagatgaagcagatcaagaaacaaaaccctaatgaaaaacaagttcaagacttggatattattgaacgtgacttgaatagaacatttccggacaatatacatttccaaagtagcttgcataacaaagagggacctccgattataaaatctttacgcagggtgcttgttgcgttctctctctacaatccgaagattggctattgtcaatctatgaactttcttgcaggcttgttgttgttatttttagacgaggaaagggccttttggatgttggtgattattacttccagatacttgccgggggtgcataatatcaatttggaaggtgttaacatcgaccaaggggtattaatgctttgtgtcaaagaatatattccagaagtttggagttacattaagccttccattgaccaccaccaaaaaaataacaaaactttttctccgtccaataaaaaagttttattcaatatgcaaaagaatgagttcttgtacagacttccgcccattactttgtgcacggcgagctggttcatgagttgctttgtcggtgtagtgccgatagagaccacgcttagaatatgggattgtttattttacgaggaaagtcattttcttttcaaagtttctttggctgtcttaaaattgagcgagcatgacctttctaaaataaaacctcgtaacaattctttgaattattcttggggctctaacttaaaccagagaggcggatccatgggccaagaagatagcgatatggaaatttttcaggtcatacagacattccctaagacattattgaacccaaatgagatctttgagaaaatcattttcaaaaggagatttaatttaaataggttagatcaggatgaaatagacaggtgtagaaaatttgttgccgctcagcgtctcaaatttaagacatatggtgaacttcttggaaattctacaagtgaggcagatttgccaattaatgataatacagataataaaggtatccacataacaagtgatgcagtcaatgaagcattatcttctgaggtatatgggtttaaaaagagccttgctggagttcattggaataatagcatcaaggagaaagtgaagcagatgaggaagaaaaaagacaagggtgactga

SEQ ID NO: 9101 - DNA, 1212 bp, Saccharomyces cerevisiae
atgaatggaatatttgctattgagaagcctagcggtattacatccaatcagtttatgctaaagttgcaacatgctttaactaaaagtcaagtattctcgaaggaaattcaaagggcaacagcggaaagaaagcagcaatatgaaaaacagacaggtaagaaggccagcaagaggaaacttcgtaaagtctcaaaggtaaagatgggacacggaggcactttggatccgttggcctctggtgtcctggtaattgggattggagcgggcaccaaaaaacttgcaaattatctttcaggcaccgttaaagtctatgaaagtgaagccctgtttggtgtttccactacttcaggagatgtagaaggtgagattttgtcccagaactccgttaaacatttaaatttcgatgatttaaagactgtggaggaaaaatttgttggacaattaaagcagacgccgccaatatacgcagctttgaagatggatggcaaacccctgcatgaatatgctcgagaaggaaagcctttacctagagccattgagcccagacaagttactatttatgacttgaaggtgttttcagactctcttaaacgtgatcatgactatcccttattgaggcccactacagaagaagctgttgataccgtgaaaaatttgaatgcaaacatgctaaacgatgttttatacttttcaaaagaatatacagagaagcacggccttgattctgaggtggcaaaggtagaagaaccatttccgctgagtgaacaagaagagcaagaaatccaaaaagaaggagattcttatagggctccaaaattgcacttcaaagctaatgtgtcttctggaacatacataaggtccttagtgagcgacatcggtaaatctatgaggagctcatgttatatggtgaaattgatacgtttgcaacagcaggactggtctcttgaaaaaaataatgtgttccaattaacggattttactgaaagagacgagaaggtgtggagtaaggtactggagaaggttctagacgagggagcaactgttgatgttatagaagagctaaagaaagcagaaaaggaaataccagcggacgtgaaggaatgtatagtttcgagtgatcaacctggtgatgaggctacggctgaaacaattgaaactgctaacgccgaagaacattctaatacactaaaaagaaaaatcgaacaggtgtaa

SEQ ID NO: 9102 - DNA, 1212 bp, Artificial Sequence
  Description of Artificial Sequence: Synthetic polynucleotide
atgaatggaatatttgctattgagaagcctagcggtattacatccaatcagtttatgttgaagttgcaacatgctttaactaaaagtcaagtattctccaaggaaattcaaagggcaacagcggaaagaaagcagcaatatgaaaaacagacaggtaagaaggccagcaagaggaaacttcgtaaagtctccaaggtaaagatgggacacggaggcactttggatccgttggcctctggtgtcttggtaattgggattggagcgggcaccaaaaaacttgcaaattatctttctggcaccgttaaagtctatgaaagtgaagccttatttggtgtttccactacttctggagatgtagaaggtgagattttgtcccagaactccgttaaacatttaaatttcgatgatttaaagactgtggaggaaaaatttgttggacaattaaagcagacgccgccaatatacgcagctttgaagatggatggcaaaccccttcatgaatatgctagagaaggaaagcctttacctagagccattgagcccagacaagttactatttatgacttgaaggtgttttctgactctcttaaacgtgatcatgactatcccttattgaggcccactacagaagaagctgttgataccgtgaaaaatttgaatgcaaacatgttgaacgatgttttatacttttccaaagaatatacagagaagcacggccttgattctgaggtggcaaaggtagaagaaccatttccgttaagtgaacaagaagagcaagaaatccaaaaagaaggagattcttatagggctccaaaattgcacttcaaagctaatgtgtcttctggaacatacataaggtccttagtgagcgacatcggtaaatctatgaggagcagttgttatatggtgaaattgatacgtttgcaacagcaggactggtctcttgaaaaaaataatgtgttccaattaacggattttactgaaagagacgagaaggtgtggagtaaggtattggagaaggttttggacgagggagcaactgttgatgttatagaagagttgaagaaagcagaaaaggaaataccagcggacgtgaaggaatgtatagtttctagtgatcaacctggtgatgaggctacggctgaaacaattgaaactgctaacgccgaagaacattctaatacattaaaaagaaaaatcgaacaggtgtga

SEQ ID NO: 9103 - DNA, 1647 bp, Saccharomyces cerevisiae
atgatagtgtggcaagcactattcgtggtttactgcctatttaccacttctattcacggtttattccaagacttcaatcctttcgcaaataagaatatttccttaaagtttcccagcctaaatagatgggagaaaaacgttatggctactggtcaacaaacaatcatcaattcggatagcatttatgaatggaccccgatcttatctaacataacagcgggcaaaaaagacagttttgtatttaccattgacgcagaagcctccggttatgggtttgctcccacgtatgaagtgttaatgtttattagcggcaatatatgccaaatgcccatgaatagatcagatgtggatttaacaatatactactcttttaatgaaacggttttagagaacccaaatataggtcaaagtgcagtttttcaggatggctacatccaagcattagccatcagtccagtgcagtcttctagctcgaacgctacctccacgtattcaaatctttatgtggtcgctgagctagtgaattccactacggagcaacctctgtccagttccgacgcctctgaaaattgggaatatagactgagtatctctgagaacgatttggtttttcagtgggatgtaaggccttgggtagaggtcctggacactgatatgaattctgcattactatcaacggggaatgtcaccgcagacgccaaagtttatcacaattattcaatatatgatccatccttgtacgatctgtatgtttactcgtacgaagattctgttcaactaaaccaaaactataatttatctctttgtgctgtgaaaaatggaccatatttagtgtcttcccaaaatacatcaaatgcaacagttacgtcaaatagtacaaatcctttagagcgtactgacttggcgattcaaaaaaaaattacagaatatggtggtagcgtgacagaaatgttttacgtgacaggactgaatgcctcaacaacttatgtagcgtacctgacaaagaaaatcagtaatggtgatgggttgtcaagtgtgggcggcattttattttcacatgtttattttaccacaagaagtaccgatgtctgctctttgatctttggtttggacttctgcagtgacgtcgcttactctgttcctacatcctcattttctgtgggtaataaaactctcatggcgcagacatatgaccacattgcagaggcactatatgcaaattttagcaaagctctacagttaatatcctgtgacgcagacaaagacgcaagatattctccggtcatgacttgtgacgattgtgccgaagcttatcgtgattgggtatgtgcagtatcaattccgagatgcaccacgacgtcttcccaatactacatccacagagataaaagtcacaaccgtaatgattatttgaataaatttattaaacctttggatgactattacgaaattctaccttgtattgacatgtgctatacattagtacgaaattgcccaagcgattttcaattttcctgtccgaatgatcttactacggaagatcttctttatcaaagttacaatttctatatggacactgactactcaacctgtaattatataggtaactcatccttgatggtaattcatccattggacgatacgtag

SEQ ID NO: 9104 - DNA, 1647 bp, Artificial Sequence
  Description of Artificial Sequence: Synthetic polynucleotide
atgatagtgtggcaagcattattcgtggtttactgcttatttaccacttctattcacggtttattccaagacttcaatcctttcgcaaataagaatatttccttaaagtttcccagcttgaatagatgggagaaaaacgttatggctactggtcaacaaacaatcatcaattctgatagcatttatgaatggaccccgatcttatctaacataacagcgggcaaaaaagacagttttgtatttaccattgacgcagaagcctccggttatgggtttgctcccacgtatgaagtgttaatgtttattagcggcaatatatgccaaatgcccatgaatagaagtgatgtggatttaacaatatactactcttttaatgaaacggttttagagaacccaaatataggtcaaagtgcagtttttcaggatggctacatccaagcattagccatcagtccagtgcagtcttctagcagtaacgctacctccacgtattctaatctttatgtggtcgctgagttggtgaattccactacggagcaacctttatccagttccgacgcctctgaaaattgggaatatagattaagtatctctgagaacgatttggtttttcagtgggatgtaaggccttgggtagaggtcttggacactgatatgaattctgcattattatctacggggaatgtcaccgcagacgccaaagtttatcacaattattctatatatgatccatccttgtacgatttatatgtttactcctacgaagattctgttcaattgaaccaaaactataatttatctctttgtgctgtgaaaaatggaccatatttagtgtcttcccaaaatacaagtaatgcaacagttacgtccaatagtacaaatcctttagagcgtactgacttggcgattcaaaaaaaaattacagaatatggtggtagcgtgacagaaatgttttacgtgacaggattgaatgcctctacaacttatgtagcgtacttgacaaagaaaatcagtaatggtgatgggttgagcagtgtgggcggcattttattttctcatgtttattttaccacaagaagtaccgatgtctgctctttgatctttggtttggacttctgcagtgacgtcgcttactctgttcctacatcctctttttctgtgggtaataaaactctcatggcgcagacatatgaccacattgcagaggcattatatgcaaattttagcaaagctttacagttaatatcctgtgacgcagacaaagacgcaagatattctccggtcatgacttgtgacgattgtgccgaagcttatcgtgattgggtatgtgcagtatctattccgagatgcaccacgacgtcttcccaatactacatccacagagataaaagtcacaaccgtaatgattatttgaataaatttattaaacctttggatgactattacgaaattttaccttgtattgacatgtgctatacattagtaagaaattgcccaagcgattttcaattttcctgtccgaatgatcttactacggaagatcttctttatcaaagttacaatttctatatggacactgactactctacctgtaattatataggtaactcttccttgatggtaattcatccattggacgatacgtga

SEQ ID NO: 9105 - DNA, 1023 bp, Saccharomyces cerevisiae
atgtcgacaagtacagagaagaggagcaaagaaaaccttccatgggttgaaaaatacagacccgaaacgttggacgaagtgtacggacaaaatgaggtgatcaccacagttcgtaaatttgtagatgaaggtaaattgccacatcttctattctatgggcctccaggtaccggtaaaacttctacaattgttgctttggcacgtgagatatatggtaagaattactcgaacatggttttggagctgaatgcatccgatgacagaggtattgatgtggtgaggaatcaaattaaagactttgcctctacaagacaaatcttctctaaagggttcaagttaattatactggatgaagcagatgccatgaccaatgccgcacaaaatgcgttgagaagagttatagaacggtacaccaagaatacgcggttctgtgtattggccaattatgcgcataaacttacacctgcgttattgagtaggtgcacgagattcagatttcagcccttgccccaagaggccattgagcgtcggatagccaacgtcttggtgcatgagaagctgaagttgtctcctaatgcggagaaggccttaatagaactttctaatggggatatgagacgtgtgttaaacgttttgcagtcttgcaaagctactttagacaatcccgacgaggatgagatcagtgacgacgttatctatgaatgctgtggggcacccagaccaagtgacttaaaggcagtattgaagtcgatactggaggacgattggggtaccgcccactacacacttaataaggtacgcagtgccaagggtctcgcgttgatcgacctaatcgagggcatagtgaagatactggaagactacgaacttcaaaatgaggaaacaagagtgcatttgcttaccaaactggccgatatagagtactcgatatccaagggtggcaacgaccagattcagggcagcgcggtcattggcgccatcaaggccagcttcgagaacgaaactgttaaagccaacgtataa

SEQ ID NO: 9106 - DNA, 1023 bp, Artificial Sequence
  Description of Artificial Sequence: Synthetic polynucleotide
atgtctacaagtacagagaagaggagcaaagaaaaccttccatgggttgaaaaatacagacccgaaacgttggacgaagtgtacggacaaaatgaggtgatcaccacagttcgtaaatttgtagatgaaggtaaattgccacatcttttattctatgggcctccaggtaccggtaaaacttctacaattgttgctttggcacgtgagatatatggtaagaattactctaacatggttttggagttgaatgcatccgatgacagaggtattgatgtggtgaggaatcaaattaaagactttgcctctacaagacaaatcttctctaaagggttcaagttaattatattggatgaagcagatgccatgaccaatgccgcacaaaatgcgttgagaagagttatagaaagatacaccaagaatacgagattctgtgtattggccaattatgcgcataaacttacacctgcgttattgagtaggtgcacgagattcagatttcagcccttgccccaagaggccattgagcgtagaatagccaacgtcttggtgcatgagaagttgaagttgtctcctaatgcggagaaggccttaatagaactttctaatggggatatgagacgtgtgttaaacgttttgcagtcttgcaaagctactttagacaatcccgacgaggatgagatcagtgacgacgttatctatgaatgctgtggggcacccagaccaagtgacttaaaggcagtattgaagagtatattggaggacgattggggtaccgcccactacacacttaataaggtacgcagtgccaagggtctcgcgttgatcgacttgatcgagggcatagtgaagatattggaagactacgaacttcaaaatgaggaaacaagagtgcatttgcttaccaaattggccgatatagagtactctatatccaagggtggcaacgaccagattcagggcagcgcggtcattggcgccatcaaggccagcttcgagaacgaaactgttaaagccaacgtatga

SEQ ID NO: 9107 - DNA, 840 bp, Saccharomyces cerevisiae
atgtgtgaatacagcaaggctcttcatattctgctcaagtcgccagtaacggatgacataataaaattcttaacagacacaacattgagggttgttccttcaagcaactaccccacgcctcccggttctccaggagagaaacacctcacaaggctgccatcgctaatgacttttatcactagattggtcagatacaccaacgtctacacacccactctgctcaccgctgcgtgctatttgaacaaattaaagcgtattctgcccagggacgctactggtctcccctcgaccatccatcgcattttcttggcctgtttgatactgagtgctaagtttcacaatgactcttctcctttaaacaagcactgggctaggtacaccgatggtctctttacactagaggatatcaaccttatggaaaggcagttgttacagctgttgaactgggacctcagggtgaacacagaagatttgatcctagatctgcagcctctattagagcccatcaagcaagacttggcaagatccagcgaccaaaggaagagaattaacatgatgatgtccatgaacagaaggacttgtgctggcacgagtcctatcagatcaaacaacagattcaaactctacgaaaaacagagaaacgtgtcgatagcatccgatttaagttctgctactctagtcgacagttgtaatgatctaagaaggctaaaagatgtaaccaacatagcgaacaacacagtcgctaacacgaattacgtcaggacggtagagaaatggaacgacaatgtcaacaggcaaagttgggatctggaacagatcatgagtcaacatgggttttaa

SEQ ID NO: 9108 - DNA, 840 bp, Artificial Sequence
  Description of Artificial Sequence: Synthetic polynucleotide
atgtgtgaatacagcaaggctcttcatattttactcaagtctccagtaacggatgacataataaaattcttaacagacacaacattgagggttgttccttccagcaactaccccacgcctcccggttctccaggagagaaacacctcacaaggttaccatctttgatgacttttatcactagattggtcagatacaccaacgtctacacacccactttactcaccgctgcgtgctatttgaacaaattaaagcgtattttgcccagggacgctactggtctcccctctaccatccatcgcattttcttggcctgtttgatattgagtgctaagtttcacaatgactcttctcctttaaacaagcactgggctaggtacaccgatggtctctttacattagaggatatcaaccttatggaaaggcagttgttacagttattgaactgggacctcagggtgaacacagaagatttgatcttagatttacagcctttattagagcccatcaagcaagacttggcaagatccagcgaccaaaggaagagaattaacatgatgatgtccatgaacagaaggacttgtgctggcacgagtcctatcagatctaacaacagattcaaactctacgaaaaacagagaaacgtgtctatagcatccgatttaagttctgctactttggtcgacagttgtaatgatttgagaaggttgaaagatgtaaccaacatagcgaacaacacagtcgctaacacgaattacgtcaggacggtagagaaatggaacgacaatgtcaacaggcaaagttgggatttggaacagatcatgagtcaacatgggttttga

SEQ ID NO: 9109 - DNA, 1122 bp, Saccharomyces cerevisiae
atgttttccgctcaaaagccaatatatggcaatggagcaggcgtgaacatgggtggtggtggtccttcaactaataatccaggatctatgtccatgcctggggttccaacttcaatgggtccaggcatgaatcaacaaattccaagtggaggccccatgctaatgggcaatactccgaataataataatagcaatgaaaatggcgagaacaacggcaataacggcaataacggcggtaacgatgctaacgcaactcgaaacaatcccaacatggtcaataatagaggcgcagtgcatgctctagatgatcccaatgtataccactggatttgtcaattgacctacggccctcaaaaggaacaagcactgcttgaattaggtcgcaaaagagaacagtttgatgaccttgccgttgtgctttggtcttcctttggtgtaatgacctcattgctgaacgaaatcatttccgtatatcccatgctgcaacctcagatgctctctaacaatctatcaaatcgtgtatgcaacgctctagttcttctacagtgtgttgcatctcacccagagacaaaacatctctttttacaggcccatattcctctctttcttttccccttcctaaatactacctccaggcaaagaacttttgagtacttgagattgacttcattaggtgtgataggcgcattggtcaaaaatgactcacaagacgtaataacgtttttgctaagaaccgatatcgtgccgttatgcctaaggatcatggaatcttcttctgagctttccaagacagtcgccattttcattttacagaaaatcctactagatgacgttggattgcaatacatctgtgccaccttggaaaggttctacgccgtaactaatgtcttaaaagatatggttgagcacttgaccgtgagcacaccaccgggacgactactgaaacatatcattagatgctacttaagattaagcgacgatctcgaagcacgcaggctattgaaaatagtcttacctgccaaactgagagataacacttttacggaagtactaagagacgacgtcgggtccaagagatgtctggcacaattgctactgacattaaacgaagaaacctcatga

SEQ ID NO: 9110 - DNA, 1122 bp, Artificial Sequence
  Description of Artificial Sequence: Synthetic polynucleotide
atgttttccgctcaaaagccaatatatggcaatggagcaggcgtgaacatgggtggtggtggtccttccactaataatccaggatctatgtccatgcctggggttccaacttctatgggtccaggcatgaatcaacaaattccaagtggaggccccatgttaatgggcaatactccgaataataataatagcaatgaaaatggcgagaacaacggcaataacggcaataacggcggtaacgatgctaacgcaactagaaacaatcccaacatggtcaataatagaggcgcagtgcatgctttagatgatcccaatgtataccactggatttgtcaattgacctacggccctcaaaaggaacaagcattacttgaattaggtcgcaaaagagaacagtttgatgaccttgccgttgtgctttggtcttcctttggtgtaatgacctctttgttgaacgaaatcatttccgtatatcccatgttacaacctcagatgctctctaacaatttatccaatcgtgtatgcaacgctttggttcttttacagtgtgttgcatctcacccagagacaaaacatctctttttacaggcccatattcctctctttcttttccccttcttgaatactacctccaggcaaagaacttttgagtacttgagattgacttctttaggtgtgataggcgcattggtcaaaaatgactctcaagacgtaataacgtttttgttaagaaccgatatcgtgccgttatgcctcaggatcatggaatcttcttctgagctttccaagacagtcgccattttcattttacagaaaatcttattagatgacgttggattgcaatacatctgtgccaccttggaaaggttctacgccgtaactaatgtcttaaaagatatggttgagcacttgaccgtgagcacaccaccgggaagattattgaaacatatcattagatgctacttaagattaagcgacgatctcgaagcacgcaggttattgaaaatagtcttacctgccaaattgagagataacacttttacggaagtattaagagacgacgtcgggtccaagagatgtttggcacaattgttgttgacattaaacgaagaaacctcttga

SEQ ID NO: 9111 - DNA, 2808 bp, Saccharomyces cerevisiae
atgtctgcacatacttacaaaaagtttgaaaactcgacctcgggcgatttacctgataaaatgaccatttatcaggattgtatgaacacgtttaacgaatcacctgtcaattccaagagatgtcgtttattgatttctcgcttgctgagactcttggcccagggcgaaaccttcccacagaatgaagcaactgcattatttttctctatctccaaattatttcaacaccagaacgatcctttaaggcaggctgtttatttggcaatcaaggaattgagtggcatttcggaggatgtgttgatggcaacctcttcaatcatgaaggacgttcaaaacggttccgatttgattaagcctgacgctattagatcgctgacttatgtcttggatgaatctactgctttttccgctgaaaggttattaaaaagtgccgtggtaagtagacatccttcaatatcctcagcagcattatgtacttcttatcatttgctgcccatttcagaagtcactatcagaagattcaccaatgaaactcaagaagctgttttggatttgaaacaatttccaaatcaacacggtaatagcgaatattatccaaactccacttatatttctcaatatcatgctcttgggttgctttatcaactgaagaaaactgataaaatggcgttactaaaattggttagacatttctctgaaaacaattctatgaaaaatcaattggccaaggtagaattggtcaagattgtcaacgatttgatttatagggatcctcaattatttagtcaattcaggccacttttgtctgattggctatccaacaagttcgaatctgttcagttggaaacggcgaaattgattacttctttcgctactcgcaattcccgcttagtggctcccgagttatatgcggcagctatcagtgctttacagtccttactgaccgttcctcgtgtttcttctagattcgctgcattgagaatcttaaatagaatatccatggtttcaccagaaaagattgttgtttgtaatcctgaactagaatctttaattaatgattctaatagaaacatttctacttatgcaatcaccactttattgaagacaggaacttccaaaaatatttcatctctgatttcgactattactaattttatccatgatgtcagtgatgactttaagatcattattattgacgccgttcgtacgttgtctttgaacttcccacaggaatggaagtcaattttgaacttcttaatcgatgttttgaaaaatagtgaaggtggattcaaatttaaaaacagtattgtcgaagcattaatcgatattgtttcatttgttccacagtctaaagaactcgccttagaaaacttgtgtgatttcatcgaggattgtgaattcaacgaaatactagtgagaatactacatcttttgggtaaagaaggtccatctgccccaaatccatcattatatgttagacatatttataacagagtggtgttggaaaattctattattagatctgctgccgttgtagctttatctaagtttgctttgacgaagaacgatcctaccttatatgagtcaatcataagtttgttaaagagaatcgctaatgataaagacgatgaagtcagagacagagccaccattgcactagaattcattgattcggctaggaataaagatgatgttatagcacaaaatctaatcgaatccaaatatttttacgatattccatcattagagtcaaaattaagttcttacatttcctcaaatactgattcatttgcaactgcatttgatgtgaatcaagttcgtaagtttactgaggatgaaatgaaggcaataaatctgaagagaaagcaagaacaaattttcaatcaaaagtctgaaaccactttggatactacaccagaggcagagagtgttccagaaaaaagagctgacgctaattcatttgctggtccaaacttggacgaccaccaagaagatctactagctactaagtacgctgacgaattgctatccattgaacaaattaaaccatttggtcaattagtaaatagttctagggctatctcattaactgagccagaagcagaattcgttgtacgtggtgtcaaacatctcttcaaagacaatgttgttttacaatttaatattacgaatactctgacggatattgccctagacaatgtttctgtagtctgtacccctgaaatttctgatgaagctgaattagaagagctattcaccctacaagtggacagattattaccatccgaggaagcagcttgttacgttgcattcaaaaaacttgatgaaattgtaatggaaggtttcttgaacaacttaacattcactacaaaagaaataaaccctgacactaatgagccatttgatggtgatgaaggtttccaagatgaatatgaaattgactcgattttcttgaatgctggtgattatgttaagagttctttcactggtaacttctccgctacatttgatgagttgccatgcgaagaagttgctgttttcaacattcaagaagatttatccatacaagaagtagtagataagattattttgaacagtagctgcttaccggtggaaagtacccaatttgctccaagtgattcaaactcccacaccttgaaattatttggtaagagtgctttaactggatctaaagtagccctacagattaagatgatcaagagttcgaaaggtcttgctttgaaagttcatggtaaaggtgaagacagcttattatgctctgatctggtgaatggtctaatgcagtaa

SEQ ID NO: 9112 - DNA, 2808 bp, Artificial Sequence
  Description of Artificial Sequence: Synthetic polynucleotide
atgtctgcacatacttacaaaaagtttgaaaactctacctctggcgatttacctgataaaatgaccatttatcaggattgtatgaacacgtttaacgaatctcctgtcaattccaagagatgtcgtttattgatttctcgcttgttaagactcttggcccagggcgaaaccttcccacagaatgaagcaactgcattatttttctctatctccaaattatttcaacaccagaacgatcctttaaggcaggctgtttatttggcaatcaaggaattgagtggcatttctgaggatgtgttgatggcaacctcttctatcatgaaggacgttcaaaacggttccgatttgattaagcctgacgctattagatctttgacttatgtcttggatgaatctactgctttttccgctgaaaggttattaaaaagtgccgtggtaagtagacatccttccatatcctctgcagcattatgtacttcttatcatttgttgcccatttctgaagtcactatcagaagattcaccaatgaaactcaagaagctgttttggatttgaaacaatttccaaatcaacacggtaatagcgaatattatccaaactccacttatatttctcaatatcatgctcttgggttgctttatcaattgaagaaaactgataaaatggcgttattgaaattggttagacatttctctgaaaacaattctatgaaaaatcaattggccaaggtagaattggtcaagattgtcaacgatttgatttatagggatcctcaattatttagtcaattcaggccacttttgtctgattggttatccaacaagttcgaatctgttcagttggaaacggcgaaattgattacttctttcgctactcgcaattcccgcttagtggctcccgagttatatgcggcagctatcagtgctttacagtccttattaaccgttcctcgtgtttcttctagattcgctgcattgagaatcttaaatagaatatccatggtttctccagaaaagattgttgtttgtaatcctgaattggaatctttaattaatgattctaatagaaacatttctacttatgcaatcaccactttattgaagacaggaacttccaaaaatatttcttctttgatttctactattactaattttatccatgatgtcagtgatgactttaagatcattattattgacgccgttcgtacgttgtctttgaacttcccacaggaatggaagtctattttgaacttcttaatcgatgttttgaaaaatagtgaaggtggattcaaatttaaaaacagtattgtcgaagcattaatcgatattgtttcttttgttccacagtctaaagaactcgccttagaaaacttgtgtgatttcatcgaggattgtgaattcaacgaaatattggtgagaatattacatcttttgggtaaagaaggtccatctgccccaaatccatctttatatgttagacatatttataacagagtggtgttggaaaattctattattagatctgctgccgttgtagctttatctaagtttgctttgacgaagaacgatcctaccttatatgagagtatcataagtttgttaaagagaatcgctaatgataaagacgatgaagtcagagacagagccaccattgcattggaattcattgattctgctaggaataaagatgatgttatagcacaaaatttgatcgaatccaaatatttttacgatattccatctttagagagtaaattaagttcttacatttcctctaatactgattcttttgcaactgcatttgatgtgaatcaagttcgtaagtttactgaggatgaaatgaaggcaataaatttgaagagaaagcaagaacaaattttcaatcaaaagtctgaaaccactttggatactacaccagaggcagagagtgttccagaaaaaagagctgacgctaattcttttgctggtccaaacttggacgaccaccaagaagatttattagctactaagtacgctgacgaattgttatccattgaacaaattaaaccatttggtcaattagtaaatagttctagggctatctctttaactgagccagaagcagaattcgttgtacgtggtgtcaaacatctcttcaaagacaatgttgttttacaatttaatattacgaatactttaacggatattgccttggacaatgtttctgtagtctgtacccctgaaatttctgatgaagctgaattagaagagcttttcaccttacaagtggacagattattaccatccgaggaagcagcttgttacgttgcattcaaaaaacttgatgaaattgtaatggaaggtttcttgaacaacttaacattcactacaaaagaaataaaccctgacactaatgagccatttgatggtgatgaaggtttccaagatgaatatgaaattgacagtattttcttgaatgctggtgattatgttaagagttctttcactggtaacttctccgctacatttgatgagttgccatgcgaagaagttgctgttttcaacattcaagaagatttatccatacaagaagtagtagataagattattttgaacagtagctgcttaccggtggaaagtacccaatttgctccaagtgattccaactcccacaccttgaaattatttggtaagagtgctttaactggatctaaagtagccttgcagattaagatgatcaagagttctaaaggtcttgctttgaaagttcatggtaaaggtgaagacagcttattatgctctgatttggtgaatggtttgatgcagtga

SEQ ID NO: 9113 - DNA, 858 bp, Saccharomyces cerevisiae
atggatgctgatgaattggaattgaaaggtcatttgaaaaaattgaaaaaagaagaattgcttagaaggaaacagttaaaagagagtaatcttcagaaaagagagcttgaatataataatgcctcaaaaaatacttcaatatatatttctggtcttcccacagacaaaacaacgaaagaaggactcactgagcagttttgcaagtatggaatgataagaaccaatcgagatggggaacccctttgcaagctatatgtgaatgataaaggcgctttcaaaggggatgccttgatcacttattccaaggaagaaagtgttacattagcaatcgaaatgatgaacgagtcgatcttcctgggaaaacagatcagggtcgaaagagcccaatttcaaaacaaggaaggtgacaatatgcacgggaaagaaaatgatttaaaggagttcaacggacctgagcctccaataaagaggctaaaaaaagcgaagtctgaaggggagggggaagtaatagattacaatgacgatgaaagcctagcaaaagctgatcgaacggtgatatttgccaacgtattcaatatttacaaatcatacacaaatgatgatataaatgatattcaggaagatcttttggaaggctgtgaagagataggtcaagtagacagtatatctgtatctcccaataagggggaagcgacggtcgtctttaagaacaataaagttgcattgcaatgttgcaaaatcatgaccggacgttattttgatgggcaaaagttgcttgctttcatttctggagatgagaacacttcaagcacaagtgacaagaatgaggacagcgaagtggaagatgaccttatatag

SEQ ID NO: 9114 - DNA, 858 bp, Artificial Sequence
  Description of Artificial Sequence: Synthetic polynucleotide
atggatgctgatgaattggaattgaaaggtcatttgaaaaaattgaaaaaagaagaattgcttagaaggaaacagttaaaagagagtaatcttcagaaaagagagcttgaatataataatgcctccaaaaatacttccatatatatttctggtcttcccacagacaaaacaacgaaagaaggactcactgagcagttttgcaagtatggaatgataagaaccaatagagatggggaacccctttgcaagctttatgtgaatgataaaggcgctttcaaaggggatgccttgatcacttattccaaggaagaaagtgttacattagcaatcgaaatgatgaacgagagtatcttcttgggaaaacagatcagggtcgaaagagcccaatttcaaaacaaggaaggtgacaatatgcacgggaaagaaaatgatttaaaggagttcaacggacctgagcctccaataaagaggttgaaaaaagcgaagtctgaaggggagggggaagtaatagattacaatgacgatgaaagcttagcaaaagctgatagaacggtgatatttgccaacgtattcaatatttacaaatcttacacaaatgatgatataaatgatattcaggaagatcttttggaaggctgtgaagagataggtcaagtagacagtatatctgtatctcccaataagggggaagcgacggtcgtctttaagaacaataaagttgcattgcaatgttgcaaaatcatgaccggacgttattttgatgggcaaaagttgcttgctttcatttctggagatgagaacacttccagcacaagtgacaagaatgaggacagcgaagtggaagatgaccttatatga

SEQ ID NO: 9115 - DNA, 969 bp, Saccharomyces cerevisiae
atgaaagcggaaaggcaaacaggattaagaaatagttttacaaccgtaatcggtcgcaaactaataaacacttttgttccgtccatgatgttaactagcgtagctggtaacgatatttttttccgaggtttattcaaatcgccggtattagcatttcaaagttatcgttatgtttcgattttgggacaattgaaaccgtcagatggttctacaaagtctttcaaaagacttgggcgtggtccttccagcggtttaggtaagacatcagggcgtggtcaaaagggtcaaaaggcgcgtggtaaagtaaaatcgtggtttgaaggtggtcaaactccaatttacaagctatttcctaaaattggatttaccaacgttggcgccaaaccattaaaggaattaaacttgaaacgcattcaatggtttcatgataaaaataggcttcatttgcaaccaggcgaggttttagacatgaataagatgagaaagcttggtctggtaactggtcccataaagtacggagttaaaattctagccagcggaaagttccactacaatctaccgattgctttggaggcttctagagcatccgctaaggctattgcggctattgaaaaagcaggaggtaagtttacagctcgttactacacaccgttgggtctaagggcacatctcaacccccagtggtttcttgagaagaggggaagagtaccactacaggctagacccacgaaaagaagggatattgatttctatagtaaagaagagaaaagaggttacctagtaatggaaaaagataaactcttacaagatatcaaagaagctcaaaataagggttctagacactttttaaaacagaatgtaaaaaagagctcattagaaatagagctagaagaactgtctccagagaaggattgggtgccagttgtgtctaattctaaagtcatgaacatcaaggctttggaccactaa

SEQ ID NO: 9116 - DNA, 969 bp, Artificial Sequence
  Description of Artificial Sequence: Synthetic polynucleotide
atgaaagcggaaaggcaaacaggattaagaaatagttttacaaccgtaatcggtcgcaaattgataaacacttttgttccgtccatgatgttaactagcgtagctggtaacgatatttttttcagaggtttattcaaatctccggtattagcatttcaaagttatcgttatgtttctattttgggacaattgaaaccgagtgatggttctacaaagtctttcaaaagacttgggcgtggtccttccagcggtttaggtaagacatctgggcgtggtcaaaagggtcaaaaggcgcgtggtaaagtaaaaagttggtttgaaggtggtcaaactccaatttacaagttatttcctaaaattggatttaccaacgttggcgccaaaccattaaaggaattaaacttgaaacgcattcaatggtttcatgataaaaataggcttcatttgcaaccaggcgaggttttagacatgaataagatgagaaagcttggtttagtaactggtcccataaagtacggagttaaaattttagccagcggaaagttccactacaatttaccgattgctttggaggcttctagagcatccgctaaggctattgcggctattgaaaaagcaggaggtaagtttacagctcgttactacacaccgttgggtttgagggcacatctcaacccccagtggtttcttgagaagaggggaagagtaccattacaggctagacccacgaaaagaagggatattgatttctatagtaaagaagagaaaagaggttacttggtaatggaaaaagataaactcttacaagatatcaaagaagctcaaaataagggttctagacactttttaaaacagaatgtaaaaaagagctctttagaaatagagttagaagaattatctccagagaaggattgggtgccagttgtgtctaattctaaagtcatgaacatcaaggctttggaccactga

SEQ ID NO: 9117 - DNA, 1512 bp, Saccharomyces cerevisiae
atgcacctagatctcatacacaagtccttcatcttagtgtggctcatatatatacgagccgcgttggctgaccaattcacatataaagcttgctattcagctagtgatatacgaaaattggggttgacttacaagggtgtttacgagtatcaatcagtttcctactgtcaaaatgaatgccctggtcaggctgtcgttgctcttttcaacggtacaggttgctactgtggtggttccgtagctcagttacagtctttgacgcaggtagattcgagcaaatgtgatgtttcgtgtgctggctggccctaccaaaattgtggtggttcttctgccatgaacgtttatatcaataacgctgcttctaccgcggactcaacttcatctactgctacctcaacatcgacaacatcttcatcaagcacaagtgttagttcaaaaacgtccacgaaattggacacgaaaacttcaactagttcttctgctacgcactcatcctcttcctcgtctacaacctccactaccacttcctcttcagagacaactacttcctcctcttcttcatcctcttcctcttctacgtctactacttctactacttctactacctctagtactacttctacttcttcttctccttccaccacttcctctagcacttctgcctcttccagttcagaaacgtcctctacgcaggcaacttcttcatccaccacatcgacctcatcctcaacttcgacagcaacggtcacttctaccccctcatcgacttcaataggtacttccacgcattacactacccgtgtggtgacgcagtccgtggtttctcaagctaaccaacaagcaagcacgatctttaccaccaggacctctgtttatgcaacagtatcgtctacgtcctcctctactagttctctcttaaacgggaaatcgagctcgtccaagagcaaaggcttgagtggtggcgccatcgcaggtgtcgtagtaggtgtggtttgtggtacagttgccttgttggctctggcgttattctttttcgtatggaaaaaacgtcgccaatcttctcagcatgtggacttggaagagacaaagcagtaccagccgtactcactgggtgatgctgacgctaaccctgttattccaccgtctgcttcgagcactaactggcacataccctctaggaataatacagcattgtccaagaatacagcgtctacttttgccacttatgatctgccgacaagggcgccgggcggcagagattctattattactggtgatgcacataatatcagcaaaagaagtcactttccctcggtagtgtacgaggagcctccttcgatctataacgggaaccaaaggttcagtgctacttcgctgcccgatatgatggaagaaagacaactacacattgtcaaccccgataatgtgagttcaaatattgggagtaatgtctcagatggtgatgatgattacgatgatgcaaaggattccaataatagttctttgcgctga

SEQ ID NO: 9118 - DNA, 1512 bp, Artificial Sequence
  Description of Artificial Sequence: Synthetic polynucleotide
atgcacttggatctcatacacaagtccttcatcttagtgtggctcatatatataagagccgcgttggctgaccaattcacatataaagcttgctattctgctagtgatataagaaaattggggttgacttacaagggtgtttacgagtatcaatctgtttcctactgtcaaaatgaatgccctggtcaggctgtcgttgctcttttcaacggtacaggttgctactgtggtggttccgtagctcagttacagtctttgacgcaggtagattctagcaaatgtgatgtttcttgtgctggctggccctaccaaaattgtggtggttcttctgccatgaacgtttatatcaataacgctgcttctaccgcggactctacttcttctactgctacctctacatctacaacatcttcttctagcacaagtgttagttctaaaacgtccacgaaattggacacgaaaacttctactagttcttctgctacgcactcttcctcttcctcttctacaacctccactaccacttcctcttctgagacaactacttcctcctcttcttcttcctcttcctcttctacgtctactacttctactacttctactacctctagtactacttctacttcttcttctccttccaccacttcctctagcacttctgcctcttccagttctgaaacgtcctctacgcaggcaacttcttcttccaccacatctacctcttccagcacttctacagcaacggtcacttctaccccctcttctacttccataggtacttccacgcattacactacccgtgtggtgacgcagtccgtggtttctcaagctaaccaacaagcaagcacgatctttaccaccaggacctctgtttatgcaacagtatcttctacgtcctcctctactagttctctcttaaacgggaaaagtagctcttccaagagcaaaggcttgagtggtggcgccatcgcaggtgtcgtagtaggtgtggtttgtggtacagttgccttgttggctttggcgttattctttttcgtatggaaaaaacgtcgccaatcttctcagcatgtggacttggaagagacaaagcagtaccagccgtactctttgggtgatgctgacgctaaccctgttattccaccgtctgcttctagcactaactggcacataccctctaggaataatacagcattgtccaagaatacagcgtctacttttgccacttatgatttaccgacaagggcgccgggcggcagagattctattattactggtgatgcacataatatcagcaaaagaagtcactttccctctgtagtgtacgaggagcctccttccatctataacgggaaccaaaggttcagtgctacttctttacccgatatgatggaagaaagacaattacacattgtcaaccccgataatgtgagtagtaatattgggagtaatgtctctgatggtgatgatgattacgatgatgcaaaggattccaataatagttctttgcgctga

SEQ ID NO: 9119 - DNA, 588 bp, Saccharomyces cerevisiae
atgtccgggtcgttaaaatctctagacaagaaaatagctaaaagaaggcaggtgtataagcccgtgctagacaatccgttcacaaacgaagcacatatgtggccgcgcgtgcatgatcagccattgatttggcagctgctgcaatcctctatcataaataagttgattcacattcaatcgaaggagaactacccttgggagctgtatacagatttcaatgaaattgtgcagtatttgagcggcgctcacggaaacagcgacccagtatgtctatttgtgtgcaataaggaccctgatgtaccgcttgtgctcttgcagcaaatcccgctattatgctatatggcgcccatgacggttaaactggtgcagttgcccaagagtgccatggataccttcaagtcggtttctaaatatggaatgctgctgctgcggtgcgacgatagggtcgacaagaaattcgtatcgcagatccagaagaacgttgatctgcttcagtttccctggttaaatgctatcaagtatcggcccacatctgtcaagctgttgaaaactacagtgccaattgtctcgaagaagaggcaaaagtag

SEQ ID NO: 9120 - DNA, 588 bp, Artificial Sequence
  Description of Artificial Sequence: Synthetic polynucleotide
atgtccgggtctttaaaatctttggacaagaaaatagctaaaagaaggcaggtgtataagcccgtgcttgacaatccgttcacaaacgaagcacatatgtggccgcgcgtgcatgatcagccattgatttggcagttattacaatcctctatcataaataagttgattcacattcaatccaaggagaactacccttgggagttgtatacagatttcaatgaaattgtgcagtatttgagcggcgctcacggaaacagcgacccagtatgtttatttgtgtgcaataaggaccctgatgtaccgcttgtgctcttgcagcaaatcccgttgttatgctatatggcgcccatgacggttaaattagtgcagttgcccaagagtgccatggataccttcaagtctgtttctaaatatggaatgttattattaagatgcgacgatagggtcgacaagaaattcgtatctcagatccagaagaacgttgatttacttcagtttccctggttaaatgctatcaagtatagacccacatctgtcaagttgttgaaaactacagtgccaattgtctccaagaagaggcaaaagtga

SEQ ID NO: 9121 - DNA, 462 bp, Saccharomyces cerevisiae
atggttgtcttgaatccaaataactggcattgggtggataaaaacaccttaccttggtctaaggactacttgaacggtaaattaacgagtttgtccactgtttcctctgatgggaagagcaaaattgagttaacccaggtgagtagcatcaccggtgactccaacgtatctcaaaggaagggcaagccgatttgctactttgacttacagttgtcgatgaacgtcaaagtgacaaatttggatactaataaggacgacgaggatgatgacggcatacttgcggacgggaaactagaaattccagagtttatgcatgacgagtctgatattccgattttgtcgcaagggtttgatgcttttgatggattggttaggtctgaatttgtccctaaagtagtggaaacgctactaaaataccaagatgacttgattaaagaacactcaaaggatatacaagtttga

SEQ ID NO: 9122 - DNA, 462 bp, Artificial Sequence
  Description of Artificial Sequence: Synthetic polynucleotide
atggttgtcttgaatccaaataactggcattgggtggataaaaacaccttaccttggtctaaggactacttgaacggtaaattaacgagtttgtccactgtttcctctgatgggaagagcaaaattgagttaacccaggtgagtagcatcaccggtgactccaacgtatctcaaaggaagggcaagccgatttgctactttgacttacagttgtccatgaacgtcaaagtgacaaatttggatactaataaggacgacgaggatgatgacggcatacttgcggacgggaaattagaaattccagagtttatgcatgacgagtctgatattccgattttgtctcaagggtttgatgcttttgatggattggttaggtctgaatttgtccctaaagtagtggaaacgttattgaaataccaagatgacttgattaaagaacactccaaggatatacaagtttga

SEQ ID NO: 9123 - DNA, 1317 bp, Saccharomyces cerevisiae
atggtatcagctttgaatcccagaactacagagtttgaatttggtgggctgattggtgccttaggcatcagcatagggctgcctgttttcactatcatcttgaatcaaatgataaggcccgattattttattaagggatttttccagaatttcgatatagttgagctttggaacggtatcaagccattgcgctactatctgggcaatcgtgaattatggactgtctattgcctgtggtatggaatactggcagttttggacgtcattttaccgggcagagtcatgaagggtgttcagttaagggatggttcgaagctttcgtataagatcaatggaattgccatgtctacaactttggtcttagttttggctatcagatggaaattgactgatggacaattgcctgaattgcaatatctgtatgaaaatcacgttagtttatgcataatatctattttgttttcgttctttttggcgacgtactgctatgttgccagcttcataccattgatcttcaagaaaaatggtaatggcaaaagggaaaagatcttagcactaggtggaaattcaggaaacatcatttacgattggtttattggtagagaactgaaccctcgtctcggcccattagatatcaagatgttttcagagttgagacccggcatgttgttatggttactgatcaatctttcctgtctgcatcaccattacctgaagactggtaaaatcaacgatgcattggtcttggttaatttcttgcaaggattttacattttcgatggagtactaaacgaggaaggtgtattaaccatgatggatatcactacagatgggtttggtttcatgctagcgtttggtgacttaagtttagttccattcacctactcattacaagcgcgttacttgagtgtttcccctgtggaattgggatgggtgaaagttgtcggtatattagccataatgtttttgggtttccacatcttccactcggcaaataagcaaaaatctgagtttagacaaggtaaattagaaaatctaaaaagtattcagacaaagcgtggtacaaagttattatgtgacgggtggtgggctaaatcacagcatatcaattactttggcgattggctgatttcattaagttggtgtttggccacctggttccaaactcccttgacatattactactcgttgtacttcgccacgttgttattacaccgtcaacaacgtgatgagcacaagtgccgcctgaaatatggcgaaaattgggaagaatacgaaagaaaagttccttacaagatcattccatatgtttattaa

SEQ ID NO: 9124 - DNA, 1317 bp, Artificial Sequence
  Description of Artificial Sequence: Synthetic polynucleotide
atggtatccgctttgaatcccagaactacagagtttgaatttggtgggttgattggtgccttaggcatcagcatagggttgcctgttttcactatcatcttgaatcaaatgataaggcccgattattttattaagggatttttccagaatttcgatatagttgagctttggaacggtatcaagccattgcgctactatttgggcaatcgtgaattatggactgtctattgcctctggtatggaatattggcagttttggacgtcattttaccgggcagagtcatgaagggtgttcagttaagggatggttccaagctttcctataagatcaatggaattgccatgtctacaactttggtcttagttttggctatcagatggaaattgactgatggacaattgcctgaattgcaatatttgtatgaaaatcacgttagtttatgcataatatctattttgttttctttctttttggcgacgtactgctatgttgccagcttcataccattgatcttcaagaaaaatggtaatggcaaaagggaaaagatcttagcattgggtggaaattctggaaacatcatttacgattggtttattggtagagaattgaaccctcgtctcggcccattagatatcaagatgttttctgagttgagacccggcatgttgttatggttattgatcaatctttcctgtttgcatcaccattacttgaagactggtaaaatcaacgatgcattggtcttggttaatttcttgcaaggattttacattttcgatggagtattgaacgaggaaggtgtattaaccatgatggatatcactacagatgggtttggtttcatgttggcgtttggtgacttaagtttagttccattcacctactctttacaagcgcgttacttgagtgtttcccctgtggaattgggatgggtgaaagttgtcggtatattagccataatgtttttgggtttccacatcttccactctgcaaataagcaaaaatctgagtttagacaaggtaaattagaaaatttgaaaagtattcagacaaagcgtggtacaaagttattatgtgacgggtggtgggctaaatctcagcatatcaattactttggcgattggttgatttctttaagttggtgtttggccacctggttccaaactcccttgacatattactactctttgtacttcgccacgttgttattacaccgtcaacaacgtgatgagcacaagtgccgcttaaaatatggcgaaaattgggaagaatacgaaagaaaagttccttacaagatcattccatatgtttattga

SEQ ID NO: 9125 - DNA, 1986 bp, Saccharomyces cerevisiae
atgagcggttttaaatgctatttgcaattgggtgacaggctctctcaaatatggctaaataagtatactttggttttgctgctagcaatgctgaagcttctgtttttctccaaatccatacaacatgcgatagaagtctcggaaacgtatattttgtccaattgttacagtattgattcactatactccaagatgacagacaacacgccgcactatttaggtatcatggggaattatcttatcgagaagggtatggaggagactgttaaagctacgctagagacgttatcacttatagtatatgcgagcgaggggctggtaaactttgccattgacctgtatttgggcacttatgcctgtttgattgttagtgccgttgatggtaccgtggacgttgctactaacattacagaaaaactgattagcttagtcaatgatacagtttcaagtgtggctaatgaattggatacgggcttgaatgacatctccaaaataatcaataaagtgatcaaggccgcatccaaagtagagaattttttcacaggtgatgacgatgacagtaacatgacgtcgtcaatcaaaagcgtcaacttaaccatatctgcgcttcacaatttatacattccttcctcaatcaacgataagcttgaagagttatcggcaaagacgccggactttgcccaggttaagaatacaaccaagaacctgatctcggttcccttcaatgaagttcggaagaatatcaaggccgtgaatgccagcaatataatcggagatacctccgttttgtacgtacctcccgtgtcccttgacaacagtactgggatttgctcatccaatcaatcagaaattttggccttttattccatcttgggacatgtcctgaaaatagccaccgtagtgtgcattaccgtattgatatgcttcgctgttggtgcgatggcgcccgttgcatggaatgaaatcaagctctggaggcgcctttgcggaatgagagaccattacatgctgagcaggcaagattcgtatacgtccttttccagtgaaaacacgcacgaattgaaagatccatttagagatcctcctatacaaaatggccaatatgatgtcattgcaagctatcagcagtgctttcaaacatggaacacaagaatagcaggctggatgacaaatcttgttacctttggaaaatcaccagagaacattgacccaaagactaaacaaaaaatagaatgggtagtggcttatatgacctccgaaagagcactgtgtgttcttggaattggacttttgggaattttagtgtgcatatgccaatttgtcatgatagcactgttaaaacacaagataagccattcattgacttctaatgatggtgacggcgttcaaaatttgctgaagtctagcactgccgtcgatatagagaaccaaatgagcctttggagcgttcagactaataaatatataaatactacggagaccaatatcaatcaggaagtattcgggtggataaacacgacaacactttctgtgaacaatacagtggccaccatgatctctgatatagacacaactttagcagatgtattcaatggaacactgctatataacccaatgaaaaccgtggtcggatgtgccattgaaaataagctctacacaatagagaaggcaatgacgtggattcacgacaaggctcagctgcatatcccgagaattaatgggacacaaatcaagcaagctctggcaaagcaaaccgacaacagcactatacccactgcaagctccacttctgccgccacagaaaacttactggagaaccttgtgaatgatatgagagaaggacttttaaaaattctccgagcttaccaccgtataactctgggagaactcacggtagccttggtcattcttgcggtgtggctcgtacaattgcccatagctctggtaattctccgattacgtcttcgcaaagccacctttgactga

SEQ ID NO: 9126 - DNA, 1986 bp, Artificial Sequence
  Description of Artificial Sequence: Synthetic polynucleotide
atgagcggttttaaatgctatttgcaattgggtgacaggctctctcaaatatggttaaataagtatactttggttttgttattggcaatgttgaagcttttatttttctccaaatccatacaacatgcgatagaagtcagtgaaacgtatattttgtccaattgttacagtattgattctttgtactccaagatgacagacaacacgccgcactatttaggtatcatggggaattatcttatcgagaagggtatggaggagactgttaaagctacgttggagacgttatctcttatagtatatgcgagcgaggggttggtaaactttgccattgacctttatttgggcacttatgcctgtttgattgttagtgccgttgatggtaccgtggacgttgctactaacattacagaaaaattgattagcttagtcaatgatacagtttctagtgtggctaatgaattggatacgggcttgaatgacatctccaaaataatcaataaagtgatcaaggccgcatccaaagtagagaattttttcacaggtgatgacgatgacagtaacatgacgtcttctatcaaaagcgtcaacttaaccatatctgcgcttcacaatttatacattccttcctctatcaacgataagcttgaagagttaagtgcaaagacgccggactttgcccaggttaagaatacaaccaagaacttgatctccgttcccttcaatgaagttagaaagaatatcaaggccgtgaatgccagcaatataatcggagatacctccgttttgtacgtacctcccgtgtcccttgacaacagtactgggatttgctcttccaatcaaagtgaaattttggccttttattccatcttgggacatgtcttgaaaatagccaccgtagtgtgcattaccgtattgatatgcttcgctgttggtgcgatggcgcccgttgcatggaatgaaatcaagctctggaggcgcctttgcggaatgagagaccattacatgttaagcaggcaagattcttatacgtccttttccagtgaaaacacgcacgaattgaaagatccatttagagatcctcctatacaaaatggccaatatgatgtcattgcaagctatcagcagtgctttcaaacatggaacacaagaatagcaggctggatgacaaatcttgttacctttggaaaatctccagagaacattgacccaaagactaaacaaaaaatagaatgggtagtggcttatatgacctccgaaagagcattatgtgttcttggaattggacttttgggaattttagtgtgcatatgccaatttgtcatgatagcattattaaaacacaagataagccattctttgacttctaatgatggtgacggcgttcaaaatttgttgaagtctagcactgccgtcgatatagagaaccaaatgagcctttggagcgttcagactaataaatatataaatactacggagaccaatatcaatcaggaagtattcgggtggataaacacgacaacactttctgtgaacaatacagtggccaccatgatctctgatatagacacaactttagcagatgtattcaatggaacattgttatataacccaatgaaaaccgtggtcggatgtgccattgaaaataagctctacacaatagagaaggcaatgacgtggattcacgacaaggctcagttacatatcccgagaattaatgggacacaaatcaagcaagctttggcaaagcaaaccgacaacagcactatacccactgcaagctccacttctgccgccacagaaaacttattggagaaccttgtgaatgatatgagagaaggacttttaaaaattctcagagcttaccaccgtataactttgggagaactcacggtagccttggtcattcttgcggtgtggctcgtacaattgcccatagctttggtaattctcagattacgtcttcgcaaagccacctttgactga

SEQ ID NO: 9127 - DNA, 3183 bp, Saccharomyces cerevisiae
atgcgaattttttcaggtgacaacaaggtagttgattccctcgcctctaaccctggattaatgagtccatcgaattttggcggtgacttcggttcacgactaaaagtaaatgtaacatcaaaaaagaaacttaacgactcatcaccaacttctcccatggaaagttcaccagtttcacctgagttggtgcctattctaacactgctaaatgcacatacacatagaagatatcatgaaggcgtgtttttgattttacaagaccttaacaacaatggcactcatgcagcaaggaaatggaaggacgtatatggggtactgttgggtactcaactagccctttgggacgccaaggaactagcagaattcactgatccgtcttgtccggtctctgaaaagaaactgaaggaagttgcttccaaacccacttatatcaatttgacagatgctacactaagaactttggataactccgataatatcgtaatggagtgtggaaaaaacctcactaatgcattggtggtttctactacgctgaaaaaccgatatttcttacaattcggtaacaaagagtctttcaacgcatggaattctgctatacgattatgtttatacgaatgttcttcgttacaagaggcttacacaggcgcatttatttcaagtagaggcgcaaaattaggtgatatcagaattctccttacgaatagaaaatatgattacaaggattgggtcagcgtcagattcggagcaggtatgccgtggaagcgctgctatgcggtaatctctcaatctagcagtaagaaaaagggtcattttggtgaaataaatctttatgaaaatgacaagaaagtgaagaaaaaccatgcaatggctactattgtagaggcaaaggcgctttatgctgtttacccgtcctcccctaaactaatagattcctctacaatcattaaagtcgtaggttctgtgaaatttgaaaaaaaggagtctgctcaggaaaaggatgtctttattatgcccgagaagcatcaagctgtaccaagttatgacactataataaggtttttaataccggctatggatacttttaaactatatggaagaccagagaaattattgtcaagcaagaacgacccacattcacttttgtttggtttgccagttttgccacatatatactacttggaagtggaggatttacttccattgactaattctgtatcaagcttacactggtcgaataacgaatggaaggaacatatcagtgatattttacaaaggaaaatagcacaaggctactgtgggtgtaattctacttccaatattacttctcctctaccttctcctttccttggttcagcagacttatttgaaagggccgatggtgttttatcaccgaaactttcttacgggtctaaatcttcttcgaataacagctcgaagaacagtttgccaaagagagagcgtgtaaaattgtcatcttcttctgaacaggaccttaataactctgatagtccatctattaaacgtaaaagtcctccactagtgatatctgaaagtccacacaaagtccacacacctactgatgcatccttcagaacaagagtgacagaaggttcaccttatgcgaagcaaagacatcccaagccgtttgcgtcatctgtaaacgattcaccatcagacagagccaagtcgaggacagttccttacaataataacgacaggaaagcgaccactcctgagaaatttgaaagaggagaaacctcttgtggtaagaacgtggacgaaagtttggaaaaggtccggaatatgaagttagaaattcccgagtccaattttgacaagttcatgacagacaaaaatctgttgtctgtggattctaaatgctctaatgagaagaagctctctgtggaatcagatttgtctgcaatctacgaaaaatactccaatggtccctttggtcacactgagggtcttaacggatcttctgatgaaacttaccttcgttttcaacgggcgtcagttcattcagagagcaactacaattcaagaaaatcctttacaccaagtgacttttctaatggcaatgaggaagaacatgccgttttacaagaattaaatagtttaacccaaagaattaatgaactaggcatggaaagtataaattcaaactccgattcggacagaataaacgggtcatattcacaagtggattttggtaacaataacgacgaggacgatatgaacctgttcgacccagattttatggcacaagaccaattgcgtgctgaagaaagagactacaacaaggatgatagaacacccttagctaaggtccctgcggcctttcaatcaactggattgggcataacccccgatgacgatatcgagagacaatacataacggaacacagatcacgacatgaagtgccaaagcggtctcccgagaaaccctccaacccgctggaaataggtaacccatacgcgaaacctggcacaaggttgaataccactcacacccacagcaaaactgatcgtagcattacccctcagaggggccagccagtcccatcaggccagcagatttcctcctacgtgcagccagcaaacattaatagtcctaacaaaatgtatggtgcaaacaactcggcaatgggttcgcccaggaatccaaagacgagagcgccaccaggtccatacaatcagggatggaataaccgcccctcgccttcaaatatttaccaacgtcctcatccctcagatacacaaccacaagcatatcatctccccggaaacccatactcaacggggaacaggccaaacatgcaagcgcaatatcacccgcagcaggtgcccatgcctatcctgcagcagcccaatcgcccgtaccaaccttatgcgatgaatacgcacatgggctctcctggcggatatgctggggcagcaccaccatttcagccagctaacgtcaactacaatactaggcctcagcagccatggcctacacctaactcaccatccgcacactaccgtccgccccctaacctgaaccagcctcaaaacggtagtgctggttactatcgtccgccggcaccacaattgcaaaactcccaagcccgtccacaaaagaaggacggattctcacagttcatgccatctgcaactacgaagaacccatatgcccagtaa

SEQ ID NO: 9128 - DNA, 3183 bp, Artificial Sequence
  Description of Artificial Sequence: Synthetic polynucleotide
atgagaattttttctggtgacaacaaggtagttgattccctcgcctctaaccctggattaatgagtccatccaattttggcggtgacttcggttccagattgaaagtaaatgtaacaagtaaaaagaaacttaacgactcttctccaacttctcccatggaaagttctccagtttctcctgagttggtgcctattttaacattgttgaatgcacatacacatagaagatatcatgaaggcgtgtttttgattttacaagaccttaacaacaatggcactcatgcagcaaggaaatggaaggacgtatatggggtacttttgggtactcaattggccctttgggacgccaaggaattggcagaattcactgatccgtcttgtccggtctctgaaaagaaattgaaggaagttgcttccaaacccacttatatcaatttgacagatgctacattaagaactttggataactccgataatatcgtaatggagtgtggaaaaaacctcactaatgcattggtggtttctactacgttgaaaaacagatatttcttacaattcggtaacaaagagtctttcaacgcatggaattctgctataagattatgtttatacgaatgttcttctttacaagaggcttacacaggcgcatttatttccagtagaggcgcaaaattaggtgatatcagaattctccttacgaatagaaaatatgattacaaggattgggtcagcgtcagattcggagcaggtatgccgtggaagcgctgctatgcggtaatctctcaatctagcagtaagaaaaagggtcattttggtgaaataaatctttatgaaaatgacaagaaagtgaagaaaaaccatgcaatggctactattgtagaggcaaaggcgctttatgctgtttacccgtcctcccctaaattgatagattcctctacaatcattaaagtcgtaggttctgtgaaatttgaaaaaaaggagtctgctcaggaaaaggatgtctttattatgcccgagaagcatcaagctgtaccaagttatgacactataataaggtttttaataccggctatggatacttttaaactttatggaagaccagagaaattattgagtagcaagaacgacccacattctcttttgtttggtttgccagttttgccacatatatactacttggaagtggaggatttacttccattgactaattctgtatccagcttacactggtctaataacgaatggaaggaacatatcagtgatattttacaaaggaaaatagcacaaggctactgtgggtgtaattctacttccaatattacttctcctttgccttctcctttccttggttctgcagacttatttgaaagggccgatggtgttttatctccgaaactttcttacgggtctaaatcttcttccaataacagctctaagaacagtttgccaaagagagagcgtgtaaaattgtcttcttcttctgaacaggaccttaataactctgatagtccatctattaaacgtaaaagtcctccattggtgatatctgaaagtccacacaaagtccacacacctactgatgcatccttcagaacaagagtgacagaaggttctccttatgcgaagcaaagacatcccaagccgtttgcgtcttctgtaaacgattctccatctgacagagccaagtccaggacagttccttacaataataacgacaggaaagcgaccactcctgagaaatttgaaagaggagaaacctcttgtggtaagaacgtggacgaaagtttggaaaaggtcagaaatatgaagttagaaattcccgagtccaattttgacaagttcatgacagacaaaaatttattgtctgtggattctaaatgctctaatgagaagaagctctctgtggaaagtgatttgtctgcaatctacgaaaaatactccaatggtccctttggtcacactgagggtcttaacggatcttctgatgaaacttaccttcgttttcaaagagcgtccgttcattctgagagcaactacaattctagaaaatcctttacaccaagtgacttttctaatggcaatgaggaagaacatgccgttttacaagaattaaatagtttaacccaaagaattaatgaattaggcatggaaagtataaatagcaactccgattctgacagaataaacgggtcttattctcaagtggattttggtaacaataacgacgaggacgatatgaacttgttcgacccagattttatggcacaagaccaattgcgtgctgaagaaagagactacaacaaggatgatagaacacccttagctaaggtccctgcggcctttcaatctactggattgggcataacccccgatgacgatatcgagagacaatacataacggaacacagatctagacatgaagtgccaaagagatctcccgagaaaccctccaacccgttggaaataggtaacccatacgcgaaacctggcacaaggttgaataccactcacacccacagcaaaactgatcgtagcattacccctcagaggggccagccagtcccaagtggccagcagatttcctcctacgtgcagccagcaaacattaatagtcctaacaaaatgtatggtgcaaacaactctgcaatgggttctcccaggaatccaaagacgagagcgccaccaggtccatacaatcagggatggaataaccgcccctctccttccaatatttaccaacgtcctcatccctctgatacacaaccacaagcatatcatctccccggaaacccatactctacggggaacaggccaaacatgcaagcgcaatatcacccgcagcaggtgcccatgcctatcttacagcagcccaatcgcccgtaccaaccttatgcgatgaatacgcacatgggctctcctggcggatatgctggggcagcaccaccatttcagccagctaacgtcaactacaatactaggcctcagcagccatggcctacacctaactctccatccgcacactaccgtccgccccctaacttgaaccagcctcaaaacggtagtgctggttactatcgtccgccggcaccacaattgcaaaactcccaagcccgtccacaaaagaaggacggattctctcagttcatgccatctgcaactacgaagaacccatatgcccagtga

SEQ ID NO: 9129 - DNA, 189 bp, Saccharomyces cerevisiae
atgacacttgcctattatggacagccagtaaagatgtgccatatattgccccctttacgctctctgccagtattagtgggaaaaaaaaaactgaaaaaaaaaaaatcgcagactactaataatcacgtgatatttcttttcactctcttcataaagttgctaaaaacacacaatcgaatgagcctctga

SEQ ID NO: 9130 - DNA, 189 bp, Artificial Sequence
  Description of Artificial Sequence: Synthetic polynucleotide
atgacacttgcctattatggacagccagtaaagatgtgccatatattgccccctttacgctctttaccagtattagtgggaaaaaaaaaattgaaaaaaaaaaaatctcagactactaataatcacgtgatatttcttttcactctcttcataaagttgttgaaaacacacaatagaatgagcctctga

SEQ ID NO: 9131 - DNA, 1461 bp, Saccharomyces cerevisiae
atgtcgcatactttaaaatcgaaaacgctccaagagctggacattgaggagattaaggaaactaacccattgctcaaactagttcaagggcagaggattgttcaagttccggaactagtgcttgagtctggcgtggtcataaataatttccctattgcttataagacgtggggtacactgaatgaagctggtgataatgttctggtaatttgtcatgccttgactgggtccgcagatgttgctgactggtggggccctcttctgggtaacgacttagcattcgacccatcaaggttttttatcatatgtttaaactctatgggctctccatatgggtctttttcgccattaacgataaatgaggagacgggcgttagatatggacccgaattcccattatgtactgtgcgcgatgacgttagagctcacagaattgttctggattctctgggagtaaagtcaatagcctgtgttattggtggctctatgggggggatgctgagtttggaatgggctgccatgtatggtaaggaatatgtgaagaatatggttgctctggcgacatcagcaagacattctgcctggtgcatatcgtggtctgaggctcaaagacaatcgatttactcagatcccaactacttggacgggtactatccggtagaggagcaacctgtggccggactatcggctgcacgtatgtctgcattgttgacgtacaggacaagaaacagtttcgagaacaaattctccagaagatctccttcaatagcacaacaacaaaaagctcaaagggaggagacacgcaaaccatctactgtcagcgaacactccctacaaatccacaatgatgggtataaaacaaaagccagcactgccatcgctggcatttctgggcaaaaaggtcaaagcgtggtgtccaccgcatcttcttcggattcattgaattcttcaacatcgatgacttcggtaagttctgtaacgggtgaagtgaaggacataaagcctgcgcagacgtatttttctgcacaaagttacttgaggtaccagggcacaaagttcatcaataggttcgacgccaattgttacattgccatcacacgtaaactggatacgcacgatttggcaagagacagagtagatgacatcactgaggtcctttctaccatccaacaaccatccctgatcatcggtatccaatctgatggactgttcacatattcagaacaagaatttttggctgagcacataccgaagtcgcaattagaaaaaattgaatctcccgaaggccacgatgccttcctattggagtttaagctgataaacaaactgatagtacaatttttaaaaaccaactgcaaggccattaccgatgccgctccaagagcttggggaggtgacgttggtaacgatgaaacgaagacgtctgtctttggtgaggccgaagaagttaccaactggtag

SEQ ID NO: 9132 - DNA, 1461 bp, Artificial Sequence
  Description of Artificial Sequence: Synthetic polynucleotide
atgtcccatactttaaaatctaaaacgctccaagagttggacattgaggagattaaggaaactaacccattgctcaaattggttcaagggcagaggattgttcaagttccggaattagtgcttgagtctggcgtggtcataaataatttccctattgcttataagacgtggggtacattaaatgaagctggtgataatgttttggtaatttgtcatgccttgactgggtccgcagatgttgctgactggtggggccctcttttgggtaacgacttagcattcgacccatctaggttttttatcatatgtttaaactctatgggctctccatatgggtctttttctccattaacgataaatgaggagacgggcgttagatatggacccgaattcccattatgtactgtgcgcgatgacgttagagctcacagaattgttttggattctttgggagtaaagagtatagcctgtgttattggtggctctatgggggggatgttaagtttggaatgggctgccatgtatggtaaggaatatgtgaagaatatggttgctttggcgacaagtgcaagacattctgcctggtgcatatcttggtctgaggctcaaagacaatctatttactctgatcccaactacttggacgggtactatccggtagaggagcaacctgtggccggattatctgctgcacgtatgtctgcattgttgacgtacaggacaagaaacagtttcgagaacaaattctccagaagatctccttccatagcacaacaacaaaaagctcaaagggaggagacacgcaaaccatctactgtcagcgaacactccttacaaatccacaatgatgggtataaaacaaaagccagcactgccatcgctggcatttctgggcaaaaaggtcaaagcgtggtgtccaccgcatcttcttctgattctttgaattcttctacatctatgacttctgtaagttctgtaacgggtgaagtgaaggacataaagcctgcgcagacgtatttttctgcacaaagttacttgaggtaccagggcacaaagttcatcaataggttcgacgccaattgttacattgccatcacacgtaaattggatacgcacgatttggcaagagacagagtagatgacatcactgaggtcctttctaccatccaacaaccatccttaatcatcggtatccaatctgatggattattcacatattctgaacaagaatttttggctgagcacataccgaagtctcaattagaaaaaattgaatctcccgaaggccacgatgccttcttgttggagtttaagttaataaacaaattgatagtacaatttttaaaaaccaactgcaaggccattaccgatgccgctccaagagcttggggaggtgacgttggtaacgatgaaacgaagacgtctgtctttggtgaggccgaagaagttaccaactggtga

SEQ ID NO: 9133 - DNA, 1731 bp, Saccharomyces cerevisiae
atgtcgaatgagagcacacgagttaccgttagtcgcggttgtacagcctccgacgagtgtgcgcaagcattggaacggacaaacgatgagctagacagagaatcatcggtatcagaaagtagaagtgatgaagagagccacgagaagttatcccgacgtcgattcccgacgctaggtataggcatatggctcgatttgaaggacagaataccgtattacaagtcagattgggtagatgcgtttaattacagagttattccctctattgttgacacctactttaataacctgctacctgcaatagcctttgcgcaagatatgtttgataggactgataattcctatggtgtgaacgaagtacttctatccagtgcaatggctggaattgtttttggagttcttggtggacagcccttatgtatagtgggtgttactggccccatctctatttttaattatacggtctacgaaattataaagcctttgaataccagctattttggcttcatgttttggatttgtatgtggtctatgatttttcatttagttttagcatttacgaacgccgtttgcctcttgcaatacgtgactacgttcccatgtgacatatttggattatttattaatgtggtctacattcaaaaaggaatacaaattttaacaagacagttcagtgctaaatcaggggagaaatcagtacaagacggatttgctagtgtcgtggtggcgctggttatgactgcgtttggtcttttctttaaattatttcattattaccccctcttttctcataggatcagaacattcatatctgattattcaactgcgctttcagtgctattctggtcatcatttacacattttggtggctacttgcatgatgtcaaatttaaaaaattgcctattacgaaagctttttttcctacttccaaagtcaataggcctcaaaatacttggctggcatatgaaccgattcctgttaaagacgtctttattgccctaccatttggtatatttttaacaatcttgttttactttgatcataacgtatcgtcgctaatggcacaaaggcatcagtataagctgaaaaaaccatcctcttttcattacgatttcgcactattgggacttaccacttgcatcagcggggttctaggaatcccggcgcccaatggtttgattcctcaagcaccattgcacacagagacactgctagttagggattcaaaccaaaaggttatcagttgcgtagagcaaagatttacaaatacgtttcagggcctgatgattctagggacaatgacaagaccgttattggtatgcttaggagaaatccctcaggcagtactttccggattgtttttcattatgggcatcaatggcctaatgacaaatagtattatacaacggttggttttcctgttttcagaccctaacagaagagataatacttcacctttaatgaaagtatccaagaagtcaatgctgatatttctttcctttagcctgacggggtttgctggtgaatttgctatcacaaatactatagcggccatcggctttcccttagtattgcttttaagtgtgttagtttctttctcgtttgcttatattttcccgactgaagaattaaagattctcgatactaatgtggcacaaaaatttaccattaaaaatttgttattggaaaatattcgtgatgcaaagttctgtgataagcatgaagactaa

SEQ ID NO: 9134 - DNA, 1731 bp, Artificial Sequence
  Description of Artificial Sequence: Synthetic polynucleotide
atgagtaatgagagcacaagagttaccgttagtcgcggttgtacagcctccgacgagtgtgcgcaagcattggaaagaacaaacgatgagttggacagagaaagttctgtatctgaaagtagaagtgatgaagagagccacgagaagttatcccgtcgtagattcccgacgttaggtataggcatatggctcgatttgaaggacagaataccgtattacaagagtgattgggtagatgcgtttaattacagagttattccctctattgttgacacctactttaataacttattgcctgcaatagcctttgcgcaagatatgtttgataggactgataattcctatggtgtgaacgaagtacttctttccagtgcaatggctggaattgtttttggagttcttggtggacagcccttatgtatagtgggtgttactggccccatctctatttttaattatacggtctacgaaattataaagcctttgaataccagctattttggcttcatgttttggatttgtatgtggtctatgatttttcatttagttttagcatttacgaacgccgtttgcctcttgcaatacgtgactacgttcccatgtgacatatttggattatttattaatgtggtctacattcaaaaaggaatacaaattttaacaagacagttcagtgctaaaagtggggagaaatctgtacaagacggatttgctagtgtcgtggtggcgttggttatgactgcgtttggtcttttctttaaattatttcattattaccccctcttttctcataggatcagaacattcatatctgattattctactgcgctttctgtgcttttctggtcttcttttacacattttggtggctacttgcatgatgtcaaatttaaaaaattgcctattacgaaagctttttttcctacttccaaagtcaataggcctcaaaatacttggttggcatatgaaccgattcctgttaaagacgtctttattgccttaccatttggtatatttttaacaatcttgttttactttgatcataacgtatcttctttgatggcacaaaggcatcagtataagttgaaaaaaccatcctcttttcattacgatttcgcattattgggacttaccacttgcatcagcggggttttaggaatcccggcgcccaatggtttgattcctcaagcaccattgcacacagagacattgttggttagggattccaaccaaaaggttatcagttgcgtagagcaaagatttacaaatacgtttcagggcttaatgattttggggacaatgacaagaccgttattggtatgcttaggagaaatccctcaggcagtactttccggattgtttttcattatgggcatcaatggcttaatgacaaatagtattatacaaagattggttttcttattttctgaccctaacagaagagataatacttctcctttaatgaaagtatccaagaagtctatgttgatatttctttcctttagcttaacggggtttgctggtgaatttgctatcacaaatactatagcggccatcggctttcccttagtattgcttttaagtgtgttagtttctttctcctttgcttatattttcccgactgaagaattaaagattctcgatactaatgtggcacaaaaatttaccattaaaaatttgttattggaaaatattcgtgatgcaaagttctgtgataagcatgaagactga

SEQ ID NO: 9135 - DNA, 1053 bp, Saccharomyces cerevisiae
atgagtaagaaaccaattgttttgaaattaggaaaggatgcctttggtgaccaagcctggggggaattggaaaagattgcggatgtaattaccatccctgaatccaccactagagaacagtttttgcgggaggtaaaagacccacaaaataagctctcccaagtacaagtcattactagaacagcaaggagtgtgaaaaacaccggtagatttgatgaagagcttgctcttgctttgccctcctccgtagtggctgtatgtcatactggtgctggttatgaccaaattgatgttgagccattcaagaaaaggcacatccaggttgccaatgttcctgatttagttagcaatgctaccgctgatacgcatgtatttttgctattgggtgccctaagaaacttcggtattggtaacagaaggttgatcgagggaaactggccggaggcaggacccgcatgtggttctccctttggatacgaccctgaagggaaaacagttggtatactgggtctaggtaggattggtcgttgtattttagagagattgaagccgtttgggttcgagaatttcatatatcataacagacaccagcttccttccgaagaagagcatggttgtgaatatgtaggattcgaggagtttttgaagcgttctgatatagtatctgtaaacgtcccactgaaccacaatactcaccatctaatcaatgcagagactattgaaaaaatgaaagatggtgtagttattgttaacacagcgcgtggtgccgtgatagacgaacaagccatgactgatgctttgcgttctggaaagattagaagtgctggtttggacgttttcgaatatgagccaaaaatatccaaagagttattatcgatgtcccaagtcttaggactgcctcatatgggcacacatagtgtagaaacaagaaagaaaatggaagaactggtcgttgaaaatgcaaagaatgtgatattgaccgggaaagtcttgactattgttccggaattacaaaatgaagactggcccaatgaatctaagccattagtttga

SEQ ID NO: 9136 - DNA, 1053 bp, Artificial Sequence
  Description of Artificial Sequence: Synthetic polynucleotide
atgagtaagaaaccaattgttttgaaattaggaaaggatgcctttggtgaccaagcctggggggaattggaaaagattgcggatgtaattaccatccctgaatccaccactagagaacagtttttgagagaggtaaaagacccacaaaataagctctcccaagtacaagtcattactagaacagcaaggagtgtgaaaaacaccggtagatttgatgaagagcttgctcttgctttgccctcctccgtagtggctgtatgtcatactggtgctggttatgaccaaattgatgttgagccattcaagaaaaggcacatccaggttgccaatgttcctgatttagttagcaatgctaccgctgatacgcatgtatttttgttgttgggtgccttgagaaacttcggtattggtaacagaaggttgatcgagggaaactggccggaggcaggacccgcatgtggttctccctttggatacgaccctgaagggaaaacagttggtatattaggtttaggtaggattggtcgttgtattttagagagattgaagccgtttgggttcgagaatttcatatatcataacagacaccagcttccttccgaagaagagcatggttgtgaatatgtaggattcgaggagtttttgaagcgttctgatatagtatctgtaaacgtcccattgaaccacaatactcaccatttgatcaatgcagagactattgaaaaaatgaaagatggtgtagttattgttaacacagcgcgtggtgccgtgatagacgaacaagccatgactgatgctttgcgttctggaaagattagaagtgctggtttggacgttttcgaatatgagccaaaaatatccaaagagttattatctatgtcccaagtcttaggattgcctcatatgggcacacatagtgtagaaacaagaaagaaaatggaagaattggtcgttgaaaatgcaaagaatgtgatattgaccgggaaagtcttgactattgttccggaattacaaaatgaagactggcccaatgaatctaagccattagtttga

SEQ ID NO: 9137 - DNA, 3717 bp, Saccharomyces cerevisiae
atgtctgctgatttgcaacaaggcactacaaatgcggctgatttctctctgacggtacttagagcaagaattgctttattggcaactgccatcggtgggccggattatacttcccagatagacccacccccttataagcttggcgatgactgtttggcgtgcttaaaagatctgaaaagatggtttaaactagtggatgaccagcagaaaagatgggatgtggcaatggcagtagctgaatatcgcatcttgacggatgatctgttacctattctgatagattgggaaaacaaatgttctcttgcagcaaagcttgcaaagaacaacccagaccatgaagagtttagaaacaaagcttattacgataaaattgcgctaaattgtctacaactattggtccttatgacttggcctttaattgtaactgaacagtcttcatcaaatcaaattactctctatggtgagctaaagaagcatcaattggtatacaagaaaacgattctgtctatggaaagtggtaaagtgttaagagctgccattagattggctctggatgttatcaaaatcgaccgattatcaagaactcctagggacaatatggttctcaaattggttttgaattttttcagaaatgtcattgctatagaacccggtgaatttactatcaatactaagaaaagcatgcctaagaaaggtatcacatctatcgatactttgccaccaaacgtctctatggatgacatctctttaaatacggttatttcctcattccataaaaacaaggtattcggtttcctcttaacgctgaccagctccttatcaaaagagtttgaccaggactttatcaatatcccactgttggagattatgttctacttcactaaagatgttaaccaagaactgctattccctcgacagttcgaaaccgggacacattcaaaggtggtaaataaaaatgagagctcctctgctaataacattgttacaagtgcaggttttgaactatcgaagttattacaaaaggaacaccaaatgagaaaaaacgttatcaagcatacatctgcaagacactccagatttggtggtcttttatctatacaaacaccagataaaactaggttaactgtttctggtagccaagctctcgtagatgaaaaaatagcgctccaaaaactagatgacagcaaaaaatggaataaaagaataattaaaaagcatcaatctgtcgcagctgagggcttaccgaatagtctcttgaattcacaaaccggtaaagctatttttttcaccgaatcaaatggtaaacatttcaaagaattcatcaacaactttatagattccggctttaacatcttgttgcatagtgtgacgaactacttcacaactgagcaggataggatggtaactttggagcaagtcgaatatttacttttctttgcatggtttgttaaataccagttgttgaggtccaaaatcgacaattccgcagatataaagcaagtttcagaagccttgaaagaggtgactttcattctagtgtcttctcttttaagaagcgcatatgacctgaaaaattggacagtgacacatgctggtatgattgcatttaatgaactgttgaacctcgtttcccgtacaaaggccgctcaagaagaggattcgaccgatatagaattcattgtaagtaggcttttcagtgacgagagaatacaattactgtcaaatctgccgaagattggttccaaatactccctccaattcatgaaaagttgcattgaactaacacactcggtattgaaagtattagagcaatactctgacgataaaacattagttattgaaggcaaatcaagacggcaaaaaaagtttaatatttcagaaggtgatattactaaattgatagaagaagaaaatgtagatagagatgaagcgcttgatattctaacctcttctttaagaagtatagaagtcaattttcaaaaggtgcaagccaactatatgacagaaccggtaatagaaacgtacattaatttccttgaaagatttcgtgagcttgaggacgattccattaaaaaagtattttcctttttccatagagtatttgttcaggcaaaagaacaggcattgttatttagatttgatttgataatattattaagagaaatgctttcacctgacggattagatagaatgtctcgttcaaggaaatatgtgagtcaattttcagactacttcctcgccaggttgaagaaaaggttaaagaaatcacctgcttggtttgttggattacttttcccgccattacacaatagtgaagtaggattttaccaaagatatggtgaatataatgtacttaataatgaatcaatgtatgccgctcctgcatcacagttcaaaccaattcccgatgaagaagccttaccaccttcgattttgttggatatgaaatatggtgttttagtttccacattacttgatgatggaaaaactgaactattggaccaactgctcaagcatataacccacacactagatatttttaagtcgtggctaaccgtaaatgttaatgctgggaaagaaacagttaatccacccaatgaatatttcacattgacaggtgtactcaacaacgaccctatttttaaagataaggactacagggctttattgttgctgataggatactccattccacgtaaaatcaatgaaccttgttttttaccggggactgttgaagtttctgacctgactgtttcttgtgaactagtgaaaaaatacttatcaacaccatttgaaactccaaacggactgccttcttcttcctatcttctacgagttcgttcagaaaaggatagtttttctcacaatgaacaagatggatgggaaggagacgatgattatgattacaacgatccctacattgttccagatgatcaaattttatcgaaaagcgacgcagcatacttcaaggatttagataacaatgcatcagataaacttaaaggtaccaaattcagtaaagggattgcgagatccaaaaaaaaagataagaggaagcgtaggaaaggagaagccaagactaatttgccaatgtttggcgaccaggatgatgaacgacctcagaccgttagagaacgccatggcgtattcagtaaagagtttattagtgattcagaagatgacgaggatttgatgaaccctatattttttgaaaacgaaacatatatgagatggttactagataaaaacaatggtcagttgaccgaggatagatatatccagtttgccaaatttgccgcggaaaggatgaataatgggggtgttgtgacaggagattatacgagcttgtttggtggatccataccaagtattgaaagcataagagctacagaaagtagttcctttgcgccagataaaagcctcatttctttagcaagccacgtggcatctgaaatgtctattttcgatgtaaataataacaataataatcaactctctgatgacgatgtcaactcggaatcaagaaatagtttgggctcatcacagccatcaaattcgcaaaatatgttccaatctgaggtgtatagcagaaaagaatctacaaagcgttctttggaagcgagtgcagccgatgaaagcgatgaagatgaagaggccatccgcctttttggcaaaaagtctagagttgttttgagccaaggtgatagtgatgattga

SEQ ID NO: 9138 - DNA, 3717 bp, Artificial Sequence
  Description of Artificial Sequence: Synthetic polynucleotide
atgtctgctgatttgcaacaaggcactacaaatgcggctgatttctctttgacggtacttagagcaagaattgctttattggcaactgccatcggtgggccggattatacttcccagatagacccacccccttataagcttggcgatgactgtttggcgtgcttaaaagatttgaaaagatggtttaaattagtggatgaccagcagaaaagatgggatgtggcaatggcagtagctgaatatcgcatcttgacggatgatttattacctattttaatagattgggaaaacaaatgttctcttgcagcaaagcttgcaaagaacaacccagaccatgaagagtttagaaacaaagcttattacgataaaattgcgttgaattgtttgcaattattggtccttatgacttggcctttaattgtaactgaacagtcttcttccaatcaaattactctctatggtgagttgaagaagcatcaattggtatacaagaaaacgattttatctatggaaagtggtaaagtgttaagagctgccattagattggctttagatgttatcaaaatcgacagattatctagaactcctagggacaatatggttctcaaattggttttgaattttttcagaaatgtcattgctatagaacccggtgaatttactatcaatactaagaaaagcatgcctaagaaaggtatcacatctatcgatactttgccaccaaacgtctctatggatgacatctctttaaatacggttatttccagtttccataaaaacaaggtattcggtttcctcttaacgttgaccagctccttatccaaagagtttgaccaggactttatcaatatcccattgttggagattatgttctacttcactaaagatgttaaccaagaattattattccctcgtcagttcgaaaccgggacacattctaaggtggtaaataaaaatgagagctcctctgctaataacattgttacaagtgcaggttttgaattatccaagttattacaaaaggaacaccaaatgagaaaaaacgttatcaagcatacatctgcaagacactccagatttggtggtcttttatctatacaaacaccagataaaactaggttaactgtttctggtagccaagctctcgtagatgaaaaaatagcgctccaaaaattggatgacagcaaaaaatggaataaaagaataattaaaaagcatcaatctgtcgcagctgagggcttaccgaatagtctcttgaattctcaaaccggtaaagctatttttttcaccgaaagtaatggtaaacatttcaaagaattcatcaacaactttatagattccggctttaacatcttgttgcatagtgtgacgaactacttcacaactgagcaggataggatggtaactttggagcaagtcgaatatttacttttctttgcatggtttgttaaataccagttgttgaggtccaaaatcgacaattccgcagatataaagcaagtttctgaagccttgaaagaggtgactttcattttggtgtcttctcttttaagaagcgcatatgacttgaaaaattggacagtgacacatgctggtatgattgcatttaatgaattattgaacctcgtttcccgtacaaaggccgctcaagaagaggattctaccgatatagaattcattgtaagtaggcttttcagtgacgagagaatacaattattatccaatttaccgaagattggttccaaatactccctccaattcatgaaaagttgcattgaattaacacactctgtattgaaagtattagagcaatactctgacgataaaacattagttattgaaggcaaatctagaagacaaaaaaagtttaatatttctgaaggtgatattactaaattgatagaagaagaaaatgtagatagagatgaagcgcttgatattttgacctcttctttaagaagtatagaagtcaattttcaaaaggtgcaagccaactatatgacagaaccggtaatagaaacgtacattaatttccttgaaagatttcgtgagcttgaggacgattccattaaaaaagtattttcctttttccatagagtatttgttcaggcaaaagaacaggcattgttatttagatttgatttgataatattattaagagaaatgctttctcctgacggattagatagaatgtctcgttctaggaaatatgtgagtcaattttctgactacttcctcgccaggttgaagaaaaggttaaagaaatctcctgcttggtttgttggattacttttcccgccattacacaatagtgaagtaggattttaccaaagatatggtgaatataatgtacttaataatgaaagtatgtatgccgctcctgcatcccagttcaaaccaattcccgatgaagaagccttaccaccttctattttgttggatatgaaatatggtgttttagtttccacattacttgatgatggaaaaactgaattattggaccaattgctcaagcatataacccacacattagatatttttaagtcttggttgaccgtaaatgttaatgctgggaaagaaacagttaatccacccaatgaatatttcacattgacaggtgtactcaacaacgaccctatttttaaagataaggactacagggctttattgttgttaataggatactccattccacgtaaaatcaatgaaccttgttttttaccggggactgttgaagtttctgacttgactgtttcttgtgaattagtgaaaaaatacttatctacaccatttgaaactccaaacggattgccttcttcttcctatcttttaagagttcgttctgaaaaggatagtttttctcacaatgaacaagatggatgggaaggagacgatgattatgattacaacgatccctacattgttccagatgatcaaattttatccaaaagcgacgcagcatacttcaaggatttagataacaatgcatctgataaacttaaaggtaccaaattcagtaaagggattgcgagatccaaaaaaaaagataagaggaagcgtaggaaaggagaagccaagactaatttgccaatgtttggcgaccaggatgatgaaaggcctcagaccgttagagaacgccatggcgtattcagtaaagagtttattagtgattctgaagatgacgaggatttgatgaaccctatattttttgaaaacgaaacatatatgagatggttattagataaaaacaatggtcagttgaccgaggatagatatatccagtttgccaaatttgccgcggaaaggatgaataatgggggtgttgtgacaggagattatacgagcttgtttggtggatccataccaagtattgaaagcataagagctacagaaagtagttcctttgcgccagataaaagcctcatttctttagcaagccacgtggcatctgaaatgtctattttcgatgtaaataataacaataataatcaactctctgatgacgatgtcaactctgaatctagaaatagtttgggctcttctcagccatccaattctcaaaatatgttccaatctgaggtgtatagcagaaaagaatctacaaagcgttctttggaagcgagtgcagccgatgaaagcgatgaagatgaagaggccatccgcctttttggcaaaaagtctagagttgttttgagccaaggtgatagtgatgattga

SEQ ID NO: 9139 - DNA, 2280 bp, Saccharomyces cerevisiae
atggatgcttctgaggaagcaaaaagagtatcaatacaggttacatccctgtctacgcaattgatcgagagcgtggataaacagtcacacttagaagaacagcttaataaatccttaaaaacaatagccagccagaaggcagcaattgaaaactataatcagttgaaagaagattacaacactttaaaaagagaattgtcagacagagatgacgaagtgaaaagattgcgtgaagatatagccaaagaaaatgagcttcgaactaaagctgaagaggaagcggataaactaaataaagaagttgaggatctgactgcttccctctttgatgaggctaataatatggttgctgatgctagaaaggagaaatatgctatcgaaatcttaaataagagactcactgaacaactgcgtgaaaaggacacattactggatactttgaccctacagctcaagaatctgaaaaaagtgatgcatagtttagataatgaaagcacagtcacaaataattcgaacagatattccacaatattgagtgattcagcaacttcttctagcacttctttgaataaagttccaacttcatattctcttgcttcccaagatatttatagcggaattgtgtactcgccaagcatttcatctattcgttatgatataagcctttacaatgaatttctaaaatttgtcgctgcactaccccgttgtgaaaacataaaggcaacttcaaccgaatcaaagttaatacgaagattggtaaatgatgaaatccagcctatacttaagattgataatgcttcaggcatcggctggttggttaaaaaaaccctactttccttgattatagatggtttggtggtcgtggaacccctaagcggcgttaatgcaacctaccaaattggctacaactcaagtagccctgcaaagcaagccacttcgaatatgccaaaaatgttcaagtttcccttagattcacctccagttgcagtgcacgccgcatgttccttttgtggagaatctagagatgacattatcgaacacgcaaggatgtatatattgaaaacgttgcacaagactgacgacggtaaagaacaagttacgaatacgtatcccttgtgtcattggtgtttgctaaagttgcggcagacatgtgaaatctttgctttcctgagatcattgaaggtaggcgcatggcatttagaaaagctaacgacgcagaacattaccaaggaagatttggaaaaattctctgaagtaacgaagcataccaaaagagacggcagggtttcttctcaagacaaaaaaaccaaacgtttaagttttatggcaggacttggtatcaattcttcaacaaaaaataagccaaagatggagattttttcttctgaaacaaatgcaaagccaggacaacctaccactaatattcaaagagcatggctgcaattgtgtaaattgcgttgtatacttcattggactcatattggcatatgggcagtggatgattcaatttcttcaaaaattggaccgttagttgaggatgacagcgatgaggatcaaaacgatgctatatcggttcgcttgcaggacaaagctctttggaagcaggacgcaaaaagacctttttcttcatctagcgcagaagaaagtcaaaagagcgacgcttttgactttgaaagtggagatatggaaaatgaaattacgggtgaatcttcaagtgatgaatcctcttcagatgggtcttccacagataattcaaccgcagatagttcatcagaagatgaatcttctctagcagattctactacaagtagcgcagattctagttcaccagagagtatagacaacggtgaaggtgatgacacggtaacgaaagatgacaaaagtagcattaagtcggcaaataataatgaagaaaacagcgattgcggagataaaaaaggtcgttctataataaagaaaaaggctcctcaacgcaagatacaaaagaagaagttactccaagatttggatgatttagaagagcaatttagagaagaaagcgcaattgatcagactgaatttgaaaacgctgagtctaatgtaaaacaaaatatatcctcgaagagggcatcttctggagacgagaactctaagaaggataataatgaaaaaactttaaagacaaacttgacgataggcgacaaaacccaagaacaaataggggaaaatagtcctagtagcggattgcatgcgtcttcaagcaatgatgacaatttcgatgatgcccaggaacagcaataa

SEQ ID NO: 9140 - DNA, 2280 bp, Artificial Sequence
  Description of Artificial Sequence: Synthetic polynucleotide
atggatgcttctgaggaagcaaaaagagtatctatacaggttacatccttatctacgcaattgatcgagagcgtggataaacagtctcacttagaagaacagcttaataaatccttaaaaacaatagccagccagaaggcagcaattgaaaactataatcagttgaaagaagattacaacactttaaaaagagaattgagtgacagagatgacgaagtgaaaagattgcgtgaagatatagccaaagaaaatgagcttagaactaaagctgaagaggaagcggataaattgaataaagaagttgaggatttgactgcttccctctttgatgaggctaataatatggttgctgatgctagaaaggagaaatatgctatcgaaatcttaaataagagactcactgaacaattgcgtgaaaaggacacattattagatactttgaccttgcagctcaagaatttgaaaaaagtgatgcatagtttagataatgaaagcacagtcacaaataatagcaacagatattccacaatattgagtgattctgcaacttcttctagcacttctttgaataaagttccaacttcttattctcttgcttcccaagatatttatagcggaattgtgtactctccaagcatttcttctattcgttatgatataagcctttacaatgaatttttgaaatttgtcgctgcattgccccgttgtgaaaacataaaggcaacttctaccgaatccaagttaataagaagattggtaaatgatgaaatccagcctatacttaagattgataatgcttctggcatcggctggttggttaaaaaaaccttactttccttgattatagatggtttggtggtcgtggaacccttaagcggcgttaatgcaacctaccaaattggctacaacagtagtagccctgcaaagcaagccacttccaatatgccaaaaatgttcaagtttcccttagattctcctccagttgcagtgcacgccgcatgttccttttgtggagaatctagagatgacattatcgaacacgcaaggatgtatatattgaaaacgttgcacaagactgacgacggtaaagaacaagttacgaatacgtatcccttgtgtcattggtgtttgttgaagttgagacagacatgtgaaatctttgctttcttaagaagtttgaaggtaggcgcatggcatttagaaaagttgacgacgcagaacattaccaaggaagatttggaaaaattctctgaagtaacgaagcataccaaaagagacggcagggtttcttctcaagacaaaaaaaccaaacgtttaagttttatggcaggacttggtatcaattcttctacaaaaaataagccaaagatggagattttttcttctgaaacaaatgcaaagccaggacaacctaccactaatattcaaagagcatggttacaattgtgtaaattgcgttgtatacttcattggactcatattggcatatgggcagtggatgattctatttcttctaaaattggaccgttagttgaggatgacagcgatgaggatcaaaacgatgctatatctgttcgcttgcaggacaaagctctttggaagcaggacgcaaaaagacctttttcttcttctagcgcagaagaaagtcaaaagagcgacgcttttgactttgaaagtggagatatggaaaatgaaattacgggtgaatcttccagtgatgaatcctcttctgatgggtcttccacagataattctaccgcagatagttcttctgaagatgaatcttctttggcagattctactacaagtagcgcagattctagttctccagagagtatagacaacggtgaaggtgatgacacggtaacgaaagatgacaaaagtagcattaagtctgcaaataataatgaagaaaacagcgattgcggagataaaaaaggtcgttctataataaagaaaaaggctcctcaacgcaagatacaaaagaagaagttactccaagatttggatgatttagaagagcaatttagagaagaaagcgcaattgatcagactgaatttgaaaacgctgagtctaatgtaaaacaaaatatatcctccaagagggcatcttctggagacgagaactctaagaaggataataatgaaaaaactttaaagacaaacttgacgataggcgacaaaacccaagaacaaataggggaaaatagtcctagtagcggattgcatgcgtcttctagcaatgatgacaatttcgatgatgcccaggaacagcaatga

SEQ ID NO: 9141 - DNA, 5862 bp, Saccharomyces cerevisiae
atgttgaagaattcaggctccaaacattcgaactcaaaggaaagtcattcgaattcgagttctggtatattccaaaatttgaagcgtttggctaactcaaatgcaacgaatagcaatacgggttctccgacctatgcatcccaacaacagcactctccagtgggaaacgaagtgtccacttcacctgcatcttcgtcatcttttagaaaactgaatgcaccttctaggtctacatctactgaggcgaggccgttgaataaaaaatcgacattaaacacacaaaacttgtctcaatatatgaatggtaaattaagtggagatgttcccgtatcctcacagcacgcaaggtcgcattcaatgcaatcgaaatattcgtattccaagaggaattcttcacaggcgtccaataagctaacaaggcagcataccgggcaaagtcactccgcatcaagtcttctctctcaaggttcgctaactaacttgagcaaattcactacacccgatggtaaaatttatttagaaatgccgtcggacccatacgaggtggaagttttgtttgaagatattatgtataaaagaaatatttttcagtctttatcagaggacaaacaagaagctctgatgggctacagcattgagaagaaatggctgattgttaagcaggatttacaaaatgagctaaaaaaaatgcgagcaaacactacatcttcttccactgcctccagaacttcgatggcgtcggaccatcatcctatccttacggctaattcatctctttcgtctcccaaatctgttttgatgacaagcgcctcttctcccacctcaactgtatacagcaacagtttaaatcattctactactctttcatcggtaggtacgtcaacctcgaaggggaaaaaattagtgagcgggagtttgaaaaagcagccatctctaaacaatatttatagaggtggggctgagaacaatacgagtgcatctactcttccaggagacagaacaaacagaccaccgatacattatgtgcaacgaatcctggcagacaaacttactagcgatgagatgaaagatttatgggtaactttaagaactgaacagttagactgggtagacgcttttatagaccatcagggtcacattgctatggctaatgtactaatgaactctatttataagactgcaccccgagaaaacttgactaaagaattattagagaaagaaaattcattttttaaatgcttcagagtcttatcaatgctctcacaaggtttgtatgagttcagtacacataggttaatgactgatactgttgcagaaggtttattctctacgaaactggccacaaggaaaatggccactgaaatttttgtttgtatgctagaaaaaaaaaataaaagcagattcgaagcagttcttacctcactagataaaaagtttaggatagggcaaaatcttcatatgattcaaaacttcaaaaaaatgccccagtatttctctcatttaaccttggaaagtcatttgaaaattattcaagcctggttatttgccgttgaacaaactttagatggaagaggaaaaatgggttccttagtaggcgcgtcggatgaatttaaaaatggtgggggtgaaaatgcgattctagaatactgccaatggacaatggtttttatcaatcatttatgctcttgctctgataacataaatcaaagaatgctattaaggacgaaactagaaaattgtggaattttacgaattatgaacaaaataaaactgctagattacgacaaggtaattgaccaaattgagttatatgacaataataaacttgacgattttaacgttaaattagaggccaacaataaggcttttaatgtagatttacacgatccactatcattattaaaaaacctttgggatatatgtaaaggtaccgagaatgaaaagcttttagtatctttagttcaacatcttttcctttctagttcaaagttaatagaagaaaaccaaaattcctctaaacttactaagcaattgaaacttatggattctttggtgactaatgttagtgttgcctcaacttctgatgaagaaactaatatgaatatggctatccagcggctttacgatgccatgcagactgatgaagttgcacgtcgagctatattagaaagtagagctctaacgaagaaattggaagaaattcaggcagaaagggattctttaagtgaaaagttaagcaaggcggagcacggactcgttggacagttagaagatgagttgcatgagagagatcgtattttagctaagaatcagagagttatgcagcagctggaagctgagttagaagagttgaaaaagaagcatcttttggaaaagcatcagcaagaggtagaattgagaaaaatgttgactatattgaattcgaggcctgaagaaagcttcaataagaatgaaggcaccagaggtatgaactcgagcctaaattcttcagagaaagcgaatatccaaaaggtgttacaggacggattatcaagagcaaaaaaggattacaaggatgattcaaaaaaattcggcatgacacttcaacctaataagagattaaaaatgttaagaatgcaaatggaaaatattgaaaatgaagccaggcaactagagatgacaaattttgctgaatttgagaaagatcgtcttgaacctccaatacatattaagaagcccaaagtgaagaagatgaaaaataaggataggaaacctttagtcaagcctcaagaggcggacgtaaataaactaaatgacctaaggcgggctttggctgaaatccaaatggaaagtaatgatatttccaaatttaacgtcgaagaacgtgttaatgagctatttaatgaaaagaaatctctggctttaaagagactgaaagaactagaaacaaaatacaaaggatttggtattgactttaatgtcgacgagattatggacagtccaaagaaaaatactggggacgtggaaacggaagaagacgctaactatgccagtcttgaccctaagacatatcagaaaaagttagacgagattaatagaataacggaccagttgttagatattcagactcaaaccgaacacgaaatacaagtagaagaagatggggaaagcgatctttcctcttcaagttctgatgatgaaagtgaggaaatataccaagacgcatctccaactcaagaactaaggagcgaacactcagagctatcttcaggatcaggtcctgggtcttttctcgatgccttatctcaaaaatatggtactggtcaaaatgttactgcatcggctgcttttggagagaacaataacggttcgggtattggacctctacatagtaaagttgaaaagacctttatgaacagactcagaaaatccaccgtgtcttctgctccatatttagaggagttaacacagaaggtaaataaagttgaaccatatgaacaaaatgaagatgaaggtctagataaaaaatctttaccggaaaacagcacggcaagtgcagcttccgcctttgacaaagctgagaaagacatgagacaacatgtggaaaacggaaagcaagggcgtgtggtaaatcatgaagaagataaaacagcggatttcagcgctgtgagtaaactgaataatacagatggcgcagaagatctctctactcaatcatctgtactctcctcacagccgccaccgcctcctcctcctcctcctccagttcccgccaaattgttcggtgaatcgttggagaaagagaaaaagtcggaagacgacactgtcaagcaagaaactactggggattctcctgctcctccccctccaccaccaccacctcctcctccacccatggcattgttcggcaaacccaagggagaaacaccaccaccgccgccgctaccatctgtattatcttcatctactgatggcgtcattccgccagctccacctatgatgccggcatcgcaaatcaaatcagctgtaacatcaccattacttcctcaatcgccctcattatttgaaaagtatcctcgtccacacaagaaattaaagcaactgcattgggaaaaattagattgtactgataattctatttggggtacaggtaaagctgagaagttcgcagatgacttatacgaaaagggtgttcttgctgatttagaaaaggcctttgccgctagggaaattaaatcattagcaagcaagcgcaaggaagatctgcagaaaattacatttttatccagggatatttctcaacagtttggtatcaatttgcatatgtattcatcactttcggttgccgatctggtgaaaaagattctaaactgcgatagggattttttgcaaacaccgagtgttgttgagtttttgtcaaaatctgaaataattgaagtttctgttaatttagctaggaattacgccccgtattcgacagactgggagggcgtgaggaatctcgaagatgccaagccccctgaaaaagatccaaacgatttacagagggctgaccaaatttatttgcaattgatggttaatctagaatcatactggggttcacgtatgagagctctcacagtggttacttcgtatgaaagagaatataatgagttattggcaaagttaagaaaagtcgacaaagctgttagcgcgcttcaagaatcagataacttgcgcaatgtctttaatgttatcttagcagttggtaatttcatgaacgacacttctaagcaggcacaaggtttcaaactttcaaccttgcagaggttgacgtttatcaaggatactaccaatagcatgacctttctaaattacgtcgaaaaaattgtcaggttaaattatccaagcttcaatgactttctaagtgaattagaacctgtattggatgtcgtgaaagtttccattgagcagttagttaacgactgtaaggactttagccaatcgattgtaaacgtagagcgttcagttgaaattggtaatttaagcgattcctcaaagtttcatccattagataaagttttgataaaaacattgcccgtgttaccggaagccagaaaaaagggggacttgttagaagacgaagttaagctgactatcatggaatttgaaagtctgatgcatacgtacggtgaagattctggtgataagtttgcaaaaatctcattctttaagaaatttgcagattttataaatgaatacaaaaaagctcaagcgcaaaatctagccgcggaagaagaagaaagactttatataaagcataagaaaatagtggaagaacagcaaaaaagggcacaagaaaaggaaaaacaaaaagagaacagcaattcgccttcatctgaaggaaatgaagaggatgaagcagaagataggcgcgctgttatggataaactattagaacagttgaaaaatgcaggtcctgctaaaagtgacccatcttccgccagaaagagagccctagtgaggaaaaaatatctttctgaaaaagacaacgctccacaattactcaacgatttggatactgaagaagggtctattctttattctccagaagctatggaccctactgccgatacagtgattcacgctgaatcacccactccgcttgccacaaggggtgttatgaatacctctgaagatttaccatcgccatccaagacatctgcgctggaagatcaagaggaaattagtgacagagctagaatgttattaaaggagctaagaggctctgacacaccagtaaagcaaaattccatactcgatgaacatctagaaaaattgagggcccgcaaggaaagatccataggtgaggctagcacaggtaacaggctaagtttcaaataa

SEQ ID NO: 9142 - DNA, 5862 bp, Artificial Sequence
  Description of Artificial Sequence: Synthetic polynucleotide
atgttgaagaatagtggctccaaacattccaactccaaggaaagtcattctaatagtagttctggtatattccaaaatttgaagcgtttggctaacagtaatgcaacgaatagcaatacgggttctccgacctatgcatcccaacaacagcactctccagtgggaaacgaagtgtccacttctcctgcatcttcttcttcttttagaaaattgaatgcaccttctaggtctacatctactgaggcgaggccgttgaataaaaaatctacattaaacacacaaaacttgtctcaatatatgaatggtaaattaagtggagatgttcccgtatcctctcagcacgcaaggagccattctatgcaaagtaaatattcttattccaagaggaattcttctcaggcgtccaataagttaacaaggcagcataccgggcaaagtcactccgcaagtagtcttctctctcaaggttctttgactaacttgagcaaattcactacacccgatggtaaaatttatttagaaatgccgtctgacccatacgaggtggaagttttgtttgaagatattatgtataaaagaaatatttttcagtctttatctgaggacaaacaagaagctttgatgggctacagcattgagaagaaatggttgattgttaagcaggatttacaaaatgagttgaaaaaaatgagagcaaacactacatcttcttccactgcctccagaacttctatggcgtctgaccatcatcctatccttacggctaattcttctctttcttctcccaaatctgttttgatgacaagcgcctcttctcccacctctactgtatacagcaacagtttaaatcattctactactctttcttctgtaggtacgtccacctccaaggggaaaaaattagtgagcgggagtttgaaaaagcagccatctttgaacaatatttatagaggtggggctgagaacaatacgagtgcatctactcttccaggagacagaacaaacagaccaccgatacattatgtgcaaagaatcttggcagacaaacttactagcgatgagatgaaagatttatgggtaactttaagaactgaacagttagactgggtagacgcttttatagaccatcagggtcacattgctatggctaatgtattaatgaactctatttataagactgcacccagagaaaacttgactaaagaattattagagaaagaaaattctttttttaaatgcttcagagtcttatctatgctctctcaaggtttgtatgagttcagtacacataggttaatgactgatactgttgcagaaggtttattctctacgaaattggccacaaggaaaatggccactgaaatttttgtttgtatgttggaaaaaaaaaataaaagcagattcgaagcagttcttacctctttagataaaaagtttaggatagggcaaaatcttcatatgattcaaaacttcaaaaaaatgccccagtatttctctcatttaaccttggaaagtcatttgaaaattattcaagcctggttatttgccgttgaacaaactttagatggaagaggaaaaatgggttccttagtaggcgcgtctgatgaatttaaaaatggtgggggtgaaaatgcgattttggaatactgccaatggacaatggtttttatcaatcatttatgctcttgctctgataacataaatcaaagaatgcttttaaggacgaaattagaaaattgtggaattttaagaattatgaacaaaataaaattattagattacgacaaggtaattgaccaaattgagttatatgacaataataaacttgacgattttaacgttaaattagaggccaacaataaggcttttaatgtagatttacacgatccattatctttattaaaaaacctttgggatatatgtaaaggtaccgagaatgaaaagcttttagtatctttagttcaacatcttttcctttctagttccaagttaatagaagaaaaccaaaattcctctaaacttactaagcaattgaaacttatggattctttggtgactaatgttagtgttgcctctacttctgatgaagaaactaatatgaatatggctatccagagactttacgatgccatgcagactgatgaagttgcacgtcgtgctatattagaaagtagagctttgacgaagaaattggaagaaattcaggcagaaagggattctttaagtgaaaagttaagcaaggcggagcacggactcgttggacagttagaagatgagttgcatgagagagatcgtattttagctaagaatcagagagttatgcagcagttagaagctgagttagaagagttgaaaaagaagcatcttttggaaaagcatcagcaagaggtagaattgagaaaaatgttgactatattgaattctaggcctgaagaaagcttcaataagaatgaaggcaccagaggtatgaactccagcttgaattcttctgagaaagcgaatatccaaaaggtgttacaggacggattatctagagcaaaaaaggattacaaggatgattctaaaaaattcggcatgacacttcaacctaataagagattaaaaatgttaagaatgcaaatggaaaatattgaaaatgaagccaggcaattggagatgacaaattttgctgaatttgagaaagatcgtcttgaacctccaatacatattaagaagcccaaagtgaagaagatgaaaaataaggataggaaacctttagtcaagcctcaagaggcggacgtaaataaattgaatgacttgaggagagctttggctgaaatccaaatggaaagtaatgatatttccaaatttaacgtcgaagaacgtgttaatgagttatttaatgaaaagaaatctttggctttaaagagattgaaagaattggaaacaaaatacaaaggatttggtattgactttaatgtcgacgagattatggacagtccaaagaaaaatactggggacgtggaaacggaagaagacgctaactatgccagtcttgaccctaagacatatcagaaaaagttagacgagattaatagaataacggaccagttgttagatattcagactcaaaccgaacacgaaatacaagtagaagaagatggggaaagcgatctttcctcttccagttctgatgatgaaagtgaggaaatataccaagacgcatctccaactcaagaattgaggagcgaacacagcgagctttcttctggatctggtcctgggtcttttctcgatgccttatctcaaaaatatggtactggtcaaaatgttactgcatctgctgcttttggagagaacaataacggttctggtattggacctttgcatagtaaagttgaaaagacctttatgaacagactcagaaaatccaccgtgtcttctgctccatatttagaggagttaacacagaaggtaaataaagttgaaccatatgaacaaaatgaagatgaaggtttggataaaaaatctttaccggaaaacagcacggcaagtgcagcttccgcctttgacaaagctgagaaagacatgagacaacatgtggaaaacggaaagcaagggcgtgtggtaaatcatgaagaagataaaacagcggatttcagcgctgtgagtaaattgaataatacagatggcgcagaagatctctctactcaatcttctgtactctcctctcagccgccaccgcctcctcctcctcctcctccagttcccgccaaattgttcggtgaatctttggagaaagagaaaaagtctgaagacgacactgtcaagcaagaaactactggggattctcctgctcctccccctccaccaccaccacctcctcctccacccatggcattgttcggcaaacccaagggagaaacaccaccaccgccgccgttaccatctgtattatcttcttctactgatggcgtcattccgccagctccacctatgatgccggcatctcaaatcaaatctgctgtaacatctccattacttcctcaatctccctctttatttgaaaagtatcctcgtccacacaagaaattaaagcaattgcattgggaaaaattagattgtactgataattctatttggggtacaggtaaagctgagaagttcgcagatgacttatacgaaaagggtgttcttgctgatttagaaaaggcctttgccgctagggaaattaaatctttagcaagcaagcgcaaggaagatttacagaaaattacatttttatccagggatatttctcaacagtttggtatcaatttgcatatgtattcttctctttctgttgccgatttggtgaaaaagattttgaactgcgatagggattttttgcaaacaccgagtgttgttgagtttttgagtaaatctgaaataattgaagtttctgttaatttagctaggaattacgccccgtattctacagactgggagggcgtgaggaatctcgaagatgccaagccccctgaaaaagatccaaacgatttacagagggctgaccaaatttatttgcaattgatggttaatttggaatcttactggggttctcgtatgagagctctcacagtggttacttcttatgaaagagaatataatgagttattggcaaagttaagaaaagtcgacaaagctgttagcgcgcttcaagaaagtgataacttgcgcaatgtctttaatgttatcttagcagttggtaatttcatgaacgacacttctaagcaggcacaaggtttcaaactttctaccttgcagaggttgacgtttatcaaggatactaccaatagcatgacctttttgaattacgtcgaaaaaattgtcaggttaaattatccaagcttcaatgactttttgagtgaattagaacctgtattggatgtcgtgaaagtttccattgagcagttagttaacgactgtaaggactttagccaatctattgtaaacgtagagcgttctgttgaaattggtaatttaagcgattcctccaagtttcatccattagataaagttttgataaaaacattgcccgtgttaccggaagccagaaaaaagggggacttgttagaagacgaagttaagttgactatcatggaatttgaaagtttaatgcatacgtacggtgaagattctggtgataagtttgcaaaaatctctttctttaagaaatttgcagattttataaatgaatacaaaaaagctcaagcgcaaaatttggccgcggaagaagaagaaagactttatataaagcataagaaaatagtggaagaacagcaaaaaagggcacaagaaaaggaaaaacaaaaagagaacagcaattctccttcttctgaaggaaatgaagaggatgaagcagaagataggcgcgctgttatggataaattattagaacagttgaaaaatgcaggtcctgctaaaagtgacccatcttccgccagaaagagagccttagtgaggaaaaaatatctttctgaaaaagacaacgctccacaattactcaacgatttggatactgaagaagggtctattctttattctccagaagctatggaccctactgccgatacagtgattcacgctgaaagtcccactccgcttgccacaaggggtgttatgaatacctctgaagatttaccatctccatccaagacatctgcgttagaagatcaagaggaaattagtgacagagctagaatgttattaaaggagttaagaggctctgacacaccagtaaagcaaaattccatactcgatgaacatttggaaaaattgagggcccgcaaggaaagatccataggtgaggctagcacaggtaacaggttgagtttcaaatga

SEQ ID NO: 9143 - DNA, 1722 bp, Saccharomyces cerevisiae
atggatgaaactgtgaacatacaaatgtccaaggaaggtcagtatgaaatcaattctagctctataataaaagaggaggagtttgtagatgaacaatattctggggagaacgttacgaaggccatcaccacagagagaaaagtcgaggatgatgctgctaaggaaacagagagctcaccacaagaaagaagagaggtgaagcggaagttaaagcagcggcatatagggatgattgctctcggcggcaccattgggacgggcctcataattggtattggtccgccattggcacacgccggccctgttggtgccttgatatcgtatttatttatggggacagtgatttactccgttacacaatcgttaggagagatggtcacttttatcccggttacatcttcattttctgtcttcgcccaaagatttctgtcgccagcgctgggagcgactaacggatatatgtactggctgtcgtggtgtttcaccttcgcactggaactatccgttttggggaaagttattcagtactggacagaagcagtgcctctagcggcttggatcgtgatcttttggtgcctgttaacttcaatgaacatgtttcccgtaaagtattacggagaatttgagttttgtattgcctccataaaggtcatcgcgttgctcggttttatcattttctcattctgtgttgtgtgtggtgcgggacaatctgatggacccatcggtttcaggtactggagaaatccaggagcctgggggcctggcattatctccagtgataaaaatgagggccgttttctcggatgggtttcctctttgattaatgctgcatttacgtaccaaggtactgaactggttgggataaccgctggtgaagcggctaacccaagaaaagctctcccgagggcaataaagaaagttgtagtgaggattctagtcttttacattctttcactatttttcattggccttttggtcccatataatgacccaaagttggatagtgacggtatatttgtctcttcatcgccctttatgataagcattgagaattcaggcacaaaagttctcccagatatatttaacgcggtcgtgctaatcaccattctttccgcaggtaactctaatgtgtacattggctcaagagtactgtatagtctgtctaaaaatagcttggcgccaaggttcttgtctaacgtgaccagaggtggtgttccatacttttctgttctatctacatccgtgttcggatttttggctttcttagaggtttctgcaggcagcggcaaggcctttaactggttattgaacataactggtgtggccggtttctttgcctggcttttgatttcattttctcatatccgtttcatgcaagccataaggaaacgtggtatatcgagggatgacttaccttataaagctcaaatgatgccttttttggcatattatgcatcttttttcatcgctctaattgttctgatccagggcttcaccgctttcgcacctacttttcagcctatagactttgtcgctgcatatatatcaatattcctatttttggccatatggttatcattccaagtttggtttaagtgccgcttactctggaagctgcaggatatcgatatcgattctgaccgccggcaaatagaggagttggtatggatagagccagaatgtaaaacaaggtggcaacgagtttgggatgtcctttcataa

SEQ ID NO: 9144 - DNA, 1722 bp, Artificial Sequence
  Description of Artificial Sequence: Synthetic polynucleotide
atggatgaaactgtgaacatacaaatgtccaaggaaggtcagtatgaaatcaattctagctctataataaaagaggaggagtttgtagatgaacaatattctggggagaacgttacgaaggccatcaccacagagagaaaagtcgaggatgatgctgctaaggaaacagagagctctccacaagaaagaagagaggtgaagagaaagttaaagcagaggcatatagggatgattgctctcggcggcaccattgggacgggcctcataattggtattggtccgccattggcacacgccggccctgttggtgccttgatatcttatttatttatggggacagtgatttactccgttacacaatctttaggagagatggtcacttttatcccggttacatcttctttttctgtcttcgcccaaagatttttatctccagcgttgggagcgactaacggatatatgtactggttatcttggtgtttcaccttcgcattggaattatccgttttggggaaagttattcagtactggacagaagcagtgcctttagcggcttggatcgtgatcttttggtgccttttaacttctatgaacatgtttcccgtaaagtattacggagaatttgagttttgtattgcctccataaaggtcatcgcgttgctcggttttatcattttcagtttctgtgttgtgtgtggtgcgggacaatctgatggacccatcggtttcaggtactggagaaatccaggagcctgggggcctggcattatctccagtgataaaaatgagggccgttttctcggatgggtttcctctttgattaatgctgcatttacgtaccaaggtactgaattggttgggataaccgctggtgaagcggctaacccaagaaaagctctcccgagggcaataaagaaagttgtagtgaggattttagtcttttacattctttctttatttttcattggccttttggtcccatataatgacccaaagttggatagtgacggtatatttgtctcttcttctccctttatgataagcattgagaatagtggcacaaaagttctcccagatatatttaacgcggtcgtgttaatcaccattctttccgcaggtaactctaatgtgtacattggctccagagtattatatagtttatctaaaaatagcttggcgccaaggttcttgtctaacgtgaccagaggtggtgttccatacttttctgttttatctacatccgtgttcggatttttggctttcttagaggtttctgcaggcagcggcaaggcctttaactggttattgaacataactggtgtggccggtttctttgcctggcttttgatttccttttctcatatccgtttcatgcaagccataaggaaacgtggtatatctagggatgacttaccttataaagctcaaatgatgccttttttggcatattatgcatcttttttcatcgctttgattgttttgatccagggcttcaccgctttcgcacctacttttcagcctatagactttgtcgctgcatatatatccatattcttatttttggccatatggttatctttccaagtttggtttaagtgccgcttactctggaagttacaggatatcgatatcgattctgaccgccgtcaaatagaggagttggtatggatagagccagaatgtaaaacaaggtggcaaagagtttgggatgtcctttcctga

SEQ ID NO: 9145 - DNA, 396 bp, Saccharomyces cerevisiae
atgtctattgtgctacggaagagtaacaaaaaaaacaaaaactgcataacaagcaagttttatacaatacacattataaaaatttctactccggtgttccgagctcccattgccattggagaaagcccttatgtggagtggagctgcctacaggttgttttcaggaaagacatggttacaaaaaagacgacattcgcccaacttatcactcgcttgaaccactttttatgccaagcccttaaacgccgcgactcaaaaacatacatactgtgccgcacggcagtttttggcgctatgacacccttttccccaagaaaatcgcatattaacaacaaattacccatgcaacccaggaaaaaaaaaatagtcattatatacgtagtgcgctttcattga

SEQ ID NO: 9146 - DNA, 396 bp, Artificial Sequence
  Description of Artificial Sequence: Synthetic polynucleotide
atgtctattgtgttaagaaagagtaacaaaaaaaacaaaaactgcataacaagcaagttttatacaatacacattataaaaatttctactccggtgttcagagctcccattgccattggagaaagcccttatgtggagtggagctgcttacaggttgttttcaggaaagacatggttacaaaaaagacgacattcgcccaacttatcactcgcttgaaccactttttatgccaagcccttaaacgccgcgactctaaaacatacatattgtgccgcacggcagtttttggcgctatgacacccttttccccaagaaaatctcatattaacaacaaattacccatgcaacccaggaaaaaaaaaatagtcattatatacgtagtgcgctttcattga

SEQ ID NO: 9147 - DNA, 1836 bp, Saccharomyces cerevisiae
atgggcaggtttagtaacataataacgtccaataaatgggacgagaaacaaaacaacattggcgaacagagcatgcaggaattaccagaagaccagatagaacatgagatggaagcaatagatccaagtaataagacgaccccatactctattgatgagaaacagtacaacacaaaaaagaagcatgggtcattgcaaggtggcgcaattgctgatgtaaattcgataactaattcgttaacaagattgcaagttgtctctcatgaaacagatattaacgaggatgaagaagaagcccactatgaggataaacacgtgaagagagccttgaagcaaagacacattggtatgattgcactaggtggtacaatcggtactggtcttttcgttggtatctccactcccttgagtaatgctggccctgtggggtccctgattgcttacattttcatgggcaccattgtctacttcgttacccagtcacttggtgagatggctacgtttatccccgtgacatcatctatcactgtcttttcgaagaggttcttatcacctgcattcggtgtttctaacggctacatgtactggttcaattgggctattacttatgctgtggaggtttctgtcattggccaagttattgaatactggacagataaagttccattagcggcctggattgcgatattctgggtaattattactttgatgaattttttccctgtcaaagtttatggtgaatttgagttctgggtggcctctgttaaagttttagccattatgggttacttgatatatgctttgattattgtctgcggtggatcccaccagggccctatcggtttcaggtactggagaaatccaggagcctgggggccaggcatcatctccagtgataaaagtgaaggccgttttctcggatgggtctcctccttgattaatgctgcatttacgtaccaaggtactgaactggttgggatcaccgctggtgaagcggctaacccaagaaagaccgttccaagagctatcaataaagtcgtctttagaatcgtactattctatattatgtctttgttctttattggtctactggttccatacaacgattcccgtttatctgctagttctgctgttattgcatcatcacccttcgttatttccattcaaaacgctggtacttatgctcttccagatattttcaacgccgtggtgttgattactgttgtatctgccgctaattcgaatgtttacgttggttcccgtgttctttactctttagctaggactggtaacgcaccaaagcaatttggatacgtcaccagacagggtgttccatatctcggtgttgtttgcactgctgcattgggtcttttggcattcctggttgtcaataacaatgcaaacactgcatttaactggttgatcaacatttccactttggctgggttatgcgcctggttattcatctctttggcacatattaggttcatgcaagctttaaagcaccgtggtatttctcgtgatgatctgcccttcaaggccaaattgatgccttatggtgcctactacgcagccttttttgtcaccgtcatcatattcatccaagggttccaagcgttctgtccgttcaaagtttctgagtttttcacatcttacatctccttgattcttttagccgttgtgttcattggttgccagatatactacaaatgcagatttatttggaagctagaagatattgacatcgattccgacagaagagaaatcgaagcaattatttgggaagacgacgagcctaagaatttatgggagaaattctgggctgctgttgcatag

SEQ ID NO: 9148 - DNA, 1836 bp, Artificial Sequence
  Description of Artificial Sequence: Synthetic polynucleotide
atgggcaggtttagtaacataataacgtccaataaatgggacgagaaacaaaacaacattggcgaacagagcatgcaggaattaccagaagaccagatagaacatgagatggaagcaatagatccaagtaataagacgaccccatactctattgatgagaaacagtacaacacaaaaaagaagcatgggtctttgcaaggtggcgcaattgctgatgtaaattctataactaattctttaacaagattgcaagttgtctctcatgaaacagatattaacgaggatgaagaagaagcccactatgaggataaacacgtgaagagagccttgaagcaaagacacattggtatgattgcattgggtggtacaatcggtactggtcttttcgttggtatctccactcccttgagtaatgctggccctgtggggtccttgattgcttacattttcatgggcaccattgtctacttcgttacccagtctcttggtgagatggctacgtttatccccgtgacatcttctatcactgtcttttccaagaggttcttatctcctgcattcggtgtttctaacggctacatgtactggttcaattgggctattacttatgctgtggaggtttctgtcattggccaagttattgaatactggacagataaagttccattagcggcctggattgcgatattctgggtaattattactttgatgaattttttccctgtcaaagtttatggtgaatttgagttctgggtggcctctgttaaagttttagccattatgggttacttgatatatgctttgattattgtctgcggtggatcccaccagggccctatcggtttcaggtactggagaaatccaggagcctgggggccaggcatcatctccagtgataaaagtgaaggccgttttctcggatgggtctcctccttgattaatgctgcatttacgtaccaaggtactgaattggttgggatcaccgctggtgaagcggctaacccaagaaagaccgttccaagagctatcaataaagtcgtctttagaatcgtattattctatattatgtctttgttctttattggtttattggttccatacaacgattcccgtttatctgctagttctgctgttattgcatcttctcccttcgttatttccattcaaaacgctggtacttatgctcttccagatattttcaacgccgtggtgttgattactgttgtatctgccgctaatagtaatgtttacgttggttcccgtgttctttactctttagctaggactggtaacgcaccaaagcaatttggatacgtcaccagacagggtgttccatatctcggtgttgtttgcactgctgcattgggtcttttggcattcttggttgtcaataacaatgcaaacactgcatttaactggttgatcaacatttccactttggctgggttatgcgcctggttattcatctctttggcacatattaggttcatgcaagctttaaagcaccgtggtatttctcgtgatgatttgcccttcaaggccaaattgatgccttatggtgcctactacgcagccttttttgtcaccgtcatcatattcatccaagggttccaagcgttctgtccgttcaaagtttctgagtttttcacatcttacatctccttgattcttttagccgttgtgttcattggttgccagatatactacaaatgcagatttatttggaagttggaagatattgacatcgattccgacagaagagaaatcgaagcaattatttgggaagacgacgagcctaagaatttatgggagaaattctgggctgctgttgcatga

SEQ ID NO: 9149 - DNA, 3201 bp, Saccharomyces cerevisiae
atgcataaagcatccagttcaaagaaaagctttgatgatactattgaactaaaaaaaaatgaacaattactgaaactgatcaactctagtgaattcacccttcacaattgtgtggagttactgtgcaaacactccgaaaatattggtatacattactatttatgtcagaaattggccacatttcctcacagcgaactacagttctatattccccaactagtacaggtcctcgtcaccatggagacagaatcaatggctttagaagatttactattaaggttgagggcggaaaaccctcattttgcactactgacgttttggcagttacaagcgttactaacggatttatctactgaccccgcttcttatggcttccaagtggctagaagagtcttaaacaacttacaaaccaatctctttaacacaagttcaggtagcgataaaaatgttaaaatacatgaaaacgttgcaccggccttagttctttcctctatgataatgtcggctatagcattcccccaattaagcgaagtgaccaaaccattagtggaatctcaaggtagaagacaaaaagctttcgtttttaagttggctagaagtgcaatgaaagattttaccaagaacatgaccttgaaaaataccctactaaacaagaaaacttccagatccaaaagagttagctcaaatcgcagttcaactccgacttctccaatagatttaatagatccaataaaaactaaagaagatgcatccttcaggaaatccagacatagtgaggtaaaattggatttcgacattgtggatgatataggtaaccaggtctttgaagaaagaatctcatcttcaatcaaactcccaaaacgtaaacctaagtatttggataattcatacgttcataggacatatgatggcaaaaatataaacagggacggaagcatttcaaataccgcaaaggctctcgatggaaataaaggtgattatatttctccaaagggacgtaatgatgaaaataatgagattggtaacaatgaagatgaaactggtggtgaaacggaggaggacgcggacgctttaaactctgatcacttcaccagttctatgccagatctgcataatattcaaccaaggacttcttctgcttcatctgcttctttagaagggacacctaagttaaacaggaccaattcccaacccctttcgcgccaggcattcaaaaacagtaaaaaagcgaattcttctttgagtcaagaaattgacttgtcgcaattatcgaccacttcaaaaataaaaatgttaaaagcaaattattttcgttgcgagacacaatttgccattgcgctagaaacaatatctcaaaggctagctcgagtaccgacagaagctagattgagtgccttacgagccgagttgtttctattaaacagggacctaccagcggaagtagatatccccactttattgcctccaaataaaaaaggaaagttacataaattagtgaccattactgctaatgaggcacaagttttgaactctgcagaaaaagttccatatttactcctgatagaatacttgagagacgaatttgattttgacccaacaagtgaaaccaatgaaagattattaaagaagatcagtggtaatcagggaggcttgatatttgatttaaattacatgaatagaaaagaaaacaacgaaaatagaaatgaaagtactcttactagcaacaacactcgatcttcggtatatgatagtaactcgttcaacaacggggcctcccgcaatgaaggtctatccagtacctcaagaagtgattcagcgtccacagctcatgttaggactgaagtcaataaagaggaagatttaggtgatatgtcaatggtaaaagtcaggaacagaacggatgacgaagcgtatagaaatgctttagtaatacagagtgccgcaaatgttccaattttacctgatgatagtcaagacagaagcccagagttgaactttggctcaaacttggacgaagtactcatcgagaatggaattaatagcaaaaatatacatagccaaactgacgctttagcagaccagatgagagtttcagctgttatgttagcacaattggataagtcgccacaacagttatcagaaagtaccaaacaaatccgcgctcaaattatttcatcaatgaaggaggtgcaggataaatttggttaccatgatttggaagcccttcatggaatggcaggtgagagaaaattggaaaacgatttaatgacgggtggtattgacacttcatatctaggtgaagattgggctaccaagaaagagaggatacgtaaaacttcggaatatggccatttcgaaaactgggatttatgttctgtaatcgccaagacgggtgatgatttgagacaggaggcgtttgcataccagatgattcaagcgatggccaatatttgggttaaagaaaaagttgacgtttgggttaaaagaatgaaaattttaattactagtgcgaatacgggacttgtggagaccatcacaaatgctatgtctgtgcatagtattaaaaaggctttaaccaaaaaaatgattgaagatgcagaactagatgacaagggtggtattgcctctttgaatgatcacttccttagagcttttggtaatcctaatggatttaagtatagaagagcacaagacaactttgcttcttcgttagccgcatattctgtcatttgctatctcttgcaggttaaagatagacacaacggtaacattatgatcgataacgaaggccatgtaagtcacatcgattttggatttatgctatcaaattcacccggctcagtgggctttgaggccgcaccattcaaattaacttacgaatatattgaactgctaggcggagtagagggagaagcgtttaaaaagtttgttgaactaactaaaagttcgttcaaggctctgagaaagtatgctgatcaaatcgtatcaatgtgtgagattatgcaaaaggacaatatgcagccttgtttcgatgctggcgaacaaacaagtgtacaactacgacaaaggttccaattggacttatcagaaaaagaagttgatgacttcgtagaaaatttcttgataggtaaatctttgggtagtatttacaccagaatatacgaccaatttcaacttattacacagggtatatatagctga

SEQ ID NO: 9150 - DNA, 3201 bp, Artificial Sequence
  Description of Artificial Sequence: Synthetic polynucleotide
atgcataaagcatccagttccaagaaaagctttgatgatactattgaattgaaaaaaaatgaacaattattgaaattaatcaactctagtgaattcacccttcacaattgtgtggagttattatgcaaacactccgaaaatattggtatacattactatttatgtcagaaattggccacatttcctcacagcgaattacagttctatattccccaattggtacaggtcctcgtcaccatggagacagaaagtatggctttagaagatttattattaaggttgagggcggaaaaccctcattttgcattattgacgttttggcagttacaagcgttattgacggatttatctactgaccccgcttcttatggcttccaagtggctagaagagtcttaaacaacttacaaaccaatctctttaacacaagttctggtagcgataaaaatgttaaaatacatgaaaacgttgcaccggccttagttctttcctctatgataatgtctgctatagcattcccccaattaagcgaagtgaccaaaccattagtggaatctcaaggtagaagacaaaaagctttcgtttttaagttggctagaagtgcaatgaaagattttaccaagaacatgaccttgaaaaataccttattaaacaagaaaacttccagatccaaaagagttagcagtaatcgcagttctactccgacttctccaatagatttaatagatccaataaaaactaaagaagatgcatccttcaggaaatccagacatagtgaggtaaaattggatttcgacattgtggatgatataggtaaccaggtctttgaagaaagaatctcttcttctatcaaactcccaaaacgtaaacctaagtatttggataattcttacgttcataggacatatgatggcaaaaatataaacagggacggaagcatttctaataccgcaaaggctctcgatggaaataaaggtgattatatttctccaaagggacgtaatgatgaaaataatgagattggtaacaatgaagatgaaactggtggtgaaacggaggaggacgcggacgctttaaactctgatcacttcaccagttctatgccagatttgcataatattcaaccaaggacttcttctgcttcttctgcttctttagaagggacacctaagttaaacaggaccaattcccaacccctttcccgccaggcattcaaaaacagtaaaaaagcgaattcttctttgagtcaagaaattgacttgtctcaattatctaccacttctaaaataaaaatgttaaaagcaaattattttcgttgcgagacacaatttgccattgcgttagaaacaatatctcaaaggttggctcgtgtaccgacagaagctagattgagtgccttaagagccgagttgtttttattaaacagggacttaccagcggaagtagatatccccactttattgcctccaaataaaaaaggaaagttacataaattagtgaccattactgctaatgaggcacaagttttgaactctgcagaaaaagttccatatttactcttaatagaatacttgagagacgaatttgattttgacccaacaagtgaaaccaatgaaagattattaaagaagatcagtggtaatcagggaggcttgatatttgatttaaattacatgaatagaaaagaaaacaacgaaaatagaaatgaaagtactcttactagcaacaacactagatcttctgtatatgatagtaactctttcaacaacggggcctcccgcaatgaaggtttatccagtacctccagaagtgattctgcgtccacagctcatgttaggactgaagtcaataaagaggaagatttaggtgatatgtccatggtaaaagtcaggaacagaacggatgacgaagcgtatagaaatgctttagtaatacagagtgccgcaaatgttccaattttacctgatgatagtcaagacagaagcccagagttgaactttggctctaacttggacgaagtactcatcgagaatggaattaatagcaaaaatatacatagccaaactgacgctttagcagaccagatgagagtttctgctgttatgttagcacaattggataagtctccacaacagttatctgaaagtaccaaacaaatccgcgctcaaattatttcttctatgaaggaggtgcaggataaatttggttaccatgatttggaagcccttcatggaatggcaggtgagagaaaattggaaaacgatttaatgacgggtggtattgacacttcttatttgggtgaagattgggctaccaagaaagagaggatacgtaaaacttctgaatatggccatttcgaaaactgggatttatgttctgtaatcgccaagacgggtgatgatttgagacaggaggcgtttgcataccagatgattcaagcgatggccaatatttgggttaaagaaaaagttgacgtttgggttaaaagaatgaaaattttaattactagtgcgaatacgggacttgtggagaccatcacaaatgctatgtctgtgcatagtattaaaaaggctttaaccaaaaaaatgattgaagatgcagaattagatgacaagggtggtattgcctctttgaatgatcacttccttagagcttttggtaatcctaatggatttaagtatagaagagcacaagacaactttgcttcttctttagccgcatattctgtcatttgctatctcttgcaggttaaagatagacacaacggtaacattatgatcgataacgaaggccatgtaagtcacatcgattttggatttatgctttctaattctcccggctctgtgggctttgaggccgcaccattcaaattaacttacgaatatattgaattattaggcggagtagagggagaagcgtttaaaaagtttgttgaattgactaaaagttctttcaaggctttgagaaagtatgctgatcaaatcgtatctatgtgtgagattatgcaaaaggacaatatgcagccttgtttcgatgctggcgaacaaacaagtgtacaattaagacaaaggttccaattggacttatctgaaaaagaagttgatgacttcgtagaaaatttcttgataggtaaatctttgggtagtatttacaccagaatatacgaccaatttcaacttattacacagggtatatatagctga

SEQ ID NO: 9151 - DNA, 897 bp, Saccharomyces cerevisiae
atggctccgtcaatgattccgttcactatcaagcttaaaacatgcctgaaaatgtgtattcaaaggttaagatatgctcaagaaaagcaacaggcgattgcaaagcagtctcgaagacaggttgcacaactgttactgacaaataaagaacagaaggcgcattatcgtgtggagacgctaattcatgacgatattcatattgagctactagagatattggaactatattgtgaattactactggctagagtgcaggtaataaacgatatctccaccgaggaacagcttgtcaaagagcatatggatgatggtattaacgaagctatcagatccctaatctatgcgattcttttcgttgatgaagtcaaagaacttagccaattgaaagatttgatggcctggaaaataaacgttgagtttgttaatggagtaatagcagatcatatcgatgtccctgaaaagattataaaaaaatgctctccctcagttccaaaagaagaactagttgatctttatttgaaggaaatcgcgaaaacatacgatgtgccatatagtaagctggagaattccttatcttcgtcgtcttctaacatttcttcagactttagtgacccctcgggagatatcgaggataatgacgaagaaaagcctattttagccttagataatgacgataatgacaatgcagatgctaaacaccctatcactgttaaaaagcctaggcagaatagtgaaaatatcaagaacgagctcaagattccgaaagatatcaaaaaggaagtgatcgaaaagaaacaatcagaaaagaaaactacaaaaagaaagactaagaaggagcaagaaaatgatgaactagatgagttgaagaaacggtttgacgctttacgcagaaaataa

SEQ ID NO: 9152 - DNA, 897 bp, Artificial Sequence
  Description of Artificial Sequence: Synthetic polynucleotide
atggctccgtctatgattccgttcactatcaagcttaaaacatgcttgaaaatgtgtattcaaaggttaagatatgctcaagaaaagcaacaggcgattgcaaagcagtctagaagacaggttgcacaattattattaacaaataaagaacagaaggcgcattatcgtgtggagacgttgattcatgacgatattcatattgagttattggagatattggaattgtattgtgaattattattagctagagtgcaggtaataaacgatatctccaccgaggaacagcttgtcaaagagcatatggatgatggtattaacgaagctatcagatccttaatctatgcgattcttttcgttgatgaagtcaaagaacttagccaattgaaagatttgatggcctggaaaataaacgttgagtttgttaatggagtaatagcagatcatatcgatgtccctgaaaagattataaaaaaatgctctccctctgttccaaaagaagaattggttgatctttatttgaaggaaatcgcgaaaacatacgatgtgccatatagtaagttggagaattccttatcttcttcttcttctaacatttcttctgactttagtgaccccagtggagatatcgaggataatgacgaagaaaagcctattttagccttagataatgacgataatgacaatgcagatgctaaacaccctatcactgttaaaaagcctaggcagaatagtgaaaatatcaagaacgagctcaagattccgaaagatatcaaaaaggaagtgatcgaaaagaaacaaagtgaaaagaaaactacaaaaagaaagactaagaaggagcaagaaaatgatgaattagatgagttgaagaaaagatttgacgctttacgcagaaaatga

SEQ ID NO: 9153 - DNA, 1053 bp, Saccharomyces cerevisiae
atgggtcttttttcaagaaaacgggaccatacgcctgctgtgcctaaagagaaacttattccatgtgataagatattcttggaccctcctgccaagtatggtaacgcacctctactggaacccatctccgaagatcaaaacgaaaaatatagagctgtcttacgacattttcaagatgatgatctgaaattaccagaaaatctcaatgaccttgacaatgggacacatgccaatgacagacccttgagtgattgggagaagttttggctttctagggagtgttttctaagatacctaagagccaataaatggaacaccgcgaacgccataaaaggtctcaccaaaaccttggtatggaggagagaaattggacttacacatggtaaggaggacaaagaccctttaacagctgacaaagttgccgttgagaacgaaactggtaaacaggttattttgggctttgacaacgctaaaagacctctatactacatgaaaaatggtcgtcaaaacacagaatcttcctttagacaagtccaagaattagtctacatgatggaaactgcgacaactgtagctccccaaggtgtagaaaagatcacagtcttggtagatttcaaaagttataaagaacctggtattatcactgataaagctccacccatctctattgctaggatgtgtttgaacgtcatgcaagatcattaccctgaaaggttagctaagtgtgtcctgatcaatatcccatggtttgcgtgggcttttttgaagatgatgtatccgttccttgaccctgccactaaggcgaaggctatctttgacgaaccatttgaaaaccacatagagccatctcaactagatgctctatacaatggtctgttagacttcaagtataaacatgaagtctattggccagatatggttaagaaagttgacgatttacgattgaaacgttttgatagatttttaaagtttggaggcattgtcggattaagtgaatatgacaccaagggccaacatgacgaattaaaatatcctgttgatatggtcatttga

SEQ ID NO: 9154 - DNA, 1053 bp, Artificial Sequence
  Description of Artificial Sequence: Synthetic polynucleotide
atgggtcttttttccagaaaaagagaccatacgcctgctgtgcctaaagagaaacttattccatgtgataagatattcttggaccctcctgccaagtatggtaacgcacctttattggaacccatctccgaagatcaaaacgaaaaatatagagctgtcttaagacattttcaagatgatgatttgaaattaccagaaaatctcaatgaccttgacaatgggacacatgccaatgacagacccttgagtgattgggagaagttttggctttctagggagtgttttttaagatacttgagagccaataaatggaacaccgcgaacgccataaaaggtctcaccaaaaccttggtatggaggagagaaattggacttacacatggtaaggaggacaaagaccctttaacagctgacaaagttgccgttgagaacgaaactggtaaacaggttattttgggctttgacaacgctaaaagacctttgtactacatgaaaaatggtcgtcaaaacacagaatcttcctttagacaagtccaagaattagtctacatgatggaaactgcgacaactgtagctccccaaggtgtagaaaagatcacagtcttggtagatttcaaaagttataaagaacctggtattatcactgataaagctccacccatctctattgctaggatgtgtttgaacgtcatgcaagatcattaccctgaaaggttagctaagtgtgtcttgatcaatatcccatggtttgcgtgggcttttttgaagatgatgtatccgttccttgaccctgccactaaggcgaaggctatctttgacgaaccatttgaaaaccacatagagccatctcaattggatgctttgtacaatggtttattagacttcaagtataaacatgaagtctattggccagatatggttaagaaagttgacgatttaagattgaaacgttttgatagatttttaaagtttggaggcattgtcggattaagtgaatatgacaccaagggccaacatgacgaattaaaatatcctgttgatatggtcatttga

SEQ ID NO: 9155 - DNA, 945 bp, Saccharomyces cerevisiae
atgtcttataatccgtacgcatatgcaacaagtgagcagaatggcgttaacgatcgcttttcccacactccacaacagcaacgaccaatgcaaattccgaggaacacgcccgtgaatggccaaggtaatgcgaatatgaatgcaaacgtaaatggcagtggcggtggttttccattccaagatcctcgtggttcgatggcattccaactagggcagagcgcattttctaattttattggtcaggataactttaaccagtttcaagaaacggtcaataaagccactgcaaacgctgccggctctcaacaaatttcaacgtattttcaagtcagcacccgttatgtcatcaataaattgaaactcatcctagttccttttcttaacggaaccaagaactggcaacgaattatggactctggcaactttttgccaccaagggatgacgtgaactccccagacatgtacatgcctattatgggactagttacctatattctcatctggaatacgcagcaaggtctgaagggttcattcaaccccgaagacttgtactacaaactgtcttctactctggcgtttgtgtgtttagatttgttgattttgaagcttggcttgtatcttttgatcgattctaagattccaagcttcagtttggtcgaactgttgtgctatgtcggctacaaatttgttccattgattctcgcccagcttttgaccaacgtgaccatgccatttaacctgaatattttgataaaattttacttatttattgcctttggcgtattcctactaagatccgtcaagttcaatttactaagccgctccggtgctgaagacgatgatatacacgtttccatcagcaaatcgaccgtcaagaagtgcaattacttcctattcgtctatggcttcatttggcaaaatgttctaatgtggttaatgggttga

SEQ ID NO: 9156 - DNA, 945 bp, Artificial Sequence
  Description of Artificial Sequence: Synthetic polynucleotide
atgtcttataatccgtacgcatatgcaacaagtgagcagaatggcgttaacgatcgcttttcccacactccacaacagcaaagaccaatgcaaattccgaggaacacgcccgtgaatggccaaggtaatgcgaatatgaatgcaaacgtaaatggcagtggcggtggttttccattccaagatcctcgtggttctatggcattccaattagggcagagcgcattttctaattttattggtcaggataactttaaccagtttcaagaaacggtcaataaagccactgcaaacgctgccggctctcaacaaatttctacgtattttcaagtcagcacccgttatgtcatcaataaattgaaactcatcttggttccttttcttaacggaaccaagaactggcaaagaattatggactctggcaactttttgccaccaagggatgacgtgaactccccagacatgtacatgcctattatgggattggttacctatattctcatctggaatacgcagcaaggtttgaagggttctttcaaccccgaagacttgtactacaaattatcttctactttggcgtttgtgtgtttagatttgttgattttgaagcttggcttgtatcttttgatcgattctaagattccaagcttcagtttggtcgaattattgtgctatgtcggctacaaatttgttccattgattctcgcccagcttttgaccaacgtgaccatgccatttaacttgaatattttgataaaattttacttatttattgcctttggcgtattcttattaagatccgtcaagttcaatttattaagccgctccggtgctgaagacgatgatatacacgtttccatcagcaaatctaccgtcaagaagtgcaattacttccttttcgtctatggcttcatttggcaaaatgttttgatgtggttaatgggttga

SEQ ID NO: 9157 - DNA, 6669 bp, Saccharomyces cerevisiae
atgatgtttggcaagaaaaaaaacaacggaggatcttccactgcaagatattcagctggcaacaagtacaacacactctcaaataattatgcgcttagcgcgcaacagctcttaaatgctagtaagatcgatgacatcgattcgatgatgggatttgaaagatacgtaccgccgcaatacaatggcaggtttgatgcgaaggatatagatcagattccaggccgcgtagggtggctgacgaacatgcacgcaacgctggtctctcaggaaaccttatccagtggtagtaatggcggcggcaattcgaatgacggagaacgtgtaacgaccaaccaaggtatttccggagttgacttctactttttagatgaagagggtgggagcttcaagtcgacagttgtctatgacccatacttctttattgcgtgtaacgatgaatcaagagtaaatgatgtggaggaactagtgaaaaaatatctggaatcttgtctcaaaagcttacaaatcattagaaaggaagatcttaccatggacaatcaccttttagggctgcagaagacacttattaagttatcatttgtaaattccaatcagttattcgaggccaggaaactcctgaggccaatcttgcaggataatgccaataataatgtgcaaagaaatatatataacgttgctgcaaatggctcggaaaaagttgacgccaaacatctgatcgaagatatcagggaatatgatgtgccgtatcatgtccgagtatctatagacaaggacattagagtcggtaaatggtataaggtaactcaacagggattcattgaagatactaggaaaattgcatttgccgaccctgtggtaatggcatttgatatagaaaccacgaagccgcctttaaaattcccggattccgccgtagatcaaataatgatgatttcgtatatgatcgatggggaaggttttttgataacaaatagggagataatctctgaggatattgaagactttgagtatacaccgaaaccggagtatcctggttttttcaccatatttaacgaaaacgatgaagtggcgcttctacaaaggttttttgaacatataagagatgtacgacccactgttatatccaccttcaatggtgactttttcgattggccttttatacataacagaagtaagattcacggcttggacatgttcgatgaaattggtttcgctccagatgctgaaggtgagtacaagtcctcatactgctctcacatggattgtttccgttgggtgaagcgtgattcttatttaccacaaggttcccagggtttaaaagctgttactcaatctaagctaggttataacccaattgaactggatcccgaattaatgacgccgtatgcatttgaaaagccacagcacctttccgaatattctgtttccgatgcagtcgctacgtattacctttacatgaaatatgttcatccttttatcttttccctttgtactattattcctttgaacccggatgaaacattgagaaagggtaccggtactttgtgtgaaatgttgttgatggttcaagcttatcaacataatattcttctaccaaataagcatacagatcccattgagaggttctatgatggacatcttctagaatccgagacttacgtgggtggacatgtggagtcattagaagctggtgtttttaggagtgatttgaagaatgaattcaagatagatccttctgccattgatgaattattacaagaattaccagaagctttgaaatttagtgtggaagttgaaaataagtccagtgtagataaagtaacgaattttgaggaaataaaaaaccagataacgcagaaattattagagttgaaggaaaacaatataagaaacgaactacctttgatctatcatgtagatgtcgcctctatgtacccaaacatcatgactacaaatagactacaaccagatagtatcaaagcagagcgcgattgtgctagttgcgattttaatagacccggaaaaacctgtgcaagaaagttaaaatgggcttggagaggagaattctttcccagtaagatggatgagtataacatgatcaagcgtgcattacaaaatgagacttttcccaacaaaaacaagttttctaaaaagaaagttttgacatttgatgaactaagttacgcagaccaagttatccacataaaaaaacgtttaactgaatattcaaggaaagtttatcatagggttaaagtatcagaaattgtcgaacgagaagccattgtctgccaaagagaaaatccattctacgtcgataccgtgaaatcctttcgtgataggcgttacgaattcaaaggtttagccaagacttggaagggaaatctgtccaaaattgacccatctgataagcatgcgagagacgaggccaaaaagatgattgtgctttatgactcattacaattagctcacaaagttattttgaattcgttttatgggtatgttatgaggaaaggctctcgttggtattccatggaaatggcggggattacgtgtttaacaggtgccacgatcattcaaatggcgagagctttagtagaaagggtaggaagaccattagaattagatactgatggtatttggtgtatcttaccaaaatctttccctgaaacttacttttttacattagaaaatggtaaaaagctttatctctcctacccatgttccatgctgaattacagagttcaccaaaagtttacgaatcaccaataccaagaattaaaagacccattgaactatatatatgagacgcacagtgaaaacacgatttttttcgaagttgacggaccatataaggccatgattttgcctagttccaaggaagaaggaaaaggtataaagaaaagatatgctgtcttcaatgaagacggctcacttgctgaactgaaaggttttgaattgaagaggcgtggtgaattacaactaataaaaaattttcaaagtgatattttcaaggtctttttggaaggtgatacattagaaggatgttacagtgctgtagcaagcgtatgtaaccgttggttagatgttcttgattcacatggtcttatgttagaagatgaagacttggtcagtttgatttgtgaaaatagaagtatgtcaaaaactttaaaggaatatgaagggcaaaaatctacttctattacgacggcaaggagattgggggattttttgggtgaagatatggtaaaagataaaggtctacaatgtaaatatattattagttcaaaacctttcaatgcacctgttactgaacgagccattccagtcgcaatattttcagcggacattcccatcaaaaggtcttttctgaggcgatggacattagatccatctttggaagatctggatatcagaaccataatcgattggggttattatagagaaagacttggatctgctatacaaaagataattactattccagcagcattacaaggggtttccaatcctgttccaagggttgaacatccagattggctaaaaagaaaaatcgctacaaaggaggataagtttaagcagacttcactaaccaaatttttttcgaagacaaagaatgtaccaacaatgggcaagataaaagatatcgaggatttgtttgaaccaactgtagaagaagataacgccaaaattaaaattgcaagaactactaaaaagaaagccgtatccaagaggaaaagaaatcagcttacaaatgaagaagatccactagtattgccctcggagattccttccatggacgaggactatgttgggtggctaaattatcaaaaaattaaatggaaaatccaagcaagagatagaaagcgtcgagaccaattatttggtaatacaaacagctcccgtgaaagaagtgcactaggaagtatgattaggaagcaagctgaatcatatgcgaactccacttgggaggtcttacaatacaaggattccggtgagccaggggttttggaagtatttgtaacaattaatggcaaagtccagaacatcaccttccatataccaaaaactatttatatgaaattcaaatctcaaacaatgccgctacaaaagattaagaattgccttattgaaaaatcttctgcatcgttaccaaataatcccaaaacgtctaatccagcaggcggtcagctattcaaaattactctaccggaatctgtctttctggaagaaaaggaaaactgcactagtatcttcaacgatgaaaatgtacttggtgtatttgagggcactatcactcctcatcaaagagcgatcatggatttgggagcttcggtaacgttccgctcaaaagcaatgggtgcgttaggcaagggaatacagcagggttttgaaatgaaggatctttcaatggcggaaaatgaaaggtatctgagtggattttcaatggacattggctatttactacatttcccaacatcaattgggtatgaatttttttcattattcaagtcatggggagatactattactatattagttttgaaaccatccaaccaggctcaggaaataaatgcctcatcattaggacaaatatacaaacaaatgtttgaaaaaaagaaaggtaaaatagaaacatattcttacttggttgatattaaagaagatatcaattttgagtttgtatattttacagatatctcaaaattgtacagaagactatcacaggaaactactaaattaaaagaagaaagaggtctgcagtttttactcttgttacaatctccgtttatcactaagctcttaggcacaatccggcttctaaaccagatgcccattgttaagctttccttgaatgaagttcttctaccccaattgaactggcaaccgacattattgaagaaacttgttaaccacgttttatccagtggttcgtggatttctcacttgatcaagttatcccagtatagtaacattccaatctgtaatttgaggctggatagtatggattatattattgatgttctttatgcaagaaaactaaaaaaagagaacatcgtgctttggtggaatgagaaagctccacttccagatcatggaggcattcaaaatgattttgatttaaatacatcatggataatgaatgattcagaatttcccaaaattaataactcaggtgtgtatgacaatgtagttctcgatgttggtgttgataatttaacagtgaacacaattttgacatcagcattaatcaatgatgctgaaggcagtgatctagttaacaataatatgggtatagatgacaaagatgccgttattaactcgccatctgaattcgtgcacgacgccttttctaatgacgctttgaatgttttaagaggtatgttaaaggagtggtgggatgaggccctaaaagaaaattcaaccgcagatttgttggtaaattccctggcaagttgggttcaaaacccgaatgcgaaactattcgacggattactaagatatcacgttcataacttaacaaaaaaagccttacttcaattagtaaatgaatttagtgcacttggctcaactattgtatatgcagacaggaatcaaattctaataaagacaaacaagtactcacctgaaaactgttacgcctacagccaatatatgatgaaggcagttagaacaaatccaatgtttagttatctggacttaaatatcaaacgttattgggatctgctaatatggatggataagtttaattttagtggattagcatgtattgaaatagaggaaaaggaaaatcaggattataccgctgtttcgcaatggcaactaaagaagtttctgtcaccaatatatcagcccgaatttgaggattggatgatgatcatattggatagtatgctaaagacaaagcagagctatctaaaattgaattcagggacgcaaagacctacccaaatagttaatgtaaaaaaacaagataaggaagatagtgttgaaaactcgttgaacggattttctcaccttttttccaaaccactaatgaaaagagtcaaaaagctttttaaaaaccagcaagagttcattttagatcctcagtatgaggcagactatgttattcctgttcttcctggttcccatctgaatgtgaaaaatccccttctagaacttgtcaaatcactctgccatgtcatgttactttcaaagagtacaattttagaaatcaggaccctgagaaaagaactgctgaagatatttgaattgcgtgagtttgctaaagtagcggaattcaaagatccaagtttgagtctcgtggtgccggattttttatgtgaatactgttttttcatttctgatattgacttttgtaaggcagctcctgaatctattttttcatgcgtcagatgtcacaaagcctttaatcaagtattgttgcaagaacacctgattcaaaaactacgttctgatatcgaatcctatttaattcaagatttgagatgctccagatgtcataaagtgaaacgtgactatatgagtgcccactgtccatgtgccggcgcgtgggaaggaactctccccagagaaagcattgttcaaaagttaaatgtgtttaagcaagtagccaagtattacggttttgatatattattgagttgtattgctgatttgaccatatga

SEQ ID NO: 9158 - DNA, 6669 bp, Artificial Sequence
  Description of Artificial Sequence: Synthetic polynucleotide
atgatgtttggcaagaaaaaaaacaacggaggatcttccactgcaagatattctgctggcaacaagtacaacacactctctaataattatgcgcttagcgcgcaacagctcttaaatgctagtaagatcgatgacatcgattctatgatgggatttgaaagatacgtaccgccgcaatacaatggcaggtttgatgcgaaggatatagatcagattccaggccgcgtagggtggttgacgaacatgcacgcaacgttagtctctcaggaaaccttatccagtggtagtaatggcggcggcaatagtaatgacggagaacgtgtaacgaccaaccaaggtatttccggagttgacttctactttttagatgaagagggtgggagcttcaagagtacagttgtctatgacccatacttctttattgcgtgtaacgatgaatctagagtaaatgatgtggaggaattagtgaaaaaatatttggaatcttgtctcaaaagcttacaaatcattagaaaggaagatcttaccatggacaatcaccttttagggttgcagaagacacttattaagttatcttttgtaaattccaatcagttattcgaggccaggaaactcttgaggccaatcttgcaggataatgccaataataatgtgcaaagaaatatatataacgttgctgcaaatggctctgaaaaagttgacgccaaacatttgatcgaagatatcagggaatatgatgtgccgtatcatgtcagagtatctatagacaaggacattagagtcggtaaatggtataaggtaactcaacagggattcattgaagatactaggaaaattgcatttgccgaccctgtggtaatggcatttgatatagaaaccacgaagccgcctttaaaattcccggattccgccgtagatcaaataatgatgatttcttatatgatcgatggggaaggttttttgataacaaatagggagataatctctgaggatattgaagactttgagtatacaccgaaaccggagtatcctggttttttcaccatatttaacgaaaacgatgaagtggcgcttttacaaaggttttttgaacatataagagatgtaagacccactgttatatccaccttcaatggtgactttttcgattggccttttatacataacagaagtaagattcacggcttggacatgttcgatgaaattggtttcgctccagatgctgaaggtgagtacaagtcctcttactgctctcacatggattgtttccgttgggtgaagcgtgattcttatttaccacaaggttcccagggtttaaaagctgttactcaatctaagttgggttataacccaattgaattagatcccgaattaatgacgccgtatgcatttgaaaagccacagcacctttccgaatattctgtttccgatgcagtcgctacgtattacctttacatgaaatatgttcatccttttatcttttccctttgtactattattcctttgaacccggatgaaacattgagaaagggtaccggtactttgtgtgaaatgttgttgatggttcaagcttatcaacataatattcttttaccaaataagcatacagatcccattgagaggttctatgatggacatcttttagaatccgagacttacgtgggtggacatgtggagtctttagaagctggtgtttttaggagtgatttgaagaatgaattcaagatagatccttctgccattgatgaattattacaagaattaccagaagctttgaaatttagtgtggaagttgaaaataagtccagtgtagataaagtaacgaattttgaggaaataaaaaaccagataacgcagaaattattagagttgaaggaaaacaatataagaaacgaattacctttgatctatcatgtagatgtcgcctctatgtacccaaacatcatgactacaaatagattacaaccagatagtatcaaagcagagcgcgattgtgctagttgcgattttaatagacccggaaaaacctgtgcaagaaagttaaaatgggcttggagaggagaattctttcccagtaagatggatgagtataacatgatcaagcgtgcattacaaaatgagacttttcccaacaaaaacaagttttctaaaaagaaagttttgacatttgatgaattaagttacgcagaccaagttatccacataaaaaaacgtttaactgaatattctaggaaagtttatcatagggttaaagtatctgaaattgtcgaaagagaagccattgtctgccaaagagaaaatccattctacgtcgataccgtgaaatcctttcgtgataggcgttacgaattcaaaggtttagccaagacttggaagggaaatttatccaaaattgacccatctgataagcatgcgagagacgaggccaaaaagatgattgtgctttatgactctttacaattagctcacaaagttattttgaattctttttatgggtatgttatgaggaaaggctctcgttggtattccatggaaatggcggggattacgtgtttaacaggtgccacgatcattcaaatggcgagagctttagtagaaagggtaggaagaccattagaattagatactgatggtatttggtgtatcttaccaaaatctttccctgaaacttacttttttacattagaaaatggtaaaaagctttatctctcctacccatgttccatgttgaattacagagttcaccaaaagtttacgaatcaccaataccaagaattaaaagacccattgaactatatatatgagacgcacagtgaaaacacgatttttttcgaagttgacggaccatataaggccatgattttgcctagttccaaggaagaaggaaaaggtataaagaaaagatatgctgtcttcaatgaagacggctctcttgctgaattgaaaggttttgaattgaagaggcgtggtgaattacaattgataaaaaattttcaaagtgatattttcaaggtctttttggaaggtgatacattagaaggatgttacagtgctgtagcaagcgtatgtaaccgttggttagatgttcttgattctcatggtcttatgttagaagatgaagacttggtcagtttgatttgtgaaaatagaagtatgtccaaaactttaaaggaatatgaagggcaaaaatctacttctattacgacggcaaggagattgggggattttttgggtgaagatatggtaaaagataaaggtttacaatgtaaatatattattagttctaaacctttcaatgcacctgttactgaaagagccattccagtcgcaatattttctgcggacattcccatcaaaaggtcttttttaaggagatggacattagatccatctttggaagatttggatatcagaaccataatcgattggggttattatagagaaagacttggatctgctatacaaaagataattactattccagcagcattacaaggggtttccaatcctgttccaagggttgaacatccagattggttgaaaagaaaaatcgctacaaaggaggataagtttaagcagacttctttaaccaaatttttttccaagacaaagaatgtaccaacaatgggcaagataaaagatatcgaggatttgtttgaaccaactgtagaagaagataacgccaaaattaaaattgcaagaactactaaaaagaaagccgtatccaagaggaaaagaaatcagcttacaaatgaagaagatccattagtattgccctctgagattccttccatggacgaggactatgttgggtggttaaattatcaaaaaattaaatggaaaatccaagcaagagatagaaagcgtagagaccaattatttggtaatacaaacagctcccgtgaaagaagtgcattgggaagtatgattaggaagcaagctgaaagttatgcgaactccacttgggaggtcttacaatacaaggattccggtgagccaggggttttggaagtatttgtaacaattaatggcaaagtccagaacatcaccttccatataccaaaaactatttatatgaaattcaaatctcaaacaatgccgttacaaaagattaagaattgccttattgaaaaatcttctgcatctttaccaaataatcccaaaacgtctaatccagcaggcggtcagttattcaaaattactttaccggaatctgtctttttggaagaaaaggaaaactgcactagtatcttcaacgatgaaaatgtacttggtgtatttgagggcactatcactcctcatcaaagagcgatcatggatttgggagcttctgtaacgttccgctctaaagcaatgggtgcgttaggcaagggaatacagcagggttttgaaatgaaggatctttctatggcggaaaatgaaaggtatttgagtggattttccatggacattggctatttattacatttcccaacatccattgggtatgaatttttttctttattcaagtcttggggagatactattactatattagttttgaaaccatccaaccaggctcaggaaataaatgcctcttctttaggacaaatatacaaacaaatgtttgaaaaaaagaaaggtaaaatagaaacatattcttacttggttgatattaaagaagatatcaattttgagtttgtatattttacagatatctccaaattgtacagaagattatctcaggaaactactaaattaaaagaagaaagaggtttacagtttttactcttgttacaatctccgtttatcactaagctcttaggcacaatcagacttttgaaccagatgcccattgttaagctttccttgaatgaagttcttttgccccaattgaactggcaaccgacattattgaagaaacttgttaaccacgttttatccagtggttcttggatttctcacttgatcaagttatcccagtatagtaacattccaatctgtaatttgaggttagatagtatggattatattattgatgttctttatgcaagaaaattgaaaaaagagaacatcgtgctttggtggaatgagaaagctccacttccagatcatggaggcattcaaaatgattttgatttaaatacatcttggataatgaatgattctgaatttcccaaaattaataacagtggtgtgtatgacaatgtagttctcgatgttggtgttgataatttaacagtgaacacaattttgacaagtgcattaatcaatgatgctgaaggcagtgatttggttaacaataatatgggtatagatgacaaagatgccgttattaactctccatctgaattcgtgcacgacgccttttctaatgacgctttgaatgttttaagaggtatgttaaaggagtggtgggatgaggccttgaaagaaaattctaccgcagatttgttggtaaattccttggcaagttgggttcaaaacccgaatgcgaaattattcgacggattattaagatatcacgttcataacttaacaaaaaaagccttacttcaattagtaaatgaatttagtgcacttggctccactattgtatatgcagacaggaatcaaattttaataaagacaaacaagtactctcctgaaaactgttacgcctacagccaatatatgatgaaggcagttagaacaaatccaatgtttagttatttggacttaaatatcaaacgttattgggatttattgatatggatggataagtttaattttagtggattagcatgtattgaaatagaggaaaaggaaaatcaggattataccgctgtttctcaatggcaattgaagaagtttttatctccaatatatcagcccgaatttgaggattggatgatgatcatattggatagtatgttgaagacaaagcagagctatttgaaattgaatagtgggacgcaaagacctacccaaatagttaatgtaaaaaaacaagataaggaagatagtgttgaaaactctttgaacggattttctcaccttttttccaaaccattaatgaaaagagtcaaaaagctttttaaaaaccagcaagagttcattttagatcctcagtatgaggcagactatgttattcctgttcttcctggttcccatttgaatgtgaaaaatccccttttagaacttgtcaaatctctctgccatgtcatgttactttccaagagtacaattttagaaatcaggaccttgagaaaagaattattgaagatatttgaattgcgtgagtttgctaaagtagcggaattcaaagatccaagtttgagtctcgtggtgccggattttttatgtgaatactgttttttcatttctgatattgacttttgtaaggcagctcctgaatctattttttcttgcgtcagatgtcacaaagcctttaatcaagtattgttgcaagaacacttgattcaaaaattacgttctgatatcgaatcctatttaattcaagatttgagatgctccagatgtcataaagtgaaacgtgactatatgagtgcccactgtccatgtgccggcgcgtgggaaggaactctccccagagaaagcattgttcaaaagttaaatgtgtttaagcaagtagccaagtattacggttttgatatattattgagttgtattgctgatttgaccatatga

SEQ ID NO: 9159 - DNA, 1440 bp, Saccharomyces cerevisiae
atgaatgtgaccactccggaagttgcttttagggaatatcaaaccaactgtctcgcatcgtatatttctgctgatccagacataactccttcaaatttaatcttgcaaggttatagtggaacaggaaaaacctacactttgaagaagtattttaatgcgaatccaaatttgcatgcagtatggctggaacctgttgagttggtttcttggaagcccttactgcaggcgatagcacgtactgtacaatataaattgaaaaccctatatccaaacattcccaccacagattacgatcctttacaggttgaagagccatttcttttggtaaagacgttgcacaatatttttgtccaatatgaatctttgcaagaaaagacttgcttgttcttgatattggatggtttcgatagtttacaagatttagacgccgcactgtttaacaaatatatcaaactaaatgaattacttccaaaagattctaaaattaatataaaattcatttacacgatgttagagacatcatttttgcaaagatattctacacattgcattccaactgttatgtttccgaggtataatgtggacgaagtttctactatattagtgatgtctagatgtggcgaactcatggaagattcttgtctacgtaagcgtatcattgaagagcagataacggactgtacagacgatcaatttcaaaatgtagctgcgaacttcattcacttaattgtgcaggcttttcattcttatactggaaacgacatattcgcattgaatgacttgatagacttcaaatggcccaagtatgtatctcgcattactaaggaaaacatatttgaaccactggctctttacaaaagtgccatcaaactatttttaagcacagatgataatttaagtgaaaatggacaaggtgaaagcgcgataaccacaaatcgtgatgaccttgagaacagtcaaacttacgacttatcaataatttcgaagtatctgctcatagcctcatatatttgttcatatctggaacctagatacgatgcgagtattttctctaggaaaacacgtatcatacaaggtagagctgcttatggacgaagaaagaagaaagaagttaaccctagatatttacagccttctttatttgctattgaaagacttttggctattttccaagctatattccctattcaaggtaaggcggagagtggttccctatctgcacttcgtgaggaatccttaatgaaagcgaatatcgaggtttttcaaaatttatccgaattgcatacattgaaattaatagctacaaccatgaacaagaatatcgactatttgagtcctaaagtcaggtggaaagtaaacgttccctgggaaattattaaagaaatatcagaatctgttcatttcaatatcagcgattacttcagcgatattcacgaatga

SEQ ID NO: 9160 - DNA, 1440 bp, Artificial Sequence
  Description of Artificial Sequence: Synthetic polynucleotide
atgaatgtgaccactccggaagttgcttttagggaatatcaaaccaactgtctcgcaagttatatttctgctgatccagacataactccttccaatttaatcttgcaaggttatagtggaacaggaaaaacctacactttgaagaagtattttaatgcgaatccaaatttgcatgcagtatggttagaacctgttgagttggtttcttggaagcccttattgcaggcgatagcacgtactgtacaatataaattgaaaaccttatatccaaacattcccaccacagattacgatcctttacaggttgaagagccatttcttttggtaaagacgttgcacaatatttttgtccaatatgaatctttgcaagaaaagacttgcttgttcttgatattggatggtttcgatagtttacaagatttagacgccgcattatttaacaaatatatcaaattgaatgaattacttccaaaagattctaaaattaatataaaattcatttacacgatgttagagacatcttttttgcaaagatattctacacattgcattccaactgttatgtttccgaggtataatgtggacgaagtttctactatattagtgatgtctagatgtggcgaactcatggaagattcttgtttgcgtaagcgtatcattgaagagcagataacggactgtacagacgatcaatttcaaaatgtagctgcgaacttcattcacttaattgtgcaggcttttcattcttatactggaaacgacatattcgcattgaatgacttgatagacttcaaatggcccaagtatgtatctcgcattactaaggaaaacatatttgaaccattggctctttacaaaagtgccatcaaattatttttaagcacagatgataatttaagtgaaaatggacaaggtgaaagcgcgataaccacaaatcgtgatgaccttgagaacagtcaaacttacgacttatctataatttccaagtatttgctcatagcctcttatatttgttcttatttggaacctagatacgatgcgagtattttctctaggaaaacacgtatcatacaaggtagagctgcttatggaagaagaaagaagaaagaagttaaccctagatatttacagccttctttatttgctattgaaagacttttggctattttccaagctatattccctattcaaggtaaggcggagagtggttccttatctgcacttcgtgaggaatccttaatgaaagcgaatatcgaggtttttcaaaatttatccgaattgcatacattgaaattaatagctacaaccatgaacaagaatatcgactatttgagtcctaaagtcaggtggaaagtaaacgttccctgggaaattattaaagaaatatctgaatctgttcatttcaatatcagcgattacttcagcgatattcacgaatga

SEQ ID NO: 9161 - DNA, 489 bp, Saccharomyces cerevisiae
atggattttgataatttactaaacctagaagaacagtattaccaagaaggttttctggagggccagaatgagaatataaagcagagctttctagaaggtaaacagtatggtttacaagtgggattccaaagatttacgctcctgggacaaatggaaggtttgtgtgatgttatagaatcgtatggattgcatagtccaacactagaaaagaatatacataccattcgtactttaatgaaaggtttgaaaatgaataacgatgatgaaagtgtgatggaatttgagagggtgttaataaaattgaaaaataagtttagaaccattctaataactcttcatcgattagttaaagataaaagaacccccaccgtgacatttgaagtctttgaagacgtttcaagggccattgccggagaaattagaggttttgtagaaaatgaagacatcgcaaagaataagacaaaacaaaatcaggctcaatcctggtaa

SEQ ID NO: 9162 - DNA, 489 bp, Artificial Sequence
  Description of Artificial Sequence: Synthetic polynucleotide
atggattttgataatttattaaacttggaagaacagtattaccaagaaggttttttggagggccagaatgagaatataaagcagagctttttggaaggtaaacagtatggtttacaagtgggattccaaagatttacgctcttgggacaaatggaaggtttgtgtgatgttatagaaagttatggattgcatagtccaacattagaaaagaatatacataccattcgtactttaatgaaaggtttgaaaatgaataacgatgatgaaagtgtgatggaatttgagagggtgttaataaaattgaaaaataagtttagaaccattttaataactcttcatagattagttaaagataaaagaacccccaccgtgacatttgaagtctttgaagacgtttccagggccattgccggagaaattagaggttttgtagaaaatgaagacatcgcaaagaataagacaaaacaaaatcaggctcaatcctggtga

SEQ ID NO: 9163 - DNA, 222 bp, Saccharomyces cerevisiae
atggcagagataaaacattatcaattcaatgtcgtcatgacctgctcgggatgttctggtgcagtcaataaagttttgacgaaattagaaccagacgtttccaaaatagatatatcccttgaaaagcaattagtagatgtatatactacacttccttacgattttattttagaaaagattaagaaaaccggaaaggaagttagatctggcaaacaattgtga

SEQ ID NO: 9164 - DNA, 222 bp, Artificial Sequence
  Description of Artificial Sequence: Synthetic polynucleotide
atggcagagataaaacattatcaattcaatgtcgtcatgacctgctctggatgttctggtgcagtcaataaagttttgacgaaattagaaccagacgtttccaaaatagatatatcccttgaaaagcaattagtagatgtatatactacacttccttacgattttattttagaaaagattaagaaaaccggaaaggaagttagatctggcaaacaattgtga

SEQ ID NO: 9165 - DNA, 2265 bp, Saccharomyces cerevisiae
atggagtctctttttcctaacaaaggtgaaataatacgcgagttactgaaggatcctttaatattaaaaaatgacagcaaaaggtccaatggcagtgagttagaacttgattctagtgacctactacaacgcgaggcaattctagccaacgaactgaacatcctagataatttgaagacgtttttaaatctcataaaagaagttaaaactaatttgaacatactagaactagaaaactgctactattcgttgcagtcattgcgaaaaaagatgcgtaataatgctgcttatcttaagcaaagctttaatttccagcagtccatttctacctacgtcgacacactgcatttagaacttgtcagcacgttgtataaaattcttactaatggattttggaagattaccgagaatagcatccaatttacgcccacagtggaatggggtaaagacaaggttcatattgagtatgatacatttatggattttgtggcccaacagtattttcctaagggtagtttggacaatcaagcttggttcattttagatatgaccagtgccgactctcaagagcaggtaagagcaaaattgaatacaatcatgaaggagtatatgaacctttccaggattgtaagcatgatcaaaaattctatttttatatctggtaaagaaatctcatatgaaaacgaaaaaaacatacttgtcttttctaaatcctcttcgcatggccaacattgtgtgtctactgtattaacaagttttgaagcagtatgcgatttcatgttagacggattagcctttagagacagaaagaccttaagttatgagctaggtcccttgttcaatacggagtttaccaaatttgtgaaaaataatgcatcgataattttagaatcacttgattcaccgctaaaaaatctagtttctgtcataaataacaaactaactagactagttgccaaatcagaagttaccaattggacacattccggtaaagagattcaggatttgttaatgaacaaacaattatactacaatttattactagataaagttcttgaatcgcatattagtgagataagaagtatatttgaagatccaaaaaagagctggcaaaatttggaagtagttgagctcactactagcaatactaatacgatgagcgaaaaaattggaaaaaatgattcagatgtacagaacgaaaaagaactccataatgccgtatccaaagatgatgattggaattgggaagtagaggatgatgatgccgatgcatggggtgatgaaattgatgtaaatattgacgacgaggaagaaaaaacaaatcaagagaaggaaaaagaaccagaagaagaagaaaatgcctgggatgaagcctgggcaattgacgaaaatatagatgatgcttccctagaaaatggaaaggaacatttaaaagctcatgatgtaggatcacttgataaagaccacattgaagttacacagttaccaaaattgttcttggcaatttcacagaatttcaagagtagctttgcagatagccatgttgatgagcaatactttgcgtacaaatacaaccttttgcagacatcgtatatggccatgtgcacagctaatttttctcacaattggtgccaattatatgtggatatgagatatctaatagaacgagatgaaaagctgtatagaataaaagaattaacaaggaacctgctggaaactaaactgaacatgaaatatcgtattgtctgtcaactaatcaggcatcaattgaccgaatttcgtgagaacgagagaaatccatcgtgggacgccaccattgagaaactgctaccttatatcttgaaggaaattgttcgtccactgcagaaaataagaggtgaagaaggttcccgttacttgttgtctttcttaaactttttatataacgattgcgtgacaaaggaaatattaaaatggcagattatctctgaggtcaattccgaaaatttgggtgagctcgtatctttattagtgaacaacaccgatatacaattattagcgaaggaaccaagttacaaaaagatgagagaaaaattcgccactatgggcaagtttctaccattacatttaaaggagattatggagatgttttacaatggggatttttatctttttgcgacagacgaactaatccaatggatagagttattgtttgccgacactcccctgcgaaggaatgccattgatgatatttacgaaattagaggcactgctctagatgattaa

SEQ ID NO: 9166 - DNA, 2265 bp, Artificial Sequence
  Description of Artificial Sequence: Synthetic polynucleotide
atggagtctctttttcctaacaaaggtgaaataatacgcgagttattgaaggatcctttaatattaaaaaatgacagcaaaaggtccaatggcagtgagttagaacttgattctagtgacttattacaacgcgaggcaattttagccaacgaattgaacatcttagataatttgaagacgtttttaaatctcataaaagaagttaaaactaatttgaacatattggaattggaaaactgctactattctttgcagtctttgagaaaaaagatgcgtaataatgctgcttatcttaagcaaagctttaatttccagcagtccatttctacctacgtcgacacattgcatttagaacttgtcagcacgttgtataaaattcttactaatggattttggaagattaccgagaatagcatccaatttacgcccacagtggaatggggtaaagacaaggttcatattgagtatgatacatttatggattttgtggcccaacagtattttcctaagggtagtttggacaatcaagcttggttcattttagatatgaccagtgccgactctcaagagcaggtaagagcaaaattgaatacaatcatgaaggagtatatgaacctttccaggattgtaagcatgatcaaaaattctatttttatatctggtaaagaaatcagttatgaaaacgaaaaaaacatacttgtcttttctaaatcctcttctcatggccaacattgtgtgtctactgtattaacaagttttgaagcagtatgcgatttcatgttagacggattagcctttagagacagaaagaccttaagttatgagttaggtcccttgttcaatacggagtttaccaaatttgtgaaaaataatgcatctataattttagaatctcttgattctccgttaaaaaatttggtttctgtcataaataacaaattaactagattggttgccaaaagtgaagttaccaattggacacattccggtaaagagattcaggatttgttaatgaacaaacaattatactacaatttattattagataaagttcttgaaagtcatattagtgagataagaagtatatttgaagatccaaaaaagagctggcaaaatttggaagtagttgagctcactactagcaatactaatacgatgagcgaaaaaattggaaaaaatgattctgatgtacagaacgaaaaagaactccataatgccgtatccaaagatgatgattggaattgggaagtagaggatgatgatgccgatgcatggggtgatgaaattgatgtaaatattgacgacgaggaagaaaaaacaaatcaagagaaggaaaaagaaccagaagaagaagaaaatgcctgggatgaagcctgggcaattgacgaaaatatagatgatgcttccttagaaaatggaaaggaacatttaaaagctcatgatgtaggatctcttgataaagaccacattgaagttacacagttaccaaaattgttcttggcaatttctcagaatttcaagagtagctttgcagatagccatgttgatgagcaatactttgcgtacaaatacaaccttttgcagacatcttatatggccatgtgcacagctaatttttctcacaattggtgccaattatatgtggatatgagatatttgatagaaagagatgaaaagctttatagaataaaagaattaacaaggaacttattggaaactaaattgaacatgaaatatcgtattgtctgtcaattgatcaggcatcaattgaccgaatttcgtgagaacgagagaaatccatcttgggacgccaccattgagaaattattgccttatatcttgaaggaaattgttcgtccattacagaaaataagaggtgaagaaggttcccgttacttgttgtctttcttaaactttttatataacgattgcgtgacaaaggaaatattaaaatggcagattatctctgaggtcaattccgaaaatttgggtgagctcgtatctttattagtgaacaacaccgatatacaattattagcgaaggaaccaagttacaaaaagatgagagaaaaattcgccactatgggcaagtttttaccattacatttaaaggagattatggagatgttttacaatggggatttttatctttttgcgacagacgaattgatccaatggatagagttattgtttgccgacactcccttaagaaggaatgccattgatgatatttacgaaattagaggcactgctttagatgattga

SEQ ID NO: 9167 - DNA, 3690 bp, Saccharomyces cerevisiae
atgtccgttcacgggagggatcccaaaaagaggcagttaaggctaatatcggttgcattcaaagaagcatcaattgactctccttcctttcgtgcatccgtaaatttcttccaaacaagggtggatgcattagaggattggatagagaagactgtcgactttttcgatcagaaatataaggtgtcatttgaagattttcgaagagcaaaggaaactctcctatcccaattgttacctcctccagccttgctgagcaacggttttgtcagtaaccaatcgtttactcccaggctgattgatagttttaacaaggactattatgacttttctatgaaattactgcaaattgtaaagggtgatgactctagccactcaaccgcgctattagaacttatgactactgcaattgaaccctacagaaacgtgagaaaaaatttcgatttttaccaaggtaaatatgacagtatgctggcatcctaccaggctataagaatttcaaaaaccagtttagagccatcttctatcaaaagtgatgccttacaattatttgaagtgcaaaaaaactaccttaaggcctccctagacctcataagtgccatatcagcagtaaaattaagcttagataaattcatactagagtcaatgaaagtattaaagtcaagaagcatttttataacgaaagattctggaaggaaaatagatttatctccttgcattaatgagtatttagacaattacgcaatatgggtagaaaattccatcgaaggatcgaaagtattggattctgatatcagtaatgcaaaaaagcaagcatataggtataccttgaaacgaattacgccgtcaagtgacacaagtgattacaatataagatcaatacattcctcgaagctgctatcaaaggatacgcaagtgcctccaaaatcgcccgaaaagtctgggtggctttatatgaaaacacaggttggaaagcctaccagggaaatatgggtgagaagatggtgctttctgaaaaatgcagtttttggtatgttccttttgtcgccatcgaagacctacgtggaggaaactgataagtttggtgtcttccttactaatgtgcgctatgacccagaggaagatcgaaaattttgttttgaagtaaaaatatttggtaataaagtaacagaggcacatgataacatgtcaaaggatatcacgttggtctttcaaacttcaaattatctagatttgaaatcatggttaatagcttttgaagcgacaaaaaagtatgtcatgagtatacaacatgatagtcttgaatatgagctggcgtttaaaagattttctcccaagttttttgaatttgcctctagtacaaccacctccatagatcaattaatcacaacatttgacaaagaaaccgagtccttgtatgaaacgctgaactgctcaatctctgaatatgatattttgactttaggagaggagaaggtgtttcagttccaaatgccaacaacaccaatatctacaaaaatgacacaactggctattctgtctaatttcctcacaaaaggtagctggttccctaatgctgttcttgcgaatatatggggcacgaccgattggagtgaatatactatattgccaggaaagggaaagaaaccctcctctttattaacgatcgatggcaaaaggcttccaataagaaactccactatatatcctcaatattattctaatgagttgaaagtgcttgatctacagttcaagtcattagtattttctccggaccaaaggttggagaagctaccggaagagcttttacttttcaagtttgaagcattgtggtgtcctaacaaaaagcagaagttctcagctacctgcttttgcacaaaagactacatttattgctacatgaattctatggaatttatctgtcttacaaagatcagcttgtctgaaatcgtttctgtagaagccgacagatcatcaaagaagaccttaaaactttacgatgccagcggtctacaaatgaaagcaatcgttttattttctgactataagcttattgcatctaagttgcaatatctgttagaaaacaaggctataaaaaacccaaatagtaacgaagagattttagtaaagtttgaacagatggaaaaagaatctcaagaaaaaaaacaagaagaattatataagatagaacaagaaaactcctttgatcgtaaggccaccagcgtatccaaaatcatcaaatcacgtgtgacattttgggagatgtccgatgatgcatctactttattaaacagactcaaaaaacttcagacagagtactcgattacttacaatcatgaatatgaaatatctagtaaaggactagcccacatactatttggagataaatcgaatgcttttccaaaatgcctgtttttagcaagaaaagatggggaagaacacgggaaacgtttttggtataaaaacaaagacatcaacgggaaatcacaattagttcgaaagataccatttcgattggatatgaccggtaattttttaaatactggtaaatatcatagagataaggaatctaaaatgatttttgctacacagaggatagtcaaaattgttgataacaaatattatgaagtcgatttagatccttttttcgttaaagtgccattttgtcatttattgaagctttcaattaaatttgtcataactgagtcatatgatgtagataaccatcttgaaataaagttgaatatgacggcgagcagttcatcgcttcatgtcctatacaaactagaatatattgatagtagaactggcaaaacaatagaaaagctatctttggctgaaataatatgccaaacatgggccttgaaatttgctcatagtgaattcctactgataagaagggtgttacggtactacttggaaaagattggcaaacacggaaaagttatcaaagctatcaaactatgtggtatattaggtgttctcagcaacaaaagtgaagaacctgctactgaaaaaaatggcaactccaaagagagtgaaagtatgcaatatgacatcaggtattcttgtactatccttttcctagtgtttatcaaactaatggtttacagagtaacgaatttgacgtttgtattcttcagaatacttatcggtattctattattatgtgctgaaaagttctcacggattaatcgaatgatggtggtcggattattagcatctattatgataaacatacttttatcagaaaaagcatcagtgccctactggtcaataaagagagctgaaaaactgttccacgaccgtcttggatcagataagttcacaatgcaaagagccatttacataagtgattcggacttgctaagtagtcaactgtcagtgccgtcaaataaccccatttttgagaagttcagcgaggacaatttcaataaggactatcagtatagcgaaacgagaaaacagttggctatgaggagaaatgaattgctaattgaacttagaatactccaagacatggagaaacaattagtgcatgacgactacgaaaaattcttgctggaagaagtaaataaatgctcgatggtgtctatagagatgactgatctttggtttaatgacactcaattgcaaaattactgttctatttgtaacgaagaactcgagaagttaagaccaccaataacttga

SEQ ID NO: 9168 - DNA, 3690 bp, Artificial Sequence
  Description of Artificial Sequence: Synthetic polynucleotide
atgtccgttcacgggagggatcccaaaaagaggcagttaaggttgatatctgttgcattcaaagaagcatctattgactctccttcctttcgtgcatccgtaaatttcttccaaacaagggtggatgcattagaggattggatagagaagactgtcgactttttcgatcagaaatataaggtgtcctttgaagattttagaagagcaaaggaaactctcttatcccaattgttacctcctccagccttgttgagcaacggttttgtcagtaaccaaagttttactcccaggttgattgatagttttaacaaggactattatgacttttctatgaaattattacaaattgtaaagggtgatgactctagccacagcaccgcgttattagaacttatgactactgcaattgaaccctacagaaacgtgagaaaaaatttcgatttttaccaaggtaaatatgacagtatgttagcatcctaccaggctataagaatttccaaaaccagtttagagccatcttctatcaaaagtgatgccttacaattatttgaagtgcaaaaaaactaccttaaggcctccttggacctcataagtgccatatctgcagtaaaattaagcttagataaattcatattggagtccatgaaagtattaaagtctagaagcatttttataacgaaagattctggaaggaaaatagatttatctccttgcattaatgagtatttagacaattacgcaatatgggtagaaaattccatcgaaggatctaaagtattggattctgatatcagtaatgcaaaaaagcaagcatataggtataccttgaaaagaattacgccgtccagtgacacaagtgattacaatataagaagtatacattcctccaagttattatccaaggatacgcaagtgcctccaaaaagtcccgaaaagtctgggtggctttatatgaaaacacaggttggaaagcctaccagggaaatatgggtgagaagatggtgctttttgaaaaatgcagtttttggtatgttccttttgtctccatctaagacctacgtggaggaaactgataagtttggtgtcttccttactaatgtgcgctatgacccagaggaagataggaaattttgttttgaagtaaaaatatttggtaataaagtaacagaggcacatgataacatgtccaaggatatcacgttggtctttcaaacttccaattatttggatttgaaaagttggttaatagcttttgaagcgacaaaaaagtatgtcatgagtatacaacatgatagtcttgaatatgagttagcgtttaaaagattttctcccaagttttttgaatttgcctctagtacaaccacctccatagatcaattaatcacaacatttgacaaagaaaccgagtccttgtatgaaacgttgaactgctccatctctgaatatgatattttgactttaggagaggagaaggtgtttcagttccaaatgccaacaacaccaatatctacaaaaatgacacaattggctattttatctaatttcctcacaaaaggtagctggttccctaatgctgttcttgcgaatatatggggcacgaccgattggagtgaatatactatattgccaggaaagggaaagaaaccctcctctttattaacgatcgatggcaaaaggcttccaataagaaactccactatatatcctcaatattattctaatgagttgaaagtgcttgatttacagttcaagtctttagtattttctccggaccaaaggttggagaagttaccggaagagcttttacttttcaagtttgaagcattgtggtgtcctaacaaaaagcagaagttcagtgctacctgcttttgcacaaaagactacatttattgctacatgaattctatggaatttatctgtcttacaaagatcagcttgtctgaaatcgtttctgtagaagccgacagaagttccaagaagaccttaaaactttacgatgccagcggtttacaaatgaaagcaatcgttttattttctgactataagcttattgcatctaagttgcaatatcttttagaaaacaaggctataaaaaacccaaatagtaacgaagagattttagtaaagtttgaacagatggaaaaagaatctcaagaaaaaaaacaagaagaattatataagatagaacaagaaaactcctttgatcgtaaggccaccagcgtatccaaaatcatcaaatctcgtgtgacattttgggagatgtccgatgatgcatctactttattaaacagactcaaaaaacttcagacagagtactctattacttacaatcatgaatatgaaatatctagtaaaggattggcccacatattgtttggagataaatctaatgcttttccaaaatgcttatttttagcaagaaaagatggggaagaacacgggaaacgtttttggtataaaaacaaagacatcaacgggaaatctcaattagttagaaagataccatttagattggatatgaccggtaattttttaaatactggtaaatatcatagagataaggaatctaaaatgatttttgctacacagaggatagtcaaaattgttgataacaaatattatgaagtcgatttagatccttttttcgttaaagtgccattttgtcatttattgaagctttctattaaatttgtcataactgagtcttatgatgtagataaccatcttgaaataaagttgaatatgacggcgagcagttcttctcttcatgtcttgtacaaattagaatatattgatagtagaactggcaaaacaatagaaaagttatctttggctgaaataatatgccaaacatgggccttgaaatttgctcatagtgaattcttattgataagaagggtgttaagatactacttggaaaagattggcaaacacggaaaagttatcaaagctatcaaattatgtggtatattaggtgttctcagcaacaaaagtgaagaacctgctactgaaaaaaatggcaactccaaagagagtgaaagtatgcaatatgacatcaggtattcttgtactatccttttcttggtgtttatcaaattaatggtttacagagtaacgaatttgacgtttgtattcttcagaatacttatcggtattttattattatgtgctgaaaagttcagtagaattaatagaatgatggtggtcggattattagcatctattatgataaacatacttttatctgaaaaagcatctgtgccctactggtccataaagagagctgaaaaattattccacgaccgtcttggaagtgataagttcacaatgcaaagagccatttacataagtgattctgacttgttaagtagtcaattatctgtgccgtccaataaccccatttttgagaagttcagcgaggacaatttcaataaggactatcagtatagcgaaacgagaaaacagttggctatgaggagaaatgaattgttaattgaacttagaatactccaagacatggagaaacaattagtgcatgacgactacgaaaaattcttgttggaagaagtaaataaatgctctatggtgtctatagagatgactgatctttggtttaatgacactcaattgcaaaattactgttctatttgtaacgaagaactcgagaagttaagaccaccaataacttga

SEQ ID NO: 9169 - DNA, 2475 bp, Saccharomyces cerevisiae
atgtcaaagctattttctactgtcaattctgcaagacatagtgtaccactaggcggcatgagagattatgtgcacattaagaaactagagatgaatacagttcttgggcctgattcctggaatcaattaatgcctcagaaatgtctactaagcttagatatgggtacagattttagtaaatctgcggctacggatgatttgaaatattctctaaattatgcagttatttctcgtgatttgacgaatttcgtcagcaaaaaaaagaattggggttctgtttctaatttggctaaatctgtgtctcaatttgttatggacaaatattctggtgtcgagtgtctgaatttagaagtgcaggcggatacaacgcatattagaagtgaccacatatcttgtattattcaacaagaaagagggaatccagaatcacaggaatttgacgttgttaggatatctgagttaaaaatgttgactttgattggtgttttcacctttgagagacttaagaaacagtatgtaactttggatataaagttgccttggccaaagaaagccgaattgccaccgccagtgcaaagcataattgataacgttgtcaagtttgtggaggaatcaaatttcaagactgtggaagctcttgtagaatctgtgtcagctgttattgcccataacgagtattttcaaaagtttccagattcgcctttggtggtgaaggttttgaaattaaacgcaatcacagccacagaaggtgttggtgtaagctgtattagagagcccagggagattgcgatggtaaatattccatatctttcctccatacatgaatcgtctgatattaagttccaattgtcttcatcacaaaacactcctattgagggtaaaaatacatggaaaagagcgtttttagcgtttggttcaaacattggggaccgtttcaaacacattcaaatggcgttgcaattattatcaagggaaaaaacggttaaattacggaatatttcgtctatttttgaaagtgaaccaatgtatttcaaagatcaaacccctttcatgaatgggtgtgttgaggtggagacattactgaccccaagcgaattattaaaattgtgtaaaaaaattgaatatgaagagttgcaaagagtcaagcattttgataatggtccgagaacaatagatctggatattgttatgtttttgaatagcgccggagaagatattatagtaaatgaaccggatttgaatataccgcatcctagaatgctggagaggactttcgttcttgagccgttatgtgaattaatatcccccgttcaccttcatcctgtgacagcggaacccattgtagaccatttaaaacagttatacgacaaacagcatgatgaagataccttatggaaattagttccattgccttatcgtagtggtgtggagcctagatttttgaaattcaagaccgctacaaaacttgacgaatttactggagaaacaaacagaattactgtttcacctacatatatcatggctatcttcaacgctacaccagattcattttccgatggaggtgagcattttgcggacattgaaagtcaattgaatgatatcattaaattgtgtaaagacgcattatatttgcatgagagcgtcatcatcgacgttggagggtgttctaccaggcctaactctattcaggcgtctgaggaagaagaaatacgcaggtctatcccattaattaaggccattagagaaagcactgagttaccgcaagataaagtcatactatccattgatacttatcgttccaatgtcgctaaagaagcgattaaagttggagtggatattattaatgatatttcgggaggtttatttgacagcaacatgtttgccgtaattgcagagaacccagaaatttgttatattttatcacacacacgtggtgatatttcaacgatgaataggctggcgcattacgaaaattttgcattgggtgattctattcagcaagaatttgttcataataccgacattcagcagctagacgacttgaaagacaaaacagtgttaatcaggaatgttggtcaagaaattggcgaaaggtatatcaaagcgattgataatggagtaaagcgctggcaaattctaatcgaccctggacttggttttgctaagacctggaagcaaaacttacaaattattagacatatccccattttaaagaactactcattcaccatgaactcaaacaattcgcaagtgtatgttaacctcagaaatatgcccgttttattgggtccatcgcgcaaaaaattcattggacatatcacaaaagatgtggatgcgaagcaaagagactttgctactggagcggtggtagcgtcgtgtattggtttcggcagcgacatggttagggtccatgacgttaaaaattgttcgaagagcattaaattagcagatgctatttataaaggtttggaataa

SEQ ID NO: 9170 - DNA, 2475 bp, Artificial Sequence
  Description of Artificial Sequence: Synthetic polynucleotide
atgtccaagttattttctactgtcaattctgcaagacatagtgtaccattaggcggcatgagagattatgtgcacattaagaaattagagatgaatacagttcttgggcctgattcctggaatcaattaatgcctcagaaatgtttattaagcttagatatgggtacagattttagtaaatctgcggctacggatgatttgaaatattctttgaattatgcagttatttctcgtgatttgacgaatttcgtcagcaaaaaaaagaattggggttctgtttctaatttggctaaatctgtgtctcaatttgttatggacaaatattctggtgtcgagtgtttgaatttagaagtgcaggcggatacaacgcatattagaagtgaccacatatcttgtattattcaacaagaaagagggaatccagaatctcaggaatttgacgttgttaggatatctgagttaaaaatgttgactttgattggtgttttcacctttgagagacttaagaaacagtatgtaactttggatataaagttgccttggccaaagaaagccgaattgccaccgccagtgcaaagcataattgataacgttgtcaagtttgtggaggaaagtaatttcaagactgtggaagctcttgtagaatctgtgtctgctgttattgcccataacgagtattttcaaaagtttccagattctcctttggtggtgaaggttttgaaattaaacgcaatcacagccacagaaggtgttggtgtaagctgtattagagagcccagggagattgcgatggtaaatattccatatctttcctccatacatgaaagctctgatattaagttccaattgtcttcttctcaaaacactcctattgagggtaaaaatacatggaaaagagcgtttttagcgtttggttccaacattggggaccgtttcaaacacattcaaatggcgttgcaattattatctagggaaaaaacggttaaattaagaaatatttcttctatttttgaaagtgaaccaatgtatttcaaagatcaaacccctttcatgaatgggtgtgttgaggtggagacattattaaccccaagcgaattattaaaattgtgtaaaaaaattgaatatgaagagttgcaaagagtcaagcattttgataatggtccgagaacaatagatttggatattgttatgtttttgaatagcgccggagaagatattatagtaaatgaaccggatttgaatataccgcatcctagaatgttagagaggactttcgttcttgagccgttatgtgaattaatatcccccgttcaccttcatcctgtgacagcggaacccattgtagaccatttaaaacagttatacgacaaacagcatgatgaagataccttatggaaattagttccattgccttatcgtagtggtgtggagcctagatttttgaaattcaagaccgctacaaaacttgacgaatttactggagaaacaaacagaattactgtttctcctacatatatcatggctatcttcaacgctacaccagattctttttccgatggaggtgagcattttgcggacattgaaagtcaattgaatgatatcattaaattgtgtaaagacgcattatatttgcatgagagcgtcatcatcgacgttggagggtgttctaccaggcctaactctattcaggcgtctgaggaagaagaaatacgcaggtctatcccattaattaaggccattagagaaagcactgagttaccgcaagataaagtcatattatccattgatacttatcgttccaatgtcgctaaagaagcgattaaagttggagtggatattattaatgatatttctggaggtttatttgacagcaacatgtttgccgtaattgcagagaacccagaaatttgttatattttatcccacacacgtggtgatatttctacgatgaataggttagcgcattacgaaaattttgcattgggtgattctattcagcaagaatttgttcataataccgacattcagcagttagacgacttgaaagacaaaacagtgttaatcaggaatgttggtcaagaaattggcgaaaggtatatcaaagcgattgataatggagtaaagcgctggcaaattttgatcgaccctggacttggttttgctaagacctggaagcaaaacttacaaattattagacatatccccattttaaagaactactctttcaccatgaactccaacaattctcaagtgtatgttaacctcagaaatatgcccgttttattgggtccaagccgcaaaaaattcattggacatatcacaaaagatgtggatgcgaagcaaagagactttgctactggagcggtggtagcgtcttgtattggtttcggcagcgacatggttagggtccatgacgttaaaaattgttccaagagcattaaattagcagatgctatttataaaggtttggaatga

SEQ ID NO: 9171 - DNA, 462 bp, Saccharomyces cerevisiae
atgtctcaaaaagcttgttacgtttgcggtaagattggccatttggcagaagactgtgattctgaaagactatgttacaactgtaacaaacccggtcacgttcaaacggattgtaccatgccaagaacagttgaattcaagcaatgttacaattgtggtgaaaccggtcacgttagaagtgaatgtactgtgcaacgttgtttcaactgtaaccaaaccggccacatctccagagaatgccctgaaccaaagaagaccagcagattctccaaagtttcatgttataaatgtggtggtccaaaccatatggctaaggactgtatgaaagaggacggaattagtggattgaaatgttacacttgtggtcaagctggccacatgtccagggactgtcaaaatgacaggctttgttacaactgtaacgaaactggccatatttccaaggattgtccaaaggcttag

SEQ ID NO: 9172 - DNA, 462 bp, Artificial Sequence
  Description of Artificial Sequence: Synthetic polynucleotide
atgtctcaaaaagcttgttacgtttgcggtaagattggccatttggcagaagactgtgattctgaaagattatgttacaactgtaacaaacccggtcacgttcaaacggattgtaccatgccaagaacagttgaattcaagcaatgttacaattgtggtgaaaccggtcacgttagaagtgaatgtactgtgcaacgttgtttcaactgtaaccaaaccggccacatctccagagaatgccctgaaccaaagaagaccagcagattctccaaagtttcttgttataaatgtggtggtccaaaccatatggctaaggactgtatgaaagaggacggaattagtggattgaaatgttacacttgtggtcaagctggccacatgtccagggactgtcaaaatgacaggctttgttacaactgtaacgaaactggccatatttccaaggattgtccaaaggcttga

SEQ ID NO: 9173 - DNA, 1206 bp, Saccharomyces cerevisiae
atggttgggcctggtctgggaattaatcgagtgaggagaaaaggtgtttattccacaaaaaagggaagtggtgataacttactgttaatgaaaagacaaggaaaacatgacatacatgatagagaaagtgacgacttatcaggccatgatgccttttccccctcaaaaaagcgcggcaaaatagacagtatcacagaagatgagattgaagtaaaaaagctttccactgtggccacatttgataaactttcgaggtcatttccaaattcagaagtacaagccgcaaagaatgcagcactcagaggaaaagaaaaagaagaagagaaggtcgtttctatcccactaatacagaatttgaaaaatgaagatatcgagtctatcaaatgcaggaacaataatcttttagacggtaaaaaattactcttggaggcagaactatcggcagttgaagataaccaaatcttctcctcttcatttcccgaggataaaaagctatcgttacaaagttgtttgagttctaaagagcagataatcaaaaaacttcaagtaagggaagaatacatgagcaagttcaaactaccacccatgttgttttcggatgagctactcactgaagtagaacccttcatgcccattgtaatggacatattggagggaaagatatcgtctgtatactattttgaagcaaaaaatgcattcaaaaactcacaaaaggcttacttgtccgtagatgagtttagaaagttgaatttaaacaaatttactgctggattttacggcctgaaaaggcaattgagggttggcgaagaaatcgctaagagatataaaagggcactcacgcacaatcagcccgcaaccttaaaatggtgggggataacagatttctgtaactacgttttggctccagaaacccttacgtctttttgtatttaccaattaaatctctcgaataaatcttgctcgtcgaagacaccgaataaacatccaaagcaacaattaaacgagaaggaatattactacgatcccgaattaaggatgctagcctatgacttactcgaggatacagttgaatacggtatcatagtagccgactctgatccaattgagcaatgggaagctgccatagaggaagaccgtctgcgggaactgaaactcgatgttcataactattccagcaggagatggcgactggatacgcacgattaa

SEQ ID NO: 9174 - DNA, 1206 bp, Artificial Sequence
  Description of Artificial Sequence: Synthetic polynucleotide
atggttgggcctggtttgggaattaatagagtgaggagaaaaggtgtttattccacaaaaaagggaagtggtgataacttattattaatgaaaagacaaggaaaacatgacatacatgatagagaaagtgacgacttaagtggccatgatgccttttccccctctaaaaagcgcggcaaaatagacagtatcacagaagatgagattgaagtaaaaaagctttccactgtggccacatttgataaactttctaggtcttttccaaattctgaagtacaagccgcaaagaatgcagcactcagaggaaaagaaaaagaagaagagaaggtcgtttctatcccattgatacagaatttgaaaaatgaagatatcgagtctatcaaatgcaggaacaataatcttttagacggtaaaaaattactcttggaggcagaattaagtgcagttgaagataaccaaatcttctcctcttcttttcccgaggataaaaagctttctttacaaagttgtttgagttctaaagagcagataatcaaaaaacttcaagtaagggaagaatacatgagcaagttcaaattaccacccatgttgttttctgatgagttactcactgaagtagaacccttcatgcccattgtaatggacatattggagggaaagatatcttctgtatactattttgaagcaaaaaatgcattcaaaaactctcaaaaggcttacttgtccgtagatgagtttagaaagttgaatttaaacaaatttactgctggattttacggcttgaaaaggcaattgagggttggcgaagaaatcgctaagagatataaaagggcactcacgcacaatcagcccgcaaccttaaaatggtgggggataacagatttctgtaactacgttttggctccagaaacccttacgtctttttgtatttaccaattaaatctctctaataaatcttgcagttccaagacaccgaataaacatccaaagcaacaattaaacgagaaggaatattactacgatcccgaattaaggatgttggcctatgacttactcgaggatacagttgaatacggtatcatagtagccgactctgatccaattgagcaatgggaagctgccatagaggaagaccgtttgagagaattgaaactcgatgttcataactattccagcaggagatggagattagatacgcacgattga

SEQ ID NO: 9175 - DNA, 1269 bp, Saccharomyces cerevisiae
atgtcgacaattggagctgttgatattcttaatcaaaagaccataacttctgaagtggctgcctcagtgacttcaaaatatctacaaagtacgttttctaaaggtaatacaagtcatatcgaagataaaaggttcattcatgtcagttcgcgttctcattcaagattcacctcgactcccataactccaaatgaaattctttccctaaaatttcacgtatcaggttcatcgatggcgtatagtagaatggatgggtcattgaccgtttggtttattaaagatgcaagttttgacaaatctgtagaagtttatattccagactgttgtggttccgataaattggctactgatttgtcctggaaccctacttctttaaatcaaatagctgtcgtgagcaattcatcagagatatccttactcttaatcaacgaaaaatcgctaacggcatccaaattaaggaccttgtcattgggaagcaagactaaggtcaacacatgtctttatgatccattaggaaactggttattagctgccaccaaatctgagaaaatctacttgtttgatgtgaaaaaggatcacagctctgtctgttctttgaacatcagcgatataagccaagaggataatgacgttgtgtattccttagcatggagcaatggtggaagtcatatatttattggctttaagagtggttatttggccattttaaaagcaaaacatggcatattggaggtttgtaccaaaattaaagcacatactggtcctataaccgagatcaaaatggacccatggggaagaaacttcattactgggagtatcgatgggaattgctacgtatggaatatgaagtcactatgttgtgaattaataattaacgatttgaactctgcggtaacaacactagacgtctgtcatttgggtaaaatactaggaatttgtacagaagatgaaatggtatatttctatgatcttaatagtggtaatttactccactctaaatctttagccaattacaaaaccgatcccgttttgaagttttatcctgataaatcatggtatatcatgtcaggcaagaatgacacactatcaaatcattttgttaaaaacgaaaaaaatctaataacttattggaaagacatgttcgataacacgatgattgaaaaacgtaggaaaaacaacggtggaggcaacaaccacaataaaaggacgagtaagaatactgataggattggcaaggataggccgagtagattcaactcaaaaaaataa

SEQ ID NO: 9176 - DNA, 1269 bp, Artificial Sequence
  Description of Artificial Sequence: Synthetic polynucleotide
atgtctacaattggagctgttgatattcttaatcaaaagaccataacttctgaagtggctgcctctgtgacttctaaatatttacaaagtacgttttctaaaggtaatacaagtcatatcgaagataaaaggttcattcatgtcagttctcgttctcattccagattcacctctactcccataactccaaatgaaattctttccttgaaatttcacgtatctggttcttctatggcgtatagtagaatggatgggtctttgaccgtttggtttattaaagatgcaagttttgacaaatctgtagaagtttatattccagactgttgtggttccgataaattggctactgatttgtcctggaaccctacttctttaaatcaaatagctgtcgtgagcaattcttctgagatatccttactcttaatcaacgaaaaatctttgacggcatccaaattaaggaccttgtctttgggaagcaagactaaggtcaacacatgtctttatgatccattaggaaactggttattagctgccaccaaatctgagaaaatctacttgtttgatgtgaaaaaggatcacagctctgtctgttctttgaacatcagcgatataagccaagaggataatgacgttgtgtattccttagcatggagcaatggtggaagtcatatatttattggctttaagagtggttatttggccattttaaaagcaaaacatggcatattggaggtttgtaccaaaattaaagcacatactggtcctataaccgagatcaaaatggacccatggggaagaaacttcattactgggagtatcgatgggaattgctacgtatggaatatgaagtctttatgttgtgaattaataattaacgatttgaactctgcggtaacaacattagacgtctgtcatttgggtaaaatattaggaatttgtacagaagatgaaatggtatatttctatgatcttaatagtggtaatttactccactctaaatctttagccaattacaaaaccgatcccgttttgaagttttatcctgataaaagttggtatatcatgagtggcaagaatgacacattatccaatcattttgttaaaaacgaaaaaaatttgataacttattggaaagacatgttcgataacacgatgattgaaaaacgtaggaaaaacaacggtggaggcaacaaccacaataaaaggacgagtaagaatactgataggattggcaaggataggccgagtagattcaactccaaaaaatga

SEQ ID NO: 9177 - DNA, 846 bp, Saccharomyces cerevisiae
atgaaggtaaatttaatgttgaaaagagggcttgctactgcaactgcaactgccagttccgctccccccaagattaaagtcggagtactactgtcaagaatccctataattaaatcagaattaaatgaactagagaaaaaatactatgagtaccaatcagaactagaaaagagactaatgtggacgtttccggcatatttttatttcaaaaagggtactgtagcagaacacaaatttctatccctgcagaaaggacctatctccaaaaaaaatggcatttggtttcctagaggcataccggacattaaacatggcagagaaagaagtactaagcaagaagttaaactttctgatgacagtacagtagcatttagcaacaatcaaaaagagcaaagcaaagacgatgttaataggcccgtgattcccaacgacaggataacggaagcagataggtcaaatgatatgaagagccttgaaagacaattgagcaggaccttatatcttttggttaaggataaaagcggtacttggaaattccctaacttcgatctttctgatgaatctaagccgttacacgtacacgcagagaacgaattgaaattgttgagcggtgatcagatatacacttggtctgtttctgctacgcccataggtgttttgcaggacgagagaaataggactgctgagtttattgtgaagtcacacattttggctggaaaatttgatttggtggcgtcgaaaaatgatgcattcgaggattttgcttggctgacaaaaggtgagatcagtgaatatgtaccaaaagattactttaacaaaacagaatttcttttagcggataattga

SEQ ID NO: 9178 - DNA, 846 bp, Artificial Sequence
  Description of Artificial Sequence: Synthetic polynucleotide
atgaaggtaaatttaatgttgaaaagagggcttgctactgcaactgcaactgccagttccgctccccccaagattaaagtcggagtattgttatctagaatccctataattaaaagtgaattaaatgaattagagaaaaaatactatgagtaccaaagtgaattggaaaagagattaatgtggacgtttccggcatatttttatttcaaaaagggtactgtagcagaacacaaatttctttccttacagaaaggacctatctccaaaaaaaatggcatttggtttcctagaggcataccggacattaaacatggcagagaaagaagtactaagcaagaagttaaactttctgatgacagtacagtagcatttagcaacaatcaaaaagagcaaagcaaagacgatgttaataggcccgtgattcccaacgacaggataacggaagcagataggtctaatgatatgaagagccttgaaagacaattgagcaggaccttatatcttttggttaaggataaaagcggtacttggaaattccctaacttcgatctttctgatgaatctaagccgttacacgtacacgcagagaacgaattgaaattgttgagcggtgatcagatatacacttggtctgtttctgctacgcccataggtgttttgcaggacgagagaaataggactgctgagtttattgtgaagtctcacattttggctggaaaatttgatttggtggcgtccaaaaatgatgcattcgaggattttgcttggttgacaaaaggtgagatcagtgaatatgtaccaaaagattactttaacaaaacagaatttcttttagcggataattga

SEQ ID NO: 9179 - DNA, 1728 bp, Saccharomyces cerevisiae
atgcagcaggacgacgattttcaaaattttgtagctaccttggaatcattcaaagatttgaaatctggtatttcaggttctcgtattaagaaactaaccacttacgcacttgatcacattgatattgaatcgaaaatcatatctttgataatagactactcaagactttgtcccgattctcataaattaggttctttatatatcatcgattcaataggtagagcttacttggatgaaacaagatcaaattcaaacagcagcagcaacaaacccggtacttgtgcccatgccataaacacgttgggcgaagtaattcaagaactgctatccgatgctattgcaaaaagtaatcaagaccacaaggaaaaaattcgtatgcttttagacatttgggacaggtccggcttgtttcaaaagagttacttgaacgccatcaggtcaaaatgctttgctatggacatatcgaataacaccgcgaacaccgcttcacaacaactatcactggatcccaagcagaggtcgaaacaaatcttgtcaaatctaaagaaaagtcctcctttaaacttgaacataagtcttccaactgatttgacttccacagatccagccaaacagcaagcagctcttttccaagtaatagcggctctgcagaaacattttaaaactttgccttcacatacatccgtgggtacagtcgcacctccccaagcccatacaattaccgaatatggtagcagacgtgaacgtgaacgtgaaagagaaagatataactcaagaaggaatagatcaagatctcctccggcaccattttctcagccatcgacaggcaggaaggaccgctatccatctgtggcccaggaccaatacagcataggcgcccccaatacgacatttggcacaaacaatcaccacttataccccgatgagcttaatgtttccaataatcctcattatagaccaaaaccagtaagttacgactctacattgccaccagatcatattaaagtctacagccgtactcttttcatcggtggggtaccactaaacatgaaggaatgggaccttgctaacgttttaaaaccttttgctgaagtacaaagcgtcattctgaataactccagaaaacacgcttttgtgaaagtttattcaagacatgaggccgaaaatgttttgcaaaacttcaataaagatggagccctgccattgagaactaggtggggagttggttttggtccaagagattgttgtgactatcaacacggttacagtattattcctatgcacaggctcacggacgctgataaaaaatggtcagtaagtgcgcaatggggtggcacttctggtcaacctctcgttaccggtattgttttcgaagaaccggatattatcgttggtgaaggtgtttcttccaaggcaatatctcaaaagatgcctactgattctggcagaaatgggccacgttctggtaaacctaacaaatctggtagcatatcgtcgatatctccagtaccctacggcaatgcaccattggcatctcctccaccacagcaatatgtgcaacctatgatgcagcaaccgtatggttatgcccccaaccaaccattaccttctcagggacctgccgcagcggctccccctgtacctcagcaacaatttgaccccactgctcaattgaattctttgatgaatatgcttaaccaacagcagcagcaacaacaacaaagctaa

SEQ ID NO: 9180 - DNA, 1728 bp, Artificial Sequence
  Description of Artificial Sequence: Synthetic polynucleotide
atgcagcaggacgacgattttcaaaattttgtagctaccttggaatctttcaaagatttgaaatctggtatttctggttctcgtattaagaaattgaccacttacgcacttgatcacattgatattgaaagtaaaatcatatctttgataatagactactctagactttgtcccgattctcataaattaggttctttatatatcatcgattctataggtagagcttacttggatgaaacaagatctaatagcaacagcagcagcaacaaacccggtacttgtgcccatgccataaacacgttgggcgaagtaattcaagaattattatccgatgctattgcaaaaagtaatcaagaccacaaggaaaaaattcgtatgcttttagacatttgggacaggtccggcttgtttcaaaagagttacttgaacgccatcaggtccaaatgctttgctatggacatatccaataacaccgcgaacaccgcttctcaacaattatctttagatcccaagcagaggtccaaacaaatcttgagcaatttgaagaaaagtcctcctttaaacttgaacataagtcttccaactgatttgacttccacagatccagccaaacagcaagcagctcttttccaagtaatagcggctttacagaaacattttaaaactttgccttctcatacatccgtgggtacagtcgcacctccccaagcccatacaattaccgaatatggtagcagacgtgaacgtgaacgtgaaagagaaagatataactctagaaggaatagatctagatctcctccggcaccattttctcagccatctacaggcaggaaggaccgctatccatctgtggcccaggaccaatacagcataggcgcccccaatacgacatttggcacaaacaatcaccacttataccccgatgagcttaatgtttccaataatcctcattatagaccaaaaccagtaagttacgactctacattgccaccagatcatattaaagtctacagccgtactcttttcatcggtggggtaccattgaacatgaaggaatgggaccttgctaacgttttaaaaccttttgctgaagtacaaagcgtcattttgaataactccagaaaacacgcttttgtgaaagtttattctagacatgaggccgaaaatgttttgcaaaacttcaataaagatggagccttaccattgagaactaggtggggagttggttttggtccaagagattgttgtgactatcaacacggttacagtattattcctatgcacaggctcacggacgctgataaaaaatggtctgtaagtgcgcaatggggtggcacttctggtcaacctctcgttaccggtattgttttcgaagaaccggatattatcgttggtgaaggtgtttcttccaaggcaatatctcaaaagatgcctactgattctggcagaaatgggccacgttctggtaaacctaacaaatctggtagcatatcttctatatctccagtaccctacggcaatgcaccattggcatctcctccaccacagcaatatgtgcaacctatgatgcagcaaccgtatggttatgcccccaaccaaccattaccttctcagggacctgccgcagcggctccccctgtacctcagcaacaatttgaccccactgctcaattgaattctttgatgaatatgcttaaccaacagcagcagcaacaacaacaaagctga

SEQ ID NO: 9181 - DNA, 3939 bp, Saccharomyces cerevisiae
atgagcgctatctataaattatctattcagggcatacggtcttttgactccaatgatagggaaactattgaatttggcaagcctctgactttaatagtcggcatgaatggttcaggtaaaacgactatcatcgaatgtttaaagtacgctaccacaggtgatctaccgcccaacagcaagggaggagtattcattcatgacccgaagataactggtgaaaaggacattagagctcaggtcaaactggcgtttacgagtgccaatggactcaatatgattgtcaccagaaatattcagttgctaatgaaaaagactactactacatttaagactttagaaggccagttggtcgctataaataatagtggtgaccgcagtactttgtccacccggtctctggaattagacgcacaagtacccctgtatctgggagttccaaaagcgatcttggaatacgtgatattctgtcaccaagaagacagcctgtggccactgagtgaaccatccaatcttaaaaagaagtttgatgaaattttccaagcgatgaaatttacaaaggctctagacaatttaaaatccataaagaaagacatgtccgtggatatcaagttattaaagcaatcagtagaacacttaaagttggataaagacagatcgaaagcaatgaagctcaatatccaccaattgcaaactaagatagatcagtataatgaagaagtgtctgaaattgaatctcaattgaatgaaatcactgagaaatccgataaactgtttaaatctaatcaagatttccaaaaaatactatccaaagtagagaacttgaaaaatacaaaactctcaattagtgatcaagtgaaaagattgtcaaactcaattgatattctcgatttatcgaagccagatttgcaaaacttattggcaaacttctctaaagtcttgatggataagaataatcagttgagagatttggaaaccgatatttcaagtttgaaagaccgtcagtcatccttgcagagcctttctaattccctcatcaggcggcagggtgagttagaagctggtaaggagacatacgaaaagaacagaaatcacctttcatcgctaaaagaagccttccaacataagttccaaggcctttcaaatattgaaaacagtgatatggctcaagtaaatcacgaaatgtcacagttcaaggctttcatctctcaggatttaactgacactatagatcaatttgcaaaggatattcaactaaaggaaacaaatttatccgacttgataaaatcaataaccgtcgattcacagaatttggaatataataaaaaggacagatctaaattaatccatgactctgaagagcttgctgagaaattgaaatcatttaaaagtttgtctactcaagatagcctcaatcatgaactggaaaacttaaaaacatacaaagaaaagctgcaatcttgggaaagtgagaatattataccaaaattgaaccagaaaatagaagagaaaaataatgagatgattatcttagagaatcaaattgagaaatttcaagatcgcataatgaaaacgaatcaacaagcggacttatacgccaaactaggactaataaagaagtccattaatactaaattagacgagttacaaaagattacggaaaaattacagaatgattctagaataaggcaagtatttcccctcacccaggaatttcaaagagctgatttagaaatggattttcagaaattattcatcaatatgcaaaagaatatagcgatcaacaacaaaaagatgcacgaattggatagaagatatacaaacgctttgtacaatttgaacaccattgaaaaggatttacaggataatcagaagtcgaaagaaaaagtgatacaactactaagcgaaaacttaccagaggattgtactattgatgaatataatgatgtcctggaagaaacggagctctcctataagactgcgctggaaaacttgaaaatgcatcaaactactttagaatttaatagaaaagcattagagatcgctgaacgtgacagctgctgttatttgtgttctagaaagtttgaaaatgaatcgtttaaaagtaagttgttacaagaactaaaaacaaaaacagacgcaaattttgaaaaaactttgaaagacactgtccaaaacgaaaaggaatatcttcatagtttaaggctactggagaaacatattattacactaaattctataaatgaaaagattgataattcacagaagtgccttgaaaaagctaaggaggaaacaaaaacttccaaatcaaaactagatgaattggaagtagattccacaaaattgaaagatgagaaagagttagctgagtctgaaattcgtcctttgattgagaagtttacttacttagaaaaggaacttaaggatcttgaaaacagttctaaaacgatatctgaggagctatcgatttataataccagtgaagatggtattcaaactgttgatgaattaagggaccaacaaaggaagatgaatgattctttacgtgaactgaggaaaaccatttcagatttgcaaatggaaaaagatgaaaaggtgagagaaaattcaagaatgattaacttgattaaagaaaaggaattaacagtttctgaaattgaatcatctttaacacagaaacaaaatattgatgattctataaggtcaaaaagggaaaacatcaacgatatcgattctagagtaaaggagttagaagcacgtattatttcattaaaaaacaaaaaggatgaagcgcaaagtgttctagacaaagtaaaaaatgaacgtgatattcaagtacgcaacaaacaaaaaaccgttgcagatattaatcggttaatagatagatttcagaccatttataacgaagtggttgattttgaagctaagggcttcgatgaattgcaaacaacaataaaagaactagaattgaacaaagctcaaatgctggaactaaaggagcagcttgatctcaagtcaaatgaagttaacgaagaaaagagaaaacttgctgactcaaataatgaggagaaaaacttgaagcagaacttagaactaattgaattgaaatcacaacttcagcacattgaatctgagataagtagattagacgttcaaaatgcagaagctgaaagggacaaatatcaagaggaatcactaagactaagaacaagatttgaaaagctgagctctgaaaacgcaggtaaattaggtgaaatgaaacaattacagaatcaaatagattcattgactcatcaactgcggactgattacaaagatatcgagaaaaattaccataaagaatgggttgaattacagacaagatcctttgttactgacgacatagatgtctattcaaaagcattagatagtgctattatgaaatatcatggattgaaaatgcaagatataaacaggataattgatgaattatggaagcgtacgtatagtggtactgatatagacaccatcaaaattagatcagatgaagttagtagtacagttaagggaaaatcatacaactatcgtgttgtaatgtacaagcaggatgttgaattggatatgagaggacgatgttccgcgggtcaaaaagttcttgcatcgattattatcaggctagctctatctgaaacatttggcgcaaattgtggcgtaattgcactagacgaacctaccaccaatttagatgaagaaaacatcgaaagtttagcaaaatctttacacaatataattaatatgagaagacatcaaaagaatttccagctaatcgtgatcactcatgatgagaaatttttgggtcatatgaatgcagcggcatttactgatcacttcttcaaagtcaagagagatgataggcaaaaatcacaaattgagtgggtcgatattaacagagtcacttattga

SEQ ID NO: 9182 - DNA, 3939 bp, Artificial Sequence
  Description of Artificial Sequence: Synthetic polynucleotide
atgagcgctatctataaattatctattcagggcataagatcttttgactccaatgatagggaaactattgaatttggcaagcctttaactttaatagtcggcatgaatggttctggtaaaacgactatcatcgaatgtttaaagtacgctaccacaggtgatttaccgcccaacagcaagggaggagtattcattcatgacccgaagataactggtgaaaaggacattagagctcaggtcaaattagcgtttacgagtgccaatggactcaatatgattgtcaccagaaatattcagttgttgatgaaaaagactactactacatttaagactttagaaggccagttggtcgctataaataatagtggtgaccgcagtactttgtccaccaggtctttggaattagacgcacaagtacccttatatttgggagttccaaaagcgatcttggaatacgtgatattctgtcaccaagaagacagcttgtggccattaagtgaaccatccaatcttaaaaagaagtttgatgaaattttccaagcgatgaaatttacaaaggctttggacaatttaaaatccataaagaaagacatgtccgtggatatcaagttattaaagcaaagtgtagaacacttaaagttggataaagacagaagtaaagcaatgaagctcaatatccaccaattgcaaactaagatagatcagtataatgaagaagtgtctgaaattgaatctcaattgaatgaaatcactgagaaatccgataaattatttaaatctaatcaagatttccaaaaaatattatccaaagtagagaacttgaaaaatacaaaactctccattagtgatcaagtgaaaagattgtctaactctattgatattctcgatttatccaagccagatttgcaaaacttattggcaaacttctctaaagtcttgatggataagaataatcagttgagagatttggaaaccgatatttccagtttgaaagaccgtcagtcttccttgcagagcctttctaattccctcatcaggaggcagggtgagttagaagctggtaaggagacatacgaaaagaacagaaatcacctttcttctttgaaagaagccttccaacataagttccaaggcctttctaatattgaaaacagtgatatggctcaagtaaatcacgaaatgtctcagttcaaggctttcatctctcaggatttaactgacactatagatcaatttgcaaaggatattcaattgaaggaaacaaatttatccgacttgataaaatctataaccgtcgattctcagaatttggaatataataaaaaggacagatctaaattaatccatgactctgaagagcttgctgagaaattgaaaagttttaaaagtttgtctactcaagatagcctcaatcatgaattggaaaacttaaaaacatacaaagaaaagttacaatcttgggaaagtgagaatattataccaaaattgaaccagaaaatagaagagaaaaataatgagatgattatcttagagaatcaaattgagaaatttcaagatcgcataatgaaaacgaatcaacaagcggacttatacgccaaattaggattgataaagaagtccattaatactaaattagacgagttacaaaagattacggaaaaattacagaatgattctagaataaggcaagtatttcccctcacccaggaatttcaaagagctgatttagaaatggattttcagaaattattcatcaatatgcaaaagaatatagcgatcaacaacaaaaagatgcacgaattggatagaagatatacaaacgctttgtacaatttgaacaccattgaaaaggatttacaggataatcagaagagtaaagaaaaagtgatacaattattaagcgaaaacttaccagaggattgtactattgatgaatataatgatgtcttggaagaaacggagctctcctataagactgcgttagaaaacttgaaaatgcatcaaactactttagaatttaatagaaaagcattagagatcgctgaacgtgacagctgctgttatttgtgttctagaaagtttgaaaatgaaagttttaaaagtaagttgttacaagaattgaaaacaaaaacagacgcaaattttgaaaaaactttgaaagacactgtccaaaacgaaaaggaatatcttcatagtttaaggttattggagaaacatattattacattaaattctataaatgaaaagattgataattctcagaagtgccttgaaaaagctaaggaggaaacaaaaacttccaaatctaaattggatgaattggaagtagattccacaaaattgaaagatgagaaagagttagctgagtctgaaattcgtcctttgattgagaagtttacttacttagaaaaggaacttaaggatcttgaaaacagttctaaaacgatatctgaggagttatccatttataataccagtgaagatggtattcaaactgttgatgaattaagggaccaacaaaggaagatgaatgattctttacgtgaattgaggaaaaccatttctgatttgcaaatggaaaaagatgaaaaggtgagagaaaattctagaatgattaacttgattaaagaaaaggaattaacagtttctgaaattgaaagctctttaacacagaaacaaaatattgatgattctataaggtccaaaagggaaaacatcaacgatatcgattctagagtaaaggagttagaagcacgtattatttctttaaaaaacaaaaaggatgaagcgcaaagtgttttggacaaagtaaaaaatgaacgtgatattcaagtacgcaacaaacaaaaaaccgttgcagatattaatagattaatagatagatttcagaccatttataacgaagtggttgattttgaagctaagggcttcgatgaattgcaaacaacaataaaagaattggaattgaacaaagctcaaatgttggaattgaaggagcagcttgatctcaagagcaatgaagttaacgaagaaaagagaaaacttgctgactctaataatgaggagaaaaacttgaagcagaacttagaattgattgaattgaaatctcaacttcagcacattgaatctgagataagtagattagacgttcaaaatgcagaagctgaaagggacaaatatcaagaggaatctttgagattgagaacaagatttgaaaagttgagctctgaaaacgcaggtaaattaggtgaaatgaaacaattacagaatcaaatagattctttgactcatcaattaagaactgattacaaagatatcgagaaaaattaccataaagaatgggttgaattacagacaagatcctttgttactgacgacatagatgtctattctaaagcattagatagtgctattatgaaatatcatggattgaaaatgcaagatataaacaggataattgatgaattatggaagcgtacgtatagtggtactgatatagacaccatcaaaattagaagtgatgaagttagtagtacagttaagggaaaatcttacaactatcgtgttgtaatgtacaagcaggatgttgaattggatatgagaggaagatgttccgcgggtcaaaaagttcttgcatctattattatcaggttggctttatctgaaacatttggcgcaaattgtggcgtaattgcattggacgaacctaccaccaatttagatgaagaaaacatcgaaagtttagcaaaatctttacacaatataattaatatgagaagacatcaaaagaatttccagttaatcgtgatcactcatgatgagaaatttttgggtcatatgaatgcagcggcatttactgatcacttcttcaaagtcaagagagatgataggcaaaaatctcaaattgagtgggtcgatattaacagagtcacttattga

SEQ ID NO: 9183 - DNA, 1629 bp, Saccharomyces cerevisiae
atgaatagcagtctgcaagttggcatcggaattgatgtaggttcatcaagtgctagaataggtgtatataattactacaatgatgcgctgttagaaatggcgcaggaaccagtcccatactaccaggattcttcaaagaagtcatggaaattctggcaaaaatcaactgaaataattaaagcccttcaaaagtgtcttcagaaactgaacattagagaatatgaggtaaagtcatgtggtgtttctgcaacgtgttcattagctattttcgaaagggatcgcacaagtaacatgctgataccgtatccaaatgaagataatgtcatattttggatggactcttctgccgtaaacgaatgtcaatggctaaatatgcaatgtccacaacagcttttggattatttgggaggaaaatttgtacccgaaatgggcgtccccaaattgaagtactttttagatgaatactctcatttacgagacaaacattttcatatctttgatcttcatcaatacattgcttatgaactgagccgcttgtatgaatggaacattgaaggacttttgggaagagaaaatcttaatggtataggcaatgatggagaggtatctggctggtcatcttcattttacaaaaacattataaatttaccatctaatgtaagcattggaaccactagtcttgttgccaataagcacatttcgacaactgtagttcgcagttgtattgacagttatgcaagttggttcgcagttgcttctcctcatttggaaacatcattgtttatgatagccgggacttctagctgctacatgtatggtactaccatctctgatactagaattcctggagtatggggaccttttgatactatacttgacaacaggggtgatttttctgtttatgctgcgggccagtcgtgtactggtaaattaattgaacatttatttgagagtcatccatgtgccaggaaaattctgaaagatggtgctgatatctatcaagtactcgaacaaaccattcgtgacattgagaagaacaatggtctctcaattcatattcttacgaaagatatgtttttctacggtgattacgagggaaataggactccttttgcagatccacggataaagggttctttcattggcgagtccaccgatacatcaatgttgaatcttacatataaatatatttgtatcttggaatttttatcatttcagacaaaattgataattgatacatttcaaaatgaaaattcaaatatacatatcaaagagttaaggatatctggtagtcaagcgaaaaatgaaagactattatcattgatttccttggttaacaacggtgtagcaataattaaacctaaagagaatgtcgatatgatgggtatcaaaggtgcttacgtgcttgctaagtctgcaaaggaaaagaaacaactagctgacgttataacagagagagatattagtaatgatagcgaaaaattcgaatctcttgctgaataccgacttggaaacgatagcatattactaagaaaattgctttgcgttaaatatcatatacacttagatatggctaagcaacagaagcgttatcacaaactcgtcgacgaagtatttcagcacctctaa

SEQ ID NO: 9184 - DNA, 1629 bp, Artificial Sequence
  Description of Artificial Sequence: Synthetic polynucleotide
atgaatagcagtttacaagttggcatcggaattgatgtaggttcttccagtgctagaataggtgtatataattactacaatgatgcgttattagaaatggcgcaggaaccagtcccatactaccaggattcttccaagaagtcttggaaattctggcaaaaatctactgaaataattaaagcccttcaaaagtgtcttcagaaattgaacattagagaatatgaggtaaagagttgtggtgtttctgcaacgtgttctttagctattttcgaaagggatcgcacaagtaacatgttgataccgtatccaaatgaagataatgtcatattttggatggactcttctgccgtaaacgaatgtcaatggttaaatatgcaatgtccacaacagcttttggattatttgggaggaaaatttgtacccgaaatgggcgtccccaaattgaagtactttttagatgaatactctcatttaagagacaaacattttcatatctttgatcttcatcaatacattgcttatgaattgagccgcttgtatgaatggaacattgaaggacttttgggaagagaaaatcttaatggtataggcaatgatggagaggtatctggctggtcttcttctttttacaaaaacattataaatttaccatctaatgtaagcattggaaccactagtcttgttgccaataagcacatttctacaactgtagttcgcagttgtattgacagttatgcaagttggttcgcagttgcttctcctcatttggaaacatctttgtttatgatagccgggacttctagctgctacatgtatggtactaccatctctgatactagaattcctggagtatggggaccttttgatactatacttgacaacaggggtgatttttctgtttatgctgcgggccagtcctgtactggtaaattaattgaacatttatttgagagtcatccatgtgccaggaaaattttgaaagatggtgctgatatctatcaagtactcgaacaaaccattcgtgacattgagaagaacaatggtctctccattcatattcttacgaaagatatgtttttctacggtgattacgagggaaataggactccttttgcagatccaagaataaagggttctttcattggcgagtccaccgatacatctatgttgaatcttacatataaatatatttgtatcttggaatttttatcttttcagacaaaattgataattgatacatttcaaaatgaaaatagtaatatacatatcaaagagttaaggatatctggtagtcaagcgaaaaatgaaagattattatctttgatttccttggttaacaacggtgtagcaataattaaacctaaagagaatgtcgatatgatgggtatcaaaggtgcttacgtgcttgctaagtctgcaaaggaaaagaaacaattggctgacgttataacagagagagatattagtaatgatagcgaaaaattcgaatctcttgctgaatacagacttggaaacgatagcatattattaagaaaattgctttgcgttaaatatcatatacacttagatatggctaagcaacagaagcgttatcacaaactcgtcgacgaagtatttcagcacctctga

SEQ ID NO: 9185 - DNA, 1248 bp, Saccharomyces cerevisiae
atgtccgtgaaaaggtctgtttctgaaatcgaaattgaaagtgttcaagatcaaccctctgttgccgtgggaagtttcttcaagggcttccgtgctcccagtgacactacgttcgacttatacaaaaaaaagaagtctgaaaaggacgaattcgtattacacggtgaaaacgagagactagaatacgaaggttatactgattcttcttcccaagcttcgaaccagtatgttgtgggcctatttaatccagaaaagaaaagtattcaactctacaaggctcccgtacttgtttccaaagttgtatccaagtcaagcaagaatctaaggggtccaaaaataaaaagtaagagtgatactcgtccatctgctttgagaaatgcgttgggtgaagcgtttggtactaaaaaggctaaaaaagctattgcagatctagaaagaaaccgtattgactctgataagttgactgattctgctattgacattgtggattccgtgagaactgcatctaaggatttaccaactcgggctcaattggatgaaattacttccaacgatagacctactccattagccaatatcgatgccactgatgtagaacaaatttacccaattgaaagtataataccaaagaaggaattacagtttattcgcgtttcatcaattctgaaagaagcggataaggaaaagaagttggaattgttcccataccaaaacaattccaagtatgtggcaaagaaattggactctttgacacaaccttcacaaatgaccaaattacagctactatactacttatcactattactgggcgtatacgaaaatagacgcgtgaataacaagacgaagttgttagaaaggttgaacagtcctcctgaaatcttggtagatggtatcttaagcagatttaccgtgataaagcctggacagtttggaagatcaaaggatcgctcctatttcattgacccacaaaatgaagataaaatcttatgctacatcttggcaatcataatgcatttggataacttcattgttgaaatcacacccttagcacacgaattgaacttgaaaccttccaaagttgtcagtttgttcagggtacttggtgctattgtcaaaggtgccacagtggctcaagctgaggcttttggcattccaaaaagtactgcagcttcttataaaattgccactatgaaagttccatttaagctacctgaaatgacaagaagaggaagaggtccaagacgttag

SEQ ID NO: 9186 - DNA, 1248 bp, Artificial Sequence
  Description of Artificial Sequence: Synthetic polynucleotide
atgtccgtgaaaaggtctgtttctgaaatcgaaattgaaagtgttcaagatcaaccctctgttgccgtgggaagtttcttcaagggcttccgtgctcccagtgacactacgttcgacttatacaaaaaaaagaagtctgaaaaggacgaattcgtattacacggtgaaaacgagagattagaatacgaaggttatactgattcttcttcccaagcttctaaccagtatgttgtgggcttatttaatccagaaaagaaaagtattcaactctacaaggctcccgtacttgtttccaaagttgtatccaagagcagcaagaatttaaggggtccaaaaataaaaagtaagagtgatactcgtccatctgctttgagaaatgcgttgggtgaagcgtttggtactaaaaaggctaaaaaagctattgcagatttggaaagaaaccgtattgactctgataagttgactgattctgctattgacattgtggattccgtgagaactgcatctaaggatttaccaactagagctcaattggatgaaattacttccaacgatagacctactccattagccaatatcgatgccactgatgtagaacaaatttacccaattgaaagtataataccaaagaaggaattacagtttattcgcgtttcttccattttgaaagaagcggataaggaaaagaagttggaattgttcccataccaaaacaattccaagtatgtggcaaagaaattggactctttgacacaaccttctcaaatgaccaaattacagttgttgtactacttaagtttgttattaggcgtatacgaaaatagacgcgtgaataacaagacgaagttgttagaaaggttgaacagtcctcctgaaatcttggtagatggtatcttaagcagatttaccgtgataaagcctggacagtttggaagatccaaggatcgctcctatttcattgacccacaaaatgaagataaaatcttatgctacatcttggcaatcataatgcatttggataacttcattgttgaaatcacacccttagcacacgaattgaacttgaaaccttccaaagttgtcagtttgttcagggtacttggtgctattgtcaaaggtgccacagtggctcaagctgaggcttttggcattccaaaaagtactgcagcttcttataaaattgccactatgaaagttccatttaagttacctgaaatgacaagaagaggaagaggtccaagacgttga

SEQ ID NO: 9187 - DNA, 2304 bp, Saccharomyces cerevisiae
atgaatatcttcataaaagccctgagaagatatactataatgtctacgccgaagattgtgcagcccaaatggaaggttccaacgccacaagctaaagaaactgtgttgaagttgtacaacagtttaacaagatctaaggttgaattcattccgcaatctggcaatagaggtgtcacttggtactcttgcggtcctactgtttacgatgcctcccatatgggtcatgccagaaactatgtctctattgatatcaatagaagaattattcaagattattttggttacgacgtgcaatttgtgcaaaatgttactgatatcgacgataaaattattttgagagctagacaaaactatttatttgacaattttgtcaaagaaaatgataccaaattcaacgccactgttgttgacaaggtcaaaaccgcacttttccaatatatcaacaaaaattttactattcaaggcagcgagatcaaaactatcgaagaatttgaaacttggttatcgaatgctgatactgaaactttaaaattggagaatcctaaattccctatgcatgtcaccgcagttcaaaatgctattgaatcaatcactaagggcgattccatggacgcagaagttgcctttgaaaaagtcaaggacgttacggttcctctattggataaagaattgggctctaccattagcaatccagagattttccgccaacttccagcttactgggaacagaaattcaatgatgacatgttatcattaaacgtgctacctcccaccgttacaactcgtgtttctgagtacgttccagaaattattgactttgttcaaaaaattattgataatggttacgcatatgccacttccgacggttccgtgtactttgatactttaaaatttgacaaatccccaaatcatgactatgctaaatgccagccatggaataagggccagttagacttaattaatgatggtgaagggtccttaagcaactttgctgataacggaaaaaagtcgaataatgattttgctttatggaaggcttccaaggcaggtgaacctgagtgggaatcaccatggggtaagggtagaccaggatggcatattgaatgttctgtgatggccagtgatatcctaggctctaacatcgatattcattcaggtggcatcgatttggcctttcctcaccatgataacgaattggctcaatccgaggctcgcttcgacaatcaacagtggatcaactatttcttacatacgggccatttacatattgagggtcaaaaaatgtctaaatccttaaagaatttcattaccattcaagaagctttgaaaaaattctcaccgcgccaattaagattggcttttgcctcagtacaatggaacaatcaattggatttcaaggaatctttgatccatgaagtaaagtcatttgaaaactccatgaacaatttttttaagactattagagcattgaagaacgatgcagcttctgcaggtcatatctctaaaaagtttagtcccttagagaaagaattattggctgattttgttgaaagtgaatcgaaagtccattcggcgttctgtgataatttatccacacctgttgctttgaagacactgagcgaattagtgaccaagtcaaacacatacattaccactgcaggtgctgctttaaaaattgagcccttgattgctatctgtagctacatcaccaaaatcttaagaataattggatttccatcccgtcctgacaatttgggttgggcagcccaagctggctccaacgatggatccctaggctcattggaagacactgttatgccatatgttaagtgtttatccacatttagagatgatgtacgttccttagctatcaagaaagccgaacccaaggaattcttgcaattaacggataaaattagaaacgaagatttgctaaacttgaatgttgccttggatgataggaatggacaatctgccttgatcaaatttttgactaacgatgaaaaattggaaattgtcaagctaaacgaggagaaacatgccaacgaactagcaaagaaacaaaagaaattggaacagcagaaattaagagagcagaaggaaaacgagaggaagcagaaagctcaaattaaaccacaagatatgttcaaggatgtcacattgtacagtgcttgggacgagcaaggccttccaacaaaggacaaagacggtaatgatatcaccaagagtatgaccaagaagttgaagaagcaatgggaacaacaaaagaagctacatgaagagtactttggtgaagacaaatag

SEQ ID NO: 9188 - DNA, 2304 bp, Artificial Sequence
  Description of Artificial Sequence: Synthetic polynucleotide
atgaatatcttcataaaagccttgagaagatatactataatgtctacgccgaagattgtgcagcccaaatggaaggttccaacgccacaagctaaagaaactgtgttgaagttgtacaacagtttaacaagatctaaggttgaattcattccgcaatctggcaatagaggtgtcacttggtactcttgcggtcctactgtttacgatgcctcccatatgggtcatgccagaaactatgtctctattgatatcaatagaagaattattcaagattattttggttacgacgtgcaatttgtgcaaaatgttactgatatcgacgataaaattattttgagagctagacaaaactatttatttgacaattttgtcaaagaaaatgataccaaattcaacgccactgttgttgacaaggtcaaaaccgcacttttccaatatatcaacaaaaattttactattcaaggcagcgagatcaaaactatcgaagaatttgaaacttggttatccaatgctgatactgaaactttaaaattggagaatcctaaattccctatgcatgtcaccgcagttcaaaatgctattgaaagtatcactaagggcgattccatggacgcagaagttgcctttgaaaaagtcaaggacgttacggttcctttattggataaagaattgggctctaccattagcaatccagagattttccgccaacttccagcttactgggaacagaaattcaatgatgacatgttatctttaaacgtgttgcctcccaccgttacaactcgtgtttctgagtacgttccagaaattattgactttgttcaaaaaattattgataatggttacgcatatgccacttccgacggttccgtgtactttgatactttaaaatttgacaaatccccaaatcatgactatgctaaatgccagccatggaataagggccagttagacttaattaatgatggtgaagggtccttaagcaactttgctgataacggaaaaaagagcaataatgattttgctttatggaaggcttccaaggcaggtgaacctgagtgggaatctccatggggtaagggtagaccaggatggcatattgaatgttctgtgatggccagtgatatcttgggctctaacatcgatattcattctggtggcatcgatttggcctttcctcaccatgataacgaattggctcaatccgaggctcgcttcgacaatcaacagtggatcaactatttcttacatacgggccatttacatattgagggtcaaaaaatgtctaaatccttaaagaatttcattaccattcaagaagctttgaaaaaattcagtccgcgccaattaagattggcttttgcctctgtacaatggaacaatcaattggatttcaaggaatctttgatccatgaagtaaagagctttgaaaactccatgaacaatttttttaagactattagagcattgaagaacgatgcagcttctgcaggtcatatctctaaaaagtttagtcccttagagaaagaattattggctgattttgttgaaagtgaaagtaaagtccattctgcgttctgtgataatttatccacacctgttgctttgaagacattgagcgaattagtgaccaagtctaacacatacattaccactgcaggtgctgctttaaaaattgagcccttgattgctatctgtagctacatcaccaaaatcttaagaataattggatttccatcccgtcctgacaatttgggttgggcagcccaagctggctccaacgatggatccttgggctctttggaagacactgttatgccatatgttaagtgtttatccacatttagagatgatgtacgttccttagctatcaagaaagccgaacccaaggaattcttgcaattaacggataaaattagaaacgaagatttgttgaacttgaatgttgccttggatgataggaatggacaatctgccttgatcaaatttttgactaacgatgaaaaattggaaattgtcaagttgaacgaggagaaacatgccaacgaattggcaaagaaacaaaagaaattggaacagcagaaattaagagagcagaaggaaaacgagaggaagcagaaagctcaaattaaaccacaagatatgttcaaggatgtcacattgtacagtgcttgggacgagcaaggccttccaacaaaggacaaagacggtaatgatatcaccaagagtatgaccaagaagttgaagaagcaatgggaacaacaaaagaagttgcatgaagagtactttggtgaagacaaatga

SEQ ID NO: 9189 - DNA, 795 bp, Saccharomyces cerevisiae
atgatgagtgaccaagaaaacgagaacgagcatgcaaaagcattcttaggattggctaaatgcgaagaagaagtggacgctattgaacgtgaggtagaattatacagattgaacaaaatgaagcctgtttatgaaaagagggacgcgtatattgacgaaattgcagagttctggaaaattgtgctttcacaacacgttagttttgcgaattacataagggcttcagattttaaatacattgacactatagataagatcaaagtagaatggctggcattggagtctgaaatgtacgacactagagattttagtataacattccatttccatggaattgagggagacttcaaagagcagcaagtcaccaaggtgttccaaatcaaaaaaggcaaagatgaccaagaagacgggatactgactagtgagcccgttccaattgagtggccccagagttacgactcgataaacccggacttgatcaaagacaaacgcagtccagagggtaaaaaaaagtacagacagggaatgaaaaccatatttggctggttcagatggaccggcctaaaacccgggaaggagttcccgcacggcgactcattggcgtcattgttcagtgaagagatctaccctttttgtgtgaagtactatgctgaggcccagagggacttggaagacgaagaaggagaatccgggttaagcgcagatggcgacagcgaggatgacgatggcagtctcggtgaggtggacttgccactatccgacgaggaaccaagctctaagaaaaggaaagtttag

SEQ ID NO: 9190 - DNA, 795 bp, Artificial Sequence
  Description of Artificial Sequence: Synthetic polynucleotide
atgatgagtgaccaagaaaacgagaacgagcatgcaaaagcattcttaggattggctaaatgcgaagaagaagtggacgctattgaacgtgaggtagaattatacagattgaacaaaatgaagcctgtttatgaaaagagggacgcgtatattgacgaaattgcagagttctggaaaattgtgctttctcaacacgttagttttgcgaattacataagggcttctgattttaaatacattgacactatagataagatcaaagtagaatggttggcattggagtctgaaatgtacgacactagagattttagtataacattccatttccatggaattgagggagacttcaaagagcagcaagtcaccaaggtgttccaaatcaaaaaaggcaaagatgaccaagaagacgggatattgactagtgagcccgttccaattgagtggccccagagttacgacagtataaacccggacttgatcaaagacaaacgcagtccagagggtaaaaaaaagtacagacagggaatgaaaaccatatttggctggttcagatggaccggcttgaaacccgggaaggagttcccgcacggcgactctttggcgtctttgttcagtgaagagatctaccctttttgtgtgaagtactatgctgaggcccagagggacttggaagacgaagaaggagaatccgggttaagcgcagatggcgacagcgaggatgacgatggcagtctcggtgaggtggacttgccattgtccgacgaggaaccaagctctaagaaaaggaaagtttga

SEQ ID NO: 9191 - DNA, 540 bp, Saccharomyces cerevisiae
atggggtcgggcgatttgaatctgttgaaatcatggaatcccaagcttatgaaaaatagaaaaaaagtatgggagaccgaacaggatctaattaccgaacagcagaagcttaacacgcgattgaaagaaattgaaaaagaacgagaactaaatgaactgctgaacgaatcgagcaaggataagccggagactctcaagaatgacttggctttgaagaagtcgggcttggaatggatgtatcaggatgcaaaactgagtgacgaaaaggaagactatttattaggtaagaaaaaactagattcatctatactaaaccaacctgcaacaccgcctgtaagggcggccactactatttccgcttctggtgccgcaacatccataagttcgcagaagaagaagtcaaaattgcttaaagatgatccaatgagtaagtttaaggtaactaaacaacaaagaagaactccagactcaacaaaaaaaagagcaatgtcgcaacgagggaaaccgttgtccaagcccgctccggacctagactactaa

SEQ ID NO: 9192 - DNA, 540 bp, Artificial Sequence
  Description of Artificial Sequence: Synthetic polynucleotide
atggggtctggcgatttgaatttattgaaaagttggaatcccaagcttatgaaaaatagaaaaaaagtatgggagaccgaacaggatttgattaccgaacagcagaagcttaacacgagattgaaagaaattgaaaaagaaagagaattgaatgaattattaaacgaaagtagcaaggataagccggagactctcaagaatgacttggctttgaagaagtctggcttggaatggatgtatcaggatgcaaaattaagtgacgaaaaggaagactatttattaggtaagaaaaaattggattcttctatattaaaccaacctgcaacaccgcctgtaagggcggccactactatttccgcttctggtgccgcaacatccataagttctcagaagaagaagagtaaattgcttaaagatgatccaatgagtaagtttaaggtaactaaacaacaaagaagaactccagactctacaaaaaaaagagcaatgtctcaaagagggaaaccgttgtccaagcccgctccggacttggactactga

SEQ ID NO: 9193 - DNA, 327 bp, Saccharomyces cerevisiae
atgtccattgagaatctgaaatcatttgatcctttcgccgacacaggagacgacgaaaccgccacttcaaactatattcatattcgtatccaacagagaaatggtagaaaaactttaactacggtgcaaggtgtcccagaggaatatgatttaaagagaattcttaaggtcctaaagaaggactttgcatgtaatggtaacattgtcaaggatccagaaatgggggagattattcagttgcagggtgaccaaagagcaaaggtttgcgaatttatgatctcccaactgggattgcaaaagaagaacattaaaattcatgggttttaa

SEQ ID NO: 9194 - DNA, 327 bp, Artificial Sequence
  Description of Artificial Sequence: Synthetic polynucleotide
atgtccattgagaatttgaaaagttttgatcctttcgccgacacaggagacgacgaaaccgccacttctaactatattcatattcgtatccaacagagaaatggtagaaaaactttaactacggtgcaaggtgtcccagaggaatatgatttaaagagaattcttaaggtcttgaagaaggactttgcatgtaatggtaacattgtcaaggatccagaaatgggggagattattcagttgcagggtgaccaaagagcaaaggtttgcgaatttatgatctcccaattaggattgcaaaagaagaacattaaaattcatgggttttga

SEQ ID NO: 9195 - DNA, 2907 bp, Saccharomyces cerevisiae
atgtccagaatagattcagatctgcagaaagcgcttaaaaaggcgtgttccgttgaggagaccgcacctaagagaaagcacgtacgcgcatgcatagtgtacacatgggaccatcagtcttccaaagctgtttttacaacccttaagacgctgcctctggccaatgacgaagtgcaactgttcaagatgcttattgtactgcataagatcatacaagagggacatccgtcagcgctagctgaggccatccgggatagggactggatcagatctctgggtagggtacattctggcggttcgtcgtacagcaaactgattcgggagtatgtgcggtacctggttttgaagctggactttcatgcgcaccatagagggtttaacaacgggacgtttgagtacgaggagtatgtgtcactggtttcagtttccgacccggacgaagggtacgagacgatcttagatttgatgtcgttacaggattctcttgacgagttctcgcagatcatctttgcgtcgattcagtccgagaggagaaatactgagtgcaaaatttcggcgctgatcccgttgattgcggagtcatatggtatttataaattcatcacctcgatgctgagagctatgcacaggcaattgaatgatgcggagggtgacgctgctctgcagcccttgaaagaacggtacgagttgcaacatgcaaggctgtttgagttttacgcggactgctcttctgtgaagtacttgaccacgttagtaaccattccaaaactacccgtggacgctccagacgtatttttaatcaacgatgtggacgagtcaaaagagattaagttcaaaaaaagagagccctctgtaactccagcgcggacgccggcacggactccaacaccaacaccacctgttgttgctgagccggctatttccccacgtccggtatctcaaaggactacttcgacgcctacgggttacttgcaaactatgccgacgggtgccaccactgggatgatgatccccactgccactggtgcagctaacgccatttttccacaggcgacggcacaaatgcagccggacttctgggccaatcaacaagcccagtttgcgaacgagcaaaaccgtctcgagcaagagcgtgtgcaacagttgcaacaacagcaggcacagcaggaactgtttcaacagcagttacaaaaagcacaacaggatatgatgaatatgcagcttcaacaacaaaaccaacatcaaaacgatttaattgccctcaccaatcaatatgaaaaggaccaggctttattgcagcaatatgaccaaagagtgcagcagctggaaagtgaaatcacaacgatggattctacagcttccaaacaattggctaataaggacgagcaactaactgcattgcaggatcaattggatgtttgggaaagaaaatatgagtctttagccaagctatactcccagttgcgtcaagagcatctaaatcttttacctcgttttaaaaaactgcagttaaaggtgaatagtgcgcaggaatccattcagaaaaaggaacagttagaacacaaattgaagcaaaaggatttgcaaatggccgagttggttaaggaccgtgacagggcaaggttagaattagaaagatccattaataatgcagaggcggacagtgcagcggcgacagcagcagcagaaacaatgactcaggataaaatgaaccctattctggatgccatattggaaagcggtatcaacaccatccaggaatcggtctataatctcgattctcctttgagttggtcgggtccgctgactccacccactttccttttgtccttattggaaagtacttctgaaaacgccactgagtttgccaccagtttcaataatttgatagtagacggccttgcacacggcgaccaaacagaggtcatacactgcgttagtgatttcagtacttcgatggctacactggtgaccaattcaaaggcgtacgccgttactacattacctcaagaacagtctgatcaaattttgaccctggtgaagagatgtgccagagaggcccaatatttcttcgaggatttgatgtctgaaaatcttaaccaggtcggtgatgaggagaaaactgatatcgtcatcaatgccaacgtggacatgcaagagaagttgcaagagctatctttggctatcgaaccgttattgaacatacaatctgtcaaatcaaataaagaaacgaacccacattctgaattggttgccactgctgacaaaattgtcaaatcctcagaacacttacgtgttgacgttcctaaaccattgttgtcattggcattaatgattattgatgctgttgtggctttggtaaaggctgctattcagtgccaaaatgaaattgccaccacgacaagtattcctctgaaccaattctacttgaaaaacagcagatggacagaaggtttgatctccgcggcaaaggctgtggcaggtgcaaccaatgttttaatcactactgctagtaagttaatcacttctgaagacaatgaaaacacatcacctgaacaatttatcgtcgcctccaaagaagtggccgcatccacaatacaattggtagcagcatcgagagtgaaaacttccatccactcgaaggcccaagataaattggaacactgttccaaagatgttaccgatgcatgcagaagtttgggtaaccacgtcatgggtatgattgaagatgatcattcgacttcgcaacagcagcaaccattggacttcacatccgaacacacattgaagactgccgaaatggaacagcaagtggaaattttgaagttagaacaatccttgagcaatgccaggaagagattgggcgagataagaaggcatgcctactataaccaggatgatgattga

SEQ ID NO: 9196 - DNA, 2907 bp, Artificial Sequence
  Description of Artificial Sequence: Synthetic polynucleotide
atgtccagaatagattctgatttacagaaagcgcttaaaaaggcgtgttccgttgaggagaccgcacctaagagaaagcacgtacgcgcatgcatagtgtacacatgggaccatcagtcttccaaagctgtttttacaacccttaagacgttacctttggccaatgacgaagtgcaattattcaagatgcttattgtattacataagatcatacaagagggacatccgtctgcgttagctgaggccatcagagatagggactggatcagatctttgggtagggtacattctggcggttcttcctacagcaaattgattagagagtatgtgaggtacttggttttgaagttggactttcatgcgcaccatagagggtttaacaacgggacgtttgagtacgaggagtatgtgtctttggtttctgtttccgacccggacgaagggtacgagacgatcttagatttgatgtctttacaggattctcttgacgagttctctcagatcatctttgcgtccattcagtccgagaggagaaatactgagtgcaaaattagtgcgttgatcccgttgattgcggagtcttatggtatttataaattcatcacctccatgttgagagctatgcacaggcaattgaatgatgcggagggtgacgctgctttacagcccttgaaagaaagatacgagttgcaacatgcaaggttatttgagttttacgcggactgctcttctgtgaagtacttgaccacgttagtaaccattccaaaattgcccgtggacgctccagacgtatttttaatcaacgatgtggacgagagtaaagagattaagttcaaaaaaagagagccctctgtaactccagcgcgcacgccggcaagaactccaacaccaacaccacctgttgttgctgagccggctatttccccacgtccggtatctcaaaggactacttccacgcctacgggttacttgcaaactatgccgacgggtgccaccactgggatgatgatccccactgccactggtgcagctaacgccatttttccacaggcgacggcacaaatgcagccggacttctgggccaatcaacaagcccagtttgcgaacgagcaaaaccgtctcgagcaagagcgtgtgcaacagttgcaacaacagcaggcacagcaggaattatttcaacagcagttacaaaaagcacaacaggatatgatgaatatgcagcttcaacaacaaaaccaacatcaaaacgatttaattgccctcaccaatcaatatgaaaaggaccaggctttattgcagcaatatgaccaaagagtgcagcagttagaaagtgaaatcacaacgatggattctacagcttccaaacaattggctaataaggacgagcaattgactgcattgcaggatcaattggatgtttgggaaagaaaatatgagtctttagccaagttgtactcccagttgcgtcaagagcatttgaatcttttacctcgttttaaaaaattacagttaaaggtgaatagtgcgcaggaatccattcagaaaaaggaacagttagaacacaaattgaagcaaaaggatttgcaaatggccgagttggttaaggaccgtgacagggcaaggttagaattagaaagatccattaataatgcagaggcggacagtgcagcggcgacagcagcagcagaaacaatgactcaggataaaatgaaccctattttagatgccatattggaaagcggtatcaacaccatccaggaatctgtctataatctcgattctcctttgagttggtctggtccgttgactccacccactttccttttgtccttattggaaagtacttctgaaaacgccactgagtttgccaccagtttcaataatttgatagtagacggccttgcacacggcgaccaaacagaggtcatacactgcgttagtgatttcagtacttctatggctacattagtgaccaattctaaggcgtacgccgttactacattacctcaagaacagtctgatcaaattttgaccttagtgaagagatgtgccagagaggcccaatatttcttcgaggatttgatgtctgaaaatcttaaccaggtcggtgatgaggagaaaactgatatcgtcatcaatgccaacgtggacatgcaagagaagttgcaagagctttctttggctatcgaaccgttattgaacatacaatctgtcaaatctaataaagaaacgaacccacattctgaattggttgccactgctgacaaaattgtcaaatccagtgaacacttacgtgttgacgttcctaaaccattgttgtctttggcattaatgattattgatgctgttgtggctttggtaaaggctgctattcagtgccaaaatgaaattgccaccacgacaagtattcctttgaaccaattctacttgaaaaacagcagatggacagaaggtttgatctccgcggcaaaggctgtggcaggtgcaaccaatgttttaatcactactgctagtaagttaatcacttctgaagacaatgaaaacacatctcctgaacaatttatcgtcgcctccaaagaagtggccgcatccacaatacaattggtagcagcatctagagtgaaaacttccatccactccaaggcccaagataaattggaacactgttccaaagatgttaccgatgcatgcagaagtttgggtaaccacgtcatgggtatgattgaagatgatcattctacttctcaacagcagcaaccattggacttcacatccgaacacacattgaagactgccgaaatggaacagcaagtggaaattttgaagttagaacaatccttgagcaatgccaggaagagattgggcgagataagaaggcatgcctactataaccaggatgatgattga

SEQ ID NO: 9197 - DNA, 4779 bp, Saccharomyces cerevisiae
atggcattttggttacctcaaaatatacaaaagcggctgcttctttacgtccttcagcaaatttcgctgttctccaatatagatttatctaacttggacgtttctatagggtctaagtcacatttctcgttccatgatgtgaatctgtcacttgatgatctcaacattccaaacgtgcaaataaacgaaggcatagttgacgagcttgtgttaaaattaacagtttctggcggtgtggaaatcgatgggtctggtttaagatttatcatgacacctttatattccagtggctcacaggaacttcactcagattttttggttaaaagcatccaagatcttacgaattcgatgttacaatttagtgatccattgaccacatataataggtacaaagaagatgacattagctcttcagacagtagtagtgatctcaactctaatatagaagcttcaaaaccagccgcaaatggttcttatactcttcaaaatatgcggaacaaggcccttaatgtagccttagcgaaattgaaaatagcattaaaggacgttaccatacgtttcatagtgaatgatagagatccttccgataacattgtggaggttcatctagaaagcatacaacttattactacagacgcaaatttacgacatataaacattgaaaatatcaccatttcctcaatacaaaaacaagctgtacccgactctcctgtgcatcctttcaataatgacgatctgtcacaaagcgtttatttatcaaaaatggaggctacttcactttatatgagcgccatggaagagcaatcaaatgaagaccccagtgaaccccaagttacacaagaagaacaagagaatgataagtgcaaggaatctttaatggaaataaataatttgaacatagcttttaagggtttatcatcggtcaatgatctcagaatgtctaatattgttattgatattcaggatgttcatttagcgatacacaaaattgtcgaaatcaaaaactccactttgaagaatattatagatatcattgttacacatttggatgccaatgaaagcttttcttgccaggattcccaaagtccttcacctgacaagcaggaaccatcagctctttcttctgttgatatcaaatgtatatacttaaacttaggccaagatatcacagtaattttgaagagctttaaattagagcaaaaggaaaataattcattggcattttctttaggctcattttattctaattcgagtccattgacaattagccataaaactaagccattgctcactggagaacaaacccctcaaagcatcgcattaaatatgggcgacgaactagatattattatcagtcatgatggcattgcgcatttctttaaaatctttcagtttgtttcaaaatgtatgtccttttatcagaataagtcaaaagggatgatgcctcaaatagcatcggatactaaaaggaccgtacaacttacctcaaaagcagtgaagttgtcgcttaagtttccatattttttattatgtttccaggtttcacccttcatttacgactctaaccgtgagttgtacattgagcttgtagacgtatttaaaaaactaccttctcggtgcacgaaaatattgacaatgtcgagcattacgatctcgaacttgcaatcccctctacaactgggttcatatgacgatactttgaaagaagcgctaatttatagttctgtccatgcaatcatcaaagaagtgatatttaacgaagaatattctggaatagtacaattagtcgaagatatttctgcgtttggaaaacttttcacggattcaaagaacagtgaatgtacaggaaagtctaaaagcaagagaggctcctttttgcagagaagtgtcagagtacttaattcttccaggttcgtttacaagcagagtttatccgctaatttttctctcaagatagattccatgaagttaaaagtatcagaaattatagggccgcaatttggttctgtggaagcattactatcaaataatttctttgcgattacggatgactctcaaattgtatattttacaaagaacttaaaggtagaaagaaagacaccgtcattattagagccacaagaaatcatgtcagtagttttgaataaagcagttaacgaacctgtactatatgttcatagaagggcgaatggaaagttaaaagtcatttttaacaacattcgcatacattactatgcaaggtggttagaaatactaaagaaaaacatcggcccggataatgccagttcaaaagatgaacctgtttcacaaaagcttagtaaaaaacaaccgacttcaggatttccctgggaactcaaatgtctggactgctctctaattctgcaccctttcagattaaaaagtgtaatggtcattgtacttgacaatctaacaactggtggaagttcatttattccgcaggcaaagcttctttcaaaggcgaatacactcttcctaatagatgactatcagaatttcaaaattcaaaaagataagaactggcctagtttgataaatttttatgctggtcaaggtttctctgcaatcggtaaaatagatactttgaattttttaataaacaaatccgatggtgcccttttattggattgtaaaatagaacaagttggtctttcattatgcgcggattcttttcaaactttttgtcagctttgtattgatttaaaatatcctcagacgtttcctgatgaggaaaaatttagaacgcagttgaaaaatcctatcgatgtattcaaagacatcgattgtgatcttttcaattctgccttcatccgggagaacaatcatcaaaatgattacgactcagtgcatttggtagacagttttctcgacaaaactcacgagttcaacaatggtgccagaagtaaactatcctctcaaggttcatatgaaatggacagttcctctggaactgccacaggtggtattttacttccccatgagagttatctagactctgctcagccaaaagaagaagatactccaccaatcgcctcaaaagagcaagaaagggatgtggatataaggggtagtatagatgtcgaaaaagttgttataaaactattcgatgggtatgattggaaatatacgcggaaatttatcgctaatactgttgaaaaactggataaagagctcagtaaagcggaagcaagcagttcgaaatcaaatgtaccccaatcagaggcaaatatttttgactctatttatatatctgctaacaaaaacaatgtcacagatttgagaagaaatcttgatggtgagatccagggggttcagaattccttctctgatgtctctaaagttaatttgcgaccttctaagcattacaaagccctgattcaattgaacaaagtacatgtcaatttgaagaattatcgagtagatgaacccgatgagtctaactctgataattccacagatgttttgaaccgatgtgtagtttccatttacgaatttgaaattatcgataatgttcccacgtccacctggaataaatttgtaactttgctaaagcacgaaccgtggccacacagttctccgatgtttcttctggacctggaatttatccggccgatcgactttttgcaagcagtggaattagtcatgcaattaaatgttgcgcctttacgccttcacgtggatcaagacactttagagtttctaataaggttcttagggttcaaagataaaagatttgaattaattgatgagtatccagatattgtatttattcaaaaatttagcactaattcaattaagttaagattagattataagccgaaaaaagttgattatgcgggtttaagatcgggccaaacttctgaattgatgaatttttttacccttgatggatccaagattattttgaaaagcgtagtcctgtatggattaaatggattcgatgaattaaataataaactgaaagccatttggacgccggatattaccaaaaagcagctgcctggcgttttggaaggactggctcctgtcagatcgtttatggcgattgggtcaggggtgaagaccctagtcacagtactaatgtcagaatacaggcaagaagggcatttgggaaggagtctgaaaaagggtggcaatgtcttcttgaaaacgacaacgggagattttgtgaaattgggagttaaattaacttcagggacacaggcgatattggagaacaccgaggaactattcggtggtgttggttccaatggcagggtgtacgatgcatcgaaatttggctccgctgatggtgcagacagtgatactgcagctgtattagacttggatactttattcgaggaggatcagttagttggtagtaaatattccaggataagagatcatgagcccacggcagtagtcatcgatatgtcttcaccgggagatcacaacgaacccacaatagtgagtctgtacgcagatcagcccctcgacctgcccacgggtttgaaggaggcgtatagttcattagaaaagcatatgcatattgcgtacgatgcggtatggagggcaaagggacagatgaaggatgataaacggggagggccgagcgccgcagcagtttatgttgctagagctgcacctgtggcaattattcggccgttaattggggccactgaggcagtgtctaagactttacagggaatagctaatcaagtggataagacgcataacgagcaaatcaatgataagtacaagtccaatcggactgattcgtaa

SEQ ID NO: 9198 - DNA, 4779 bp, Artificial Sequence
  Description of Artificial Sequence: Synthetic polynucleotide
atggcattttggttacctcaaaatatacaaaagagattacttctttacgtccttcagcaaatttctttattctccaatatagatttatctaacttggacgtttctatagggtctaagagtcatttcagtttccatgatgtgaatttatctcttgatgatctcaacattccaaacgtgcaaataaacgaaggcatagttgacgagcttgtgttaaaattaacagtttctggcggtgtggaaatcgatgggtctggtttaagatttatcatgacacctttatattccagtggctctcaggaacttcacagtgattttttggttaaaagcatccaagatcttacgaattctatgttacaatttagtgatccattgaccacatataataggtacaaagaagatgacattagctcttctgacagtagtagtgatctcaactctaatatagaagcttccaaaccagccgcaaatggttcttatactcttcaaaatatgagaaacaaggcccttaatgtagccttagcgaaattgaaaatagcattaaaggacgttaccatacgtttcatagtgaatgatagagatccttccgataacattgtggaggttcatttggaaagcatacaacttattactacagacgcaaatttaagacatataaacattgaaaatatcaccatttcctccatacaaaaacaagctgtacccgactctcctgtgcatcctttcaataatgacgatttatctcaaagcgtttatttatccaaaatggaggctacttctctttatatgagcgccatggaagagcaaagcaatgaagaccccagtgaaccccaagttacacaagaagaacaagagaatgataagtgcaaggaatctttaatggaaataaataatttgaacatagcttttaagggtttatcttctgtcaatgatctcagaatgtctaatattgttattgatattcaggatgttcatttagcgatacacaaaattgtcgaaatcaaaaactccactttgaagaatattatagatatcattgttacacatttggatgccaatgaaagcttttcttgccaggattcccaaagtccttctcctgacaagcaggaaccatctgctctttcttctgttgatatcaaatgtatatacttaaacttaggccaagatatcacagtaattttgaagagctttaaattagagcaaaaggaaaataattctttggcattttctttaggctctttttattctaatagtagtccattgacaattagccataaaactaagccattgctcactggagaacaaacccctcaaagcatcgcattaaatatgggcgacgaattagatattattatcagtcatgatggcattgcgcatttctttaaaatctttcagtttgtttccaaatgtatgtccttttatcagaataagagtaaagggatgatgcctcaaatagcatctgatactaaaaggaccgtacaacttacctccaaagcagtgaagttgtctcttaagtttccatattttttattatgtttccaggtttctcccttcatttacgactctaaccgtgagttgtacattgagcttgtagacgtatttaaaaaattaccttctaggtgcacgaaaatattgacaatgtctagcattacgatctccaacttgcaatcccctttacaattgggttcttatgacgatactttgaaagaagcgttaatttatagttctgtccatgcaatcatcaaagaagtgatatttaacgaagaatattctggaatagtacaattagtcgaagatatttctgcgtttggaaaacttttcacggattctaagaacagtgaatgtacaggaaagtctaaaagcaagagaggctcctttttgcagagaagtgtcagagtacttaattcttccaggttcgtttacaagcagagtttatccgctaatttttctctcaagatagattccatgaagttaaaagtatctgaaattatagggccgcaatttggttctgtggaagcattattatccaataatttctttgcgattacggatgactctcaaattgtatattttacaaagaacttaaaggtagaaagaaagacaccgtctttattagagccacaagaaatcatgtctgtagttttgaataaagcagttaacgaacctgtattatatgttcatagaagggcgaatggaaagttaaaagtcatttttaacaacattcgcatacattactatgcaaggtggttagaaatattgaagaaaaacatcggcccggataatgccagttctaaagatgaacctgtttctcaaaagcttagtaaaaaacaaccgacttctggatttccctgggaactcaaatgtttggactgctctttgattttacaccctttcagattaaaaagtgtaatggtcattgtacttgacaatttgacaactggtggaagttcttttattccgcaggcaaagcttctttccaaggcgaatacactcttcttgatagatgactatcagaatttcaaaattcaaaaagataagaactggcctagtttgataaatttttatgctggtcaaggtttctctgcaatcggtaaaatagatactttgaattttttaataaacaaatccgatggtgcccttttattggattgtaaaatagaacaagttggtctttctttatgcgcggattcttttcaaactttttgtcagctttgtattgatttaaaatatcctcagacgtttcctgatgaggaaaaatttagaacgcagttgaaaaatcctatcgatgtattcaaagacatcgattgtgatcttttcaattctgccttcatcagagagaacaatcatcaaaatgattacgactctgtgcatttggtagacagttttctcgacaaaactcacgagttcaacaatggtgccagaagtaaactttcctctcaaggttcttatgaaatggacagttcctctggaactgccacaggtggtattttacttccccatgagagttatttggactctgctcagccaaaagaagaagatactccaccaatcgcctccaaagagcaagaaagggatgtggatataaggggtagtatagatgtcgaaaaagttgttataaaattattcgatgggtatgattggaaatatacgagaaaatttatcgctaatactgttgaaaaattggataaagagctcagtaaagcggaagcaagcagttctaaatctaatgtaccccaaagtgaggcaaatatttttgactctatttatatatctgctaacaaaaacaatgtcacagatttgagaagaaatcttgatggtgagatccagggggttcagaattccttctctgatgtctctaaagttaatttgagaccttctaagcattacaaagccttaattcaattgaacaaagtacatgtcaatttgaagaattatagagtagatgaacccgatgagtctaactctgataattccacagatgttttgaacagatgtgtagtttccatttacgaatttgaaattatcgataatgttcccacgtccacctggaataaatttgtaactttgttgaagcacgaaccgtggccacacagttctccgatgtttcttttggacttggaatttatcagaccgatcgactttttgcaagcagtggaattagtcatgcaattaaatgttgcgcctttacgccttcacgtggatcaagacactttagagtttttaataaggttcttagggttcaaagataaaagatttgaattaattgatgagtatccagatattgtatttattcaaaaatttagcactaattctattaagttaagattagattataagccgaaaaaagttgattatgcgggtttaagaagcggccaaacttctgaattgatgaatttttttacccttgatggatccaagattattttgaaaagcgtagtcctttatggattaaatggattcgatgaattaaataataaattgaaagccatttggacgccggatattaccaaaaagcagttgcctggcgttttggaaggattggctcctgtcagatcttttatggcgattgggtctggggtgaagaccttggtcacagtattaatgtctgaatacaggcaagaagggcatttgggaaggagtttgaaaaagggtggcaatgtcttcttgaaaacgacaacgggagattttgtgaaattgggagttaaattaacttctgggacacaggcgatattggagaacaccgaggaattattcggtggtgttggttccaatggcagggtgtacgatgcatccaaatttggctccgctgatggtgcagacagtgatactgcagctgtattagacttggatactttattcgaggaggatcagttagttggtagtaaatattccaggataagagatcatgagcccacggcagtagtcatcgatatgtcttctccgggagatcacaacgaacccacaatagtgagtttatacgcagatcagcccctcgacttgcccacgggtttgaaggaggcgtatagttctttagaaaagcatatgcatattgcgtacgatgcggtatggagggcaaagggacagatgaaggatgataaaagaggagggccgagcgccgcagcagtttatgttgctagagctgcacctgtggcaattattagaccgttaattggggccactgaggcagtgtctaagactttacagggaatagctaatcaagtggataagacgcataacgagcaaatcaatgataagtacaagtccaatagaactgatagttga

SEQ ID NO: 9199 - DNA, 1518 bp, Saccharomyces cerevisiae
atgagtgaaggccccgtcaaattcgaaaaaaataccgtcatatctgtctttggtgcgtcaggtgatctggcaaagaagaagacttttcccgccttatttgggcttttcagagaaggttaccttgatccatctaccaagatcttcggttatgcccggtccaaattgtccatggaggaggacctgaagtcccgtgtcctaccccacttgaaaaaacctcacggtgaagccgatgactctaaggtcgaacagttcttcaagatggtcagctacatttcgggaaattacgacacagatgaaggcttcgacgaattaagaacgcagatcgagaaattcgagaaaagtgccaacgtcgatgtcccacaccgtctcttctatctggccttgccgccaagcgtttttttgacggtggccaagcagatcaagagtcgtgtgtacgcagagaatggcatcacccgtgtaatcgtagagaaacctttcggccacgacctggcctctgccagggagctgcaaaaaaacctggggcccctctttaaagaagaagagttgtacagaattgaccattacttgggtaaagagttggtcaagaatcttttagtcttgaggttcggtaaccagtttttgaatgcctcgtggaatagagacaacattcaaagcgttcagatttcgtttaaagagaggttcggcaccgaaggccgtggcggctatttcgactctataggcataatcagagacgtgatgcagaaccatctgttacaaatcatgactctcttgactatggaaagaccggtgtcttttgacccggaatctattcgtgacgaaaaggttaaggttctaaaggccgtggcccccatcgacacggacgacgtcctcttgggccagtacggtaaatctgaggacgggtctaagcccgcctacgtggatgatgacactgtagacaaggactctaaatgtgtcacttttgcagcaatgactttcaacatcgaaaacgagcgttgggagggcgtccccatcatgatgcgtgccggtaaggctttgaatgagtccaaggtggagatcagactgcagtacaaagcggtcgcatcgggtgtcttcaaagacattccaaataacgaactggtcatcagagtgcagcccgatgccgctgtgtacctaaagtttaatgctaagacccctggtctgtcaaatgctacccaagtcacagatctgaatctaacttacgcaagcaggtaccaagacttttggattccagaggcttacgaggtgttgataagagacgccctactgggtgaccattccaactttgtcagagatgacgaattggatatcagttggggcatattcaccccattactgaagcacatagagcgtccggacggtccaacaccggaaatttacccctacggatcaagaggtccaaagggattgaaggaatatatgcaaaaacacaagtatgttatgcccgaaaagcacccttacgcttggcccgtgactaagccagaagatacgaaggataattag

SEQ ID NO: 9200 - DNA, 1518 bp, Artificial Sequence
  Description of Artificial Sequence: Synthetic polynucleotide
atgagtgaaggccccgtcaaattcgaaaaaaataccgtcatatctgtctttggtgcgtctggtgatttggcaaagaagaagacttttcccgccttatttgggcttttcagagaaggttaccttgatccatctaccaagatcttcggttatgccagatccaaattgtccatggaggaggacttgaagtcccgtgtcttgccccacttgaaaaaacctcacggtgaagccgatgactctaaggtcgaacagttcttcaagatggtcagctacatttctggaaattacgacacagatgaaggcttcgacgaattaagaacgcagatcgagaaattcgagaaaagtgccaacgtcgatgtcccacaccgtctcttctatttggccttgccgccaagcgtttttttgacggtggccaagcagatcaagagtcgtgtgtacgcagagaatggcatcacccgtgtaatcgtagagaaacctttcggccacgacttggcctctgccagggagttacaaaaaaacttggggcccctctttaaagaagaagagttgtacagaattgaccattacttgggtaaagagttggtcaagaatcttttagtcttgaggttcggtaaccagtttttgaatgccagttggaatagagacaacattcaaagcgttcagatttcctttaaagagaggttcggcaccgaaggccgtggcggctatttcgactctataggcataatcagagacgtgatgcagaaccatcttttacaaatcatgactctcttgactatggaaagaccggtgtcttttgacccggaatctattcgtgacgaaaaggttaaggttttgaaggccgtggcccccatcgacacggacgacgtcctcttgggccagtacggtaaatctgaggacgggtctaagcccgcctacgtggatgatgacactgtagacaaggactctaaatgtgtcacttttgcagcaatgactttcaacatcgaaaacgagcgttgggagggcgtccccatcatgatgcgtgccggtaaggctttgaatgagtccaaggtggagatcagattacagtacaaagcggtcgcatctggtgtcttcaaagacattccaaataacgaattggtcatcagagtgcagcccgatgccgctgtgtacttgaagtttaatgctaagacccctggtttatccaatgctacccaagtcacagatttgaatttaacttacgcaagcaggtaccaagacttttggattccagaggcttacgaggtgttgataagagacgccttattgggtgaccattccaactttgtcagagatgacgaattggatatcagttggggcatattcaccccattattgaagcacatagagcgtccggacggtccaacaccggaaatttacccctacggaagcagaggtccaaagggattgaaggaatatatgcaaaaacacaagtatgttatgcccgaaaagcacccttacgcttggcccgtgactaagccagaagatacgaaggataattga

SEQ ID NO: 9201 - DNA, 1476 bp, Saccharomyces cerevisiae
atgagtgctctactgtccgagtctgacctaaacgattttatcagtcccgcccttgcgtgcgtcaaacctacccaggtgagcgggggcaagaaggataacgttaacatgaacggagaatacgaggtgagcacggaaccagaccaactggagaaggtctctattaccctatcagactgcctcgcgtgttctggttgtataacgtctagtgaagaaatcttgttgagtagccaaagtcactcggttttcctgaaaaactgggggaagctttcgcagcagcaagacaaattcctcgttgtgagtgtctcgccacaatgcagactatctcttgcgcagtactacggcttaacattggaggcggccgatttgtgtttgatgaattttttccaaaagcatttccagtgcaagtatatggttggaacggagatgggcagaatcatatcgattagcaaaaccgtagagaagatcattgcgcataagaaacaaaaagaaaataccggtgcggaccgcaagcctctattatctgctgtgtgtccgggatttcttatatacacggaaaagaccaaaccgcagttggtgcctatgctgctcaatgtcaagtcgcctcagcaaattacgggctcgttgatcagagctacgttcgagagtctcgctatcgcgcgtgagtccttttaccatctgtcgctgatgccatgttttgacaagaaactagaagcgtcaaggccagaatcgcttgacgatgggattgactgtgtcattacgccacgtgaaatagtgacaatgttacaagagttgaatttagacttcaagtcgtttcttactgaggacacaagtttatatgggcggctatcaccgccgggatgggacccgcgagtccactgggcgtcgaatctgggaggcacttgtggtggctatgcctaccagtacgtaacggctgtccaacgactacacccaggaagtcagatgatagttctggagggtagaaacagcgacattgtcgagtaccgattgctgcacgatgatcgcataatagccgccgccagcgagctttccgggtttagaaacatccaaaatctggtgcgtaaactgacctcgggctccgggtcagagcgcaagaggaacatcaccgctctgcggaagagacgaacaggtccaaaggcgaactcacgcgagatggcggccgccacggccgccacggccgatccctaccactcggactacatcgaggtaaacgcgtgtccgggtgcatgcatgaacggtggtggcctactcaatggcgagcaaaacagtctcaagcggaagcagttggttcagacactgaataagcgtcacggagaggagctagcaatggtagatcctctaaccctgggacccaagctagaagaggcggcagcccgcccgctttcgctagagtacgtcttcgcgcccgtcaagcaggccgtcgaaaaggatctcgtctctgttgggagcacctggtaa

SEQ ID NO: 9202 - DNA, 1476 bp, Artificial Sequence
  Description of Artificial Sequence: Synthetic polynucleotide
atgagtgctttattatccgagtctgacttgaacgattttatcagtcccgcccttgcgtgcgtcaaacctacccaggtgagcgggggcaagaaggataacgttaacatgaacggagaatacgaggtgagcacggaaccagaccaattggagaaggtctctattaccttaagtgactgcctcgcgtgttctggttgtataacgtctagtgaagaaatcttgttgagtagccaaagtcactctgttttcttgaaaaactgggggaagctttctcagcagcaagacaaattcctcgttgtgagtgtctctccacaatgcagattatctcttgcgcagtactacggcttaacattggaggcggccgatttgtgtttgatgaattttttccaaaagcatttccagtgcaagtatatggttggaacggagatgggcagaatcatatctattagcaaaaccgtagagaagatcattgcgcataagaaacaaaaagaaaataccggtgcggaccgcaagcctttattatctgctgtgtgtccgggatttcttatatacacggaaaagaccaaaccgcagttggtgcctatgttgctcaatgtcaagtctcctcagcaaattacgggctctttgatcagagctacgttcgagagtctcgctatcgcgcgtgagtccttttaccatttatctttgatgccatgttttgacaagaaattagaagcgtccaggccagaatctcttgacgatgggattgactgtgtcattacgccacgtgaaatagtgacaatgttacaagagttgaatttagacttcaagagctttcttactgaggacacaagtttatatgggagattatctccgccgggatgggacccgcgtgtccactgggcgtctaatttaggaggcacttgtggtggctatgcctaccagtacgtaacggctgtccaaagattgcacccaggaagtcagatgatagttttggagggtagaaacagcgacattgtcgagtacagattgttgcacgatgatcgcataatagccgccgccagcgagctttccgggtttagaaacatccaaaatttggtgcgtaaattgacctctggctccgggagtgagcgcaagaggaacatcaccgctttaagaaagagaagaacaggtccaaaggcgaactctcgcgagatggcggccgccacggccgccacggccgatccctaccactctgactacatcgaggtaaacgcgtgtccgggtgcatgcatgaacggtggtggcttgctcaatggcgagcaaaacagtctcaagagaaagcagttggttcagacattaaataagcgtcacggagaggagttggcaatggtagatcctttgaccttaggacccaagttggaagaggcggcagcccgcccgctttctttggagtacgtcttcgcgcccgtcaagcaggccgtcgaaaaggatctcgtctctgttgggagcacctggtga

SEQ ID NO: 9203 - DNA, 1365 bp, Saccharomyces cerevisiae
atgtcctcttccatcgatatcagtaagatcaactcttggaacaaagagtttcaatccgacttaacccatcaattggcaaccactgtccttaagaattataatgccgatgatgcactgttgaacaagactagactgcaaaagcaagataacagggttttcaacactgttgtctctactgattccactccagtcaccaaccaaaaaagctctggtagatgttggttgtttgccgctaccaatcaactgcgcttgaatgttctttctgaattgaacttaaaagaattcgaactgtcccaagcttacttgttcttttacgataagttggaaaaggccaactatttcttggaccaaatcgtctcctcggctgatcaagacatcgactcacgtctcgtgcaatacttgttagcagctccaacagaagacggtggccaatacagcatgtttttgaacctagtcaagaagtatggccttatccccaaagatttatacggggatctaccttattctactactgcgtccagaaaatggaattctctgttgactactaaactgagagaatttgccgagactctaagaacagctttgaaagagcgttctgccgatgattccataattgtcactctgagagagcaaatgcaaagagaaatcttcaggttgatgtcgttgttcatggacatacctccagtgcaaccaaacgagcaattcacttgggaatacgttgacaaagacaagaaaatccacactatcaaatcgactccgttagaatttgcctccaaatacgcaaaattggacccttccacgccagtctcattgatcaatgatccaagacacccatatggtaaattaattaagatcgatcgtttaggaaacgtccttggcggagatgccgtgatttacttaaatgttgacaatgaaacactatctaaattggttgttaagagattacaaaataacaaagctgtcttttttggatctcacactccaaagttcatggacaagaaaactggtgtcatggatattgaattgtggaactatcctgccatcggctataatttacctcagcaaaaggcatcgcgtattagataccatgaaagtttgatgactcatgctatgttgatcactggctgccacgtcgatgaaacgtctaaattaccacttcgctaccgcgttgaaaattcctggggtaaagactccggtaaagacggattatacgtgatgactcaaaagtacttcgaggagtactgctttcaaattgtggtcgatatcaatgaattgccaaaagagctggcttcaaaattcacctcaggtaaggaagagccgattgtcttgcccatctgggacccaatgggtgctttggccaaataa

SEQ ID NO: 9204 - DNA, 1365 bp, Artificial Sequence
  Description of Artificial Sequence: Synthetic polynucleotide
atgtcctcttccatcgatatcagtaagatcaactcttggaacaaagagtttcaatccgacttaacccatcaattggcaaccactgtccttaagaattataatgccgatgatgcattattgaacaagactagattacaaaagcaagataacagggttttcaacactgttgtctctactgattccactccagtcaccaaccaaaaaagctctggtagatgttggttgtttgccgctaccaatcaattgcgcttgaatgttctttctgaattgaacttaaaagaattcgaattatcccaagcttacttgttcttttacgataagttggaaaaggccaactatttcttggaccaaatcgtctcctctgctgatcaagacatcgactctcgtctcgtgcaatacttgttagcagctccaacagaagacggtggccaatacagcatgtttttgaacttggtcaagaagtatggccttatccccaaagatttatacggggatttaccttattctactactgcgtccagaaaatggaattctttgttgactactaaattgagagaatttgccgagactttgagaacagctttgaaagagcgttctgccgatgattccataattgtcactttgagagagcaaatgcaaagagaaatcttcaggttgatgtctttgttcatggacatacctccagtgcaaccaaacgagcaattcacttgggaatacgttgacaaagacaagaaaatccacactatcaaatctactccgttagaatttgcctccaaatacgcaaaattggacccttccacgccagtctctttgatcaatgatccaagacacccatatggtaaattaattaagatcgatcgtttaggaaacgtccttggcggagatgccgtgatttacttaaatgttgacaatgaaacattatctaaattggttgttaagagattacaaaataacaaagctgtcttttttggatctcacactccaaagttcatggacaagaaaactggtgtcatggatattgaattgtggaactatcctgccatcggctataatttacctcagcaaaaggcatctcgtattagataccatgaaagtttgatgactcatgctatgttgatcactggctgccacgtcgatgaaacgtctaaattaccacttcgctaccgcgttgaaaattcctggggtaaagactccggtaaagacggattatacgtgatgactcaaaagtacttcgaggagtactgctttcaaattgtggtcgatatcaatgaattgccaaaagagttggcttccaaattcacctctggtaaggaagagccgattgtcttgcccatctgggacccaatgggtgctttggccaaatga

SEQ ID NO: 9205 - DNA, 2445 bp, Saccharomyces cerevisiae
atgaaagtgaggaaatatattactttatgcttttggtgggccttttcaacatccgctcttgtatcatcacaacaaattccattgaaggaccatacgtcacgacagtattttgctgtagaaagcaatgaaacattatcccgcttggaggaaatgcatccaaattggaaatatgaacatgatgttcgagggctaccaaaccattatgttttttcaaaagagttgctaaaattgggcaaaagatcatcattagaagagttacagggggataacaacgaccacatattatctgtccatgatttattcccgcgtaacgacctatttaagagactaccggtgcctgctccaccaatggactcaagcttgttaccggtaaaagaagctgaggataaactcagcataaatgatccgctttttgagaggcagtggcacttggtcaatccaagttttcctggcagtgatataaatgttcttgatctgtggtacaataatattacaggcgcaggggtcgtggctgccattgttgatgatggccttgactacgaaaatgaagacttgaaggataatttttgcgctgaaggttcttgggatttcaacgacaataccaatttacctaaaccaagattatctgatgactaccatggtacgagatgtgcaggtgaaatagctgccaaaaaaggtaacaatttttgcggtgtcggggtaggttacaacgctaaaatctcaggcataagaatcttatccggtgatatcactacggaagatgaagctgcgtccttgatttatggtctagacgtaaacgatatatattcatgctcatggggtcccgctgatgacggaagacatttacaaggccctagtgacctggtgaaaaaggctttagtaaaaggtgttactgagggaagagattccaaaggagcgatttacgtttttgccagtggaaatggtggaactcgtggtgataattgcaattacgacggctatactaattccatatattctattactattggggctattgatcacaaagatctacatcctccttattccgaaggttgttccgccgtcatggcagtcacgtattcttcaggttcaggcgaatatattcattcgagtgatatcaacggcagatgcagtaatagccacggtggaacgtctgcggctgctccattagctgccggtgtttacactttgttactagaagccaacccaaacctaacttggagagacgtacagtatttatcaatcttgtctgcggtagggttagaaaagaacgctgacggagattggagagatagcgccatggggaagaaatactctcatcgctatggctttggtaaaatcgatgcccataagttaattgaaatgtccaagacctgggagaatgttaacgcacaaacctggttttacctgccaacattgtatgtttcccagtccacaaactccacggaagagacattagaatccgtcataaccatatcagaaaaaagtcttcaagatgctaacttcaagagaattgagcacgtcacggtaactgtagatattgatacagaaattaggggaactacgactgtcgatttaatatcaccagcggggataatttcaaaccttggcgttgtaagaccaagagatgtttcatcagagggattcaaagactggacattcatgtctgtagcacattggggtgagaacggcgtaggtgattggaaaatcaaggttaagacaacagaaaatggacacaggattgacttccacagttggaggctgaagctctttggggaatccattgattcatctaaaacagaaactttcgtctttggaaacgataaagaggaggttgaaccagctgctacagaaagtaccgtatcacaatattctgccagttcaacttctatttccatcagcgctacttctacatcttctatctcaattggtgtggaaacgtcggccattccccaaacgactactgcgagtaccgatcctgattctgatccaaacactcctaaaaaactttcctctcctaggcaagccatgcattattttttaacaatatttttgattggcgccacatttttggtgttatacttcatgttttttatgaaatcaaggagaaggatcagaaggtcaagagcggaaacgtatgaattcgatatcattgatacagactctgagtacgattctactttggacaatggaacttccggaattactgagcccgaagaggttgaggacttcgattttgatttgtccgatgaagaccatcttgcaagtttgtcttcatcagaaaacggtgatgctgaacatacaattgatagtgtactaacaaacgaaaatccatttagtgaccctataaagcaaaagttcccaaatgacgccaacgcagaatctgcttccaataaattacaagaattacagcctgatgttcctccatcttccggacgatcgtga

SEQ ID NO: 9206 - DNA, 2445 bp, Artificial Sequence
  Description of Artificial Sequence: Synthetic polynucleotide
atgaaagtgaggaaatatattactttatgcttttggtgggccttttctacatccgctcttgtatcttctcaacaaattccattgaaggaccatacgtctagacagtattttgctgtagaaagcaatgaaacattatcccgcttggaggaaatgcatccaaattggaaatatgaacatgatgttagggggttaccaaaccattatgttttttccaaagagttgttgaaattgggcaaaagaagttctttagaagagttacagggggataacaacgaccacatattatctgtccatgatttattcccgcgtaacgacttatttaagagattaccggtgcctgctccaccaatggactccagcttgttaccggtaaaagaagctgaggataaactcagcataaatgatccgctttttgagaggcagtggcacttggtcaatccaagttttcctggcagtgatataaatgttcttgatttatggtacaataatattacaggcgcaggggtcgtggctgccattgttgatgatggccttgactacgaaaatgaagacttgaaggataatttttgcgctgaaggttcttgggatttcaacgacaataccaatttacctaaaccaagattatctgatgactaccatggtacgagatgtgcaggtgaaatagctgccaaaaaaggtaacaatttttgcggtgtcggggtaggttacaacgctaaaatcagtggcataagaatcttatccggtgatatcactacggaagatgaagctgcgtccttgatttatggtttggacgtaaacgatatatattcttgctcttggggtcccgctgatgacggaagacatttacaaggccctagtgacttggtgaaaaaggctttagtaaaaggtgttactgagggaagagattccaaaggagcgatttacgtttttgccagtggaaatggtggaactcgtggtgataattgcaattacgacggctatactaattccatatattctattactattggggctattgatcacaaagatttgcatcctccttattccgaaggttgttccgccgtcatggcagtcacgtattcttctggttctggcgaatatattcattctagtgatatcaacggcagatgcagtaatagccacggtggaacgtctgcggctgctccattagctgccggtgtttacactttgttattggaagccaacccaaacttgacttggagagacgtacagtatttatctatcttgtctgcggtagggttagaaaagaacgctgacggagattggagagatagcgccatggggaagaaatactctcatcgctatggctttggtaaaatcgatgcccataagttaattgaaatgtccaagacctgggagaatgttaacgcacaaacctggttttacttgccaacattgtatgtttcccagtccacaaactccacggaagagacattagaatccgtcataaccatatctgaaaaaagtcttcaagatgctaacttcaagagaattgagcacgtcacggtaactgtagatattgatacagaaattaggggaactacgactgtcgatttaatatctccagcggggataatttccaaccttggcgttgtaagaccaagagatgtttcttctgagggattcaaagactggacattcatgtctgtagcacattggggtgagaacggcgtaggtgattggaaaatcaaggttaagacaacagaaaatggacacaggattgacttccacagttggaggttaaagctctttggggaatccattgattcttctaaaacagaaactttcgtctttggaaacgataaagaggaggttgaaccagctgctacagaaagtaccgtatctcaatattctgccagttctacttctatttccatcagcgctacttctacatcttctatctctattggtgtggaaacgagtgccattccccaaacgactactgcgagtaccgatcctgattctgatccaaacactcctaaaaaactttcctctcctaggcaagccatgcattattttttaacaatatttttgattggcgccacatttttggtgttatacttcatgttttttatgaaatctaggagaaggatcagaaggagcagagcggaaacgtatgaattcgatatcattgatacagactctgagtacgattctactttggacaatggaacttccggaattactgagcccgaagaggttgaggacttcgattttgatttgtccgatgaagaccatcttgcaagtttgtcttcttctgaaaacggtgatgctgaacatacaattgatagtgtattaacaaacgaaaatccatttagtgaccctataaagcaaaagttcccaaatgacgccaacgcagaatctgcttccaataaattacaagaattacagcctgatgttcctccatcttccggaagatcttga

SEQ ID NO: 9207 - DNA, 1380 bp, Saccharomyces cerevisiae
atgacagcagctaataagaatattgtcttcggattttccagatccattagcgcaattctactaatatgctttttctttgaaaaagtctgcggtgatatggagcatgatatgggcatggatgatacttcgggatacacgaggccagaaattgtgcaggctgggtcgaaatctttccactggctctgcactttgggattcttgttgcttttaccatccgtggtgacgtgcctttcgttcgctggcaggatatattcagctaccctcttacaatgcacttgtgccgtttacgctttcttagaagctgccgtattaagatttcaagacaatgatggggtagaaaatagaacttcaaggggaaccgcatggtttttggtgggacttacttggataaccttattctttggtggattagctggaggaactggtttcttagtgaaaagcaagaggttgcaaacgttcatatcaaatgcaggtgagaaaaggttgtcatatatccatcgtggtttatcctttctaactgttctaacaggttgggttaaagtctgtttggcacctgttgcgctctttgggttttgtagagaggcacacacagggcaatgcatcgctcatggtatcatgggatccgcgtttgtgttgtacgggttcatttatgtactggttttggttataccatggattcgcagtgcccaaacctcatattcacaggattacgtcgacagttgggttatgtgcatatggggcgttgtaaatacttttactgaacacaggtggggacgtgaaggatggagtgttcacgattatcaacacacgtttatgggaattatctggtggactggtggaatactcgggattttcctttccagaaatggcagaagaacatttgtaccaagtttgattattattttcaccggatgggccatgtctgagcacgcccagcacttgataattagcacaaaagtccataatatgtttgggctagttttaatgtgtggaggcgctttaagaattatcgaaatatcttttttactacgtgataaaagaacgctggacaaaatacattcattccaataccttgctcccttttgtttagtatgttcaggtctcctatttatgggcgcaaacgaagaacaactcattttagtgttgcggttgggaggcgaccatagtgcgtacgttctaattatcgtatcaggcgcatttttggtctacttctggatgattgcatgtttggaattctacctatatctacttgaaaagggaaaacaaggattccttccgaaatcatacgaacttgaagaggaaaacaataacgtgagctttgagctagataacatatcgaacgaagatgtggatgaagataccactccctttaacgtttga

SEQ ID NO: 9208 - DNA, 1380 bp, Artificial Sequence
  Description of Artificial Sequence: Synthetic polynucleotide
atgacagcagctaataagaatattgtcttcggattttccagatccattagcgcaattttattgatatgctttttctttgaaaaagtctgcggtgatatggagcatgatatgggcatggatgatacttctggatacacgaggccagaaattgtgcaggctgggtctaaatctttccactggctctgcactttgggattcttgttgcttttaccatccgtggtgacgtgcctttctttcgctggcaggatatattctgctaccctcttacaatgcacttgtgccgtttacgctttcttagaagctgccgtattaagatttcaagacaatgatggggtagaaaatagaacttctaggggaaccgcatggtttttggtgggacttacttggataaccttattctttggtggattagctggaggaactggtttcttagtgaaaagcaagaggttgcaaacgttcatatccaatgcaggtgagaaaaggttgagttatatccatcgtggtttatcctttttaactgttttgacaggttgggttaaagtctgtttggcacctgttgcgctctttgggttttgtagagaggcacacacagggcaatgcatcgctcatggtatcatgggatccgcgtttgtgttgtacgggttcatttatgtattggttttggttataccatggattcgcagtgcccaaacctcttattctcaggattacgtcgacagttgggttatgtgcatatggggcgttgtaaatacttttactgaacacaggtggggacgtgaaggatggagtgttcacgattatcaacacacgtttatgggaattatctggtggactggtggaatactcgggattttcctttccagaaatggcagaagaacatttgtaccaagtttgattattattttcaccggatgggccatgtctgagcacgcccagcacttgataattagcacaaaagtccataatatgtttgggttggttttaatgtgtggaggcgctttaagaattatcgaaatatcttttttattacgtgataaaagaacgcttgacaaaatacattctttccaataccttgctcccttttgtttagtatgttctggtctcttatttatgggcgcaaacgaagaacaactcattttagtgttgagattgggaggcgaccatagtgcgtacgttttgattatcgtaagtggcgcatttttggtctacttctggatgattgcatgtttggaattctacttatatttacttgaaaagggaaaacaaggattccttccgaaatcttacgaacttgaagaggaaaacaataacgtgagctttgagttagataacataagcaacgaagatgtggatgaagataccactccctttaacgtttga

SEQ ID NO: 9209 - DNA, 2925 bp, Saccharomyces cerevisiae
atgatgcttggagagcatttaatgagctggtctaagactggtattattgcatacagtgactcacagtcctcaaatgccaatatttgcctcacatttttagaatccataaatggaataaactggcgatttcatacgccgcaaaaatatgtattacacccgcaattgcacgaagttcaataccaagaaagtagtagtactctaagcactcactcgacaacaacttctgtcaatggatcaactacagccggggttggaagcactccaaacttcggaggcaacagcaacaagtctcctccacagttcttttataatatatcttccattcattggaacaactggtttagtttaccaggtgacatgttggctgtatgtgacgaattaggtaacatgaccatgttaattactggacaacgtcctgatcgggccactacatacgaaaagttaacgatggtatttcaagataatgtttacaaaatttataaccacgttatgcctttaaagcctgtagacaagctaaagcccatgaacattgaaaggaaacaaacaaggaaagaatacaatacatccatcttggaatttcgctggctcacctcttcaaaatccgtaatcgtttctcaattctgcgcatttgatagtagttctaatacatatagaagcagagcacagcaagtgcctccatatggtgtgtaccatccaccctttataaaatatgcgtgcttggcaataaggaaaaacggtcaaatagatttttggtaccaattttcaaactcaaaggatcataaaaaaataacgttacagctgctggacacttcaaatcaaagattcaaggatcttcaatggcttgaatttgctagaattacacctatgaatgatgatcagtgtatgttgataaccacatattcaaaattatctaaaaatatctctttttacaaactacacgttaattggaaccttaatgcgaccaaaccaaacgtcctaaatgacccatcgttgaaaatacaatttatattaagcactactttagatccaacggatgatgaagggcatgtgttgaagttagagaacctgcatgttgtgtctaaatcatcaattgagaaagatccctccccagaaattttagttttgtataatgtttgcgatacatcaaaatcattggtgaaaagatatagactagctccaacacaactttcagctgagtatttggtgatattgaaaccagatttaaatatcgatcgaaataattctacgaatcaaatattccaatcgcgccgttacaaccttcgtcgccacagtgatatcgttctcgacaaaaaagtcaccttgataacttctgagatgttcgatgcatttgtttcattttactttgaagatggtaccatcgaatcctacaatcaaaatgattggaagttggagactgaacgacttataagtcagagccaattaggaaaattcaaaaatattattgcatccccactaagcgcaggatttaattatgggaagctccctttacctccatcggttgagtggatgaaggtttcaccatctatgtgtggggttatcgttaaacagtataataaaaaatggccacagttttatgctgctgttcaaaaaaactacgcagatcctgagaaggattctataaatgctacagctttggcatttggatacgtgaaaagtttacataagcaaatatctgccgaagacttgaccatcgctgcgaagacgcacatactcagaatttcattcttggatagaaaaagggccaaagaatttattacgactttgttgaaaagcctatactcgtttttcaacatttctcctgatgcgcctaaagagattatggataaaataataacaagtaggccacttcaaaaaattatgctattgcagctggaacttggcagttgtttttcgcaagaaaatattgaagaaatggcgagagttatactctacttgaaaaatgttttgtttgcgttcaatggtgtggcgagaaattttcattttgcgattgaacaaataagtaataattctaaccaacaacaaaacccgaagttgttccagactatattttcaaaacaggatctcattcattcattgattcctgttgctaaatggtttgtcaaatttatcacttatttgacccaagaaattttaattttaataaatgatcccacaaacaaggaatacacactagttcacggaatatttggagccaaaatgtccaggactttgatattgtctattcttaacgaaatcaagaaagtcacccaaatagtggcgaaatttccagaaacatcatacccaattttaaacgagtcatcaacttttttgaaactagtcttatctgaatcaccagtggatttcgaaaaatttgaaacgtttttagttgatgtaaacaacaaatttatcgcgctatgcgaacaacagccatcacaggaacgtgagttttcgttgttggtgaaagctgaaatccccccagaatatgccaaagtgggagatttcctcctgcagtatgctaataatgcagtgatttcccatgcgaatgcggctgcagtatattttgcagatacaagtggcttgaaaatatctaattcagagtttttcaatcccgaaatatttcatttattgcaaccattagaagagggattaattattgatacagataaactacccataaaaaatagaacctccaaatcttttagcaaattactgtacgacgatgtaacctgtgacaaactgagtgtatcagaaatatccgatgggaaacttaagagatgcagtaggtgcggttccgtcacaagagcaggaaatataatatcgagtgataagacaattgtacccactagcatccaaaccaaaagatggccaaccatgtatacaagactgtgcatatgttcaggtatgctttttgagatggacggctga

SEQ ID NO: 9210 - DNA, 2925 bp, Artificial Sequence
  Description of Artificial Sequence: Synthetic polynucleotide
atgatgcttggagagcatttaatgagctggtctaagactggtattattgcatacagtgactctcagtcctctaatgccaatatttgcctcacatttttagaatccataaatggaataaactggagatttcatacgccgcaaaaatatgtattacacccgcaattgcacgaagttcaataccaagaaagtagtagtactttaagcactcactctacaacaacttctgtcaatggatctactacagccggggttggaagcactccaaacttcggaggcaacagcaacaagtctcctccacagttcttttataatatatcttccattcattggaacaactggtttagtttaccaggtgacatgttggctgtatgtgacgaattaggtaacatgaccatgttaattactggacaacgtcctgatagagccactacatacgaaaagttaacgatggtatttcaagataatgtttacaaaatttataaccacgttatgcctttaaagcctgtagacaagttgaagcccatgaacattgaaaggaaacaaacaaggaaagaatacaatacatccatcttggaatttcgctggctcacctcttctaaatccgtaatcgtttctcaattctgcgcatttgatagtagttctaatacatatagaagcagagcacagcaagtgcctccatatggtgtgtaccatccaccctttataaaatatgcgtgcttggcaataaggaaaaacggtcaaatagatttttggtaccaattttccaactccaaggatcataaaaaaataacgttacagttattagacacttccaatcaaagattcaaggatcttcaatggcttgaatttgctagaattacacctatgaatgatgatcagtgtatgttgataaccacatattctaaattatctaaaaatatctctttttacaaattacacgttaattggaaccttaatgcgaccaaaccaaacgtcttgaatgacccatctttgaaaatacaatttatattaagcactactttagatccaacggatgatgaagggcatgtgttgaagttagagaacttacatgttgtgtctaaatcttccattgagaaagatccctccccagaaattttagttttgtataatgtttgcgatacaagtaaatctttggtgaaaagatatagattggctccaacacaactttctgctgagtatttggtgatattgaaaccagatttaaatatcgatagaaataattctacgaatcaaatattccaaagtcgccgttacaaccttcgtcgccacagtgatatcgttctcgacaaaaaagtcaccttgataacttctgagatgttcgatgcatttgtttctttttactttgaagatggtaccatcgaatcctacaatcaaaatgattggaagttggagactgaaagacttataagtcagagccaattaggaaaattcaaaaatattattgcatccccattaagcgcaggatttaattatgggaagctccctttacctccatctgttgagtggatgaaggtttctccatctatgtgtggggttatcgttaaacagtataataaaaaatggccacagttttatgctgctgttcaaaaaaactacgcagatcctgagaaggattctataaatgctacagctttggcatttggatacgtgaaaagtttacataagcaaatatctgccgaagacttgaccatcgctgcgaagacgcacatactcagaatttctttcttggatagaaaaagggccaaagaatttattacgactttgttgaaaagcttgtactcttttttcaacatttctcctgatgcgcctaaagagattatggataaaataataacaagtaggccacttcaaaaaattatgcttttgcagttagaacttggcagttgtttttctcaagaaaatattgaagaaatggcgagagttatactctacttgaaaaatgttttgtttgcgttcaatggtgtggcgagaaattttcattttgcgattgaacaaataagtaataattctaaccaacaacaaaacccgaagttgttccagactatattttccaaacaggatctcattcattctttgattcctgttgctaaatggtttgtcaaatttatcacttatttgacccaagaaattttaattttaataaatgatcccacaaacaaggaatacacattagttcacggaatatttggagccaaaatgtccaggactttgatattgtctattcttaacgaaatcaagaaagtcacccaaatagtggcgaaatttccagaaacatcttacccaattttaaacgagtcttctacttttttgaaattggtcttatctgaatctccagtggatttcgaaaaatttgaaacgtttttagttgatgtaaacaacaaatttatcgcgttatgcgaacaacagccatctcaggaacgtgagttttctttgttggtgaaagctgaaatccccccagaatatgccaaagtgggagatttcctcttacagtatgctaataatgcagtgatttcccatgcgaatgcggctgcagtatattttgcagatacaagtggcttgaaaatatctaattctgagtttttcaatcccgaaatatttcatttattgcaaccattagaagagggattaattattgatacagataaattgcccataaaaaatagaacctccaaatcttttagcaaattattgtacgacgatgtaacctgtgacaaattaagtgtatctgaaatatccgatgggaaacttaagagatgcagtaggtgcggttccgtcacaagagcaggaaatataatatctagtgataagacaattgtacccactagcatccaaaccaaaagatggccaaccatgtatacaagattgtgcatatgttctggtatgctttttgagatggacggctga

SEQ ID NO: 9211 - DNA, 1281 bp, Saccharomyces cerevisiae
atgacaggagaaaaaatacttcattcgcagttgttaaccaacagcgacatgtctagcgggaatgtccaccatacgaaaccgatgatgtacaacgtaaccctgccttcctacaacagcagtagtataggtccagtcgataatttgaaaataaacgagagacctggctctcatgatcattccatgagaagtgaaatgtcatccaaaaactccggaagcgattttatgccacaatctatttcacgttccgaaggtagtgtctaccaggtcaagatagatcgtggtgactccccgaatacagaaggattcgactttaaagttaatgcaagagatctgctgttacttcgaatgtcctgggatatcctcctcagggagtatttaacacctaaagaattaaaagtttttcaagcacttctgtattccaataaacatattacttcaacagaaagaccctatttgaatactgctcctgacggtatgatttccaaaactattgaccctactgccaggccacgtaaaacaaaacaaagggacaatgataacaaggttgatactgcactattttgttcacagttttatgacaatttgattgcaatggatcccttgttagaagaatattttccatcattaaaacatcaagcagtttcgttctgtaaggtccttgattctgctattgacaaccttgaaaacgttcatgtcctagatgattatattgtgaaattaggaaaacgccattccagaattctcggcatcaaaaccgttggtttcgaagtaatgggaaaagcatttatgactacattgcaggacaggtttggatcttttctcacactggaactcaaaaatctatggggacaactttactcatatttggcaaattgtatgattactgcagggaaggacccaatggaaaagattcaaccagatttttcgtataatggtgactctgtggttttaaatttttccattcccaaacttgcgatgcatgatataagtacagttaacaagctacaaatggtgaaaactaaaaacgctactatacctcataatataacacaagtaccgacaaataaaattcctacagaaatactcttagacaattcttctactccaataaaaagcgaccgtgaatcgacgcctccaatctcaccaaagggctctggaagtacaaaaccaagcatcggtagcagtaccgtcgtggaaagtaataccaagaaaaataattatgatgaaaaaatccatttattgcaaaaaactgctcagcagaagaactgctcgattatgtaa

SEQ ID NO: 9212 - DNA, 1281 bp, Artificial Sequence
  Description of Artificial Sequence: Synthetic polynucleotide
atgacaggagaaaaaatacttcattctcagttgttaaccaacagcgacatgtctagcgggaatgtccaccatacgaaaccgatgatgtacaacgtaaccttaccttcctacaacagcagtagtataggtccagtcgataatttgaaaataaacgagagacctggctctcatgatcattccatgagaagtgaaatgtcttccaaaaactccggaagcgattttatgccacaatctatttctcgttccgaaggtagtgtctaccaggtcaagatagatcgtggtgactccccgaatacagaaggattcgactttaaagttaatgcaagagatttattattacttcgtatgtcctgggatatcctcctcagggagtatttaacacctaaagaattaaaagtttttcaagcacttttatattccaataaacatattacttctacagaaagaccctatttgaatactgctcctgacggtatgatttccaaaactattgaccctactgccaggccacgtaaaacaaaacaaagggacaatgataacaaggttgatactgcattattttgttctcagttttatgacaatttgattgcaatggatcccttgttagaagaatattttccatctttaaaacatcaagcagtttctttctgtaaggtccttgattctgctattgacaaccttgaaaacgttcatgtcttggatgattatattgtgaaattaggaaaacgccattccagaattctcggcatcaaaaccgttggtttcgaagtaatgggaaaagcatttatgactacattgcaggacaggtttggatcttttctcacattagaactcaaaaatttatggggacaactttactcctatttggcaaattgtatgattactgcagggaaggacccaatggaaaagattcaaccagatttttcttataatggtgactctgtggttttaaatttttccattcccaaacttgcgatgcatgatataagtacagttaacaagttacaaatggtgaaaactaaaaacgctactatacctcataatataacacaagtaccgacaaataaaattcctacagaaatactcttagacaattcttctactccaataaaaagcgaccgtgaaagtacgcctccaatctctccaaagggctctggaagtacaaaaccaagcatcggtagcagtaccgtcgtggaaagtaataccaagaaaaataattatgatgaaaaaatccatttattgcaaaaaactgctcagcagaagaactgctccattatgtga

SEQ ID NO: 9213 - DNA, 2679 bp, Saccharomyces cerevisiae
atgtcggatagtatttcagattcaaagtcctcagaacttttaaattctactttttattcgtcgacgtcgataaatacacttgatcatgctagaacctttcgaaattctctgatattgaaggagatatcagatcaaagtctaaattcatcaataaagccatgcgaatccgtccttgatagggatgttgaaagctcagttctgcagcggtcgtttggagaaagtaatgcccgagactcagaagtacaaacggtaaatatgacaacttccccctcattaagtgcattggctgatattctgaacgaaagatccaaatatgctgaccaaaaaactagaaaggcacaaaatattgagtcttccataatagaagaagaagaagaggccgaagagcaaaacaactcgatcaattatcacgaggatataactggatccaggctgtctgtacgagaggaagcaaatgaaaacttggcgatgacctctccaaaccttattgacattgacggatccaatagtattcaagttgcccctttgagtttaccgtctttcgaagaacctgactttttgtccactcctagagtaaaacctgattctcagggacctcggagcaaagttagtacacgacgtactattctcgaacgagacaacaatttaccagttaagcgggaggaaaatactatcattaattcagaaactgaaagcacaacacatagcgcaccatttttaaaagaggatccgaaaccctcgcctccttcgagtaaattatacaacccaaaagttcgtttaaacaaagcagaagcgcgaaagtatactgattcttctgcccaaaggactacttcagcaggctcggtacttgaagacacttctatgcataaaaagaaaaagagtatattttcatttctgaagaagaaagaaccgaaaccagttattggtaataatagtgtaacgaatgaaaaaaataagatgtcttcatcgagcactttctcaatgaatattcaaacctctttaaaaacgcctgaaaaactaaagaagaagtctcacagtagcagtagcattttcaattccttcctaaagggaaaaattgaaacatcagactcacctcgaaaggaaccaatgaggcaaaaaaaaagaaccccaaaatccaaggacaaaaagcaagatactgaacaaataattgacgccgcatcagtgttatccactgaatcacctctactacgaaaaaaccacgacgatactcccgtgaaaatagatcacgtaacgagatcaattgatcagagaaaacctactcctttaaacatggatctcatattgggaggtgataaacagataaataccccgctacaagaacacgtaagagaagatgatgatgccaaaaatgatcttcaattaccaaccaaggataattttttatcactggactacgaagcaccctcaccagcattttccaaacacgatacaggtgaggttcttttcccaaaatttttggataatcatgaagtcgactcgatcgtttctttagaaagaacaagatctacaaagtctaacaagagaagttcaatgaactcgcaaagaaggtcattgacagatacgctatcgatcaaagcgcaaagtgagggaatgttcatcactgaggcatcttctgttgtattatctactccagacttgacgaagtctcctgctagcagcattttaaagaatggaaggttcgaatactcagataatttctccagagaacactcttacgaaggtaccacgaatgaggactttttagatatcaaggacgatagtggtccactaaaaaaagatgacatatttttagagtctattgaacaaaaatttgaccagctagtgatggcctctgatgaagaaaaaactgaagttgaaagggatgtaccaaaaccaagagaagaacctctgaagaaggattctgaaaggcaaagcgtttttgcagatgatgataacgagttaatttctgatataatggagtttgcaagttttattaacttcggtgatgatgatctcaatctagacctagacttgggagatacaacggcctcatatgcaacagaaacccctgaacctgttggaaatgatgaagtaaatcgctctggtacttttgatacacgaaataacaaagaggatagttacaaagaaagagaaactcaatcttattccgctgctggagctactacatacggagatgagcgtcaaggtcaattacatacatttgaacaagacggaagtgaaataaatgacaacgaatttgagaatgaagatttcaacaaacacatagaacagcccatagaagttactccaagaaataatgcatatttaccagaattcgaacccaatagacctgtttcaatgtcctttaaaggactaaaagccccaagaatgaatacttcttttattgactccatgacgcctgattctcccgtaaaatcagacttaacaagtctaggtgaggtgtatgtaaacagtaataatgaccagggtgtccggttttcgtcccagataatactttacgacacttatggagaattcgaatatgatagacatccagaaatttccacttgtaaccagcttactccacaactggctcaaatgatcaaattggaattaaatgagttaaagagcgcaatggaagtacacgatgattcgcgatgttacacacatttttattag

SEQ ID NO: 9214 - DNA, 2679 bp, Artificial Sequence
  Description of Artificial Sequence: Synthetic polynucleotide
atgagtgatagtatttctgattctaagtccagtgaacttttaaattctactttttattcttctacgtctataaatacacttgatcatgctagaacctttagaaattctttgatattgaaggagatatctgatcaaagtttgaattcttctataaagccatgcgaatccgtccttgatagggatgttgaaagctctgttttacagagatcttttggagaaagtaatgccagagactctgaagtacaaacggtaaatatgacaacttccccctctttaagtgcattggctgatattttgaacgaaagatccaaatatgctgaccaaaaaactagaaaggcacaaaatattgagtcttccataatagaagaagaagaagaggccgaagagcaaaacaactctatcaattatcacgaggatataactggatccaggttatctgtaagagaggaagcaaatgaaaacttggcgatgacctctccaaaccttattgacattgacggatccaatagtattcaagttgcccctttgagtttaccgtctttcgaagaacctgactttttgtccactcctagagtaaaacctgattctcagggacctcgtagcaaagttagtacaagacgtactattctcgaaagagacaacaatttaccagttaagagagaggaaaatactatcattaattctgaaactgaaagcacaacacatagcgcaccatttttaaaagaggatccgaaaccctctcctccttctagtaaattatacaacccaaaagttcgtttaaacaaagcagaagcgagaaagtatactgattcttctgcccaaaggactacttctgcaggctctgtacttgaagacacttctatgcataaaaagaaaaagagtatattttcttttttgaagaagaaagaaccgaaaccagttattggtaataatagtgtaacgaatgaaaaaaataagatgtcttcttctagcactttctccatgaatattcaaacctctttaaaaacgcctgaaaaattgaagaagaagtctcacagtagcagtagcattttcaattccttcttgaagggaaaaattgaaacaagtgactctcctagaaaggaaccaatgaggcaaaaaaaaagaaccccaaaatccaaggacaaaaagcaagatactgaacaaataattgacgccgcatctgtgttatccactgaatctcctttacttagaaaaaaccacgacgatactcccgtgaaaatagatcacgtaacgagatctattgatcagagaaaacctactcctttaaacatggatctcatattgggaggtgataaacagataaataccccgttacaagaacacgtaagagaagatgatgatgccaaaaatgatcttcaattaccaaccaaggataattttttatctttggactacgaagcaccctctccagcattttccaaacacgatacaggtgaggttcttttcccaaaatttttggataatcatgaagtcgactctatcgtttctttagaaagaacaagatctacaaagtctaacaagagaagttctatgaactctcaaagaaggtctttgacagatacgttatctatcaaagcgcaaagtgagggaatgttcatcactgaggcatcttctgttgtattatctactccagacttgacgaagtctcctgctagcagcattttaaagaatggaaggttcgaatactctgataatttctccagagaacactcttacgaaggtaccacgaatgaggactttttagatatcaaggacgatagtggtccattgaaaaaagatgacatatttttagagtctattgaacaaaaatttgaccagttggtgatggcctctgatgaagaaaaaactgaagttgaaagggatgtaccaaaaccaagagaagaacctttgaagaaggattctgaaaggcaaagcgtttttgcagatgatgataacgagttaatttctgatataatggagtttgcaagttttattaacttcggtgatgatgatctcaatttggacttggacttgggagatacaacggcctcttatgcaacagaaacccctgaacctgttggaaatgatgaagtaaatcgctctggtacttttgatacaagaaataacaaagaggatagttacaaagaaagagaaactcaatcttattccgctgctggagctactacatacggagatgagcgtcaaggtcaattacatacatttgaacaagacggaagtgaaataaatgacaacgaatttgagaatgaagatttcaacaaacacatagaacagcccatagaagttactccaagaaataatgcatatttaccagaattcgaacccaatagacctgtttctatgtcctttaaaggattgaaagccccaagaatgaatacttcttttattgactccatgacgcctgattctcccgtaaaaagtgacttaacaagtttgggtgaggtgtatgtaaacagtaataatgaccagggtgtcagattttcttcccagataatactttacgacacttatggagaattcgaatatgatagacatccagaaatttccacttgtaaccagcttactccacaattggctcaaatgatcaaattggaattaaatgagttaaagagcgcaatggaagtacacgatgattctcgttgttacacacatttttattga

SEQ ID NO: 9215 - DNA, 879 bp, Saccharomyces cerevisiae
atggcatgcaattttcagtttccagaaatagcttatccaggtaaactaatatgcccacagtacggtacggaaaataaagatggcgaagatataattttcaattatgtgcccggtcccggaactaaactaattcaatatgaacacaacggacgaactttagaagctataactgctacactagttgggacagtgaggtgtgaggaagaaaaaaaaactgatcaggaagaagagcgtgaaggcactgatcaatctacagaggaagaaaaatcagtagatgcatcacctaatgatgtcacaagaagaactgtaaaaaatattctggtttcagtgcttcctgggacagaaaagggtcgtaaaaccaacaaatatgctaataatgattttgccaataacctaccgaaggaaggtgatattgtgctgaccagggtgacaaggctttcgttgcaacgagccaatgtcgaaattttagctgtggaagataaaccatctccaattgatagtggcatcggcagtaatggatcgggaatagtcgctgctggtggcggttctggagcagctacgttctctgtttctcaagcatcatcagatttaggtgagacattcagaggtataatcaggtctcaggatgtacggtctacagacagagatcgtgtgaaagtgatagaatgtttcaagccgggagatattgttagggcgcaagttttatcattaggtgacggaaccaactactatttgaccactgcaaggaatgaccttggggtcgtgttcgccagagctgctaatggtgctggtggattgatgtatgctacagactggcaaatgatgacttcaccggttacaggcgctacagaaaagcgcaaatgtgccaaacctttttga

SEQ ID NO: 9216 - DNA, 879 bp, Artificial Sequence
  Description of Artificial Sequence: Synthetic polynucleotide
atggcatgcaattttcagtttccagaaatagcttatccaggtaaattgatatgcccacagtacggtacggaaaataaagatggcgaagatataattttcaattatgtgcccggtcccggaactaaattgattcaatatgaacacaacggaagaactttagaagctataactgctacattagttgggacagtgaggtgtgaggaagaaaaaaaaactgatcaggaagaagagcgtgaaggcactgatcaatctacagaggaagaaaaatctgtagatgcatctcctaatgatgtcacaagaagaactgtaaaaaatattttggtttctgtgcttcctgggacagaaaagggtcgtaaaaccaacaaatatgctaataatgattttgccaataacttaccgaaggaaggtgatattgtgttgaccagggtgacaaggctttctttgcaaagagccaatgtcgaaattttagctgtggaagataaaccatctccaattgatagtggcatcggcagtaatggatctggaatagtcgctgctggtggcggttctggagcagctacgttctctgtttctcaagcatcttctgatttaggtgagacattcagaggtataatcaggtctcaggatgtaagatctacagacagagatcgtgtgaaagtgatagaatgtttcaagccgggagatattgttagggcgcaagttttatctttaggtgacggaaccaactactatttgaccactgcaaggaatgaccttggggtcgtgttcgccagagctgctaatggtgctggtggattgatgtatgctacagactggcaaatgatgacttctccggttacaggcgctacagaaaagcgcaaatgtgccaaacctttttga

SEQ ID NO: 9217 - DNA, 1056 bp, Saccharomyces cerevisiae
atgttcaagagatttagcaaaaagaaggaggctccagaagacccaaaaaatttgattaatattgataagcctatcaaagaacttcctgcttcgatagctattccaaaagaaaaaccacttacaggtgagcaacaaaaaatgtatgacgaagtgctaaaacatttcagtaaccctgacttgaaggtttatacaagtgaaaaaaataagtcggaggatgatcttaaacccttagaggaagaagaaaaggcatggttgacaagagaatgttttttacgttacctaagggctactaaatgggtgctaaaagactgtatcgatagaatcaccatgactctagcgtggagaagagaattcggtattagtcatttaggtgaagagcatggtgataaaataactgctgacttggtggccgtcgagaacgaatcaggtaagcaggtgattttgggttacgaaaacgatgctagacctatcttatatttgaaaccgggcagacaaaatacaaagacttctcacagacaggtacagcacttggtcttcatgttggaaagagttatcgattttatgccagctggtcaagactctctagctttgctaatagactttaaagattaccctgatgttcctaaagtacctggcaatagtaaaatcccacctattggtgtagggaaagaagtgctgcatattctacaaactcattatccagaaagactaggaaaagcacttttgacgaatattccttggttagcatggactttcttgaagttaattcacccttttattgacccactgacccgtgaaaagctagtttttgatgaaccatttgttaaatatgtccctaagaacgaactagattcgttgtatggtggtgatctgaaattcaagtacaatcatgatgtttattggccagctctggtggaaaccgcgcgtgaaaaaagagatcattattttaagaggtttcaaagcttcggtggtattgtaggtttaagtgaggttgatttaagaggtactcatgaaaaacttctttacccagtaaaatcggaaagcagtaccgtgtaa

SEQ ID NO: 9218 - DNA, 1056 bp, Artificial Sequence
  Description of Artificial Sequence: Synthetic polynucleotide
atgttcaagagatttagcaaaaagaaggaggctccagaagacccaaaaaatttgattaatattgataagcctatcaaagaacttcctgcttctatagctattccaaaagaaaaaccacttacaggtgagcaacaaaaaatgtatgacgaagtgttgaaacatttcagtaaccctgacttgaaggtttatacaagtgaaaaaaataagagtgaggatgatcttaaacccttagaggaagaagaaaaggcatggttgacaagagaatgttttttacgttacttgagggctactaaatgggtgttgaaagactgtatcgatagaatcaccatgactttggcgtggagaagagaattcggtattagtcatttaggtgaagagcatggtgataaaataactgctgacttggtggccgtcgagaacgaaagtggtaagcaggtgattttgggttacgaaaacgatgctagacctatcttatatttgaaaccgggcagacaaaatacaaagacttctcacagacaggtacagcacttggtcttcatgttggaaagagttatcgattttatgccagctggtcaagactctttggctttgttaatagactttaaagattaccctgatgttcctaaagtacctggcaatagtaaaatcccacctattggtgtagggaaagaagtgttacatattttacaaactcattatccagaaagattaggaaaagcacttttgacgaatattccttggttagcatggactttcttgaagttaattcacccttttattgacccattgacccgtgaaaagttggtttttgatgaaccatttgttaaatatgtccctaagaacgaattagattctttgtatggtggtgatttgaaattcaagtacaatcatgatgtttattggccagctttggtggaaaccgcgcgtgaaaaaagagatcattattttaagaggtttcaaagcttcggtggtattgtaggtttaagtgaggttgatttaagaggtactcatgaaaaacttctttacccagtaaaaagtgaaagcagtaccgtgtga

SEQ ID NO: 9219 - DNA, 1140 bp, Saccharomyces cerevisiae
atgaaaagtttacaaacactatgtgaaatctcattgatgagaaatcattcaaacatacaatctgtgagtaatgtcccctatcacttattaaagaggatactgcagaaagtaaaaataccacaactattaaaacttgagaaaagcaacgtactattgatatttgacgatgatgaactatggttagaatttttaaggcaagatttcccgactaatgtacacgaacaatttgtctctaagagagacattatttgcaaatattactttgatttcgttaaggaaaacgatatagaactgtaccattcgaatcaggatttattgaagtcttgcgtgcgtcaatcagtcgtcaaagacatccgaaacaacaagtaccgaataccatacagaatgttatactcaaagtaccaacaagaagtggaaaagaaacaagaggaaagcgcagagagattaaggctggaaatgcagaagttgcagcaagaaagagaaaaaaagcaaaccatagtggttgaccacactgtttacttcaaaaagagaaacaccaagaagactacaaggttgcacaacgaaccccattcgcaattatacatgaaatcgttgaaagatcacgagtccagactaaagcatttcaaagacggcggattcaacattgcaaaaaggcatgcgcaacgtgtggcctttggtggccaagcgggcggacaatcgtcttcccccaagaaaggcccattgtccatcaaaccggagcctgttaaggtaaatcgtcaaatggataatgtcacagcagagaagaaagatgttacgcagcccatcacgccggtgaagaagagaagatccgaatcaccgtcaatctttctcaatcgtaaaaaacctgcgctattcaggcctactccgaagacaaacgctgcaggttctcgaccccatacaacagcgatcaccaacgatcaccgtactacttctcatccttatccccacaaagatgttgtaacttcaatatcaagtgtcaccgcaaatcccgtaacaaagggccacaagaagaagaaatccggaattttcgtacgaaatgccggatctgacggagatagttttccgcacgtgaccgcaaccggccctactacccgtccgtatatctatgagccacggaaatag

SEQ ID NO: 9220 - DNA, 1140 bp, Artificial Sequence
  Description of Artificial Sequence: Synthetic polynucleotide
atgaaaagtttacaaacattatgtgaaatctctttgatgagaaatcattccaacatacaatctgtgagtaatgtcccctatcacttattaaagaggatattacagaaagtaaaaataccacaattattaaaacttgagaaaagcaacgtacttttgatatttgacgatgatgaattatggttagaatttttaaggcaagatttcccgactaatgtacacgaacaatttgtctctaagagagacattatttgcaaatattactttgatttcgttaaggaaaacgatatagaattataccattctaatcaggatttattgaagtcttgcgtgcgtcaatctgtcgtcaaagacatcagaaacaacaagtacagaataccatacagaatgttatactccaagtaccaacaagaagtggaaaagaaacaagaggaaagcgcagagagattaaggttagaaatgcagaagttgcagcaagaaagagaaaaaaagcaaaccatagtggttgaccacactgtttacttcaaaaagagaaacaccaagaagactacaaggttgcacaacgaaccccattctcaattatacatgaaatctttgaaagatcacgagtccagattaaagcatttcaaagacggcggattcaacattgcaaaaaggcatgcgcaacgtgtggcctttggtggccaagcgggcggacaatcttcttcccccaagaaaggcccattgtccatcaaaccggagcctgttaaggtaaatcgtcaaatggataatgtcacagcagagaagaaagatgttacgcagcccatcacgccggtgaagaagagaagatccgaatctccgtctatctttctcaatcgtaaaaaacctgcgttattcaggcctactccgaagacaaacgctgcaggttctagaccccatacaacagcgatcaccaacgatcaccgtactacttctcatccttatccccacaaagatgttgtaacttccatatctagtgtcaccgcaaatcccgtaacaaagggccacaagaagaagaaatccggaattttcgtaagaaatgccggatctgacggagatagttttccgcacgtgaccgcaaccggccctactacccgtccgtatatctatgagccaagaaaatga

SEQ ID NO: 9221 - DNA, 1065 bp, Saccharomyces cerevisiae
atgatgaataacaacggcaaccaagtgtcgaatctctccaatgcgctccgtcaagtaaacataggaaacaggaacagtaatacaaccaccgatcaaagtaatataaattttgaattttcaacaggtgtaaataataataataataacaatagcagtagtaataacaataatgttcaaaacaataacagcggccgcaatggtagccaaaataatgataacgagaataatatcaagaataccttagaacaacatcgacaacaacaacaggcattttcggatatgagtcacgtggagtattccagaattacaaaattttttcaagaacaaccactggagggatatacccttttctctcacaggtctgcgcctaatggattcaaagttgctatagtactaagtgaacttggatttcattataacacaatcttcctagatttcaatcttggcgaacatagggcccccgaatttgtgtctgtgaaccctaatgcaagagttccagctttaatcgatcatggtatggacaacttgtctatttgggaatcaggggcgattttattacatttggtaaataaatattacaaagagactggtaatccattactctggtccgatgatttagctgaccaatcacaaatcaacgcatggttgttcttccaaacgtcagggcatgcgccaatgattggacaagctttacatttcagatacttccattcacaaaagatagcaagtgctgtagaaagatatacggatgaggttagaagagtttacggtgtagtggagatggccttggctgaacgtagagaagcgctggtgatggaattagacacggaaaatgcggctgcatactcagctggtacaacaccaatgtcacaaagtcgtttctttgattatcccgtatggcttgtaggagataaattaactatagcagatttggcctttgtcccatggaataatgtcgtggatagaattggcattaatatcaaaattgaatttccagaagtttacaaatggacgaagcatatgatgagaagacccgcggtcatcaaggcattgcgtggtgaatga

SEQ ID NO: 9222 - DNA, 1065 bp, Artificial Sequence
  Description of Artificial Sequence: Synthetic polynucleotide
atgatgaataacaacggcaaccaagtgagtaatctctccaatgcgctccgtcaagtaaacataggaaacaggaacagtaatacaaccaccgatcaaagtaatataaattttgaattttctacaggtgtaaataataataataataacaatagcagtagtaataacaataatgttcaaaacaataacagcggccgcaatggtagccaaaataatgataacgagaataatatcaagaataccttagaacaacatagacaacaacaacaggcattttctgatatgagtcacgtggagtattccagaattacaaaattttttcaagaacaaccattggagggatatacccttttctctcacaggtctgcgcctaatggattcaaagttgctatagtattgagtgaacttggatttcattataacacaatcttcttggatttcaatcttggcgaacatagggcccccgaatttgtgtctgtgaaccctaatgcaagagttccagctttaatcgatcatggtatggacaacttgtctatttgggaatctggggcgattttattacatttggtaaataaatattacaaagagactggtaatccattactctggtccgatgatttagctgaccaatctcaaatcaacgcatggttgttcttccaaacgtctgggcatgcgccaatgattggacaagctttacatttcagatacttccattctcaaaagatagcaagtgctgtagaaagatatacggatgaggttagaagagtttacggtgtagtggagatggccttggctgaacgtagagaagcgttagtgatggaattagacacggaaaatgcggctgcatactctgctggtacaacaccaatgtctcaaagtcgtttctttgattatcccgtatggcttgtaggagataaattaactatagcagatttggcctttgtcccatggaataatgtcgtggatagaattggcattaatatcaaaattgaatttccagaagtttacaaatggacgaagcatatgatgagaagacccgcggtcatcaaggcattgcgtggtgaatga

SEQ ID NO: 9223 - DNA, 1773 bp, Saccharomyces cerevisiae
atgaagacctgctactatgagcttttaggggtcgaaacgcatgcttctgatcttgagttaaaaaaagcttaccgtaaaaaggccctacaatatcacccagataaaaacccagataatgttgaagaagccacacaaaaatttgctgtgattcgagccgcttatgaagtactgtctgacccccaggaaagagcatggtatgactcacataaggaacaaattttaaatgatactccaccaagcactgatgattactatgattatgaggtagacgctacagtcacaggtgtcacaactgatgaattactcttattttttaactctgctctttatactaaaatagacaactcagctgctgggatatatcaaattgcaggaaaaatatttgccaagttagctaaagatgagattttaagtggtaagcgactggggaaattttccgagtatcaagatgatgtattcgaacaggatattaatagtattggctatttgaaagcctgcgataactttattaacaagacggataaacttttatatcctttatttggatattcgccaacggattatgaatatttgaaacatttctataagacttggtcagcgttcaataccttgaaaagttttagctggaaagacgagtacatgtactctaaaaactatgacagaagaaccaagagggaagttaatagaagaaatgagaaggctaggcaacaagctcgaaatgaatacaacaaaaccgtgaaaaggtttgtagttttcataaaaaagctcgataaaagaatgaaagaaggtgcaaaaattgcagaagaacagcgtaaactaaaagaacaacagaggaaaaatgagttaaataacagaagaaagtttgggaacgacaacaatgacgaagaaaaatttcatttacaaagctggcaaacggtaaaagaagaaaactgggatgaactggaaaaggtatatgataattttggagaattcgaaaattctaagaatgataaggaaggtgaagtattgatttacgagtgttttatctgcaacaagacatttaagtcggaaaagcaattgaaaaaccacataaacactaaactgcataagaaaaatatggaagagatacggaaagaaatggaagaggaaaacataacgcttgggttggataatctctccgatctcgagaaatttgattcagcagatgaaagtgttaaagaaaaagaagatattgatctgcaagcattgcaagctgaactcgctgaaattgaaagaaaactggcagaatcgtcttctgaagacgaaagtgaagatgacaatctcaacatagaaatggatatagaggtagaagacgtcagttcggatgaaaatgtacatgtgaatacgaagaataaaaagaaaagaaaaaagaaaaaaaaagcaaaggttgacacagaaacagaggaatctgaatcgttcgatgatactaaagacaaacggagtaatgagttggatgatcttttggcatcactaggagacaagggcttacaaacggatgacgatgaagattggtctactaaagcgaaaaagaaaaagggcaaacaacctaaaaagaattctaaatccacaaaaagcactccgtccttgtcgactctaccgtcctctatgtctccaacctccgcgatcgaggtgtgcactacatgcggagaatcatttgatagtcgaaataagctattcaaccacgtgaagatagcagggcatgcggcagtgaaaaacgtagtgaaaagaaagaaagtcaagaccaaaagaatatag

SEQ ID NO: 9224 - DNA, 1773 bp, Artificial Sequence
  Description of Artificial Sequence: Synthetic polynucleotide
atgaagacctgctactatgagcttttaggggtcgaaacgcatgcttctgatcttgagttaaaaaaagcttaccgtaaaaaggccttgcaatatcacccagataaaaacccagataatgttgaagaagccacacaaaaatttgctgtgattagagccgcttatgaagtattatctgacccccaggaaagagcatggtatgactctcataaggaacaaattttaaatgatactccaccaagcactgatgattactatgattatgaggtagacgctacagtcacaggtgtcacaactgatgaattactcttattttttaactctgctctttatactaaaatagacaactctgctgctgggatatatcaaattgcaggaaaaatatttgccaagttagctaaagatgagattttaagtggtaagagattagggaaattttccgagtatcaagatgatgtattcgaacaggatattaatagtattggctatttgaaagcctgcgataactttattaacaagacggataaacttttatatcctttatttggatattctccaacggattatgaatatttgaaacatttctataagacttggtccgcgttcaataccttgaaaagttttagctggaaagacgagtacatgtactctaaaaactatgacagaagaaccaagagggaagttaatagaagaaatgagaaggctaggcaacaagctagaaatgaatacaacaaaaccgtgaaaaggtttgtagttttcataaaaaagctcgataaaagaatgaaagaaggtgcaaaaattgcagaagaacagcgtaaattgaaagaacaacagaggaaaaatgagttaaataacagaagaaagtttgggaacgacaacaatgacgaagaaaaatttcatttacaaagctggcaaacggtaaaagaagaaaactgggatgaattggaaaaggtatatgataattttggagaattcgaaaattctaagaatgataaggaaggtgaagtattgatttacgagtgttttatctgcaacaagacatttaagtctgaaaagcaattgaaaaaccacataaacactaaattgcataagaaaaatatggaagagataagaaaagaaatggaagaggaaaacataacgcttgggttggataatctctccgatctcgagaaatttgattctgcagatgaaagtgttaaagaaaaagaagatattgatttgcaagcattgcaagctgaactcgctgaaattgaaagaaaattggcagaaagctcttctgaagacgaaagtgaagatgacaatctcaacatagaaatggatatagaggtagaagacgtcagttctgatgaaaatgtacatgtgaatacgaagaataaaaagaaaagaaaaaagaaaaaaaaagcaaaggttgacacagaaacagaggaatctgaatctttcgatgatactaaagacaaaagaagtaatgagttggatgatcttttggcatctttgggagacaagggcttacaaacggatgacgatgaagattggtctactaaagcgaaaaagaaaaagggcaaacaacctaaaaagaattctaaatccacaaaaagcactccgtccttgtctactttaccgtcctctatgtctccaacctccgcgatcgaggtgtgcactacatgcggagaaagttttgatagtagaaataagcttttcaaccacgtgaagatagcagggcatgcggcagtgaaaaacgtagtgaaaagaaagaaagtcaagaccaaaagaatatga

SEQ ID NO: 9225 - DNA, 1746 bp, Saccharomyces cerevisiae
atgactgatttcgatttaatgaattttccatttcatgagcgtttggattctcctgtatcagagaatggggaaattaaagacggagagccaatcccacaaaactggctaaatgaaaatcatgtcggaaaatccatcttacctttattcgttaaccctgaagatgtcatcaattgcaacttttccaatgctagagactcatatgaagagaacaaatcaccatctatggatcaaatgaattatgctagaaatactagttatcaggaatctccaggattacaagaacgaccaaaaaacgaaaaagataagtctcccataggtactgatgttcataaaaaggatgtacccaatttcatacactctactcctagagaaaactcttcgaagcattttacgagggcaaatgaacaggcttctgctcaaccaactgatgaacatacatcgccagatatctcgatagaagactgtaacggtgccaaaatttttctacaaaactccttatcgaaagaggattttcgaatgttagaaaatgtgatactggggtatcaaaaaaaagttattgaattgggtagagataatctaagacaagaggaaagagcaaactctttacaaaaggagctcgaagcagctacgaagtcaaacgacaaaaccttagataacaaaaaaaaaattgaagaacagacagtattgattgaaaacctaacaaaggacctttcgctgaataaagaaatgttggaaaaagccaatgatactattcagacaaaacacactgcattactaagtctcactgactccttaagaaaggccgagctgtttgaaataccgattggtatattgtttttcgatttgtatgactcggaggaaaattcttcaaaattagatcacatattacaagaaaaatatcctaatattaaagggtttttatgtgcatcacagcaagaagagctgagccgcatttctcagcgatttaaaaatgcaaaagcagaagctgaggatctccgaaatgagttagagaataaaaaaattgaaatccagaccatgagagaaaaaaataatactttaattggtacaaataaaaccctttccaaacagaacaaaatactatgtgataaatttgacaagttgacaatcgatgagaaggaaattttgaaaggatgtaatgaggaaataaaaattaagctggaaaggttgaatgaaagactaggatcatgggaaaaaagcaaagaaaaatacgaaacatcattgaaggataaagaaaaaatgctagcagatgctgaaaagaaaacaaacactctatcaaaggaactggataatttgaggtcgcgatttggaaacttagagggaaatacttctgaaaggattacaataaaaaatatcttacagtcaaggcccgatatttcggcagaagaatgtaatttccttatggttgaacaaattgattcagcaaatttgacgactttacaaaatactgtcaaagaaattgttttggctgttggtattccttatccaaagttaaggcgaaagattccgttgctggctatcaaattgaaatatgaaaacatcatgctgtccaattttgctcaacgtctgcatagacaagtatatagtcaagaaatgaatctaaagaaatttacggatcaagcatactatgattttatgtcaacgcgcaggatggattccatagatcaccatttggagaggtgtctggaccatctgtatgatcatatcctggagaagatggtgaagtaa

SEQ ID NO: 9226 - DNA, 1746 bp, Artificial Sequence
  Description of Artificial Sequence: Synthetic polynucleotide
atgactgatttcgatttaatgaattttccatttcatgagcgtttggattctcctgtatctgagaatggggaaattaaagacggagagccaatcccacaaaactggttaaatgaaaatcatgtcggaaaatccatcttacctttattcgttaaccctgaagatgtcatcaattgcaacttttccaatgctagagactcttatgaagagaacaaatctccatctatggatcaaatgaattatgctagaaatactagttatcaggaatctccaggattacaagaaagaccaaaaaacgaaaaagataagtctcccataggtactgatgttcataaaaaggatgtacccaatttcatacactctactcctagagaaaactcttccaagcattttacgagggcaaatgaacaggcttctgctcaaccaactgatgaacatacatctccagatatctccatagaagactgtaacggtgccaaaatttttttgcaaaactccttatccaaagaggattttagaatgttagaaaatgtgatattagggtatcaaaaaaaagttattgaattgggtagagataatttaagacaagaggaaagagcaaactctttacaaaaggagctcgaagcagctacgaagtctaacgacaaaaccttagataacaaaaaaaaaattgaagaacagacagtattgattgaaaacttaacaaaggacctttctttgaataaagaaatgttggaaaaagccaatgatactattcagacaaaacacactgcattattaagtctcactgactccttaagaaaggccgagttatttgaaataccgattggtatattgtttttcgatttgtatgactctgaggaaaattcttctaaattagatcacatattacaagaaaaatatcctaatattaaagggtttttatgtgcatcccagcaagaagagttgagccgcatttctcagagatttaaaaatgcaaaagcagaagctgaggatctcagaaatgagttagagaataaaaaaattgaaatccagaccatgagagaaaaaaataatactttaattggtacaaataaaaccctttccaaacagaacaaaatattatgtgataaatttgacaagttgacaatcgatgagaaggaaattttgaaaggatgtaatgaggaaataaaaattaagttggaaaggttgaatgaaagattaggatcttgggaaaaaagcaaagaaaaatacgaaacatctttgaaggataaagaaaaaatgttagcagatgctgaaaagaaaacaaacactttatccaaggaattagataatttgaggtctagatttggaaacttagagggaaatacttctgaaaggattacaataaaaaatatcttacagtctaggcccgatatttctgcagaagaatgtaatttccttatggttgaacaaattgattctgcaaatttgacgactttacaaaatactgtcaaagaaattgttttggctgttggtattccttatccaaagttaaggcgtaagattccgttgttggctatcaaattgaaatatgaaaacatcatgctttccaattttgctcaacgtttgcatagacaagtatatagtcaagaaatgaatttgaagaaatttacggatcaagcatactatgattttatgtctacgcgcaggatggattccatagatcaccatttggagaggtgtttggaccatttatatgatcatatcttggagaagatggtgaagtga

SEQ ID NO: 9227 - DNA, 2304 bp, Saccharomyces cerevisiae
atggcaaaaaggcatagtcattatcaaggaagcagacgtaggcatgcacgtggtagcaattccaagaaagctggcagggggaatgctaaaggcatacaaggcagaaagataaagaaaaaacctactcccactaacagttggcataactcttctataccactaggagaaggtgatcttgatgatgtaggcgccgacttcaacccaggaagagcattcatatcaccaaaaactatagaagactattattttggtcgcgatgccaagagccgttctatgaaaatgggtggtttaagaccaggtaatcgatatgattcttcaactgacctacaagcaggaagggcagcattccgcaaaagacctatgcaatttgtaaaagctaaggaagtttacgatccatcccacaatatgattcaaaaactgagagcaaagaacgaaacaaagaacagtgaagaaattgtcgaaagggaagcagacgtttttgaagaaccaggaaagatgacttctgatgttgaatatattaacaatgaagacagtgaaaacgaggatgatgatagtcagaattcaccctcgacggaccactcgctgtcttcgaatgaaagcaaagttgaagatggtgacctgttttttgtagatgaagaggctcagcaatcgccggatctaaccaaaataaaaagagtatgtatcgaggaaatcgcaaggccaagagaagttgcgatagagttcgatcctatcttaacaattggaaaggttgaacttagcgtttccgaaggtaacgaaagcaaggaaattagtgttgacgttccaaataagggtaataagacatatcatccatttgctggttacatttccaacgtattacatggtatgcatactagcgactcggacaatgatgaactagactacgaaatagaaacagagaataatagtgaacctttatacgaatcctcagcaagttctgaggttgatcaagggtttaattatgttggccaacgtcacaattcccgagctgacaacaatcttttaccaagccctagtccgcagttgacagaagatataaaatgtctttcaataaatggtaccaaaacattcgaaggcaataatgataatctgccatctcctgctagcgaagagttagaatttggattcaaagaagaagattttgtcataaatactaatgacatagtggtctccaatataagaatgggcggagtagacaattcatattatctacggtgttacagattactgggagattacgactttcattggattgaccaggacttactcacagacttcgttgtagacgagttaggtcttcctgaagatagattacctgcatatttgaattttattaaaaattctcttataccaaaaattgaaccagctgagccaacctactcagatattccgatttctgattcgagtgatgaaggtgacagctatgaaggcgacagctatgaagatgatgaagatatggcctcctcggttgtgcatagcgacattgaagagggtctggacgacctaattgcatacacattgaaacatgatacagaaagattcaaaacatttgaaaccaagtccttggaaactaagggtaaaggtaagaagaagaagctactcatcgatgacgccttagcgctggatacagaaacgttggagacgttacaaagtaagtttagtaaacgcatagaaaccaaagcaaagaaaagaaaagccaaagaagatttcattgatcaggagaatagaaattcgaacgatatgctcaagaaatacccatatggactccatattcaaaatattaaagatgaatttgagtcctttttgtctaggaacaatgatagactgactttccctccattagatcctcatggaaacaagaccgtaatgaaaattgcgaagcattataatatgaagagttcaaaaattgggaaagcaaatcatacgtcggttgttgtagaaaaaataaagaaaacgaaatggtcttctccgaattatagtctcattgaccaattgatgaggcagaggccagtattcatgagaatagatataagaagaccgagggaggaacaagctgctttcgaaagaactaaaacaatcagagggaaatttcatgttaaagaaggtgagattgttggtcaaaacgctccagagattggaaacgaaaatatcggtagaagaatgttggaaaagcttgggtggaaaagtggagagggccttggtattcaaggcaataaaggtataagtgaaccaatttttgccaaaattaaaaagaatagatcgggtttaagacacagtgaaagttaa

SEQ ID NO: 9228 - DNA, 2304 bp, Artificial Sequence
  Description of Artificial Sequence: Synthetic polynucleotide
atggcaaaaaggcatagtcattatcaaggaagcagacgtaggcatgcacgtggtagcaattccaagaaagctggcagggggaatgctaaaggcatacaaggcagaaagataaagaaaaaacctactcccactaacagttggcataactcttctataccattaggagaaggtgatcttgatgatgtaggcgccgacttcaacccaggaagagcattcatatctccaaaaactatagaagactattattttggtcgcgatgccaagagccgttctatgaaaatgggtggtttaagaccaggtaatagatatgattcttctactgacttgcaagcaggaagggcagcattccgcaaaagacctatgcaatttgtaaaagctaaggaagtttacgatccatcccacaatatgattcaaaaattgagagcaaagaacgaaacaaagaacagtgaagaaattgtcgaaagggaagcagacgtttttgaagaaccaggaaagatgacttctgatgttgaatatattaacaatgaagacagtgaaaacgaggatgatgatagtcagaattctcccagtacggaccactctttatcttccaatgaaagcaaagttgaagatggtgacttattttttgtagatgaagaggctcagcaatctccggatttgaccaaaataaaaagagtatgtatcgaggaaatcgcaaggccaagagaagttgcgatagagttcgatcctatcttaacaattggaaaggttgaacttagcgtttccgaaggtaacgaaagcaaggaaattagtgttgacgttccaaataagggtaataagacatatcatccatttgctggttacatttccaacgtattacatggtatgcatactagcgacagtgacaatgatgaattagactacgaaatagaaacagagaataatagtgaacctttatacgaatcctctgcaagttctgaggttgatcaagggtttaattatgttggccaacgtcacaattccagagctgacaacaatcttttaccaagccctagtccgcagttgacagaagatataaaatgtctttccataaatggtaccaaaacattcgaaggcaataatgataatttaccatctcctgctagcgaagagttagaatttggattcaaagaagaagattttgtcataaatactaatgacatagtggtctccaatataagaatgggcggagtagacaattcttattatcttcgctgttacagattattaggagattacgactttcattggattgaccaggacttactcacagacttcgttgtagacgagttaggtcttcctgaagatagattacctgcatatttgaattttattaaaaattctcttataccaaaaattgaaccagctgagccaacctactctgatattccgatttctgattctagtgatgaaggtgacagctatgaaggcgacagctatgaagatgatgaagatatggcctcctctgttgtgcatagcgacattgaagagggtttggacgacttgattgcatacacattgaaacatgatacagaaagattcaaaacatttgaaaccaagtccttggaaactaagggtaaaggtaagaagaagaagttactcatcgatgacgccttagcgttggatacagaaacgttggagacgttacaaagtaagtttagtaaacgcatagaaaccaaagcaaagaaaagaaaagccaaagaagatttcattgatcaggagaatagaaatagcaacgatatgctcaagaaatacccatatggactccatattcaaaatattaaagatgaatttgagtcctttttgtctaggaacaatgatagattaactttccctccattagatcctcatggaaacaagaccgtaatgaaaattgcgaagcattataatatgaagagttctaaaattgggaaagcaaatcatacgtctgttgttgtagaaaaaataaagaaaacgaaatggtcttctccgaattatagtctcattgaccaattgatgaggcagaggccagtattcatgagaatagatataagaagaccgagggaggaacaagctgctttcgaaagaactaaaacaatcagagggaaatttcatgttaaagaaggtgagattgttggtcaaaacgctccagagattggaaacgaaaatatcggtagaagaatgttggaaaagcttgggtggaaaagtggagagggccttggtattcaaggcaataaaggtataagtgaaccaatttttgccaaaattaaaaagaatagatctggtttaagacacagtgaaagttga

SEQ ID NO: 9229 - DNA, 1485 bp, Saccharomyces cerevisiae
atgcagaggtggctacaactgtggaaaatggatttggtacaaaaagtgtctcatggcgtttttgaaggctcgtccgaagaaccggctgctcttatgaatcatgattatatagtattaggggaagtatatcctgagcgagacgaagaatctggcgctgaacaatgtgaacaagactgtcgatatcgcggtgaagcggttagtgacgggtttttaagctctctttttggtagggaaatttcttcttacacaaaggaatttcttttggatgtacaatcaagggtcaactttacatatcggacaagatttgttcctatagcaagggcgccagatgggccttcacctttaagtctaaatttattagtacgtacaaatccgatcagtacaatagaggactatatagcaaatcctgattgctttaacactgatattgggtgggggtgtatgataaggacaggacaaagtttgttggggaatgccttacaaatccttcatttgggcagagatttcagggtaaatggtaacgaaagtctggaaagagaatcaaaatttgtaaattggtttaatgacacgcctgaggctccattttcgttacataactttgtttctgcaggtacagaactctctgataaaagaccaggtgaatggtttggtcccgcagctacggcaaggagtatacaatctttaatatatggcttccccgaatgtggcatcgatgattgtatagtatctgtttcatccggcgatatctatgaaaatgaagttgaaaaagtatttgctgagaatccaaatagtagaatattgttcttgttgggcgtgaagctcgggattaatgcggtaaatgagagctatagagaaagtatatgtggtatcttaagttcaacacagtcagtaggcattgccggcggtaggccgtcttcatcgttgtatttttttggttatcaaggaaatgaatttttacatttcgatcctcatattcctcaaccggcagtagaagattcatttgtagagtcgtgccataccagtaaatttggtaaattgcaactatcggaaatggatccctcgatgctcattggtattttgattaagggcgaaaaagactggcaacaatggaagctagaagttgcagaatctgctattatcaatgttcttgctaagagaatggatgactttgatgtgagttgtagtatggatgacgtggaaagtgtaagttctaactcaatgaagaaagatgcaagcaataatgaaaatctcggagtactagagggagactacgtagatattggtgcaatattcccacacacaacaaatacagaagatgtagacgaatatgattgttttcaagatattcattgcaagaaacagaagattgttgttatgggaaacacacacactgttaatgcgaatttaacagattatgaagtagaaggcgtccttgtagagaaggaaacggtaggtattcacagtcctattgatgaaaaatgctag

SEQ ID NO: 9230 - DNA, 1485 bp, Artificial Sequence
  Description of Artificial Sequence: Synthetic polynucleotide
atgcagaggtggttacaattatggaaaatggatttggtacaaaaagtgtctcatggcgtttttgaaggcagctccgaagaaccggctgctcttatgaatcatgattatatagtattaggggaagtatatcctgagagagacgaagaatctggcgctgaacaatgtgaacaagactgtagatatcgcggtgaagcggttagtgacgggtttttaagctctctttttggtagggaaatttcttcttacacaaaggaatttcttttggatgtacaatccagggtcaactttacatatagaacaagatttgttcctatagcaagggcgccagatgggccttctcctttaagtttgaatttattagtacgtacaaatccgatcagtacaatagaggactatatagcaaatcctgattgctttaacactgatattgggtgggggtgtatgataaggacaggacaaagtttgttggggaatgccttacaaatccttcatttgggcagagatttcagggtaaatggtaacgaaagtttagaaagagaaagtaaatttgtaaattggtttaatgacacgcctgaggctccattttctttacataactttgtttctgcaggtacagaactctctgataaaagaccaggtgaatggtttggtcccgcagctacggcaaggagtatacaatctttaatatatggcttccccgaatgtggcatcgatgattgtatagtatctgtttcttccggcgatatctatgaaaatgaagttgaaaaagtatttgctgagaatccaaatagtagaatattgttcttgttgggcgtgaagctcgggattaatgcggtaaatgagagctatagagaaagtatatgtggtatcttaagttctacacagtctgtaggcattgccggcggtaggccgtcttcttctttgtatttttttggttatcaaggaaatgaatttttacatttcgatcctcatattcctcaaccggcagtagaagattcttttgtagagagttgccataccagtaaatttggtaaattgcaattatctgaaatggatccctctatgctcattggtattttgattaagggcgaaaaagactggcaacaatggaagttggaagttgcagaatctgctattatcaatgttcttgctaagagaatggatgactttgatgtgagttgtagtatggatgacgtggaaagtgtaagttctaactccatgaagaaagatgcaagcaataatgaaaatctcggagtattggagggagactacgtagatattggtgcaatattcccacacacaacaaatacagaagatgtagacgaatatgattgttttcaagatattcattgcaagaaacagaagattgttgttatgggaaacacacacactgttaatgcgaatttaacagattatgaagtagaaggcgtccttgtagagaaggaaacggtaggtattcacagtcctattgatgaaaaatgctga

SEQ ID NO: 9231 - DNA, 621 bp, Saccharomyces cerevisiae
atgcctagtcatcgcaattcaaacttgaagttttgcacagtttgtgcatcaaacaacaatcgttcaatggaatcgcataaagtcctgcaagaagcaggctataatgttagctcttacggaacaggttcagctgtgagactgcctggtctatcgatagataagcctaatgtgtactcatttggtacaccctataatgatatatataatgatcttttatcacaatcagcagaccgttacaagtcgaacggtttattgcaaatgctggatcgtaatagaagactcaaaaaagcacctgaaaaatggcaagaaagtacaaaagtcttcgacttcgttttcacttgtgaagagagatgttttgatgccgtttgtgaagatttgatgaatagaggtgggaaattaaacaaaatagtgcatgtaattaatgttgacattaaagatgatgatgaaaatgctaaaattggtagcaaagctatattggaattagctgatatgctcaatgataaaatagaacaatgtgaaaaagatgacattccctttgaagattgtataatggacattttaactgagtggcaaagctcacattctcaactaccgtcattatacgctccttcatattactaa

SEQ ID NO: 9232 - DNA, 621 bp, Artificial Sequence
  Description of Artificial Sequence: Synthetic polynucleotide
atgcctagtcatcgcaatagcaacttgaagttttgcacagtttgtgcatctaacaacaatcgttccatggaaagtcataaagtcttacaagaagcaggctataatgttagctcttacggaacaggttctgctgtgagattacctggtttatctatagataagcctaatgtgtactcttttggtacaccctataatgatatatataatgatcttttatctcaaagtgcagaccgttacaagtctaacggtttattgcaaatgcttgatcgtaatagaagactcaaaaaagcacctgaaaaatggcaagaaagtacaaaagtcttcgacttcgttttcacttgtgaagagagatgttttgatgccgtttgtgaagatttgatgaatagaggtgggaaattaaacaaaatagtgcatgtaattaatgttgacattaaagatgatgatgaaaatgctaaaattggtagcaaagctatattggaattagctgatatgctcaatgataaaatagaacaatgtgaaaaagatgacattccctttgaagattgtataatggacattttaactgagtggcaaagctctcattctcaattgccgtctttatacgctccttcttattactga

SEQ ID NO: 9233 - DNA, 2628 bp, Saccharomyces cerevisiae
atgagcgggagtttgtctagaggaaatggtggaaagaaagttcttaataagaatcaattactgaagcgaaatcgcataagaaatgctagatcaattagagcagaggccgtggccgcttcatcaacaaaaactgggacaccgagtgatctgagtgaatcgggaagtaagctaaacgtggaccaattcattagttctcgacaattcgaggttaagcagttgcaattggccatgcataattccaaagcagccagctcaacgagaatatttcaggcattgcctcgaaaattgcgtcgtagaacggcttcgcataatgttcgtagaattccaaaaagaatgcgcaatagagctttgagggaaatgcgtaaaagtgatcagcaggatgtgttgaaggggtcttcagcctcttccagaaaagctcatggcctaaatgcaaagcaactttataaagctagaatgtccataaagctgctacgattggctagcaaatctacttctatgaaactcagcatgccaccagaggttacatcatctaactgccacgtaaggcagaaaatcaagacattaaagcgaatgattaaagaatcatcaacagcaaatccaaatataaagttacttaataatcgtatggggagctatgattgcactggtgtcaatgaattagcacctattcccaagggcagggtcaaatatacgaagagacagaagcactttgcttggctacccacccacatttggaatgctaaaaggtcgcacatgatgaaaagatggggatatcaaatggtatgggcacctactcaaaaatgctttaaattgacgcataggttgggcggtgatacctgcagctccgatggggccttatgcatggattcaagttatattggtacaataattgtaaaagacaaaagcaatgacagtgagggggactttttaaaatccattataggaaagttaacagctgaaagagcaaacttaaggaaatatcgcgaaggccaggttttattccaagggttaatttatagtttcaatgaagaaaacggtgaggattctactaagccactgggtccatgcgacgtattttgggtacaaaaggatactgcaattataaggttacacccttcaatttatactcaggtttttaacattcttttgcaacataaggaaaaactaacagtacaagattgtcgatattcattagcaagcgtgacattgaagggagctaaagctctagagtcattagcatcgtgtttaaggagcacagagtactctaaatcgtttgaacaatttaaaatggtttcaatgattaccgatcataatgccctaccacagaggtgtacgtttgcatttgaagccatagatccgcgtcatctagctgctccaaagaaattaaatgattcacagaggaagactgttaattctgacgacattttatcactgcatgaaaactatcctcaagacgaaataaacgccgtttttaacgaattatgtgaccctgaatcacgtactcaatcatacaacaaccaaaacacattaaaagaaatttctgcgagacgttacaaattgctaactgccacaccgaacagcatcaataaaactacagtcccgttcaaagaaagtgacgatccttctattccattagtcataataagaaggctcaagaccagggattggattgttgtgttaccatggttctggctgctaccgttatggcatctactgaaccggataccaaggatgtatcacattggcctcaggcaattccagcaaattcagtacgagaataagcaattatattttccggatgattatccattcactcaattgggttatatagaaaactcattttataaaaaggaggcctccaagacgaagtgggataggaagccaatgggaaaaaggattaatttcgagaagatcaaagacatccataacactaaattaccggcatatagcggagaaatcggcgattttttcagttcagactggagatttttacaaatactgagaaatggaattgattatttacagcggaatgataaaaccttagaactgatggacagtaagaagaccgggcaatttaacgctcagggtgtaagagacatcaactgtgtaaatgatgttttggagttttgcaaagattatgaagccaagaccaaggctatgtcgttgtcgattgaagagaacataccagttgcattgtgtaaaaatcggaaatgtcaatttcgcactcctgatagcattagcgtcaatagttcttcattctcccttacattcttcccacgttgtatcattgctgtatcttgcacactactcgaacgaggtcacccaaaggacaatgcaagaatatatcaagttccagaaaaggacttagagcattggctacaattggcaaaaggggtttaccgcccaaacggaagaaaagatcatgatttgaaaattccacttccagaggtacatgatttgattggttttattaccagcggcacctaccacttaaattgtggaaatggtatgggaatcggatttatagatcatcatgcggccatccggcaaccaactaggtatgtactgatcagaaatgtaggtaccaacacttataggttgggggagtggtcgaaaatatccgtataa

SEQ ID NO: 9234 - DNA, 2628 bp, Artificial Sequence
  Description of Artificial Sequence: Synthetic polynucleotide
atgagcgggagtttgtctagaggaaatggtggaaagaaagttcttaataagaatcaattattgaagagaaatcgcataagaaatgctagatctattagagcagaggccgtggccgcttcttctacaaaaactgggacaccgagtgatttgagtgaatctggaagtaagttgaacgtggaccaattcattagttctagacaattcgaggttaagcagttgcaattggccatgcataattccaaagcagccagctctacgagaatatttcaggcattgcctagaaaattgcgtcgtagaacggcttctcataatgttcgtagaattccaaaaagaatgcgcaatagagctttgagggaaatgcgtaaaagtgatcagcaggatgtgttgaaggggtcttctgcctcttccagaaaagctcatggcttgaatgcaaagcaactttataaagctagaatgtccataaagttacttagattggctagcaaatctacttctatgaaactcagcatgccaccagaggttacatcttctaactgccacgtaaggcagaaaatcaagacattaaagagaatgattaaagaatcttctacagcaaatccaaatataaagttacttaataatcgtatggggagctatgattgcactggtgtcaatgaattagcacctattcccaagggcagggtcaaatatacgaagagacagaagcactttgcttggttgcccacccacatttggaatgctaaaaggtctcacatgatgaaaagatggggatatcaaatggtatgggcacctactcaaaaatgctttaaattgacgcataggttgggcggtgatacctgcagctccgatggggccttatgcatggattctagttatattggtacaataattgtaaaagacaaaagcaatgacagtgagggggactttttaaaatccattataggaaagttaacagctgaaagagcaaacttaaggaaatatcgcgaaggccaggttttattccaagggttaatttatagtttcaatgaagaaaacggtgaggattctactaagccattgggtccatgcgacgtattttgggtacaaaaggatactgcaattataaggttacacccttctatttatactcaggtttttaacattcttttgcaacataaggaaaaattaacagtacaagattgtagatattctttagcaagcgtgacattgaagggagctaaagctttggagtctttagcatcttgtttaaggagcacagagtactctaaaagttttgaacaatttaaaatggtttctatgattaccgatcataatgccttaccacagaggtgtacgtttgcatttgaagccatagatccgcgtcatttggctgctccaaagaaattaaatgattctcagaggaagactgttaattctgacgacattttatctttgcatgaaaactatcctcaagacgaaataaacgccgtttttaacgaattatgtgaccctgaatcccgtactcaatcttacaacaaccaaaacacattaaaagaaatttctgcgagacgttacaaattgttgactgccacaccgaacagcatcaataaaactacagtcccgttcaaagaaagtgacgatccttctattccattagtcataataagaaggctcaagaccagggattggattgttgtgttaccatggttctggttgttaccgttatggcatttattaaacagaataccaaggatgtatcacattggcctcaggcaattccagcaaattcagtacgagaataagcaattatattttccggatgattatccattcactcaattgggttatatagaaaactctttttataaaaaggaggcctccaagacgaagtgggataggaagccaatgggaaaaaggattaatttcgagaagatcaaagacatccataacactaaattaccggcatatagcggagaaatcggcgattttttcagtagtgactggagatttttacaaatattaagaaatggaattgattatttacagagaaatgataaaaccttagaattgatggacagtaagaagaccgggcaatttaacgctcagggtgtaagagacatcaactgtgtaaatgatgttttggagttttgcaaagattatgaagccaagaccaaggctatgtctttgtctattgaagagaacataccagttgcattgtgtaaaaatagaaaatgtcaatttcgcactcctgatagcattagcgtcaatagttcttctttctcccttacattcttcccacgttgtatcattgctgtatcttgcacattactcgaaagaggtcacccaaaggacaatgcaagaatatatcaagttccagaaaaggacttagagcattggttacaattggcaaaaggggtttaccgcccaaacggaagaaaagatcatgatttgaaaattccacttccagaggtacatgatttgattggttttattaccagcggcacctaccacttaaattgtggaaatggtatgggaatcggatttatagatcatcatgcggccatcagacaaccaactaggtatgtattgatcagaaatgtaggtaccaacacttataggttgggggagtggtccaaaatatccgtatga

SEQ ID NO: 9235 - DNA, 1302 bp, Saccharomyces cerevisiae
atggttaacgttgtattgggctcccaatggggtgatgagggtaaaggtaaactagttgatttactggttggtaaatatgatattgtagcccgttgcgccggtggtaacaatgccgggcataccattgttgtagacggtgttaagtatgatttccatatgttaccatctggtttagtcaacccaaactgccaaaaccttttgggtaatggtgttgttattcatgttccatcttttttcaaagagttggaaaccttggaagctaaaggtttgaagaacgcaaggagtagattatttgtttcttccagagcacatttagtctttgactttcatcaggtgactgacaagctaagagaattggagttatcaggtcgttctaaagatggtaaaaatatcggtactaccggtaaaggtattggtccaacttattccacaaaggcttctagatctggtttgagagttcatcatttggtgaatgatcaacccggtgcctgggaggaatttgttgctagatataagagattattggaaacgagaagacaaagatacggtgatttcgaatacgactttgaagccaagcttgctgaatacaagaagttaagagagcaactaaagccattcgtcgtcgattctgtcgttttcatgcacaatgctattgaagcaaagaaaaagatattggttgagggtgctaatgctttgatgttggatattgattttggtacttatccatatgtgacttcttccaatactggtattggtggtgtcctcaccggtttaggtattcctccacgtactattgatgaaatttatggtgttgttaaagcctacacaactagagttggtgaaggtcctttcccaacggaacaattgaacgaaaatggagaaaaactgcagaccattggtgctgaatttggtgtcactactggtcgtaagcgtcgttgcggttggttagacttggtagtcttgaaatactcaactttgatcaatggatacacgagtttgaacattaccaagttagacgtcctcgatactttcaaagaaatcccagtgggtatttcatattctattcaaggtaagaagctagatttgttccctgaagacttgaatattcttggtaaagttgaagttgaatacaaagttttgccaggttgggatcaagatattaccaaaattacaaagtatgaagatttgccggaaaacgcaaagaagtacttaaaatatattgaagattttgttggcgttcctgttgaatgggttggtaccggccccgcaagagaaagcatgttgcataaagaaattaaatag

SEQ ID NO: 9236 - DNA, 1302 bp, Artificial Sequence
  Description of Artificial Sequence: Synthetic polynucleotide
atggttaacgttgtattgggctcccaatggggtgatgagggtaaaggtaaattggttgatttattggttggtaaatatgatattgtagcccgttgcgccggtggtaacaatgccgggcataccattgttgtagacggtgttaagtatgatttccatatgttaccatctggtttagtcaacccaaactgccaaaaccttttgggtaatggtgttgttattcatgttccatcttttttcaaagagttggaaaccttggaagctaaaggtttgaagaacgcaaggagtagattatttgtttcttccagagcacatttagtctttgactttcatcaggtgactgacaagttgagagaattggagttatctggtcgttctaaagatggtaaaaatatcggtactaccggtaaaggtattggtccaacttattccacaaaggcttctagatctggtttgagagttcatcatttggtgaatgatcaacccggtgcctgggaggaatttgttgctagatataagagattattggaaacgagaagacaaagatacggtgatttcgaatacgactttgaagccaagcttgctgaatacaagaagttaagagagcaattgaagccattcgtcgtcgattctgtcgttttcatgcacaatgctattgaagcaaagaaaaagatattggttgagggtgctaatgctttgatgttggatattgattttggtacttatccatatgtgacttcttccaatactggtattggtggtgtcctcaccggtttaggtattcctccacgtactattgatgaaatttatggtgttgttaaagcctacacaactagagttggtgaaggtcctttcccaacggaacaattgaacgaaaatggagaaaaattacagaccattggtgctgaatttggtgtcactactggtcgtaagcgtcgttgcggttggttagacttggtagtcttgaaatactccactttgatcaatggatacacgagtttgaacattaccaagttagacgtcctcgatactttcaaagaaatcccagtgggtatttcttattctattcaaggtaagaagttggatttgttccctgaagacttgaatattcttggtaaagttgaagttgaatacaaagttttgccaggttgggatcaagatattaccaaaattacaaagtatgaagatttgccggaaaacgcaaagaagtacttaaaatatattgaagattttgttggcgttcctgttgaatgggttggtaccggccccgcaagagaaagcatgttgcataaagaaattaaatga

SEQ ID NO: 9237 - DNA, 1668 bp, Saccharomyces cerevisiae
atgaattgcaaggcggtaaccattagtttattactgttgttatttttaacaagagtatatattcagccgacattctcgttaatttcagattgcgatgaaacttttaattattgggaaccattaaatttattggtacgtggatttggtaaacaaacctgggaatattcacccgagtattctattagatcatgggctttcttattacctttttactgtattctttatccagtaaacaaatttactgacctagaaagtcattggaactttttcatcacaagagcatgcttaggcttttttagttttatcatggaatttaaactacatcgtgaaattgcaggcagcttggcattgcaaatcgcaaatatttggattattttccaattgtttaatccgggctggttccatgcatctgtggaattattgccttctgccgttgccatgttgttgtatgtaggtgccaccagacactctctacgctatctgtccactgggtctacttctaactttacgaaaagtttagcgtacaatttcctggctagtatactaggctggccatttgttttaattttaagcttgccattatgtttacattaccttttcaaccatagaattatttctaccatcagaaccgcattcgactgctgtttgatattttcattgactgcatttgctgtgattgtcactgacagtatattttacgggaagcttgctcctgtatcatggaacatcttattttacaatgtcattaatgcaagtgaggaatctggcccaaatattttcggggttgagccatggtactactatccactaaatttgttactgaatttcccactgcctgtgctagttttagctattttgggaattttccatttgagattatggccattatgggcatcattattcacatggattgccgttttcactcaacaacctcacaaagaggaaagatttctctatccaatttacgggttaataactttgagtgcaagtatcgccttttacaaagtgttgaatctattcaatagaaagccgattcttaaaaaaggtataaagttgtcagttttattaattgttgcaggccaggcaatgtcacggatagtggctttggtgaacaattacacagctcctatagccgtctacgagcaattttcttcactaaatcaaggtggtgtgaaggcaccggtagtgaatgtatgtacgggacgtgaatggtatcacttcccaagttctttcctgctgccagataatcataggctaaaatttgttaaatctggatttgatggtcttcttccaggtgattttccagagagtggttctattttcaaaaagattagaactttacctaagggaatgaataacaagaatatatatgataccggtaaagagtggccgatcactagatgtgattattttattgacatcgtcgccccaataaatttaacaaaagacgttttcaaccctctacatctgatggataactggaataagctggcatgtgctgcattcatcgacggtgaaaattctaagattttgggtagagcattttacgtaccggagccaatcaaccgaatcatgcaaatagttttaccaaaacaatggaatcaagtgtacggtgttcgttacattgattactgtttgtttgaaaaaccaactgagactactaattga

SEQ ID NO: 9238 - DNA, 1668 bp, Artificial Sequence
  Description of Artificial Sequence: Synthetic polynucleotide
atgaattgcaaggcggtaaccattagtttattattattgttatttttaacaagagtatatattcagccgacattctctttaatttctgattgcgatgaaacttttaattattgggaaccattaaatttattggtacgtggatttggtaaacaaacctgggaatattctcccgagtattctattagaagttgggctttcttattacctttttactgtattctttatccagtaaacaaatttactgacttggaaagtcattggaactttttcatcacaagagcatgcttaggcttttttagttttatcatggaatttaaattgcatcgtgaaattgcaggcagcttggcattgcaaatcgcaaatatttggattattttccaattgtttaatccgggctggttccatgcatctgtggaattattgccttctgccgttgccatgttgttgtatgtaggtgccaccagacactctttacgctatttatccactgggtctacttctaactttacgaaaagtttagcgtacaatttcttggctagtatattgggctggccatttgttttaattttaagcttgccattatgtttacattaccttttcaaccatagaattatttctaccatcagaaccgcattcgactgctgtttgatattttctttgactgcatttgctgtgattgtcactgacagtatattttacgggaagcttgctcctgtaagctggaacatcttattttacaatgtcattaatgcaagtgaggaatctggcccaaatattttcggggttgagccatggtactactatccattgaatttgttattgaatttcccattgcctgtgcttgttttagctattttgggaattttccatttgagattatggccattatgggcatctttattcacatggattgccgttttcactcaacaacctcacaaagaggaaagatttctctatccaatttacgggttaataactttgagtgcaagtatcgccttttacaaagtgttgaatttattcaatagaaagccgattcttaaaaaaggtataaagttgagtgttttattaattgttgcaggccaggcaatgtctagaatagtggctttggtgaacaattacacagctcctatagccgtctacgagcaattttcttctttgaatcaaggtggtgtgaaggcaccggtagtgaatgtatgtacgggacgtgaatggtatcacttcccaagttctttcttattaccagataatcataggttgaaatttgttaaatctggatttgatggtcttcttccaggtgattttccagagagtggttctattttcaaaaagattagaactttacctaagggaatgaataacaagaatatatatgataccggtaaagagtggccgatcactagatgtgattattttattgacatcgtcgccccaataaatttaacaaaagacgttttcaaccctttgcatttaatggataactggaataagttagcatgtgctgcattcatcgacggtgaaaattctaagattttgggtagagcattttacgtaccggagccaatcaacagaatcatgcaaatagttttaccaaaacaatggaatcaagtgtacggtgttcgttacattgattactgtttgtttgaaaaaccaactgagactactaattga

SEQ ID NO: 9239 - DNA, 1764 bp, Saccharomyces cerevisiae
atgagtaacaagaggacatctgtagaacagctcatatcatgcccaatttgctctagaaaagtctttttttccttaatcaactctcatcttgacatatgtggcaaggaaaagtcaaagccttcgagtaggccacaaacggtgtcaagtcttttggcaggcccaaaaaagaggaaacaagctaactcagagaaattcattgatcttgaaaataaggaccatgaaattaagccaggtcttaagagcgagagtgatgatattgagattgttgaaaatgaaagcaaaagatttaaggcagcaccatccacggattttgcgaaatcaatagtggagcctgcttcgagcagagatcaacttcacaacgattacgaaagcagatggttgcagaaaataagccatttgccacttagtgaaaaattgaggccaaaagaattaagagattatgtaggtcagcagcacattctctctcaagataatggtacattgttcaaatacataaaacaagggactataccatctatgatactctggggccctccaggtgtaggaaagacttcactagctagactattaacgaaaactgcgacaaccagtagtaatgaatcaaatgttggttccaggtacttcatgatcgaaacaagtgcgacaaaggcaaatacgcaagaattgagaggtatatttgaaaaatcaaaaaaggaatatcaattgaccaaaagaagaactgtactttttattgatgaaattcacagattcaataaagttcaacaggatttgttattgccacacgtagaaaacggtgacattattttgattggtgcaacgacagaaaatccaagttttcagctgaacaatgctctcattagcagatgtctgatttttgtcctagaaaagctgaatgtcaacgaactgtgtattgttttatcaagaggaattgcattattgaataaatgcaggaaacaagtatggaatattgaaaatcctttgaaattgtctagaagcatactggagtacgtggtagatctgtcggtgggtgatacaaggagggcgttaaatatgttggaaatgatcgaagtttcaacaagagagcgcaaggccgacgaggaagaattatctatcgatgatgtacgagacataattaagaacaacagcagcaacgggttgaatacatactatgacccaaagggagataaccattatgatacaatctctgcgtttcataaatccattagaggtggggacgaaaacgcctcactgtactatttagcaagaatgttgcagggaggagaggacccattgtatgttgcccgaagaatgattcgaatagcttctgaagatatcggattacgggatagttcattattgcccttggctgtcgcggcacatgacgcagtaatgaaagttggtttgccagaggcagaccttgcactggcgcaatgttgtgttgctttggctagggcaccaaagtcagtagaactatatagagcttggaagaaattaagggcaatgatgagcgagaacatgtacagtttagcaagcagtgagataccgatgcatatcagaaatgcgccaaccaaattgatggaggagctgggttatcataaaggctacaagtacaatcccgattatattgaaggaaaagtccaacaagactactttcccaaagaagtgctcgagaaatgtccaaataaaactgacttaaagttcctggacggcaaacatttaggagacaaagaagatcctgacttgagacagtcatatcagggttag

SEQ ID NO: 9240 - DNA, 1764 bp, Artificial Sequence
  Description of Artificial Sequence: Synthetic polynucleotide
atgagtaacaagaggacatctgtagaacagctcatatcttgcccaatttgctctagaaaagtctttttttccttaatcaactctcatcttgacatatgtggcaaggaaaagtccaagccttctagtaggccacaaacggtgtccagtcttttggcaggcccaaaaaagaggaaacaagctaacagtgagaaattcattgatcttgaaaataaggaccatgaaattaagccaggtcttaagagcgagagtgatgatattgagattgttgaaaatgaaagcaaaagatttaaggcagcaccatccacggattttgcgaaatctatagtggagcctgcttctagcagagatcaacttcacaacgattacgaaagcagatggttgcagaaaataagccatttgccacttagtgaaaaattgaggccaaaagaattaagagattatgtaggtcagcagcacattctctctcaagataatggtacattgttcaaatacataaaacaagggactataccatctatgatactctggggccctccaggtgtaggaaagacttctttggctagattattaacgaaaactgcgacaaccagtagtaatgaaagtaatgttggttccaggtacttcatgatcgaaacaagtgcgacaaaggcaaatacgcaagaattgagaggtatatttgaaaaatctaaaaaggaatatcaattgaccaaaagaagaactgtactttttattgatgaaattcacagattcaataaagttcaacaggatttgttattgccacacgtagaaaacggtgacattattttgattggtgcaacgacagaaaatccaagttttcagttgaacaatgctctcattagcagatgtttaatttttgtcttggaaaagttgaatgtcaacgaattatgtattgttttatctagaggaattgcattattgaataaatgcaggaaacaagtatggaatattgaaaatcctttgaaattgtctagaagcatattggagtacgtggtagatttatctgtgggtgatacaaggagggcgttaaatatgttggaaatgatcgaagtttctacaagagagcgcaaggccgacgaggaagaattatctatcgatgatgtaagagacataattaagaacaacagcagcaacgggttgaatacatactatgacccaaagggagataaccattatgatacaatctctgcgtttcataaatccattagaggtggggacgaaaacgccagtttatactatttagcaagaatgttgcagggaggagaggacccattgtatgttgccagaagaatgattagaatagcttctgaagatatcggattaagagatagttctttattgcccttggctgtcgcggcacatgacgcagtaatgaaagttggtttgccagaggcagaccttgcattagcgcaatgttgtgttgctttggctagggcaccaaagagtgtagaattgtatagagcttggaagaaattaagggcaatgatgagcgagaacatgtacagtttagcaagcagtgagataccgatgcatatcagaaatgcgccaaccaaattgatggaggagttaggttatcataaaggctacaagtacaatcccgattatattgaaggaaaagtccaacaagactactttcccaaagaagtgctcgagaaatgtccaaataaaactgacttaaagttcttggacggcaaacatttaggagacaaagaagatcctgacttgagacagagttatcagggttga

SEQ ID NO: 9241 - DNA, 981 bp, Saccharomyces cerevisiae
atggaagataagcggaaaagacgagccgctacacttagtacagcattgatattatttgtggcatgctgcgtttatacactatatatattcaagtttgataaccctcggttgtctccaccagtttccttattgcctacaattagcaccttgaagaaaattgagcatgtaacagatttaaataaggagtacgtttttgttggtgacgttcatggtaactatgatgagttcatagaactcattgatgacaagattggaggactaggagaaaatataacaatgatattgctgggtgactttattcacaagggcccggactcagacaaggtcgtgtcgtatattctaaatcacaaggatcaagtcaagtgcgttttgggcaatcatgaaatattggtcatgatggcctatttaaacccagacttctcgaaatgggtaagacgccccaaattaatgacacctttaactttcagtacggagactaatttcataccacaagacatctctaaaatcagcaacgcacatggacggttagctcgcgaacttgggttttccaaattaagtcagctagcggaacattgttctatggccatagaactagatctggatattaccggtgatatactctttggtgcacatgcagggatggttccgggagacttcatgaagcccaaccaaattccgggcgtgagctctctgtcaaacatgaagtacgttgataagaagaactggtcaaaaacatcacgtgaaaaggaaaacaagaattatgtgagatggtacacactgtgggacaaatacggagaccactttagtaacgccaaagtattttacgggcacgatgcatccatgggactaaacctacggagacagaccaaaggtttggacacagcatgtataaagaacaatctgctttcatctatgaaagtgaagtacgatattaagaaggggcaatatgactatgaattaattcaagtacaatgctcttaa

SEQ ID NO: 9242 - DNA, 981 bp, Artificial Sequence
  Description of Artificial Sequence: Synthetic polynucleotide
atggaagataagagaaaaagaagagccgctacacttagtacagcattgatattatttgtggcatgctgcgtttatacattatatatattcaagtttgataaccctagattgtctccaccagtttccttattgcctacaattagcaccttgaagaaaattgagcatgtaacagatttaaataaggagtacgtttttgttggtgacgttcatggtaactatgatgagttcatagaactcattgatgacaagattggaggacttggagaaaatataacaatgatattgttgggtgactttattcacaagggcccggacagtgacaaggtcgtgtcttatattttgaatcacaaggatcaagtcaagtgcgttttgggcaatcatgaaatattggtcatgatggcctatttaaacccagacttctccaaatgggtaagacgccccaaattaatgacacctttaactttcagtacggagactaatttcataccacaagacatctctaaaatcagcaacgcacatggaagattagctcgcgaacttgggttttccaaattaagtcagcttgcggaacattgttctatggccatagaattagatttggatattaccggtgatatactctttggtgcacatgcagggatggttccgggagacttcatgaagcccaaccaaattccgggcgtgagctctttatctaacatgaagtacgttgataagaagaactggtccaaaacatctcgtgaaaaggaaaacaagaattatgtgagatggtacacattatgggacaaatacggagaccactttagtaacgccaaagtattttacgggcacgatgcatccatgggattgaacttgagaagacagaccaaaggtttggacacagcatgtataaagaacaatttactttcttctatgaaagtgaagtacgatattaagaaggggcaatatgactatgaattaattcaagtacaatgctcttga

SEQ ID NO: 9243 - DNA, 2484 bp, Saccharomyces cerevisiae
atgtctagtccagatgattttgaaactgcaccagcagaatatgttgatgcattggatccgagtatggtcgttgttgacagtggttctgctgcagtcacagcgccatcggattcagccgctgaggtaaaagctaatcaaaacgaagaaaacactggtgctactgctgctgaaactagtgagaaagtggatcagacggaggtcgaaaagaaagatgatgatgataccactgaagtcggtgtaacaactaccacgccttccattgctgatactgctgctaccgctaacattgcttcgacatcaggtgcatctgttactgaacctactactgatgacaccgctgctgatgagaaaaaggaacaagtaagtggtcctcctctgtcaaatatgaaattctatcttaatcgcgacgcggatgcgcatgactctttaaatgatattgatcaattagcgcgtctgattagagcaaacggtggtgaagtgctagactccaagccaagagaatcaaaagagaatgttttcatcgtgtcaccctataatcataccaatttaccaacggtaactccgacttatattaaggcatgttgtcaaagcaactcgctactgaacatggaaaattatttagtaccatacgataactttagagaagttgtcgatagtaggttgcaggaggaatcgcattctaatggtgtagataatagcaatagcaatagcgataacaaggattctatcaggcccaaaacagaaataatctctacgaatactaatggcgctacggaagactcaaccagcgaaaaagttatggtagacgctgaacaacaagctagattacaagagcaagctcagctccttcgtcaacatgtaagcagcaccgcatcaatcacaagcggagggcacaatgacttggtccagatcgaacaacctcaaaaagatacctccaataataataatagcaacgtcaacgacgaagacaatgatcttttgacacaggacaacaaccctcaaacagcagatgaggggaatgcatcttttcaagcacaaaggtccatgatttcgagaggcgctttgccctcccacaataaagcttcttttacagatgaggaagatgagtttattttggatgttgtgagaaaaaatccaaccaggcgtacaacacatactctttacgatgaaatatcccattatgtgcctaaccacacgggtaattctattaggcaccgatttagagtctatctttccaaaagactagagtacgtttatgaggttgacaagtttggtaaattggttagagacgacgatggaaatctgataaagactaaagttttgccaccatcaattaaaaggaaattttcagcagatgaagattacactttggcaatcgcggtcaagaagcagttttatcgtgatttgtttcaaatcgaccctgatactggaagatcacttatcacagatgaggatacacccactgctatagcgaggaggaatatgacaatggatccaaatcatgtgccagggagtgaacccaactttgcagcttacagaacccaaagccgtaggggaccgattgcacgagaatttttcaagcattttgccgaagagcatgcagcacatactgagaatgcttggagagataggtttaggaagtttcttctcgcttacggcattgatgattatattagttattatgaagctgaaaaagctcagaatagagagccggaaccgatgaagaacctcaccaatagacccaagaggcctggcgttcccactcctggcaattataactctgccgccaagagggcaagaaattatagttctcaaagaaatgttcagcctactgccaatgcagcgtccgctaatgctgctgccgctgctgctgccgctgcttccaactcttacgctataccagaaaacgaattactggacgaagataccatgaatttcatttccagtttaaagaatgatctatccaatatttcaaatagtttgccctttgagtatccacacgagattgcggaagctataagaagcgatttttcgaatgaagatatatatgataatattgatcctgataccataagctttccaccaaaaattgcaacaacagatcttttcctgccattgttctttcattttggcagtacgagacaatttatggataaacttcatgaagttatttcaggagattatgagccatcacaggctgaaaaactggtacaggatctttgcgatgaaactggtatacgtaaaaatttcagtacgagcatattgacgtgtttatccggggatctgatggtctttcctcgctatttcttgaacatgtttaaggacaatgttaatcctcctcccaacgttcctggtatttggacacatgatgacgacgaatcgctaaaaagcaatgatcaagaacaaataaggaaactggttaaaaagcatggaactggtagaatggaaatgaggaaaagattttttgagaaggacctgttatga

SEQ ID NO: 9244 - DNA, 2484 bp, Artificial Sequence
  Description of Artificial Sequence: Synthetic polynucleotide
atgtctagtccagatgattttgaaactgcaccagcagaatatgttgatgcattggatccgagtatggtcgttgttgacagtggttctgctgcagtcacagcgccaagtgattctgccgctgaggtaaaagctaatcaaaacgaagaaaacactggtgctactgctgctgaaactagtgagaaagtggatcagacggaggtcgaaaagaaagatgatgatgataccactgaagtcggtgtaacaactaccacgccttccattgctgatactgctgctaccgctaacattgcttctacatctggtgcatctgttactgaacctactactgatgacaccgctgctgatgagaaaaaggaacaagtaagtggtcctcctttatccaatatgaaattctatcttaatcgcgacgcggatgcgcatgactctttaaatgatattgatcaattagcgcgtttaattagagcaaacggtggtgaagtgcttgactccaagccaagagaaagtaaagagaatgttttcatcgtgtctccctataatcataccaatttaccaacggtaactccgacttatattaaggcatgttgtcaaagcaactctttattaaacatggaaaattatttagtaccatacgataactttagagaagttgtcgatagtaggttgcaggaggaaagtcattctaatggtgtagataatagcaatagcaatagcgataacaaggattctatcaggcccaaaacagaaataatctctacgaatactaatggcgctacggaagactctaccagcgaaaaagttatggtagacgctgaacaacaagctagattacaagagcaagctcagctccttcgtcaacatgtaagcagcaccgcatctatcacaagcggagggcacaatgacttggtccagatcgaacaacctcaaaaagatacctccaataataataatagcaacgtcaacgacgaagacaatgatcttttgacacaggacaacaaccctcaaacagcagatgaggggaatgcatcttttcaagcacaaaggtccatgatttctagaggcgctttgccctcccacaataaagcttcttttacagatgaggaagatgagtttattttggatgttgtgagaaaaaatccaaccaggcgtacaacacatactctttacgatgaaatatcccattatgtgcctaaccacacgggtaattctattaggcacagatttagagtctatctttccaaaagattggagtacgtttatgaggttgacaagtttggtaaattggttagagacgacgatggaaatttgataaagactaaagttttgccaccatctattaaaaggaaattttctgcagatgaagattacactttggcaatcgcggtcaagaagcagttttatcgtgatttgtttcaaatcgaccctgatactggaagatctcttatcacagatgaggatacacccactgctatagcgaggaggaatatgacaatggatccaaatcatgtgccagggagtgaacccaactttgcagcttacagaacccaaagccgtaggggaccgattgcaagagaatttttcaagcattttgccgaagagcatgcagcacatactgagaatgcttggagagataggtttaggaagtttcttctcgcttacggcattgatgattatattagttattatgaagctgaaaaagctcagaatagagagccggaaccgatgaagaacctcaccaatagacccaagaggcctggcgttcccactcctggcaattataactctgccgccaagagggcaagaaattatagttctcaaagaaatgttcagcctactgccaatgcagcgtccgctaatgctgctgccgctgctgctgccgctgcttccaactcttacgctataccagaaaacgaattattagacgaagataccatgaatttcatttccagtttaaagaatgatttatccaatatttctaatagtttgccctttgagtatccacacgagattgcggaagctataagaagcgatttttctaatgaagatatatatgataatattgatcctgataccataagctttccaccaaaaattgcaacaacagatcttttcttaccattgttctttcattttggcagtacgagacaatttatggataaacttcatgaagttatttctggagattatgagccatctcaggctgaaaaattagtacaggatctttgcgatgaaactggtatacgtaaaaatttcagtacgagcatattgacgtgtttatccggggatttgatggtctttcctcgctatttcttgaacatgtttaaggacaatgttaatcctcctcccaacgttcctggtatttggacacatgatgacgacgaatctttgaaaagcaatgatcaagaacaaataaggaaattggttaaaaagcatggaactggtagaatggaaatgaggaaaagattttttgagaaggacttattatga

SEQ ID NO: 9245 - DNA, 963 bp, Saccharomyces cerevisiae
atggacagtgaagcaagtgacattgaggcagagttatccgacagcgtctcagctggtggggaagaatacattgacgatgatgattatacggaagatattgacgatcagatagtcacagccaaatcatctagaagaacagcacgtaggagtgtacctaagggtgtaagaacctcaaaacgcattagagataaagaactttctgtggaggttgatgaagattatgatgaggaggaagatgtattgagcccttctaagaagcgccatctacacaccagatcaatggacaaaaggcaagttgccgcaacagcttctgaaaaatctgatattggtgatagtaaaggtaatgatggcgaaatagaagacggtatattggaagaagaagagagcttagagaaggaactgaatagaggtggaggaaaggaggtagagaaaagtgaagaatcttactacgcccaaaacgatgttggacagaagggggaggaagaacaagacggggaatctggaggctatgaagataatgaacccagtataagtaaagagtcagacgaattggtctctgtggtaaacggtaacggtaacgaagaggatgatgaagtggaggcaacaaaagaaaatacaacagattctactagaagtactacgactcgaagcaagatgctgttagatttgctggaagatggtgggtctaaaaagaaattaacagatgaagaaatccagctgcgaagagccgaaaatgcacgtaaaaggaagaaccttagcgagaagagactggaagaggagaagcaggacacaatcaataagcttttgaagaaaagggccggtaagtctaggagccacttgccaaatgatgatgaaaagaatgatggctcttcaagtttcgtgaaaccacgcaggccttacaatagcgagggtatgacaagaattctgcggagatatgaagaagacttattttgtacattttaa

SEQ ID NO: 9246 - DNA, 963 bp, Artificial Sequence
  Description of Artificial Sequence: Synthetic polynucleotide
atggacagtgaagcaagtgacattgaggcagagttatccgacagcgtctctgctggtggggaagaatacattgacgatgatgattatacggaagatattgacgatcagatagtcacagccaaatcttctagaagaacagcacgtaggagtgtacctaagggtgtaagaacctccaaacgcattagagataaagaactttctgtggaggttgatgaagattatgatgaggaggaagatgtattgagcccttctaagaagcgccatttgcacaccagaagtatggacaaaaggcaagttgccgcaacagcttctgaaaaatctgatattggtgatagtaaaggtaatgatggcgaaatagaagacggtatattggaagaagaagagagcttagagaaggaattgaatagaggtggaggaaaggaggtagagaaaagtgaagaatcttactacgcccaaaacgatgttggacagaagggggaggaagaacaagacggggaatctggaggctatgaagataatgaacccagtataagtaaagagagtgacgaattggtctctgtggtaaacggtaacggtaacgaagaggatgatgaagtggaggcaacaaaagaaaatacaacagattctactagaagtactacgactagaagcaagatgcttttagatttgttggaagatggtgggtctaaaaagaaattaacagatgaagaaatccagttaagaagagccgaaaatgcacgtaaaaggaagaaccttagcgagaagagattagaagaggagaagcaggacacaatcaataagcttttgaagaaaagggccggtaagtctaggagccacttgccaaatgatgatgaaaagaatgatggctcttccagtttcgtgaaaccacgcaggccttacaatagcgagggtatgacaagaattttaagaagatatgaagaagacttattttgtacattttga

SEQ ID NO: 9247 - DNA, 600 bp, Saccharomyces cerevisiae
atgacatcgattaacagttttcccaggaatattgactggccttccaacataggcattaaaaaaatagagggaactaatccaacggtgaatgccatcaagggcttgttatataatggtggatcaatttatgcatttctatattttgttattgctatgtttgttgaaccaacgctacaaaagcagtaccagcagagaaatgatttttccttgtttgttttgttgcgtttgagaagaatcatagcgcaattgcaaaaacgactggtgatgaccccagtatcgtcgttggggttcaacgaacagaataactttgtggagaggtccactcaaacttcagacgacaatataatacgagaagataatagccattgggctgaaatgatttatcaactgcaaaatatgaaacaagaattacagtattttaacagatcctcaggccaaccatctgaaagtatagacgattttgtctttcaaattaagatggtgactgaccaggttgagttaacagataggtcccgagctttctcaaataaatcaagaaatattatacagggaatccgagaaatcaaaggttggtttgtgaatggccaagtgccaaggtaa

SEQ ID NO: 9248 - DNA, 600 bp, Artificial Sequence
  Description of Artificial Sequence: Synthetic polynucleotide
atgacatccattaacagttttcccaggaatattgactggccttccaacataggcattaaaaaaatagagggaactaatccaacggtgaatgccatcaagggcttgttatataatggtggatctatttatgcatttttatattttgttattgctatgtttgttgaaccaacgttacaaaagcagtaccagcagagaaatgatttttccttgtttgttttgttgcgtttgagaagaatcatagcgcaattgcaaaaaagattagtgatgaccccagtatcttctttggggttcaacgaacagaataactttgtggagaggtccactcaaacttctgacgacaatataataagagaagataatagccattgggctgaaatgatttatcaattacaaaatatgaaacaagaattacagtattttaacagatccagtggccaaccatctgaaagtatagacgattttgtctttcaaattaagatggtgactgaccaggttgagttaacagataggtccagagctttcagtaataaatctagaaatattatacagggaatcagagaaatcaaaggttggtttgtgaatggccaagtgccaaggtga

SEQ ID NO: 9249 - DNA, 645 bp, Saccharomyces cerevisiae
atgaacattctgcgaatagcatgtcgttcttttcattgcctgcgctgcggtccattactcaatgagaacaggggatggtcatccaaaaagattattaaattagtcaataaatcgagtttgtccaataaagagtttacagaaaaagtacgagatggtacgaaagacattcctgagtggaagaagcagaaaatggcagttagaaaaaaattgcaaggccagaggtggaacccaccaaaaaagatatcacaggaacaaatggaggctctaagactattgaaattcaactttcctgaactgacagcatctgatcttgcagaccggttcaaaatttctcccgaggctgttcgaagaattttgaagtccaactggaagcgtactgatgaggaaaacaataacacctacgagagatggaaaagaagaggagaacggataaaagaaatgtatcaaagaaaagaggatgccgattttgtatccaatcaaattgttactagcagaaagattatacttgggtccaactcaaattcacctgaattaatagcaaggaatgttcgcacttttaaacctttcaagcctaacaacagtacacctgaaaagaaaaacaccaacaaactatacattttgaagcatttgggctcgaaacaataa

SEQ ID NO: 9250 - DNA, 645 bp, Artificial Sequence
  Description of Artificial Sequence: Synthetic polynucleotide
atgaacattttaagaatagcatgtcgttcttttcattgcttacgctgcggtccattactcaatgagaacaggggatggtcttccaaaaagattattaaattagtcaataaatctagtttgtccaataaagagtttacagaaaaagtaagagatggtacgaaagacattcctgagtggaagaagcagaaaatggcagttagaaaaaaattgcaaggccagaggtggaacccaccaaaaaagatatctcaggaacaaatggaggctttgagattattgaaattcaactttcctgaattaacagcatctgatcttgcagacagattcaaaatttctcccgaggctgttagaagaattttgaagtccaactggaagcgtactgatgaggaaaacaataacacctacgagagatggaaaagaagaggagaaagaataaaagaaatgtatcaaagaaaagaggatgccgattttgtatccaatcaaattgttactagcagaaagattatacttgggtccaacagtaattctcctgaattaatagcaaggaatgttcgcacttttaaacctttcaagcctaacaacagtacacctgaaaagaaaaacaccaacaaactttacattttgaagcatttgggctctaaacaatga

SEQ ID NO: 9251 - DNA, 2349 bp, Saccharomyces cerevisiae
atgaacattttgaagaagtttatggagtctggtaacaagccagagctcatcacgataccttctgggcagtttaatcttttgaggtctaagaattcccctaaagctgctttagaatgtatttacaacaatgcaactttaagcgtacgtaaaataggcaaatttgattatgagttggcggtttatagggtagaggacgatagtgaaggaggcacgggagatgaggctgagaattttgaagacgacaccatcagtgttttatccacacagtctaaaaagaaagaagaggagtggagcgttgaaatatcggataaaatcatgtttcacaaaacatgggataaacaaggaaacgtggcgcttgtgtgggagaacttaagaggtgatgaacaagatgaaaaggttcaatttgttgttgccgctgatgtgtcgttttctgatgttgaacagtttatccaaactgtttaccgatgccaattcgaagtaaggaataaaaaatcctctctcactgcctcagcagatgacttaaaggaaatagagcatagatcaaccaggctctttgttcaagatgatgatgacgagttagattcaagctcagatgactttcaagatgctaaagacacctcttttgagcacgagaaggaaagtgaaatattggaaagaactccttctccattgaaaaaagttccagaaggggaatattgttgtttagtgatgtctagcctatacatgtatgatccaattcaagaaaaatttattctgcaggagcccgtggtaaaggtagcaattattgatacaggcaagtacgaattttggctagcgatagaaggtaaagataatcgtcttgggactcaggtcgccccaaatatcaatcctacctttgaattagctaccgatgcctttcttttcaactatacgctacaaaacattacattgtcttatatgttaaaatttaaggacttagataagtgtattcaattcaggtttgcttgggttaaatgtttatggatgactttgaacaaagaaacgtggaccgacgttcctgaaaaggagaaagattatattttagattcatcatccgtgccattggaaaagcaatttgatgacattttacacatagatgacagatcaaatgaggaaagagataaagaatcaagcgaaagtgaaaatgatagcgaagatgaggatgacgaaaacgatcactccaaaagaatcatttcatctgaagcctttgaagaacctaggcgtgcgacttccaaaggtaatagttcattgactgtcgcctttaggaacaacaggtcatatgttacaagagataacagaattggtgtgttcaaaacggatgatgaagacgattctctagaatttgtagctgccataaagaatatttctaatttaggtggtaaaagcattgatcctcataagccaatgttgtatatggaagatcgtaatttaattttgactgatggcgaaaatgagaacaaactttataagatggatatagaaagaggaaaggtgattgaagaatggtctactggtgacaagaatgttgttcaatatggtccaaccaaaaaattcgatcaaatgacgcctgaacaaacaattgttggcgtttcacagaaaggtgtctttaaaattgatcctagaattaacggaaaaaataaaatagccgtcgatgaatcaaaagattacgtgggtaaatataactttagctctattggaacaacagagagtggttatattgctattgggtcagaaaaaggtgacataaaactatatgataggctcggtattagggcaaaaactgctataccttcactaggccaagcaatcaagtttattactacctctgctgacggtaaatggttattggcgacttgcgagagtactctgcttcttatggatttgaaaattaaggatggaaaaaatgctggcaacattggatttctgaagtcgttcccagccagtgaaaatgttaaaacatatgtattaaaaatacgaccagaacattcggcatcaatcttaacgtacacaaaaaaaccaatccgatttacgaaggcttattttaataccggtataggccagcaagaacaaactattgttacatcgacgggtccttatgcgatttcttggtcattaaagggcattttaaatcaagatggtagtaataattatccttacagaatccgtaggtacaatgctgatgttgttgctgataattttgaatttggttcagacaaaaaggttatcgttgccttgaaagacgatgtctctctatcgaaagtgaaatcctttaaacagccaagcaaaggagtcttgatgccaagtgcttccctccaagatttttatggctaa

SEQ ID NO: 9252 - DNA, 2349 bp, Artificial Sequence
  Description of Artificial Sequence: Synthetic polynucleotide
atgaacattttgaagaagtttatggagtctggtaacaagccagagctcatcacgataccttctgggcagtttaatcttttgaggtctaagaattcccctaaagctgctttagaatgtatttacaacaatgcaactttaagcgtacgtaaaataggcaaatttgattatgagttggcggtttatagggtagaggacgatagtgaaggaggcacgggagatgaggctgagaattttgaagacgacaccatcagtgttttatccacacagtctaaaaagaaagaagaggagtggagcgttgaaatatctgataaaatcatgtttcacaaaacatgggataaacaaggaaacgtggcgcttgtgtgggagaacttaagaggtgatgaacaagatgaaaaggttcaatttgttgttgccgctgatgtgtccttttctgatgttgaacagtttatccaaactgtttacagatgccaattcgaagtaaggaataaaaaatcctctctcactgcctctgcagatgacttaaaggaaatagagcatagatctaccaggctctttgttcaagatgatgatgacgagttagattctagcagtgatgactttcaagatgctaaagacacctcttttgagcacgagaaggaaagtgaaatattggaaagaactccttctccattgaaaaaagttccagaaggggaatattgttgtttagtgatgtctagcttgtacatgtatgatccaattcaagaaaaatttattttacaggagcccgtggtaaaggtagcaattattgatacaggcaagtacgaattttggttagcgatagaaggtaaagataatcgtcttgggactcaggtcgccccaaatatcaatcctacctttgaattagctaccgatgcctttcttttcaactatacgttacaaaacattacattgtcttatatgttaaaatttaaggacttagataagtgtattcaattcaggtttgcttgggttaaatgtttatggatgactttgaacaaagaaacgtggaccgacgttcctgaaaaggagaaagattatattttagattcttcttccgtgccattggaaaagcaatttgatgacattttacacatagatgacagatctaatgaggaaagagataaagaaagtagcgaaagtgaaaatgatagcgaagatgaggatgacgaaaacgatcactccaaaagaatcatttcttctgaagcctttgaagaacctaggcgtgcgacttccaaaggtaatagttctttgactgtcgcctttaggaacaacaggagttatgttacaagagataacagaattggtgtgttcaaaacggatgatgaagacgattctttggaatttgtagctgccataaagaatatttctaatttaggtggtaaaagcattgatcctcataagccaatgttgtatatggaagatcgtaatttaattttgactgatggcgaaaatgagaacaaactttataagatggatatagaaagaggaaaggtgattgaagaatggtctactggtgacaagaatgttgttcaatatggtccaaccaaaaaattcgatcaaatgacgcctgaacaaacaattgttggcgtttctcagaaaggtgtctttaaaattgatcctagaattaacggaaaaaataaaatagccgtcgatgaaagtaaagattacgtgggtaaatataactttagctctattggaacaacagagagtggttatattgctattgggagtgaaaaaggtgacataaaactttatgataggctcggtattagggcaaaaactgctataccttctttaggccaagcaatcaagtttattactacctctgctgacggtaaatggttattggcgacttgcgagagtactttacttcttatggatttgaaaattaaggatggaaaaaatgctggcaacattggatttttgaagagtttcccagccagtgaaaatgttaaaacatatgtattaaaaataaggccagaacattctgcatctatcttaacgtacacaaaaaaaccaatcagatttacgaaggcttattttaataccggtataggccagcaagaacaaactattgttacaagtacgggtccttatgcgatttcttggtctttaaagggcattttaaatcaagatggtagtaataattatccttacagaatccgtaggtacaatgctgatgttgttgctgataattttgaatttggttctgacaaaaaggttatcgttgccttgaaagacgatgtctctttatccaaagtgaaatcctttaaacagccaagcaaaggagtcttgatgccaagtgcttccctccaagatttttatggctga

SEQ ID NO: 9253 - DNA, 261 bp, Saccharomyces cerevisiae
atgcctccaagaagtatagaagaatggttttactacaagttactgagtagtccaggtttccatagatttgtacgcaaggtatataggaaagtaaatggtattaaagaagatcctttcactgaccaatcaactgcttttcaatatctttataagccaactccacgacagaaatttaaggctttaaggcttttattttgggatgaaatgagatctacttttgggttcagaaggagactaggagaccgctttaaaaaagattaa

SEQ ID NO: 9254 - DNA, 261 bp, Artificial Sequence
  Description of Artificial Sequence: Synthetic polynucleotide
atgcctccaagaagtatagaagaatggttttactacaagttattaagtagtccaggtttccatagatttgtacgcaaggtatataggaaagtaaatggtattaaagaagatcctttcactgaccaatctactgcttttcaatatctttataagccaactccaagacagaaatttaaggctttaaggcttttattttgggatgaaatgagatctacttttgggttcagaaggagattaggagaccgctttaaaaaagattga

SEQ ID NO: 9255 - DNA, 813 bp, Saccharomyces cerevisiae
atgagtaaccaacacagccctcagccattttgtttggacaccaaattggtgaaactattagaagagctccaggagggaaagcaattcaacaataaaaacatattcccggaaaaagcattatatttgaagctcgctcttgattattctttcttcagaaagaatttactagagttttgcgtccaccttgacaagataaaaggagtcattagaccaaactatgacactatatatattttgtgcctgttggaggtggatctcctcaatctggtatttaccgacaatatattggaaatatgtttgcccaggtttgtttcaagggaggacttgagggtttttaataatactttttacacatatcacgataaccgcctacgtattctccaagaagacttttctcaattgttcaaaaaaatcaaaactaaggcttctgtactatgttttacagttgaggaaatttttctgacaaaccaagaaattttacctcaaaactcaacagtggcagaactgcaaaagagcactaataaagtacagacaaatgggccgcaacggcacgatttcatagtcactctagaaataaaactgaacaaaacacaaatcactttcctcattggagctaaaggaacgagaattgaaagcttgagggaaaaatcaggcgccagcataaaaataatacctattagtgataaaatgactgcacatgaaaggaaccaccctgaatctgttcaacaaacaatactaatttcgggtgacttatactcaattgcattagccgtcaccagtatagagtctgcattaattactttggatttatag

SEQ ID NO: 9256 - DNA, 813 bp, Artificial Sequence
  Description of Artificial Sequence: Synthetic polynucleotide
atgagtaaccaacacagccctcagccattttgtttggacaccaaattggtgaaattattagaagagctccaggagggaaagcaattcaacaataaaaacatattcccggaaaaagcattatatttgaagctcgctcttgattattctttcttcagaaagaatttattggagttttgcgtccaccttgacaagataaaaggagtcattagaccaaactatgacactatatatattttgtgcttgttggaggtggatctcctcaatttggtatttaccgacaatatattggaaatatgtttgcccaggtttgtttccagggaggacttgagggtttttaataatactttttacacatatcacgataaccgccttcgtattctccaagaagacttttctcaattgttcaaaaaaatcaaaactaaggcttctgtattatgttttacagttgaggaaatttttttaacaaaccaagaaattttacctcaaaactccacagtggcagaattacaaaagagcactaataaagtacagacaaatgggccgcaaagacacgatttcatagtcactttggaaataaaattgaacaaaacacaaatcactttcctcattggagctaaaggaacgagaattgaaagcttgagggaaaaatctggcgccagcataaaaataatacctattagtgataaaatgactgcacatgaaaggaaccaccctgaatctgttcaacaaacaatattgatttctggtgacttatactctattgcattagccgtcaccagtatagagtctgcattaattactttggatttatga

SEQ ID NO: 9257 - DNA, 1842 bp, Saccharomyces cerevisiae
atggctgaaggtgttttccaaggtgctatcggtatcgatttaggtacaacatactcttgtgttgctacttatgaatcttccgttgaaattattgccaacgaacaaggtaacagagttactccatctttcgttgccttcaccccacaggaaagattgatcggtgatgctgccaagaaccaagctgctttgaacccaagaaacactgtttttgatgctaagcgtttgattggtagaagattcgacgacgagtctgtccaaaaggacatgaagacctggcctttcaaggttatcgacgtcgatggtaacccagtcattgaagtccaatacttggaagaaaccaagactttctccccacaagaaatttccgctatggtcttgaccaagatgaaggaaattgctgaagctaagattggtaagaaggttgaaaaggctgtcattactgtcccagcttactttaacgatgcccaaagacaagctaccaaggatgccggtgccatttctggtttgaacgttttgcgtatcatcaacgaacctactgccgctgctattgcttacggtctaggtgctggtaagtccgaaaaggaaagacatgttttgattttcgatttgggtggtggtactttcgatgtttccttgttgcacattgctggtggtgtttacactgttaaatctacttccggtaacactcacttgggtggtcaagatttcgacaccaacttgttggaacacttcaaggctgaattcaagaagaagactggtttggacatctccgacgatgccagagctttgagaagattgagaactgctgctgaaagagctaagagaaccttatcttctgtcactcaaactaccgttgaagttgactctttgtttgacggtgaagatttcgaatcctctttgactagagctagatttgaagacttgaacgccgcattgttcaagtctactttggaacctgttgaacaagttttgaaggatgctaagatctctaagtctcaaatcgacgaagttgtcttggttggtggttctaccagaattccaaaggtccaaaagttgttgtctgacttctttgacggtaagcaattggaaaaatctattaacccagatgaagctgttgcttacggtgctgctgttcaaggtgctatcttgactggccaatccacatctgacgaaaccaaggacttgttgttgttagatgttgctccattatctctaggtgttggtatgcaaggtgacattttcggtattgttgtcccaagaaacacaactgttccaaccatcaagagaagaaccttcacaactgtcagtgacaaccaaaccaccgttcaattcccagtctaccaaggtgaacgtgtcaactgtaaagaaaacactttgttgggtgaattcgacttgaagaacatcccaatgatgccagctggtgaaccagtcttggaagctatcttcgaagttgatgctaacggtatcttgaaggttactgccgtcgaaaagtctaccggtaagtcttctaacatcactatctccaacgctgtcggtagattgtcttctgaagaaattgaaaagatggttaaccaagccgaagagttcaaggctgctgatgaagcttttgctaagaagcacgaagctagacaaagactagaatcctacgtcgcttccatcgaacaaaccgtcactgacccagtcttgtcttctaaattgaagagaggttccaagtccaagatcgaagctgctttgtccgatgctttggctgctttgcaaatcgaagacccatccgctgatgagttgagaaaggcagaagttggtttgaagagagttgtcaccaaggccatgtcttctcgttaa

SEQ ID NO: 9258 - DNA, 1842 bp, Artificial Sequence
  Description of Artificial Sequence: Synthetic polynucleotide
atggctgaaggtgttttccaaggtgctatcggtatcgatttaggtacaacatactcttgtgttgctacttatgaatcttccgttgaaattattgccaacgaacaaggtaacagagttactccatctttcgttgccttcaccccacaggaaagattgatcggtgatgctgccaagaaccaagctgctttgaacccaagaaacactgtttttgatgctaagcgtttgattggtagaagattcgacgacgagtctgtccaaaaggacatgaagacctggcctttcaaggttatcgacgtcgatggtaacccagtcattgaagtccaatacttggaagaaaccaagactttctccccacaagaaatttccgctatggtcttgaccaagatgaaggaaattgctgaagctaagattggtaagaaggttgaaaaggctgtcattactgtcccagcttactttaacgatgcccaaagacaagctaccaaggatgccggtgccatttctggtttgaacgttttgcgtatcatcaacgaacctactgccgctgctattgcttacggtttaggtgctggtaagtccgaaaaggaaagacatgttttgattttcgatttgggtggtggtactttcgatgtttccttgttgcacattgctggtggtgtttacactgttaaatctacttccggtaacactcacttgggtggtcaagatttcgacaccaacttgttggaacacttcaaggctgaattcaagaagaagactggtttggacatctccgacgatgccagagctttgagaagattgagaactgctgctgaaagagctaagagaaccttatcttctgtcactcaaactaccgttgaagttgactctttgtttgacggtgaagatttcgaatcctctttgactagagctagatttgaagacttgaacgccgcattgttcaagtctactttggaacctgttgaacaagttttgaaggatgctaagatctctaagtctcaaatcgacgaagttgtcttggttggtggttctaccagaattccaaaggtccaaaagttgttgtctgacttctttgacggtaagcaattggaaaaatctattaacccagatgaagctgttgcttacggtgctgctgttcaaggtgctatcttgactggccaatccacatctgacgaaaccaaggacttgttgttgttagatgttgctccattatctttgggtgttggtatgcaaggtgacattttcggtattgttgtcccaagaaacacaactgttccaaccatcaagagaagaaccttcacaactgtcagtgacaaccaaaccaccgttcaattcccagtctaccaaggtgaacgtgtcaactgtaaagaaaacactttgttgggtgaattcgacttgaagaacatcccaatgatgccagctggtgaaccagtcttggaagctatcttcgaagttgatgctaacggtatcttgaaggttactgccgtcgaaaagtctaccggtaagtcttctaacatcactatctccaacgctgtcggtagattgtcttctgaagaaattgaaaagatggttaaccaagccgaagagttcaaggctgctgatgaagcttttgctaagaagcacgaagctagacaaagattagaatcctacgtcgcttccatcgaacaaaccgtcactgacccagtcttgtcttctaaattgaagagaggttccaagtccaagatcgaagctgctttgtccgatgctttggctgctttgcaaatcgaagacccatccgctgatgagttgagaaaggcagaagttggtttgaagagagttgtcaccaaggccatgtcttctcgttga

SEQ ID NO: 9259 - DNA, 600 bp, Saccharomyces cerevisiae
atgtctgcaaacgaattctactcaagtggccaacaaggtcaatataaccagcaaaacaaccaagaaagaactggtgctccaaacaacggtcaatatggtgccgacaatggtaaccccaacggtgaacgtggtttattttccactattgtaggtggcagtgccggtgcgtacgctggatctaaggtgtcgaacaaccattctaagttgagtggtgtgctgggcgccataggtggtgcattccttgccaacaagatatctgatgagcgtaaagagcataagcaacaagagcaatacggcaactcaaacttcggaggtgctcctcaaggtggacacaacaaccatcaccgtcaggacaataacaacaataacggtggatttggcggtccaggcggccctggcggtcaaggtttcggaagacaaggcccacaaggatttggaggtcctggtccacaagagtttggtggtccaggtggccaaggattcggtggtccaaatcctcaagaattcggcgggccaggtggccaaggattcggtggtccaaaccctcaggaattcgggggccaaggtcgtcaaggattcaatggcggttcacgttggtga

SEQ ID NO: 9260 - DNA, 600 bp, Artificial Sequence
  Description of Artificial Sequence: Synthetic polynucleotide
atgtctgcaaacgaattctactctagtggccaacaaggtcaatataaccagcaaaacaaccaagaaagaactggtgctccaaacaacggtcaatatggtgccgacaatggtaaccccaacggtgaacgtggtttattttccactattgtaggtggcagtgccggtgcgtacgctggatctaaggtgtctaacaaccattctaagttgagtggtgtgttaggcgccataggtggtgcattccttgccaacaagatatctgatgagcgtaaagagcataagcaacaagagcaatacggcaactccaacttcggaggtgctcctcaaggtggacacaacaaccatcaccgtcaggacaataacaacaataacggtggatttggcggtccaggcggccctggcggtcaaggtttcggaagacaaggcccacaaggatttggaggtcctggtccacaagagtttggtggtccaggtggccaaggattcggtggtccaaatcctcaagaattcggcgggccaggtggccaaggattcggtggtccaaaccctcaggaattcgggggccaaggtcgtcaaggattcaatggcggttctcgttggtga

SEQ ID NO: 9261 - DNA, 1278 bp, Saccharomyces cerevisiae
atgaaattggatacttctcatatgagatatttgacaactgatgattttcgtgtcctccaggccgttgaacaaggttctagaagtcacgaagtcgttccaactcccttgattcatcaaatctcggggatgagatcgcagtccggaacaaaccgagccattagtgatttggccaagcttagccttatttccaaaatgagaaatgtcaaatatgatggttacaggctaacttataacggtattgattatttggctttgaaaaccatgttaaacagagacactgtctattctgtcggtaacactattggtgttggtaaggaatctgacatctataaagtaagtgacaaaaatggaaaccctagagtaatgaaaattcacagattaggtagaacctcttttcattccgtcagaaataatagagattatctgaagaaatccaaccagggggcaaactggatgcatctttcacgtttggcagccaataaagaatatcagtttatgtccatgctttattctaagggtttcaaggtccctgagccattcgataactcgcgtcatatagtcgttatggagcttatcgagggttacccaatgaggagattaagaaaacataagaatatacccaagctttatagtgatctgatgtgtttcatcgttgatctagcaaatagcggacttatccattgtgattttaatgagtttaatattatgataaaggacaaactagaggatgaaaacgattgtgggttcgtagttattgattttccacaatgtatatctattcaacaccaagacgccgactattatttccaaagggatgttgactgtattcgtcgtttcttcaaaaagaaactgaagtacgaaccaaaacctgattcatcaatgctcgacactgaaggtttcggcgatggttataaatatgcgtatccagatttcaaaagggacgttaaaagaaccgacaatttggatgaattggtgcaggcttccggatttagcaaaaagcatccaggagataggggcctggaaactgccgttgaaagcatgagaaatgctgtttataattcagatgacgatatgtctaatgacgaggccgaagaagaaaatggggagggcgattattcagaggaggatgaatactatgactccgaacttgataatgaaagttctgaagatgacagtgaagatgcacaagaagaggagaacgaacgtattatagaggcgctttccagtggtgttgaaaatctaaaaatggataaactaggaaactatatactagagtag

SEQ ID NO: 9262 - DNA, 1278 bp, Artificial Sequence
  Description of Artificial Sequence: Synthetic polynucleotide
atgaaattggatacttctcatatgagatatttgacaactgatgattttcgtgtcctccaggccgttgaacaaggttctagaagtcacgaagtcgttccaactcccttgattcatcaaatctctgggatgagaagccagtccggaacaaacagagccattagtgatttggccaagcttagccttatttccaaaatgagaaatgtcaaatatgatggttacaggttaacttataacggtattgattatttggctttgaaaaccatgttaaacagagacactgtctattctgtcggtaacactattggtgttggtaaggaatctgacatctataaagtaagtgacaaaaatggaaaccctagagtaatgaaaattcacagattaggtagaacctcttttcattccgtcagaaataatagagattatttgaagaaatccaaccagggggcaaactggatgcatctttctcgtttggcagccaataaagaatatcagtttatgtccatgctttattctaagggtttcaaggtccctgagccattcgataactctcgtcatatagtcgttatggagcttatcgagggttacccaatgaggagattaagaaaacataagaatatacccaagctttatagtgatttgatgtgtttcatcgttgatttggcaaatagcggacttatccattgtgattttaatgagtttaatattatgataaaggacaaattagaggatgaaaacgattgtgggttcgtagttattgattttccacaatgtatatctattcaacaccaagacgccgactattatttccaaagggatgttgactgtattcgtcgtttcttcaaaaagaaattgaagtacgaaccaaaacctgattcttctatgctcgacactgaaggtttcggcgatggttataaatatgcgtatccagatttcaaaagggacgttaaaagaaccgacaatttggatgaattggtgcaggcttccggatttagcaaaaagcatccaggagataggggccttgaaactgccgttgaaagcatgagaaatgctgtttataattctgatgacgatatgtctaatgacgaggccgaagaagaaaatggggagggcgattattctgaggaggatgaatactatgactccgaacttgataatgaaagttctgaagatgacagtgaagatgcacaagaagaggagaacgaacgtattatagaggcgctttccagtggtgttgaaaatttgaaaatggataaattaggaaactatatattggagtga

SEQ ID NO: 9263 - DNA, 1368 bp, Saccharomyces cerevisiae
atgtcaaaattgttcttagatgaactgcctgagtctctcagccgaaagattggtaccgtggttagagtgctgccaagctcattagaaatatttgaggaattgtataaatatgcattgaatgaaaatagcaacgatagaagcggacgccataaaaagcccagaatagatgtctcttctgacctgcttaaaacagatgaaatttcggaaaccaatactattttcaaattagaaggtgtttctgtactgtcaccattaaggaaaaagcttgatttggtgttctatctttccaatgttgacgggtctcccgtaataacattactgaagggaaatgacagggaattaagcatttatcagctgaacaaaaatatcaaaatggcttcgttcttgccagtgccagaaaagcctaatctaatatacctttttatgacttacacatcgtgcgaggataacaagttttctgaacctgtggtaatgaccttgaacaaagaaaacacactaaaccagtttaaaaatttagggcttcttgattccaatgtaacagactttgaaaagtgcgtcgaatatataagaaagcaagccattttgacgggttttaaaatctccaacccattcgttaacagtacactggtggataccgatgctgaaaaaataaactcatttcacctgcagtgtcatagaggtactaaagaaggcacgctatattttttaccagatcatataatttttgggtttaaaaagcccattttgttattcgacgcttctgacatcgagtctataacctattcgtctattaccagattaacattcaatgcaagcttagtgacaaaagatggtgaaaaatacgagttttccatgatagaccaaactgaatacgctaaaattgacgactacgttaaaaggaaacaaatgaaggataagtctatgtctgaggaattgaaagctaaatccaagagcaaaggccaagcaactgatggcacagccgatcagccatctattctacaggaagctacccgtcaaatgcaagacgagaaaaaggcaggtgtgttttcagacgatgatgaagaaaatgaccaaaatttcgaagctgagagcgacctttccgatgggagtggccaagaatcctcagacggtgcagaagacggagaggaagcagaagaagatgatgaagaagacgatgaagaggaagacaaaaagggccaaagcgctttgaatagagataatagttttgcttctataaatggtcaaccagaacaggaactccaatacaaagagtttaaggagccgttagaactcgaagatattccgatagaaattgataatgatgacgatgaagatgatgaggatggatccggagtagaatacgattga

SEQ ID NO: 9264 - DNA, 1368 bp, Artificial Sequence
  Description of Artificial Sequence: Synthetic polynucleotide
atgtccaaattgttcttagatgaattacctgagtctctcagcagaaagattggtaccgtggttagagtgttaccaagctctttagaaatatttgaggaattgtataaatatgcattgaatgaaaatagcaacgatagaagcggacgccataaaaagcccagaatagatgtctcttctgacttacttaaaacagatgaaatttctgaaaccaatactattttcaaattagaaggtgtttctgtattatctccattaaggaaaaagcttgatttggtgttctatctttccaatgttgacgggtctcccgtaataacattattgaagggaaatgacagggaattaagcatttatcagttgaacaaaaatatcaaaatggcttctttcttgccagtgccagaaaagcctaatttgatatacctttttatgacttacacatcctgcgaggataacaagttttctgaacctgtggtaatgaccttgaacaaagaaaacacattgaaccagtttaaaaatttagggcttcttgattccaatgtaacagactttgaaaagtgcgtcgaatatataagaaagcaagccattttgacgggttttaaaatctccaacccattcgttaacagtacattagtggataccgatgctgaaaaaataaactcttttcacttgcagtgtcatagaggtactaaagaaggcacgctttattttttaccagatcatataatttttgggtttaaaaagcccattttgttattcgacgcttctgacatcgagtctataacctattcttctattaccagattaacattcaatgcaagcttagtgacaaaagatggtgaaaaatacgagttttccatgatagaccaaactgaatacgctaaaattgacgactacgttaaaaggaaacaaatgaaggataagtctatgtctgaggaattgaaagctaaatccaagagcaaaggccaagcaactgatggcacagccgatcagccatctattttacaggaagctacccgtcaaatgcaagacgagaaaaaggcaggtgtgttttctgacgatgatgaagaaaatgaccaaaatttcgaagctgagagcgacctttccgatgggagtggccaagaatccagtgacggtgcagaagacggagaggaagcagaagaagatgatgaagaagacgatgaagaggaagacaaaaagggccaaagcgctttgaatagagataatagttttgcttctataaatggtcaaccagaacaggaactccaatacaaagagtttaaggagccgttagaactcgaagatattccgatagaaattgataatgatgacgatgaagatgatgaggatggatccggagtagaatacgattga

SEQ ID NO: 9265 - DNA, 903 bp, Saccharomyces cerevisiae
atgcgtttgtttgaaaatagtaaagatatggaaaaccggaagagattgttacgtgccaagaaggctgccggcaataacaattgttttgaatgcaagagtgtcaatccacaatttgtttcttgcagcttcggcatatttatatgtgttaattgcgcaaaccttttgagggggatgggtacgaacatattttgtgtaaagtcaataacaatggataattttgaagaaaaggatgtcagaagagtagagaaaagcggaaataacagattcggttccttcttgtccaaaaatggtattttgcagaacgggattccattgcgtgaaaaatatgataatttgtttgctaaaagttacaagaggaggctggccaatgaagtgcgcagtaatgatattaatcggaacatgtatttgggattcaataatttccagcagtatacaaacggtgcgacgagccaaataagagataggacgttgagggaaatatctaataacagcaatgcttcggaaggggcggaatttgtactacctgagaaggtgttaggctctgacaattttcaagactgcgaaagatttcccgcttgtttgagttccgaaagaaacctggacgagaataacgttacaagtgctacgagtacgttaacaattgaaaaatttcaaaatgaccccataggaaccatttctagaagttggcagttgctttcagatgcattatacaaatcatacgaagactttaaaggctcggttgttcagccaacgattgaaaacattcaacaaaggaatttgccgaatgatatcaagagatcattcgtgcactttaacgagaagttgcatgaaacgccccatttaccctcgccagttttttcttgttttactgggggagacattctccctccagaattcaattag

SEQ ID NO: 9266 - DNA, 903 bp, Artificial Sequence
  Description of Artificial Sequence: Synthetic polynucleotide
atgcgtttgtttgaaaatagtaaagatatggaaaacagaaagagattgttacgtgccaagaaggctgccggcaataacaattgttttgaatgcaagagtgtcaatccacaatttgtttcttgcagcttcggcatatttatatgtgttaattgcgcaaaccttttgagggggatgggtacgaacatattttgtgtaaagagtataacaatggataattttgaagaaaaggatgtcagaagagtagagaaaagcggaaataacagattcggttccttcttgtccaaaaatggtattttgcagaacgggattccattgcgtgaaaaatatgataatttgtttgctaaaagttacaagaggaggttggccaatgaagtgcgcagtaatgatattaatagaaacatgtatttgggattcaataatttccagcagtatacaaacggtgcgacgagccaaataagagataggacgttgagggaaatatctaataacagcaatgcttctgaaggggcggaatttgtattacctgagaaggtgttaggctctgacaattttcaagactgcgaaagatttcccgcttgtttgagttccgaaagaaacttggacgagaataacgttacaagtgctacgagtacgttaacaattgaaaaatttcaaaatgaccccataggaaccatttctagaagttggcagttgctttctgatgcattatacaaatcttacgaagactttaaaggctctgttgttcagccaacgattgaaaacattcaacaaaggaatttgccgaatgatatcaagagatctttcgtgcactttaacgagaagttgcatgaaacgccccatttaccctctccagttttttcttgttttactgggggagacattctccctccagaattcaattga

SEQ ID NO: 9267 - DNA, 879 bp, Saccharomyces cerevisiae
atgaatacagcaaacactttggacggcaaattcgttactgagggttcttggagacctgatttatttaagggtaaagtggcatttgtcactggtggagctggcacgatatgtcgggtacagacagaagccttggttcttcttggctgtaaggcagctattgtcggcagggaccaagaaagaacagaacaggcagcaaaaggtatttcgcagttagcaaaggacaaagatgcagtcttggctattgcaaacgtcgatgttcgcaattttgaacaagtggagaatgcggttaaaaagaccgtagagaagttcggtaagatcgatttcgtcattgccggtgctgctggaaattttgtgtgcgattttgcgaacctctctccaaacgccttcaaatctgttgttgacatagatttactaggaagttttaataccgccaaggcatgcttgaaggagttaaaaaagtcaaaaggttccatccttttcgtctctgccactttccattattatggtgtgccgtttcaaggacatgtgggcgctgctaaagcgggaatagacgcattggcaaagaatttagcggttgagttggggcctctgggtatacgttcgaattgcattgctccaggtgctatcgataatacggaaggcttgaagagattagccggcaaaaaatataaggaaaaggccttggcaaagataccattacaaaggcttggatctacacgggatatagccgaatctactgtttatattttttcacccgccgcatcgtatgtcaccggtaccgtcttagttgttgacggtggtatgtggcatttagggacctattttggacatgagttgtatccagaagccttaataaagagtatgacatctaaattataa

SEQ ID NO: 9268 - DNA, 879 bp, Artificial Sequence
  Description of Artificial Sequence: Synthetic polynucleotide
atgaatacagcaaacactttggacggcaaattcgttactgagggttcttggagacctgatttatttaagggtaaagtggcatttgtcactggtggagctggcacgatatgtagagtacagacagaagccttggttcttcttggctgtaaggcagctattgtcggcagggaccaagaaagaacagaacaggcagcaaaaggtatttctcagttagcaaaggacaaagatgcagtcttggctattgcaaacgtcgatgttcgcaattttgaacaagtggagaatgcggttaaaaagaccgtagagaagttcggtaagatcgatttcgtcattgccggtgctgctggaaattttgtgtgcgattttgcgaacctctctccaaacgccttcaaatctgttgttgacatagatttattaggaagttttaataccgccaaggcatgcttgaaggagttaaaaaagagtaaaggttccatccttttcgtctctgccactttccattattatggtgtgccgtttcaaggacatgtgggcgctgctaaagcgggaatagacgcattggcaaagaatttagcggttgagttggggcctttaggtatacgttccaattgcattgctccaggtgctatcgataatacggaaggcttgaagagattagccggcaaaaaatataaggaaaaggccttggcaaagataccattacaaaggcttggatctacaagagatatagccgaatctactgtttatattttttctcccgccgcaagttatgtcaccggtaccgtcttagttgttgacggtggtatgtggcatttagggacctattttggacatgagttgtatccagaagccttaataaagagtatgacatctaaattatga

SEQ ID NO: 9269 - DNA, 2577 bp, Saccharomyces cerevisiae
atgtcattaccgggtacacctactacatctccgaccccgatggatgaggatactgaacaagccgtttcggttaatactgaacccaaaagagtaaaggtttacattttagagaacaacgaatggaaagacacaggtacagggttttgtataggggaggtggacgaaggtaagttcgcatatcttgttgtctcagatgaagactccccaactgaaactttactaaaatccaaactagaaggaaatattgaatatcaacggcaggaggaaacgcttattgtttggaaggatttaggggggaaagatatagccttgagttttgaagaaagtatgggatgtgacaccttatgtgaattcattgttcacgtccaaaggaacatagagtcaaatatttctttagtcaccgtaaaatccagcgacaacggactcgggtctgttcacgacattataacgggccctgtgaccttgccctccaacgaccagcaacagaatagtcaaactttactagaagctctaaagattttgaatgaaaatacttctttcgattttttgaaaaacgaaaccattgagtttatcctccagtcaaattacattgatacactgatttctcatttccacaaagcagaagaagaaaagataccgaaggatttatttttgctaagtaacatcatcaaaactttgatactttacaataaaagagacatattggagtcaatggtggaggacgataggattatgggaatagttgggattttagaatacgatactgaataccctacatcaaaggcaaatcataggaaatatttaggatcaaaaggtcccaatttcaaagaggttattccattggaaaatgaggacttaaaaataataatgaaaaaatgttttcgcttacagttcttaaaagacgtggtattagtacgatttttagacgatcataatttcaacttaatctcggaaattgtcatggacctggaaacgtgtataatcgactttcttcaagtagggacgtttttggacagactaatagagctttatgataccaaaacccttccagaaagctcttcagagaaggagaagtttgtacaaaaacgaaaagacgggattagattgttgcaacagtgtgttcaaatgtcaatcaatttagatgcggttgaccgttctaagttctataaaacacttgttcgaaagggtctattcaaagttttagattatgcatttcacatggagacggatagtaatgttaggattttagctacggatactatcattactataatcgaacacgatatcttgttaattcacaacgttcagaatgaagattctttcaaacggcaacataaatcagcgcccgatgacaagtcttcccatcggaaatatccgcaggattacagctccagtactgattccaagttgttattgatactttcaaccattcttctgtccgacaggagtcccggattgcgagaacaagttgtgcaagcgctaaatactttgcttcaccctgaaggatgtgtgggtaatggagaaggttcatatgatcttatgggcagatcaaattatgaagctaagaacacatctgaagatttcccaagtttcagttatggtttaaactcggattcaatcaatttaaataactatcactatagcagcgatgaaatgaataatctagagccagaatctgaatctgaatttcaagtaatggaatattttgcaaatttctataataaaatcgcacccatactgtttggtccattaatcaagaaggatatcacaacggaaatggcagaaatagatgggcaaatagaaaaggttacaaaagacgatcttttgttaattcatttagtgaaattggtatcatttgtttgcactgagcatgatcgtgtcttatccagaagattcatattagaaaacggtatactagattctgttagcaaacttatcggcggtaatcatatgatgcagctaaggttaacagcagtaagatgcattaaaaaccttatgtgtctcgatgataaatactatcatcgatatatgatttcaaaaaatttatatgcgccggtttttaaactcttccaggagaacatagataagaataatcttgcaaattcatgcattcaagattttttccgcattattataacagaatgtagagcttatcaaagtgatggccataacagaaaggaaaaaaccaatggttcttatgatggcaacggtaatgacgtcaaaacgaacgtgaacaacaataggacaaactttaccattttaaacaaatacttagttcaaacatatggtgatgtcttgagaaaagctactgatatccctttcatccaggatatgctagaaaccggggaagaaaaccaacccgatcattctagctttgaaaatagcattgaaggggggaatgacatttctgtaaatatgtcaacagatggatttgcttcgaatcatttagaagatattgacattaaaaacgtcaaaagattacattctgagattgaacactttgaaaatgacccccattattctggtgatcagttagcatttaaaaaaagcgttgaccaaatgaatgcaagtacttga

SEQ ID NO: 9270 - DNA, 2577 bp, Artificial Sequence
  Description of Artificial Sequence: Synthetic polynucleotide
atgtctttaccgggtacacctactacatctccgaccccgatggatgaggatactgaacaagccgtttctgttaatactgaacccaaaagagtaaaggtttacattttagagaacaacgaatggaaagacacaggtacagggttttgtataggggaggtggacgaaggtaagttcgcatatcttgttgtctctgatgaagactccccaactgaaactttattgaaatccaaattagaaggaaatattgaatatcaaagacaggaggaaacgcttattgtttggaaggatttaggggggaaagatatagccttgagttttgaagaaagtatgggatgtgacaccttatgtgaattcattgttcacgtccaaaggaacatagagagcaatatttctttagtcaccgtaaaatccagcgacaacggactcgggtctgttcacgacattataacgggccctgtgaccttgccctccaacgaccagcaacagaatagtcaaactttattggaagctttgaagattttgaatgaaaatacttctttcgattttttgaaaaacgaaaccattgagtttatcctccagtctaattacattgatacattaatttctcatttccacaaagcagaagaagaaaagataccgaaggatttatttttgttaagtaacatcatcaaaactttgatactttacaataaaagagacatattggagtccatggtggaggacgataggattatgggaatagttgggattttagaatacgatactgaataccctacatccaaggcaaatcataggaaatatttaggatctaaaggtcccaatttcaaagaggttattccattggaaaatgaggacttaaaaataataatgaaaaaatgttttcgcttacagttcttaaaagacgtggtattagtaagatttttagacgatcataatttcaacttaatcagtgaaattgtcatggacttggaaacgtgtataatcgactttcttcaagtagggacgtttttggacagattaatagagctttatgataccaaaacccttccagaaagctcttctgagaaggagaagtttgtacaaaaaagaaaagacgggattagattgttgcaacagtgtgttcaaatgtccatcaatttagatgcggttgaccgttctaagttctataaaacacttgttagaaagggtcttttcaaagttttagattatgcatttcacatggagacggatagtaatgttaggattttagctacggatactatcattactataatcgaacacgatatcttgttaattcacaacgttcagaatgaagattctttcaaaagacaacataaatctgcgcccgatgacaagtcttcccatagaaaatatccgcaggattacagctccagtactgattccaagttgttattgatactttctaccattcttctttccgacaggagtcccggattgagagaacaagttgtgcaagcgttgaatactttgcttcaccctgaaggatgtgtgggtaatggagaaggttcttatgatcttatgggcagatctaattatgaagctaagaacacatctgaagatttcccaagtttcagttatggtttaaacagtgattctatcaatttaaataactatcactatagcagcgatgaaatgaataatttggagccagaatctgaatctgaatttcaagtaatggaatattttgcaaatttctataataaaatcgcacccatattgtttggtccattaatcaagaaggatatcacaacggaaatggcagaaatagatgggcaaatagaaaaggttacaaaagacgatcttttgttaattcatttagtgaaattggtatcctttgtttgcactgagcatgatcgtgtcttatccagaagattcatattagaaaacggtatattggattctgttagcaaacttatcggcggtaatcatatgatgcagttgaggttaacagcagtaagatgcattaaaaaccttatgtgtctcgatgataaatactatcatcgttatatgatttccaaaaatttatatgcgccggtttttaaactcttccaggagaacatagataagaataatcttgcaaattcttgcattcaagattttttccgcattattataacagaatgtagagcttatcaaagtgatggccataacagaaaggaaaaaaccaatggttcttatgatggcaacggtaatgacgtcaaaacgaacgtgaacaacaataggacaaactttaccattttaaacaaatacttagttcaaacatatggtgatgtcttgagaaaagctactgatatccctttcatccaggatatgttggaaaccggggaagaaaaccaacccgatcattctagctttgaaaatagcattgaaggggggaatgacatttctgtaaatatgtctacagatggatttgcttctaatcatttagaagatattgacattaaaaacgtcaaaagattacattctgagattgaacactttgaaaatgacccccattattctggtgatcagttagcatttaaaaaaagcgttgaccaaatgaatgcaagtacttga

SEQ ID NO: 9271 - DNA, 741 bp, Saccharomyces cerevisiae
atgtctacgttgaaagttgtttcatcaaagcttgcagctgaaatcgacaaagaattgatgggtcctcaaatcggattcactctacaacagctaatggagttagctgggtttagtgtcgcgcaggctgtatgtcgccagtttccactgagaggcaagacagaaacggaaaagggcaaacatgtatttgttattgctgggccaggtaacaatggcggggatggtctcgtgtgcgcaagacatttgaagctttttggttacaaccctgttgttttctaccccaagagaagcgagcgcactgaattctacaaacagctggttcaccaattgaattttttcaaagttcctgtcctgtctcaagatgagggaaactggctggaatatttgaagccggaaaagaccttatgcattgtagatgcaatatttggttttagtttcaagcctcccatgagagagccattcaagggcattgtcgaagaactgtgcaaagtgcaaaacattatcccgattgtttcggtggacgtccccacaggttgggacgttgacaaaggtccgatctctcagccctcaattaatcctgctgttcttgtatctctgactgtccccaagccatgcagctctcacataagggagaatcaaacaactcattacgtggggggaagattcattcctcgagatttcgccaataaattcggctttgagccatttggatatgaatccacagaccaaatattgaaactctga

SEQ ID NO: 9272 - DNA, 741 bp, Artificial Sequence
  Description of Artificial Sequence: Synthetic polynucleotide
atgtctacgttgaaagttgtttcttccaagcttgcagctgaaatcgacaaagaattgatgggtcctcaaatcggattcactttacaacagttgatggagttagctgggtttagtgtcgcgcaggctgtatgtcgccagtttccattgagaggcaagacagaaacggaaaagggcaaacatgtatttgttattgctgggccaggtaacaatggcggggatggtctcgtgtgcgcaagacatttgaagctttttggttacaaccctgttgttttctaccccaagagaagcgagcgcactgaattctacaaacagttggttcaccaattgaattttttcaaagttcctgtcttgtctcaagatgagggaaactggttagaatatttgaagccggaaaagaccttatgcattgtagatgcaatatttggttttagtttcaagcctcccatgagagagccattcaagggcattgtcgaagaattgtgcaaagtgcaaaacattatcccgattgtttctgtggacgtccccacaggttgggacgttgacaaaggtccgatctctcagccctctattaatcctgctgttcttgtatctttgactgtccccaagccatgcagctctcacataagggagaatcaaacaactcattacgtggggggaagattcattcctagagatttcgccaataaattcggctttgagccatttggatatgaatccacagaccaaatattgaaactctga

SEQ ID NO: 9273 - DNA, 1605 bp, Saccharomyces cerevisiae
atgcatcaccaaactaagttagatgtattcataatcagagcttataatttactgtctaacgagtctgtcattagtggtgcttccttgcagagtgttacaaactcgccacagacgacaacgaacacgccctcaggtatggttaacggggcggttggaacagggatagctaatccaacagggttgatggggtctgatagcacacctaacatcgatgagattataactagcactggtagtaatgctctgacgaaaaccaactcagatagcgctaatggtacgccgaatggtaattcaagttctacctcagccattagcaatgcaagcaatcctgccactactggtaataatgcgagctctagtgccacctcaaatggaatatatacgcaagcgcaatattctcaacttttcgccaaaatatcaaaactatataacgctacactatcatctgggtcaattgacgatagatcaacatcaccaaaatcggcaatcgaactatatcaaagatttcaacagatgattaaggaactagagctgagttttgacgcaagtccttacgcaaaatacttccgccggttggatggaaggctttggcaaataaagacagactcagaattagaaaacgatgaattgtggcgattagtctcaatgagcatatttacagtattcgatcctcagaccggccaaattctaactcaaggacgcaggaagggaaactccttaaatacatcaactaaaggctccccatcagatttacagggaataaacaacgggaacaataatgggaacaatggtaatattggaaatgggagtaatattaagaactatggaaataaaaacatgccaaacaaccgaacgaaaaaaagaggcaccagggtggctaaaaatgctaaaaatgggaaaaacaataaaaatagtaataaagagagaaacggcattacagatacgagtgcattcagtaatacaacaataagcaacccaggtaccaatatgctttttgatccatcattgtctcaacagttacaaaaacgactgcaaacgctatcacaagatgtcaattctcgttcgttgacaggatattatacacagccaaccagtcctggctcaggaggatttgaatttggtttgagtcatgcagatctgaaccccaatgcttccagtaataccatgggctataatacaatgtccaataatggatcccattcgtggaaacgaaggtcactgggatcgttagatgttaatacgctggatgacgaagcggtggaagaacttttgcaactgacaaatacgagtaagaggcagaggccgatgacaactgcagcagagggtgcgttaataaatgatggtccggacactaatttaaacgcgaataacacccaaatgaaagttgatttaaatccttcaaacagcatgggacctatagatacagaagccgtgatacgcccattgaaagaagcttatgacgcaatcatttctgaaaaaggccaaagaattgtgcaattagaaagagaattggaattacagcgccaagagacgcagtggttaaggaaaatgttaattgaagacatgggttgtgttagaagtatgttaagggatttacaaagatga

SEQ ID NO: 9274 - DNA, 1605 bp, Artificial Sequence
  Description of Artificial Sequence: Synthetic polynucleotide
atgcatcaccaaactaagttagatgtattcataatcagagcttataatttattatctaacgagtctgtcattagtggtgcttccttgcagagtgttacaaactctccacagacgacaacgaacacgccctctggtatggttaacggggcggttggaacagggatagctaatccaacagggttgatggggtctgatagcacacctaacatcgatgagattataactagcactggtagtaatgctttgacgaaaaccaacagtgatagcgctaatggtacgccgaatggtaatagtagttctacctctgccattagcaatgcaagcaatcctgccactactggtaataatgcgagctctagtgccacctctaatggaatatatacgcaagcgcaatattctcaacttttcgccaaaatatccaaactttataacgctacattatcttctgggtctattgacgatagatctacatctccaaaatctgcaatcgaattgtatcaaagatttcaacagatgattaaggaattagagttgagttttgacgcaagtccttacgcaaaatacttccgcagattggatggaaggctttggcaaataaagacagactctgaattagaaaacgatgaattgtggagattagtctccatgagcatatttacagtattcgatcctcagaccggccaaattttgactcaaggacgcaggaagggaaactccttaaatacatctactaaaggctccccaagtgatttacagggaataaacaacgggaacaataatgggaacaatggtaatattggaaatgggagtaatattaagaactatggaaataaaaacatgccaaacaacagaacgaaaaaaagaggcaccagggtggctaaaaatgctaaaaatgggaaaaacaataaaaatagtaataaagagagaaacggcattacagatacgagtgcattcagtaatacaacaataagcaacccaggtaccaatatgctttttgatccatctttgtctcaacagttacaaaaaagattacaaacgttatctcaagatgtcaattctcgttctttgacaggatattatacacagccaaccagtcctggcagtggaggatttgaatttggtttgagtcatgcagatttgaaccccaatgcttccagtaataccatgggctataatacaatgtccaataatggatcccattcttggaaaagaaggtccttgggatctttagatgttaatacgttagatgacgaagcggtggaagaacttttgcaattgacaaatacgagtaagaggcagaggccgatgacaactgcagcagagggtgcgttaataaatgatggtccggacactaatttaaacgcgaataacacccaaatgaaagttgatttaaatccttccaacagcatgggacctatagatacagaagccgtgatacgcccattgaaagaagcttatgacgcaatcatttctgaaaaaggccaaagaattgtgcaattagaaagagaattggaattacagcgccaagagacgcagtggttaaggaaaatgttaattgaagacatgggttgtgttagaagtatgttaagggatttacaaagatga

SEQ ID NO: 9275 - DNA, 1986 bp, Saccharomyces cerevisiae
atgcaaagttcagtttattttgaccaaacagggtcatttgcgtccagtagcgacaacgttgtgtctagtaccaccaacacacacaacatttctcccagtcatcgttccagtttgaatctgaacactacttctcatccccacgaagcgtcgggtagaggaagcgcaagtggggagttgtatttgaatgacacaaactcacccttagcgatatcttctatgctaaacacacttgcccttggaagtatgccccaagacattgcaagcagcaacattagcaatcacgataacaacattaaggggagctacagcctaaaattgtcaaatgtagccaaggatattactctcagagaatgctatgcaatcttcgctcttgctgaaggtgtgaaaagtatagaattacagaaaaaaaactcttcatcaagcatcacttctgcctcattagaagacgagaatgatatttttatcattgccagatttgagttattgaatctagctattaattatgccgttattttgaattcgaaaaatgaactctttggacccagttttcccaataaaacaaccgttgaaataatagatgacacaacaaaaaacttggtttcattcccatcatctgccattttcaatgacacctcaagattgaataaatcgaactcgggaatgaaaaggccaagtctgttatcacaaagatccaggttttcattcagcgatccattttccaatgattctcctttaagccaacagcaatctcaacagcagcagcaacagccacaacagccacaacaacactctacgcaaaaacattcaccacaacaatgtaatcaacaacaagtgaattcttcaataccgttatcttctcaaggccaggttattgggttacattctaaccattcacatcaagatttgtctgtggaatcaacaattcaaacatctgatattggcaaatctttccttttgagagataacactgaaattaatgaaaagatatggggcacaagcggtataccttccagcatcaacggttacatgagcactccccaaccttctacgccaactttagaatggggaaatacttctgcatcccaacatggttcttcgttctttttaccctctgcagcatcgacagccattgcacctacgaatagcaacaccagtgccaatgcaaacgccagctccaacaatggagccagcaataatggtgctaaccaggcactctctgccagctcgcaacaaccaatgatgcaaattggtaacacgattaacacttccctaacctcttcaaattcattgcctccatacggtttaatgtcttctcaatcgcagcacatttcaaatatggtaaacacctctgatatgaacattacacctcaaaaacagaacagatttatgcaacaaccccaaccagagcatatgtatcctgtgaatcaaagtaacactcctcaaaaagtaccgcccgcaagattaagttcaagtagaaattcacacaagaataactctactacctcattatcctcaaatattactggatctgcctcgatttctcaggctgatttgtcactactagccagaattccacctcctgccaaccctgctgatcaaaatccaccttgtaataccctttatgtagggaatttaccctccgacgctactgagcaagaactaagacagctattttctggtcaagaaggcttcagaagactatcattcaggaataagaataccacatctaatggtcatagtcacggaccgatgtgcttcgttgaattcgatgatgtcagttttgcaaccagagcgttagctgaattgtatggtagacagttacctcgctccactgtgagcagtaagggaggtatcagattaagcttttcaaaaaacccactgggtgttaggggcccaaacagcagaagaggaggcagtggtaacccaaatcctaatgtaaatatgctttccagttacaattctaatgttggtcatataaaaaactaa

SEQ ID NO: 9276 - DNA, 1986 bp, Artificial Sequence
  Description of Artificial Sequence: Synthetic polynucleotide
atgcaaagttctgtttattttgaccaaacagggtcttttgcgtccagtagcgacaacgttgtgtctagtaccaccaacacacacaacatttctcccagtcatcgttccagtttgaatttgaacactacttctcatccccacgaagcgtctggtagaggaagcgcaagtggggagttgtatttgaatgacacaaactctcccttagcgatatcttctatgttgaacacacttgcccttggaagtatgccccaagacattgcaagcagcaacattagcaatcacgataacaacattaaggggagctacagcttgaaattgagcaatgtagccaaggatattactctcagagaatgctatgcaatcttcgctcttgctgaaggtgtgaaaagtatagaattacagaaaaaaaactcttcttctagcatcacttctgcctctttagaagacgagaatgatatttttatcattgccagatttgagttattgaatttggctattaattatgccgttattttgaattctaaaaatgaactctttggacccagttttcccaataaaacaaccgttgaaataatagatgacacaacaaaaaacttggtttctttcccatcttctgccattttcaatgacacctccagattgaataaaagtaactctggaatgaaaaggccaagtttgttatctcaaagatccaggttttctttcagcgatccattttccaatgattctcctttaagccaacagcaatctcaacagcagcagcaacagccacaacagccacaacaacactctacgcaaaaacattctccacaacaatgtaatcaacaacaagtgaattcttctataccgttatcttctcaaggccaggttattgggttacattctaaccattctcatcaagatttgtctgtggaatctacaattcaaacatctgatattggcaaatctttccttttgagagataacactgaaattaatgaaaagatatggggcacaagcggtataccttccagcatcaacggttacatgagcactccccaaccttctacgccaactttagaatggggaaatacttctgcatcccaacatggttcttctttctttttaccctctgcagcaagcacagccattgcacctacgaatagcaacaccagtgccaatgcaaacgccagctccaacaatggagccagcaataatggtgctaaccaggcactctctgccagctctcaacaaccaatgatgcaaattggtaacacgattaacacttccttgacctcttccaattctttgcctccatacggtttaatgtcttctcaatctcagcacatttctaatatggtaaacacctctgatatgaacattacacctcaaaaacagaacagatttatgcaacaaccccaaccagagcatatgtatcctgtgaatcaaagtaacactcctcaaaaagtaccgcccgcaagattaagtagtagtagaaattctcacaagaataactctactaccagtttatcctctaatattactggatctgcctctatttctcaggctgatttgtccttattagccagaattccacctcctgccaaccctgctgatcaaaatccaccttgtaataccctttatgtagggaatttaccctccgacgctactgagcaagaattgagacagttattttctggtcaagaaggcttcagaagattatctttcaggaataagaataccacatctaatggtcatagtcacggaccgatgtgcttcgttgaattcgatgatgtcagttttgcaaccagagcgttagctgaattgtatggtagacagttacctcgctccactgtgagcagtaagggaggtatcagattaagcttttccaaaaacccattgggtgttaggggcccaaacagcagaagaggaggcagtggtaacccaaatcctaatgtaaatatgctttccagttacaattctaatgttggtcatataaaaaactga

SEQ ID NO: 9277 - DNA, 897 bp, Saccharomyces cerevisiae
atgatgaataaagtagatcaaatcatcggttacaaaaagtacgaagtgaaactaccaaaagatcgacaagtaaagaaaaataaatcaaaaggtggaaatgttgatcaaatagatactaagagggaaaaggataaaatgagagcttttggtgaagaaaggaaaaagttcttagataaaatggctaaaaacaaaaaaaaaaatacaagtagaaaagatagagagaagccaaaagaagtagaaaaagaaaactacaaaagagaagacaaaaggctaaaagaacagaaaaaattatcactggcaaaagaatttcgtttcaaagaaccgaattcagaagccattaatcagaacacagcagctgaaaatggtaaacctaaaccacagactggactagattttgacatagaccatcaaaccgtgtccaagatcatgatagatcaggctattcaaacatctagtcctcttaatgtccaactcacggaacttttcaatgataacgtcctcgacgtctcgaaagatagtcagtttgtccttcaagacatggagttcacctcctgggaacgacgctggtcaaactgcagcacgaccagtaatgcgactacggtctcatcagttcctgatcccaaatataatatcaactacaacgacataacctccttcaattcagtagcgctaattaccgaagatcttaacatatctgcatcatctaatggtctgcatgagagaggtaaaaagctactgcagcaagagatggaatactcaaacaaggtcaaaaatgtcaccatcgggcttgaaagattgtgtatggatgaaaaaccagtcccagatgcaggaataaccatgcaacaagcgtcgcgctggtcagaattccccacttgttgcgatcaagctgctatttag

SEQ ID NO: 9278 - DNA, 897 bp, Artificial Sequence
  Description of Artificial Sequence: Synthetic polynucleotide
atgatgaataaagtagatcaaatcatcggttacaaaaagtacgaagtgaaattaccaaaagatagacaagtaaagaaaaataaatctaaaggtggaaatgttgatcaaatagatactaagagggaaaaggataaaatgagagcttttggtgaagaaaggaaaaagttcttagataaaatggctaaaaacaaaaaaaaaaatacaagtagaaaagatagagagaagccaaaagaagtagaaaaagaaaactacaaaagagaagacaaaaggttgaaagaacagaaaaaattatctttggcaaaagaatttcgtttcaaagaaccgaattctgaagccattaatcagaacacagcagctgaaaatggtaaacctaaaccacagactggattagattttgacatagaccatcaaaccgtgtccaagatcatgatagatcaggctattcaaacatctagtcctcttaatgtccaactcacggaacttttcaatgataacgtcctcgacgtctccaaagatagtcagtttgtccttcaagacatggagttcacctcctgggaaaggcgctggagcaactgcagcacgaccagtaatgcgactacggtcagttctgttcctgatcccaaatataatatcaactacaacgacataacctccttcaattctgtagcgttaattaccgaagatcttaacatatctgcatcttctaatggtttgcatgagagaggtaaaaagttattgcagcaagagatggaatactctaacaaggtcaaaaatgtcaccatcgggcttgaaagattgtgtatggatgaaaaaccagtcccagatgcaggaataaccatgcaacaagcgtcccgctggtctgaattccccacttgttgcgatcaagctgctatttga

SEQ ID NO: 9279 - DNA, 786 bp, Saccharomyces cerevisiae
atgctgggtttgggccaatctgctcaagcatatgcaagtgatgatgctctcaatatgaaccaggcaaaggataaaacgtacagcgttccagggtgtggcagggcaagcgacctcaaatatcctcatcgtgacggacactcttcgtctcacgaacagcgctctggaattttaccaactgaatgcccaggccctactttaaacaccggtgccggtagcatcggtatcccgggatgtggcaaagtcacaaatagagtggtcagtgactataacaaaaacgctaggtctacgctagccaattttgatagtagtaaaatgaccgaggcaagaatgaacagcaagaacgtgccgattggttgtcaagacacctctgatccgcacttcaatgggcctatcgaccaacatgttcccggtgcaggttcacctcaaagtcaacctcatcacatcgacgcgtggaacagcgtttcttctcgccgtgccgataataacaaccaagacatgatggacccccaaacggcttcctcagacaggtacaatgagaaaatgatgagagaagaaaatagcggcgtctctgcttcttcttacaccactaaagtgcagggatatcccgcaagtattccatcattcaatcaggaaactgaggaaaaggaaacctacgcctacggtgtgggtgatcggcacaatgtcccaagaaaccaaattatggatgagactaatccttcggctaacgttctaaacgctactgatcatagtatttcgcaccctgagaataaggtcttgcataagtag

SEQ ID NO: 9280 - DNA, 786 bp, Artificial Sequence
  Description of Artificial Sequence: Synthetic polynucleotide
atgttgggtttgggccaatctgctcaagcatatgcaagtgatgatgctctcaatatgaaccaggcaaaggataaaacgtacagcgttccagggtgtggcagggcaagcgacctcaaatatcctcatcgtgacggacactcttcttctcacgaacagcgctctggaattttaccaactgaatgcccaggccctactttaaacaccggtgccggtagcatcggtatcccgggatgtggcaaagtcacaaatagagtggtcagtgactataacaaaaacgctaggtctacgttggccaattttgatagtagtaaaatgaccgaggcaagaatgaacagcaagaacgtgccgattggttgtcaagacacctctgatccgcacttcaatgggcctatcgaccaacatgttcccggtgcaggttctcctcaaagtcaacctcatcacatcgacgcgtggaacagcgtttcttctcgccgtgccgataataacaaccaagacatgatggacccccaaacggcttccagtgacaggtacaatgagaaaatgatgagagaagaaaatagcggcgtctctgcttcttcttacaccactaaagtgcagggatatcccgcaagtattccatctttcaatcaggaaactgaggaaaaggaaacctacgcctacggtgtgggtgatcgtcacaatgtcccaagaaaccaaattatggatgagactaatccttctgctaacgttttgaacgctactgatcatagtatttctcaccctgagaataaggtcttgcataagtga

SEQ ID NO: 9281 - DNA, 906 bp, Saccharomyces cerevisiae
atgtcctacaaaaagtttgtgtactttattaaccttttctttctactaggggctacattgttgactttttttctgatactagcaggtggcaggaccacaggagtgttgaagaatttttattggtttcaggcatccacttcgggctttaactcggcgccctccgtaaccagatggtacaattataactggtgcggctgggaaagccgcggaatagcagtcaactgctcttctaagatggcagctcagccgttttcaccaagggacaactttggcagttcccccctcatgccctcaacttttttaaacaacagaaatgcctactattatctttcaagagtgggctgggcaatgcttctaatcgggcttttctttttgttaatcacgttagtttcggttattgccagtttaatcagatacaatagacgtaccgccgctctggcaactgcaatgagctggatcacgcttttcttcataaccctatccgcttgtctgtacacaggatgttacgctaaggcagtaaaggcgtttcaccatgagaatcgtgatgctagactaggtcccaagaattttgggcttatttggaccacagtatttttgttaattgtaaacgccatttgctgtactatcatggtggctactcataaaagaaacgagtacatctatgaccgcagtttcgcttctaccaagacagtggactcacaaactccaactccagttccaacaaatggaggaataccttcctcggtgcctgtaactgaggtccaacaatctcaatcccaccagaatcataggttctttaagaaattgagaacgaaaaagagaactgtgactagcgcaggcgatgaaccagaccgggttcaagaggaacgcgtctatactgaacagaatgttcctgttgtatcatag

SEQ ID NO: 9282 - DNA, 906 bp, Artificial Sequence
  Description of Artificial Sequence: Synthetic polynucleotide
atgtcctacaaaaagtttgtgtactttattaaccttttctttttattaggggctacattgttgactttttttttaatattggcaggtggcaggaccacaggagtgttgaagaatttttattggtttcaggcatccacttctggctttaactctgcgccctccgtaaccagatggtacaattataactggtgcggctgggaaagccgcggaatagcagtcaactgctcttctaagatggcagctcagccgttttctccaagggacaactttggcagttcccccctcatgccctccacttttttaaacaacagaaatgcctactattatctttctagagtgggctgggcaatgcttttgatcgggcttttctttttgttaatcacgttagtttctgttattgccagtttaatcagatacaatagacgtaccgccgctttggcaactgcaatgagctggatcacgcttttcttcataaccttatccgcttgtctttacacaggatgttacgctaaggcagtaaaggcgtttcaccatgagaatcgtgatgctagattaggtcccaagaattttgggcttatttggaccacagtatttttgttaattgtaaacgccatttgctgtactatcatggtggctactcataaaagaaacgagtacatctatgaccgcagtttcgcttctaccaagacagtggactctcaaactccaactccagttccaacaaatggaggaataccttcctctgtgcctgtaactgaggtccaacaatctcaatcccaccagaatcataggttctttaagaaattgagaacgaaaaagagaactgtgactagcgcaggcgatgaaccagacagagttcaagaggaacgcgtctatactgaacagaatgttcctgttgtatcttga

SEQ ID NO: 9283 - DNA, 1677 bp, Saccharomyces cerevisiae
atgggacctccgaaaaatttcaagcatttcagtaagagtaataaacacaaaaaggagcagaaagccctgattactcaagaagatttctacctggcagcgatcgactgtgaagaacaagcagaccgttggttgctatcggacataaagaaatgtttgcggttctatctaaaggctctagagcactacgaaaatggtctgactgctttagattccacgcaggaagggaaatataatatctattataatgaaacaaggctttttttgcaaatttatacagattatctggccaataacggctacattaatatcttgcaatacgtgaaaatggatgatatgcctgatctttccaatttggtgttatctctgccacagattatccaacggtttgaaattgtttatgagactttcccagaacagagaacttgggatcttcaattcaatctattgacatgttatttgactctcatagagtccctagacgacaccgtttcgcccaccgttgcaatggaaggtgcagacattttaactttgacaaacaagtatattgaaatctttcaacacctggttaattatctgttacaagaactacaaaactggagtgaaaatgcagaacaagattccgatgacacagatacggaattgcaaagagatactttggatgaagacgcgatgcaagttaccagggacggaagtggtatccgaaccaatggacctgtacaacctccagcagaagttatggacgtttctgaacaagtgactccgtcttcacttaccgaagtactcgccaactctttaaagttcaaccatgctttgatggaattggttattgagtcgaaaatatctattgaaaaaaatgtcgaaacgaaaatcttgaatcctattcagattaatttcttggaagatacaaccaataaattctatttacaactacgcgacattatagactccatttccgccgccattccattagatttgaaggaaatcggtttagccaagactttaattgaaggtttgaacatcattagctccggaaccttcgagtcattgcaagattttgttctgcaaaccgtctcctttaccgatctgcttgatgaaaaagatgtacagggtaagattgatctttcgttgattagagttgatatcgttgaatttgccattctatgtttaaacgattattcttcagatgcatcttggaaactctctgggttattgaccaaagttcttacagaggctagaactttattaacagactatagaaatcaaatcttgtttctgaaaaatcagacattgaacgaacaattgagtcacgtagtttttcaactttgtgatgtcttagtaaattcctccgataatgaactgagaaggtacgctataaaagaatcaactgaaaagtcacaaaaaacccccgggggagcgcatactttaaacatattgatgaaaaacgctaacgtttttctgaataatgctgtcgctatctcatcaaaacagtgcgggttacaagaaacgattattgataaactgaagaggaactatatccataatcaagccaaggaaagactacttttcttacagaggctggaacagaagtcaaatgaggatgacggtacttctgcttcgcctaccgcaatgacgttcgatatgccaccagaacaccctttttatagccactatcggtag

SEQ ID NO: 9284 - DNA, 1677 bp, Artificial Sequence
  Description of Artificial Sequence: Synthetic polynucleotide
atgggacctccgaaaaatttcaagcatttcagtaagagtaataaacacaaaaaggagcagaaagccttaattactcaagaagatttctacttggcagcgatcgactgtgaagaacaagcagaccgttggttgctttctgacataaagaaatgtttgagattctatttgaaggctttggagcactacgaaaatggtttgactgctttagattccacgcaggaagggaaatataatatctattataatgaaacaaggctttttttgcaaatttatacagattatttggccaataacggctacattaatatcttgcaatacgtgaaaatggatgatatgcctgatctttccaatttggtgttatctttaccacagattatccaaagatttgaaattgtttatgagactttcccagaacagagaacttgggatcttcaattcaatttattgacatgttatttgactctcatagagtccttggacgacaccgtttctcccaccgttgcaatggaaggtgcagacattttaactttgacaaacaagtatattgaaatctttcaacacttggttaattatcttttacaagaattacaaaactggagtgaaaatgcagaacaagattccgatgacacagatacggaattgcaaagagatactttggatgaagacgcgatgcaagttaccagggacggaagtggtatcagaaccaatggacctgtacaacctccagcagaagttatggacgtttctgaacaagtgactccgtcttctcttaccgaagtactcgccaactctttaaagttcaaccatgctttgatggaattggttattgagagtaaaatatctattgaaaaaaatgtcgaaacgaaaatcttgaatcctattcagattaatttcttggaagatacaaccaataaattctatttacaattgcgcgacattatagactccatttccgccgccattccattagatttgaaggaaatcggtttagccaagactttaattgaaggtttgaacatcattagctccggaaccttcgagtctttgcaagattttgttttgcaaaccgtctcctttaccgatttacttgatgaaaaagatgtacagggtaagattgatctttctttgattagagttgatatcgttgaatttgccattctttgtttaaacgattattcttctgatgcatcttggaaactctctgggttattgaccaaagttcttacagaggctagaactttattaacagactatagaaatcaaatcttgtttttgaaaaatcagacattgaacgaacaattgagtcacgtagtttttcaactttgtgatgtcttagtaaattcctccgataatgaattgagaaggtacgctataaaagaatctactgaaaagtctcaaaaaacccccgggggagcgcatactttaaacatattgatgaaaaacgctaacgtttttttgaataatgctgtcgctatctcttctaaacagtgcgggttacaagaaacgattattgataaattgaagaggaactatatccataatcaagccaaggaaagattacttttcttacagaggttagaacagaagagcaatgaggatgacggtacttctgcttcccctaccgcaatgacgttcgatatgccaccagaacaccctttttatagccactatcgttga

SEQ ID NO: 9285 - DNA, 3396 bp, Saccharomyces cerevisiae
atgagtgatcaaaataatcgatcgagaaatgaatatcactcaaaccggaagaatgaaccttcctatgaactccaaaatgcacatagcgggctatttcactcttctaatgaagaattaacaaacaggaaccaaagatataccaatcaaaatgccagcatgggttcattcactccagtccaatctttgcaatttccagaacaatctcagcaaacaaatatgctttataacggtgacgatggcaataataatactatcaatgataacgaacgagacatatatggaggttttgtcaaccaccatcgccagcgtcccccaccagcaactgcagaatacaatgacgtttttaatacgaatagtcaacagctaccgtcggaacatcaatacaataacgtaccttcatatccacttccttcgataaatgtgattcaaaccactccagaactcatacataacggctcacagactatggccacccccatcgaaaggcccttctttaacgaaaacgactactattataataacaggaactctaggacgtcaccgagtattgcttctagtagcgatggttatgcagatcaggaagctaggcccattttggagcaacccaacaataacatgaatagcggtaatattcctcaataccatgaccaaccttttggatacaacaatggttaccatggcctacaggcaaaagattactatgacgatccggagggtggttatattgatcagagaggagatgactatcagattaattcatatttgggtagaaacggtgaaatggttgatccttacgattatgaaaacagtttaagacatatgactcctatggagcgtagagaatatcttcatgatgatagcagacccgtaaacgatggaaaagaagaattagacagtgtgaaaagcggttactctcatagagacttgggggaatatgacaaggatgatttttcaagggatgacgagtacgatgatctcaacactattgataaattacagtttcaagctaatggtgtacctgcatcatcctcggtgtcttctatcggatctaaagaatccgacataatagtaagcaatgataacttaaccgcaaatagagcactaaagagaagcggtactgaaattaggaaattcaaactttggaatggtaattttgttttcgattctccaatcagtaagacgctattggaccaatacgctactacaacagaaaatgcaaacactttaccaaatgagtttaagtttatgagatatcaagcagttacttgcgaacctaatcaacttgcagagaagaatttcacggtgaggcagttgaagtatttaactccaagggaaacggaattgatgctagtagtcacaatgtataatgaagaccatatcctgttaggaagaactttgaaaggtattatggacaatgtcaaatatatggtgaaaaaaaaaaattcaagcacttgggggccggatgcatggaaaaagattgtcgtttgtatcatttcagatggtagatccaaaattaatgaacgctcgctagcattactaagttcgttaggttgttaccaggacgggtttgctaaggatgaaattaatgaaaaaaaagtggcaatgcatgtctacgaacatacgacaatgatcaacatcacaaatatttcggaatcagaggtttcattagaatgcaatcaaggtaccgttccaatacaacttttgttttgtttgaaagagcaaaatcagaaaaaaattaactcacatagatgggcatttgaaggctttgcagaattactgcgtcccaatatcgttacattgttagatgctggtaccatgccaggtaaagattctatttaccagttatggagagagttcaggaatccaaatgttggtggcgcatgtggtgaaataagaactgatttgggtaagagatttgtaaagcttttgaatcctttagttgcatcacagaatttcgaatacaaaatgtccaatattttagacaaaacaaccgagtctaactttggatttattactgttctaccgggggcattctctgcgtataggtttgaagctgtgagaggccaaccattacagaagtacttttatggtgaaattatggaaaatgaaggttttcattttttttcttccaatatgtatcttgctgaagatcgtattttatgctttgaagtggtcacaaaaaaaaattgtaattggattttgaaatactgcagaagttcttatgcttcaacagatgtaccggagagggtccctgaatttattcttcagaggaggcgttggttgaatggttcattttttgctagtgtatattccttttgtcatttttacagagtctggagcagtggtcataatattggtagaaaactccttttgacggttgaatttttttaccttttcttcaatacattgatttcatggttttcattgagttcatttttcctagtctttagaattctcactgtttctattgcactggcataccattcagcatttaatgtgttgtccgtcatattcctgtggctttatgggatttgtaccttatcaacattcatactgtcattgggtaataaacctaaaagtactgagaaattttatgttctaacttgcgtcatttttgcggtgatgatgatttacatgatattctgcagtatattcatgagtgtcaaatccttccaaaatatattgaaaaacgataccatcagctttgagggtttgattaccacagaagctttcagggatattgttatctctctgggctccacttattgtttgtacctaatcagttcaattatctatttgcagccatggcatatgttgacaagttttattcagtatattttattgagtccttcttacatcaatgttttgaatatctatgcattttgtaatgtccacgacttatcatggggtacaaagggtgcaatggcaaatccgctgggtaagattaatactacagaagatggtacgttcaaaatggaagttctggtctctagttcagagattcaagcaaactacgataaatatttgaaagttttaaatgacttcgatccaaaatcagaatctcggcctactgagccatcttatgatgaaaaaaagactggctattatgcaaacgttagatctctcgtgattatcttttgggtcatcacaaatttcatcatcgttgctgttgtcttagaaaccggtgggattgcagattatattgctatgaaatccatatcaactgatgacactttagaaactgcaaagaaggcggaaattcccttaatgaccagtaaggcctcaatttattttaatgtaattttatggttagttgcattatcggcattaataaggttcattggttgctcaatatacatgatagtaaggttttttaaaaaggttacatttcgctaa

SEQ ID NO: 9286 - DNA, 3396 bp, Artificial Sequence
  Description of Artificial Sequence: Synthetic polynucleotide
atgagtgatcaaaataatagatctagaaatgaatatcactccaacagaaagaatgaaccttcctatgaactccaaaatgcacatagcgggttgtttcactcttctaatgaagaattaacaaacaggaaccaaagatataccaatcaaaatgccagcatgggttctttcactccagtccaatctttgcaatttccagaacaatctcagcaaacaaatatgctttataacggtgacgatggcaataataatactatcaatgataacgaaagagacatatatggaggttttgtcaaccaccatcgccagcgtcccccaccagcaactgcagaatacaatgacgtttttaatacgaatagtcaacagttaccgagtgaacatcaatacaataacgtaccttcttatccacttccttccataaatgtgattcaaaccactccagaactcatacataacggctctcagactatggccacccccatcgaaaggcccttctttaacgaaaacgactactattataataacaggaactctaggacgtctccgagtattgcttctagtagcgatggttatgcagatcaggaagctaggcccattttggagcaacccaacaataacatgaatagcggtaatattcctcaataccatgaccaaccttttggatacaacaatggttaccatggcttgcaggcaaaagattactatgacgatccggagggtggttatattgatcagagaggagatgactatcagattaattcttatttgggtagaaacggtgaaatggttgatccttacgattatgaaaacagtttaagacatatgactcctatggagcgtagagaatatcttcatgatgatagcagacccgtaaacgatggaaaagaagaattagacagtgtgaaaagcggttactctcatagagacttgggggaatatgacaaggatgattttagcagggatgacgagtacgatgatctcaacactattgataaattacagtttcaagctaatggtgtacctgcatcttcctctgtgtcttctatcggatctaaagaatccgacataatagtaagcaatgataacttaaccgcaaatagagcattgaagagaagcggtactgaaattaggaaattcaaactttggaatggtaattttgttttcgattctccaatcagtaagacgttattggaccaatacgctactacaacagaaaatgcaaacactttaccaaatgagtttaagtttatgagatatcaagcagttacttgcgaacctaatcaacttgcagagaagaatttcacggtgaggcagttgaagtatttaactccaagggaaacggaattgatgttggtagtcacaatgtataatgaagaccatatcttattaggaagaactttgaaaggtattatggacaatgtcaaatatatggtgaaaaaaaaaaatagtagcacttgggggccggatgcatggaaaaagattgtcgtttgtatcatttctgatggtagatccaaaattaatgaacgctctttggcattattaagttctttaggttgttaccaggacgggtttgctaaggatgaaattaatgaaaaaaaagtggcaatgcatgtctacgaacatacgacaatgatcaacatcacaaatatttctgaaagtgaggtttctttagaatgcaatcaaggtaccgttccaatacaacttttgttttgtttgaaagagcaaaatcagaaaaaaattaactctcatagatgggcatttgaaggctttgcagaattattacgtcccaatatcgttacattgttagatgctggtaccatgccaggtaaagattctatttaccagttatggagagagttcaggaatccaaatgttggtggcgcatgtggtgaaataagaactgatttgggtaagagatttgtaaagcttttgaatcctttagttgcatcccagaatttcgaatacaaaatgtccaatattttagacaaaacaaccgagtctaactttggatttattactgttttaccgggggcattctctgcgtataggtttgaagctgtgagaggccaaccattacagaagtacttttatggtgaaattatggaaaatgaaggttttcattttttttcttccaatatgtatcttgctgaagatcgtattttatgctttgaagtggtcacaaaaaaaaattgtaattggattttgaaatactgcagaagttcttatgcttctacagatgtaccggagagggtccctgaatttattcttcagaggaggcgttggttgaatggttctttttttgctagtgtatattccttttgtcatttttacagagtctggagcagtggtcataatattggtagaaaactccttttgacggttgaatttttttaccttttcttcaatacattgatttcttggttttctttgagttcttttttcttggtctttagaattctcactgtttctattgcattggcataccattctgcatttaatgtgttgtccgtcatattcttatggctttatgggatttgtaccttatctacattcatattatctttgggtaataaacctaaaagtactgagaaattttatgttttaacttgcgtcatttttgcggtgatgatgatttacatgatattctgcagtatattcatgagtgtcaaatccttccaaaatatattgaaaaacgataccatcagctttgagggtttgattaccacagaagctttcagggatattgttatctctttaggctccacttattgtttgtacttgatcagttctattatctatttgcagccatggcatatgttgacaagttttattcagtatattttattgagtccttcttacatcaatgttttgaatatctatgcattttgtaatgtccacgacttatcttggggtacaaagggtgcaatggcaaatccgttgggtaagattaatactacagaagatggtacgttcaaaatggaagttttggtctctagtagtgagattcaagcaaactacgataaatatttgaaagttttaaatgacttcgatccaaaaagtgaatctagacctactgagccatcttatgatgaaaaaaagactggctattatgcaaacgttagatctctcgtgattatcttttgggtcatcacaaatttcatcatcgttgctgttgtcttagaaaccggtgggattgcagattatattgctatgaaatccatatctactgatgacactttagaaactgcaaagaaggcggaaattcccttaatgaccagtaaggcctctatttattttaatgtaattttatggttagttgcattaagtgcattaataaggttcattggttgctctatatacatgatagtaaggttttttaaaaaggttacatttcgctga

SEQ ID NO: 9287 - DNA, 1074 bp, Saccharomyces cerevisiae
atgtgcagattcttgattttcaaaggcaaacaaccgattcggctatctcatcttttaacaagaccagctcattctatcataaaccaatcatttgatagcagattacggctagacagaagaaggccaatgaatggtgatggttttggtgtcgcttactatccattggataccgagttaagcgaggacggtccatgccttttcaaagctattactcctgcatggaacaaccaaaatttgagtacattagcagaaaaaactaaatctgatctggtctttgcgcacgtaagagcctctacatatggtgtcctatctgagaccaattgccatccgtttacataccacagcttatgttttatgcataatggcggtatatctaatttcaaaggaatcaagagaaaattattgaatcatatcaaagacgaatacctgaattttattcaagggagcacagactccgagtgcgcatttgcattattcttagacactttagacaaattgggttacgacccaaagaagcaggacggcgatttcggtaatgttgcactaagaaaggcaatgttacgaacgattgactacatcagagattggactaaagaagcgaacaaggacgaggcacatgtggagccatctctcttaaattttgctgtaactgacggatccaccgttgtcgtttccaggtatataacttcaaagacggacgaggcagcatctttgcatttcagttgtggttccagctttgtagaaacttcaccaggagaatacagggtagaaaggttggatagaaaccaagatgtaattatggttgcatcggaacctttgactttcgagagaggtgattggactgcagtacccaccaacagcatattgaccattaagaaacagacaatattactacaccctattatcgatgagtactaccaagaagatccgttatacctaagaagttcaaccctcgcagaaagcaaggggctcatgggttctataccactagcaaaagccgtagaaaagaacgttcctccactagaaagagagggccgtacgagacctccaaccgctgtcgcacatatagcatga

SEQ ID NO: 9288 - DNA, 1074 bp, Artificial Sequence
  Description of Artificial Sequence: Synthetic polynucleotide
atgtgcagattcttgattttcaaaggcaaacaaccgattagattatctcatcttttaacaagaccagctcattctatcataaaccaaagttttgatagcagattaaggttggacagaagaaggccaatgaatggtgatggttttggtgtcgcttactatccattggataccgagttaagcgaggacggtccatgccttttcaaagctattactcctgcatggaacaaccaaaatttgagtacattagcagaaaaaactaaatctgatttggtctttgcgcacgtaagagcctctacatatggtgtcttgtctgagaccaattgccatccgtttacataccacagcttatgttttatgcataatggcggtatatctaatttcaaaggaatcaagagaaaattattgaatcatatcaaagacgaatacttgaattttattcaagggagcacagactccgagtgcgcatttgcattattcttagacactttagacaaattgggttacgacccaaagaagcaggacggcgatttcggtaatgttgcattgagaaaggcaatgttaagaacgattgactacatcagagattggactaaagaagcgaacaaggacgaggcacatgtggagccatctctcttaaattttgctgtaactgacggatccaccgttgtcgtttccaggtatataacttctaagacggacgaggcagcatctttgcatttcagttgtggttccagctttgtagaaacttctccaggagaatacagggtagaaaggttggatagaaaccaagatgtaattatggttgcatctgaacctttgactttcgagagaggtgattggactgcagtacccaccaacagcatattgaccattaagaaacagacaatattattacaccctattatcgatgagtactaccaagaagatccgttatacttgagaagttctaccctcgcagaaagcaaggggctcatgggttctataccattggcaaaagccgtagaaaagaacgttcctccattggaaagagagggccgtacgagacctccaaccgctgtcgcacatatagcatga

SEQ ID NO: 9289 - DNA, 615 bp, Saccharomyces cerevisiae
atgaagttctcttctgttactgctattactctagccaccgttgccaccgttgccactgctaagaagggtgaacatgatttcactaccactttaactttgtcatcggacggtagtttaactactaccacctctactcataccactcacaagtatggtaagttcaacaagacttccaagtccaagaccccaaaccacactggtactcacaagtacggtaagttcaacaagacctccaagtctaagaccccaaaccataccggtactcacaagtatggtaagttcaacaagacttccaagtccaagactccaaaccataccggtactcacaagtacggtaagttcaacaagacctccaaatccaagactccaaaccacactggtactcacaagtacggtaagttcaacaagacctccaagtctaagaccccaaaccataccggtactcacaagtatggtaagttcaacaaaaccaaacatgacactaccacttatggtcctggtgaaaaggcccgtaagaacaatgccgcccctggtccatctaatttcaactccataaaattgtttggtgttaccgctggtagtgctgccgtagccggtgccttattactattataa

SEQ ID NO: 9290 - DNA, 615 bp, Artificial Sequence
  Description of Artificial Sequence: Synthetic polynucleotide
atgaagttctcttctgttactgctattactttggccaccgttgccaccgttgccactgctaagaagggtgaacatgatttcactaccactttaactttgtcttctgacggtagtttaactactaccacctctactcataccactcacaagtatggtaagttcaacaagacttccaagtccaagaccccaaaccacactggtactcacaagtacggtaagttcaacaagacctccaagtctaagaccccaaaccataccggtactcacaagtatggtaagttcaacaagacttccaagtccaagactccaaaccataccggtactcacaagtacggtaagttcaacaagacctccaaatccaagactccaaaccacactggtactcacaagtacggtaagttcaacaagacctccaagtctaagaccccaaaccataccggtactcacaagtatggtaagttcaacaaaaccaaacatgacactaccacttatggtcctggtgaaaaggcccgtaagaacaatgccgcccctggtccatctaatttcaactccataaaattgtttggtgttaccgctggtagtgctgccgtagccggtgccttattattattatga

SEQ ID NO: 9291 - DNA, 1629 bp, Saccharomyces cerevisiae
atggataatggtacagattcttccacgagcaagttcgttcccgaatatagacgaacaaactttaagaataaaggcagattctctgcagatgaacttcgtcgtcgtagagatacacaacaggtcgaattaagaaaagcaaaaagagatgaagctttggccaaaagaagaaactttattcccccaactgatggcgctgattctgatgaagaagatgagagctccgtttctgcggaccaacaattttacagccagttgcagcaagaactaccacaaatgactcagcaacttaactctgatgatatgcaagagcaattgagtgctactgttaagtttagacaaattttgtctagagaacaccgccctccaattgatgtcgtcattcaagccggtgttgttccaagattagtagaatttatgcgtgaaaaccaacctgaaatgttacaattggaggctgcttgggctttgactaacattgcatcaggtacatctgctcaaacaaaagtggttgttgatgctgacgctgtacctcttttcattcaactattatataccggctccgttgaagttaaagaacaagccatttgggccttaggtaacgttgcaggtgattcaactgactacagagactacgttttacaatgtaatgccatggagccaattttgggtctttttaactccaataaaccatctttgatcaggaccgctacgtggactttatccaatttatgcaggggtaaaaaaccacaaccagattggtcagtggtctcacaagcgttgccaaccttagcgaaattaatctattcgatggacactgaaactttagttgatgcttgttgggctatctcttatctatctgacggaccacaagaagctattcaagcagtgatcgatgttagaattcctaaaagacttgttgaattactgagccatgaatcgactttagtccagactcctgctttaagagctgtaggtaatatagtcactggtaatgacttacagactcaggtcgttataaatgctggtgtcttacctgcgttaagacttctgctaagctctccaaaagaaaatatcaagaaagaagcgtgttggaccatttccaatattacggctggtaatactgaacaaattcaagcggtaattgacgcgaacttgattcctccattagttaaacttttggaagttgcagaatataaaactaaaaaagaagcttgttgggctatttccaatgcctcttcaggtggtttacaaagaccagatatcataagatatttagtatctcaagggtgtataaaaccattgtgtgatttgctagaaattgctgacaacagaataattgaagttaccttagatgctcttgaaaatattttaaagatgggtgaagctgacaaagaagctcgtggtttgaatatcaatgaaaatgccgattttatcgaaaaggctggtggtatggaaaagattttcaactgtcaacaaaatgaaaatgacaagatttatgaaaaagcatacaaaatcattgaaacctactttggtgaagaagaagacgccgtagacgaaactatggctccacaaaatgccggtaatactttcggctttggttctaatgtcaaccaacaattcaattttaactaa

SEQ ID NO: 9292 - DNA, 1629 bp, Artificial Sequence
  Description of Artificial Sequence: Synthetic polynucleotide
atggataatggtacagattcttccacgagcaagttcgttcccgaatatagaagaacaaactttaagaataaaggcagattctctgcagatgaacttcgtcgtcgtagagatacacaacaggtcgaattaagaaaagcaaaaagagatgaagctttggccaaaagaagaaactttattcccccaactgatggcgctgattctgatgaagaagatgagagctccgtttctgcggaccaacaattttacagccagttgcagcaagaattaccacaaatgactcagcaacttaactctgatgatatgcaagagcaattgagtgctactgttaagtttagacaaattttgtctagagaacaccgccctccaattgatgtcgtcattcaagccggtgttgttccaagattagtagaatttatgcgtgaaaaccaacctgaaatgttacaattggaggctgcttgggctttgactaacattgcatctggtacatctgctcaaacaaaagtggttgttgatgctgacgctgtacctcttttcattcaattattatataccggctccgttgaagttaaagaacaagccatttgggccttaggtaacgttgcaggtgattctactgactacagagactacgttttacaatgtaatgccatggagccaattttgggtctttttaactccaataaaccatctttgatcaggaccgctacgtggactttatccaatttatgcaggggtaaaaaaccacaaccagattggtctgtggtctctcaagcgttgccaaccttagcgaaattaatctattccatggacactgaaactttagttgatgcttgttgggctatctcttatttatctgacggaccacaagaagctattcaagcagtgatcgatgttagaattcctaaaagacttgttgaattattaagccatgaatctactttagtccagactcctgctttaagagctgtaggtaatatagtcactggtaatgacttacagactcaggtcgttataaatgctggtgtcttacctgcgttaagacttttattaagctctccaaaagaaaatatcaagaaagaagcgtgttggaccatttccaatattacggctggtaatactgaacaaattcaagcggtaattgacgcgaacttgattcctccattagttaaacttttggaagttgcagaatataaaactaaaaaagaagcttgttgggctatttccaatgcctcttctggtggtttacaaagaccagatatcataagatatttagtatctcaagggtgtataaaaccattgtgtgatttgttggaaattgctgacaacagaataattgaagttaccttagatgctcttgaaaatattttaaagatgggtgaagctgacaaagaagctcgtggtttgaatatcaatgaaaatgccgattttatcgaaaaggctggtggtatggaaaagattttcaactgtcaacaaaatgaaaatgacaagatttatgaaaaagcatacaaaatcattgaaacctactttggtgaagaagaagacgccgtagacgaaactatggctccacaaaatgccggtaatactttcggctttggttctaatgtcaaccaacaattcaattttaactga

SEQ ID NO: 9293 - DNA, 1302 bp, Saccharomyces cerevisiae
atgaatgtaacttctccaaaagatgggaatcacagtttctcgaagaaaaatagatttaatacaaataaaccgcgattccacaaactaaatgagcaggcgcagagtataaatttaccagaagaccgtgattcaattgtttcaagtaatacaacgtcaattatgacagatgatgcatttgattacaatgagggcattgcatcgcgtaccaaaaatattaattctgatagtgatagaagcaatgataccataaaacaaaacaactacaataaaagggagaccggatataaccctttctacaatggatcagggatcaatcagcgatatacacagtttcgaaaaagagagtttgaaccaacacttgcagaaaacaaagccgaagagtacatatcggacgaagataatgtaaaaattgatgaagataatatagagaacgaactccagtttacgccgaaaattaaagaggctagtatactccgatctagtttactaggacaaagaaatgttttaaatactcggaatccaaaatcaaaagaatcacacattaaagtaaaacccatcatcaataacaagagctcctcacaaagaaaatctagtgcagcacttcggaaacaattaggaaaacccctaccgctgccgtatttgaatagccctaatagtgatagtacacccacattacagagaaaagaagaagtattcacagacgaagtgcttcaaaaaaagagagaattgattgagtctaaatggcatagacttctctttcatgacaaaaaaatggtggaaaaaaagctagaaagtttaagagaatacgaaaggaaaagaatgcctccacgaggaactgatgtttctagctctgagcaggacaattctttcaaaatatcgacgccaacaaaatcgtatgtttctttggagcaaaaacccttaccaaatctctctgctatgaataactttaatgatgttaccgacaataaggagaaagaagaaacgaacaacaatatattaaagttccaagcgcaacgagatccattacaaatactacagtctgagatcgaaatgcatactaagaaacttgacacgataatagagttactaaaagacgataccgattcaaaggaaaaaaggaaagtagtgactaatgacaacgcagcgcctgaacaaatggtcaacaaaggatggcggaaaaacgtgatgatgatctacaaaaaatcaggaaatattatgaaaaagtatagggaatatttcttatggacaatttgtattttaatattgttatattgcaatatatatgtgtattataggttttaa

SEQ ID NO: 9294 - DNA, 1302 bp, Artificial Sequence
  Description of Artificial Sequence: Synthetic polynucleotide
atgaatgtaacttctccaaaagatgggaatcacagtttctccaagaaaaatagatttaatacaaataaaccgcgcttccacaaattgaatgagcaggcgcagagtataaatttaccagaagaccgtgattctattgtttctagtaatacaacgtccattatgacagatgatgcatttgattacaatgagggcattgcatctcgtaccaaaaatattaattctgatagtgatagaagcaatgataccataaaacaaaacaactacaataaaagggagaccggatataaccctttctacaatggatctgggatcaatcagagatatacacagtttagaaaaagagagtttgaaccaacacttgcagaaaacaaagccgaagagtacatatctgacgaagataatgtaaaaattgatgaagataatatagagaacgaactccagtttacgccgaaaattaaagaggctagtatactccgttctagtttattaggacaaagaaatgttttaaatactagaaatccaaaatctaaagaatctcacattaaagtaaaacccatcatcaataacaagagctcctctcaaagaaaatctagtgcagcacttagaaaacaattaggaaaacccttgccgttaccgtatttgaatagccctaatagtgatagtacacccacattacagagaaaagaagaagtattcacagacgaagtgcttcaaaaaaagagagaattgattgagtctaaatggcatagacttctctttcatgacaaaaaaatggtggaaaaaaagttggaaagtttaagagaatacgaaaggaaaagaatgcctccaagaggaactgatgtttctagctctgagcaggacaattctttcaaaatatctacgccaacaaaaagttatgtttctttggagcaaaaacccttaccaaatctctctgctatgaataactttaatgatgttaccgacaataaggagaaagaagaaacgaacaacaatatattaaagttccaagcgcaaagagatccattacaaatattacagtctgagatcgaaatgcatactaagaaacttgacacgataatagagttattgaaagacgataccgattctaaggaaaaaaggaaagtagtgactaatgacaacgcagcgcctgaacaaatggtcaacaaaggatggagaaaaaacgtgatgatgatctacaaaaaaagtggaaatattatgaaaaagtatagggaatatttcttatggacaatttgtattttaatattgttatattgcaatatatatgtgtattataggttttga

SEQ ID NO: 9295 - DNA, 1074 bp, Saccharomyces cerevisiae
atggaaaagaaggtaatatgtcaagatatcttttggtcatgtgatggtacatcgtttgtttctgtgcataatgattttggcatcagacaatatttagtgccggaggaaagtaatacggacaagctaaacagaaacctccttctaccatttacaaggttttttagaaaccagtctattgtttcatgtgcaatagacccgttttacacgctttataacgagaattccgacaggttagctggtgacagaatcgtggttggaggaaaaaacttccctctacaactatactctttgatggacgggcagtgtatcctcagctatgacacgatgaacaaaataaatggagaatacgaaactgtatacagtgtgaaaatcgatgttgagtctcgtgtatacactggctcatgccgtaacaaagtggcgatatacgacaagagcagacgagatgccgtgtggatgaaccagagtaccaaaaaagcaagcaagggaagacaaagcattatatcttgctttgaagagcaaccaatgggagggcaagctctctcaagaggatctctattgtgtggcagttatgcgaatgaaatgtttcaggtagactgccgtcatcaacgactagagagactgaactacacccgcacagttgcaggtgggattgtacaaatccttacaagcgataacgggcgttacgtgtacgttgtcagacgcaacagtgacgcgattagtatttacgatcggcgaaacctgcagcacgagcttaacgtattgcgcctaccgtttcggatccaccacaactctgcaaagttgaaggcatatatagatacggcttacggactaagtatggggacgccgcagggaacaatattgaactggggtcgagaccttgtggaatttggaggtgttccctcacacaatagtgttgaagacccactaatcacgtctatcccgccagagtcagagtggcgcactaaccttgattctactattcctgccacggtagtgaagaattgtcctggggatcccgaactgttcgccctatctcatgggggcacaatttcattatgcaggttcggcggctaa

SEQ ID NO: 9296 - DNA, 1074 bp, Artificial Sequence
  Description of Artificial Sequence: Synthetic polynucleotide
atggaaaagaaggtaatatgtcaagatatcttttggtcttgtgatggtacatcttttgtttctgtgcataatgattttggcatcagacaatatttagtgccggaggaaagtaatacggacaagttgaacagaaacctccttttaccatttacaaggttttttagaaaccagtctattgtttcttgtgcaatagacccgttttacacgctttataacgagaattccgacaggttagctggtgacagaatcgtggttggaggaaaaaacttccctttacaattgtactctttgatggacgggcagtgtatcctcagctatgacacgatgaacaaaataaatggagaatacgaaactgtatacagtgtgaaaatcgatgttgagtctcgtgtatacactggctcctgccgtaacaaagtggcgatatacgacaagagcagaagagatgccgtgtggatgaaccagagtaccaaaaaagcaagcaagggaagacaaagcattatatcttgctttgaagagcaaccaatgggagggcaagctctcagcagaggatctttgttgtgtggcagttatgcgaatgaaatgtttcaggtagactgccgtcatcaaagattggagagattgaactacacccgcacagttgcaggtgggattgtacaaatccttacaagcgataacgggcgttacgtgtacgttgtcagacgcaacagtgacgcgattagtatttacgataggagaaacttacagcacgagcttaacgtattgcgcttaccgtttagaatccaccacaactctgcaaagttgaaggcatatatagatacggcttacggattgagtatggggacgccgcagggaacaatattgaactggggtagagaccttgtggaatttggaggtgttccctctcacaatagtgttgaagacccattgatcacgtctatcccgccagagagtgagtggcgcactaaccttgattctactattcctgccacggtagtgaagaattgtcctggggatcccgaattattcgccttatctcatgggggcacaatttctttatgcaggttcggcggctga

SEQ ID NO: 9297 - DNA, 2379 bp, Saccharomyces cerevisiae
atgaccactcaagaatcgatcaaacctttggtagatagaatcctatcaaatcccctgcagttcaatgctgcaatgatctctaacaaatcgaataataatgatacttccgccgcgccggaaaatagctcgtatattgtgataggaaaacagcataataacaatagtaatagcacagctattgctgcaacggccgaatccaagcaaataaaagaaaataacttgatagacaggccaaacggaaagaaaaccaacactgttcctaaatctatggctgaagctttattgttgtatacttctaaaaatgataaagatgctgcagatgctactggtgccaagaagtcagcggagctttctacggagctttctacggagcctccttcctcttcttcggaagatgacaaagtaggaaaagaggaagaggaagagggtgaaatatttcatgaggcaagagactatgtagaaccccgaaaagctagtttgaaggaacgcgacaacgcagataagggcgatggtgaagacatcggcgaagacatcggtgaagacatcggtgaagacatcggtgaagacattggtgaagacattggtgaaaacttgggttctccattagcaaccattgatgattcatctaatgagaatgaaaaggaaaaaagaaaggaactgtctacaagcattagcagtgatgacgaaatagaagacgacgaggatgaggatgacatggattatgattctagtgctatggaaaaagagctccctgaagaagaggagaacgattccagctccaaaatttctgaaggcgaaaaaaagagtttatatcaagatttaatggaaaatagtacagtggaagtaaatcggtacgaaccagtaaacaacaccaaagaaaatggaaacaggaatccaaagggagaggaggaggaagaagaggaagaagagctgaaacataaatctaggtcaatcacccctccggttacaatatcaaatctatcaaacttttaccaattcaatgaaaatatcaatgatcgtggttctttaaactctactagaattgttaaaaattggggcgacaaattcaccaatttgaagcctcgtggccttttgaatcatggtgttacttgttacacaaatgctgctgtacaggctatgttacacattccttcgatacaacattatctttttgatatactaatggggaaatacgatagcaccatctcaaaaaattccgtttcctatactttagctgaaacaagtaaaaaaatgtggttaccggtctcaaaaaaccctagaaagaacgtttcagcttcctacattaatccaaaacatttgatttccagattggatgacattaattgtatgatgagcgaatggcagcaggaagattcacatgagtacttcatgtctctgatgtcaagattacaggaagattctgttcccaagggtcataaacttatagaatcgataatatatgacatattcggtggtcttttaaagcagatcgttacttgcaaatcttgtggcagtatatctaaaacagaacaaccattttacgatttatcgttgcacttgaaagggaagaaaaaacttgatccaaattctgacctgtcgagtgatagcattaacggcacttcagccaccacttctaccactacctccaatgctgccacaaaaccatctctttcatcctcttcatctgtcaatttaaacaatggctcaccatttgccgctgccagtgatttaagttcagccaaccgcagattttctattgaaaaatcaattaaagatttcttcaatcccgaattaatcaaggttgacaaggagcaaaagggttacgtttgtgagaagtgtcacaagaccacgaacgccgtgaagcatagttcaatattaagggctcctgaaactttacttgtgcatctgaaaaaattcagattcaatggcacgtcctcatcaaaaatgaagcaagctgtttcttatcctatgtttttagatttgacggaatattgtgagagtaaagagctacctgtcaaataccaactattaagcgtggtggttcatgagggccgctccctttcttcaggtcactacattgcccactgcaagcaaccagacggtagctgggccacttacgacgacgagtatattaatataatatctgaaagggacgttttaaaggaacccaacgcatattatctcctatacacgaggctaactccaaaatcggttccattgccattggcgaaatctgccatggccactggtaatgttacctctaaatccaaacaggaacaggctgttaacgaaccaaataaccgcccattgaagattaatagcaagaaaaataacagaaaaaaatggaaaaaaaataaaaaaaggaagttcaccaaatga

SEQ ID NO: 9298 - DNA, 2379 bp, Artificial Sequence
  Description of Artificial Sequence: Synthetic polynucleotide
atgaccactcaagaaagtatcaaacctttggtagatagaatcttatccaatcccttgcagttcaatgctgcaatgatctctaacaaatctaataataatgatacttccgccgcgccggaaaatagctcttatattgtgataggaaaacagcataataacaatagtaatagcacagctattgctgcaacggccgaatccaagcaaataaaagaaaataacttgatagacaggccaaacggaaagaaaaccaacactgttcctaaatctatggctgaagctttattgttgtatacttctaaaaatgataaagatgctgcagatgctactggtgccaagaagtctgcggagctttctacggagctttctacggagcctccttcctcttcttctgaagatgacaaagtaggaaaagaggaagaggaagagggtgaaatatttcatgaggcaagagactatgtagaacccagaaaagctagtttgaaggaacgcgacaacgcagataagggcgatggtgaagacatcggcgaagacatcggtgaagacatcggtgaagacatcggtgaagacattggtgaagacattggtgaaaacttgggttctccattagcaaccattgatgattcttctaatgagaatgaaaaggaaaaaagaaaggaattatctacaagcattagcagtgatgacgaaatagaagacgacgaggatgaggatgacatggattatgattctagtgctatggaaaaagagctccctgaagaagaggagaacgattccagctccaaaatttctgaaggcgaaaaaaagagtttatatcaagatttaatggaaaatagtacagtggaagtaaatagatacgaaccagtaaacaacaccaaagaaaatggaaacaggaatccaaagggagaggaggaggaagaagaggaagaagagttgaaacataaatctaggtctatcacccctccggttacaatatccaatttatctaacttttaccaattcaatgaaaatatcaatgatcgtggttctttaaactctactagaattgttaaaaattggggcgacaaattcaccaatttgaagcctcgtggccttttgaatcatggtgttacttgttacacaaatgctgctgtacaggctatgttacacattccttccatacaacattatctttttgatatattaatggggaaatacgatagcaccatctccaaaaattccgtttcctatactttagctgaaacaagtaaaaaaatgtggttaccggtctccaaaaaccctagaaagaacgtttctgcttcctacattaatccaaaacatttgatttccagattggatgacattaattgtatgatgagcgaatggcagcaggaagattctcatgagtacttcatgtctttgatgagtagattacaggaagattctgttcccaagggtcataaacttatagaaagtataatatatgacatattcggtggtcttttaaagcagatcgttacttgcaaatcttgtggcagtatatctaaaacagaacaaccattttacgatttatctttgcacttgaaagggaagaaaaaacttgatccaaattctgacctttccagtgatagcattaacggcacttctgccaccacttctaccactacctccaatgctgccacaaaaccatctctttcctcctcttcttctgtcaatttaaacaatggctctccatttgccgctgccagtgatttaagttctgccaaccgcagattttctattgaaaaatccattaaagatttcttcaatcccgaattaatcaaggttgacaaggagcaaaagggttacgtttgtgagaagtgtcacaagaccacgaacgccgtgaagcatagtagtatattaagggctcctgaaactttacttgtgcatttgaaaaaattcagattcaatggcacgtcctcttctaaaatgaagcaagctgtttcttatcctatgtttttagatttgacggaatattgtgagagtaaagagcttcctgtcaaataccaattattaagcgtggtggttcatgagggccgctccctttcttctggtcactacattgcccactgcaagcaaccagacggtagctgggccacttacgacgacgagtatattaatataatatctgaaagggacgttttaaaggaacccaacgcatattatctcttatacacgaggttaactccaaaatctgttccattgccattggcgaaatctgccatggccactggtaatgttacctctaaatccaaacaggaacaggctgttaacgaaccaaataaccgcccattgaagattaatagcaagaaaaataacagaaaaaaatggaaaaaaaataaaaaaaggaagttcaccaaatga

SEQ ID NO: 9299 - DNA, 477 bp, Saccharomyces cerevisiae
atgtcacaggcagcaaaaaacgtgatagtaaagctaatagtaggagcaggccaagcggcaccatcacctcccgtggggcccgcattgggctccaagggtataaaagccattgacttttgtaaggaatttaatgcaagatcagcaaactatcagccaggtgtaccggttccagtattaatcacaataaaacctgatagaacatttacgtttgaaatgaaatctccaccaaccggatatttgctgctaaaagctcttaaaatggacaagggacatggacaaccgaatgtggggacaatgttaggcagtgcacctgccaagggaccaacccgtgctttaggagagttatcgctgaagcacgtttacgaaatagccaagataaaaaagagtgatgaaaggcatagtttattggagatggaaggtattgttaaatcaatagttggcgttgcaaaaagtatgggtattaaggttgtaccttga

SEQ ID NO: 9300 - DNA, 477 bp, Artificial Sequence
  Description of Artificial Sequence: Synthetic polynucleotide
atgtctcaggcagcaaaaaacgtgatagtaaagttaatagtaggagcaggccaagcggcaccatctcctcccgtggggcccgcattgggctccaagggtataaaagccattgacttttgtaaggaatttaatgcaagaagtgcaaactatcagccaggtgtaccggttccagtattaatcacaataaaacctgatagaacatttacgtttgaaatgaaatctccaccaaccggatatttgttattgaaagctcttaaaatggacaagggacatggacaaccgaatgtggggacaatgttaggcagtgcacctgccaagggaccaacccgtgctttaggagagttatctttgaagcacgtttacgaaatagccaagataaaaaagagtgatgaaaggcatagtttattggagatggaaggtattgttaaatctatagttggcgttgcaaaaagtatgggtattaaggttgtaccttga

SEQ ID NO: 9301 - DNA, 327 bp, Saccharomyces cerevisiae
atgaagcgggtaacattaattgtcttaccaaggcgacaattcccttttctaaaatttcacagcaaagaagctttagaaagtgcagtaaatctacaactcataagaaggaaaaaaagcgtgaacattcaaatcgacagcgtaaccttctgtatttatttctgtttgttgtactttcgaactctcgaataccatagaggaactattagtctccataatgtcacaggcagcaaaaaacgtgatagtaaagctaatagtaggagcaggccaagcggcaccatcacctcccgtggggcccgcattgggctccaagggtataaaagccattga

SEQ ID NO: 9302 - DNA, 327 bp, Artificial Sequence
  Description of Artificial Sequence: Synthetic polynucleotide
atgaagagagtaacattaattgtcttaccaaggagacaattcccttttttgaaatttcacagcaaagaagctttagaaagtgcagtaaatttacaactcataagaaggaaaaaaagcgtgaacattcaaatcgacagcgtaaccttctgtatttatttctgtttgttgtactttagaactctcgaataccatagaggaactattagtctccataatgtcacaggcagcaaaaaacgtgatagtaaagctaatagtaggagcaggccaagcggcaccatcacctcccgtggggcccgcattgggctccaagggtataaaagccattga

SEQ ID NO: 9303 - DNA, 2373 bp, Saccharomyces cerevisiae
atgtcttcattaactcgattgctacaggaaaaacgaaaaaatgaaacttcgaactcatcaccgagaacttctgctgatacgttgaccacgacgcccgagtcacaatcgcttgaccttcactctaggaataagagtagtagtcatattggtagcgtgagtaatagcagcagtagtgatcgtaatagggctaacgtgccagttcctggcagtgtcacaactgttactcaaatatactcagaggaagattcatcatcaacagccggttcctctctcgacgataggaatcagttttcctccagcttccttaatgcaaactttgctcacactgcatcattctacggcacaagtgcacaaagtagagatagatttggatccttaataaacgatcaaggtactgcaggactttcctcacatggtggttcttttgctgcacagaacagaatcacaagtagattatctaccacgtcacatacttcaggaagggccattccttctttatcatcaagtataccttactccgtgccaaattctaacaaagataacaatagctcgaatagcaacagctcctctttgtcttcttcgtggctcgaaacatatgcaggcggtatgcccaataatatttctgcaatcgattcaaatgttatatcctccccaaaagtagatagcgtggaaccacgttttgttatctccaaacaaaaactccaaaaagcatcgatggatagtaataatgcaaatgccactcaatcaagatctatatcccgttcaggttcattctcttcacagcttgggaattttttcttttccaaaaactcaaaagaatcttcaaattctaactctgcaggcatgtctttttctgccaattccaatggtccttctccaaacattaagaatcccaatgttaccaatggttcgacgcctatcccgaagcctatccgcgcaagacaaagcagcatatattctgcatcaagacagccaactggttcctatactgataacttttacggttccccctcatctgtacatgaccacttacctccaagtcaaagtgttccaaggtcacaacattcttccatcggtgatttaaagaggttcttcaaaaaaagttctaacagtaacctttcctcgaatagtaacaacgtgatcccgaacggatcacctctttctagcggaattgccgttccgtcacactctcattcatcgtctcattttgccgcagggaataactcatattccactagttataacggaaatggagatactatttattctcatagtcacggcggttcaggaattccgttctcaaaaaggtacatcaaaaccggtgccgatttaggcgctggagcaggaggttctgtcaaattagctcaaagaatttcagataacaaaatatttgcagtgaaggagtttagaactaaatttgaaaatgaatccaaaagagattatgtcaagaaaattacatcagaatactgtattggtacaactttgaatcatcccaatatcattgaaacaattgaaatcgtgtatgaaaatgatagaattctccaagttatggaatattgtgaatacgatttatttgctattgtaatgagtaataaaatgtcctatgaagagatttgttgttgcttcaaacaaatacttactggtgtacaatatttgcatagtatcggcttagctcatagagatctaaagctagataattgtgttataaacgaaaaaggtattgtaaaattaatcgattttggtgctgctgtggtattttcatatccattctcaaaaaatcttgtggaagcaagtggaattgttggaagtgatccatatttagcacctgaagtctgtatatttgcgaagtatgacccacgtcccgtagatatttggtcttctgcaatcatttttgcatgtatgatactgaagaaatttccatggaaaattccgaaattaagggacaattcattcaaactattttgttccggacgtgattgcgactccttaagtagcttggttacaagaactcctgatccaccttcctacgatgaatcgcactcaacagaaaagaaaaaacccgaaagctcttccaataatgtatcagatcctaataatgttaatatcgggccacaaagattgttgcactcattaccagaagagactcagcatattgttggacgtatgattgatttggcgcccgcatgcagaggaaatatcgaagaaatcatggaagatccttggatccgtagcattgatatgtgccacttggttgaagatggattatcgttcaaagtggttagaggagaagaccatcatcacacacaagtggatcaaagtgaagcacatattgcaggcctagaaaagaaaaagaaaaagcaaaataatcaataa

SEQ ID NO: 9304 - DNA, 2373 bp, Artificial Sequence
  Description of Artificial Sequence: Synthetic polynucleotide
atgtcttctttaactagattgttacaggaaaaaagaaaaaatgaaacttctaactcttctccgagaacttctgctgatacgttgaccacgacgcccgagtctcaatctcttgaccttcactctaggaataagagtagtagtcatattggtagcgtgagtaatagcagcagtagtgatcgtaatagggctaacgtgccagttcctggcagtgtcacaactgttactcaaatatactctgaggaagattcttcttctacagccggttcctctctcgacgataggaatcagttttcctccagcttccttaatgcaaactttgctcacactgcatctttctacggcacaagtgcacaaagtagagatagatttggatccttaataaacgatcaaggtactgcaggactttcctctcatggtggttcttttgctgcacagaacagaatcacaagtagattatctaccacgagtcatacttctggaagggccattccttctttatcttccagtataccttactccgtgccaaattctaacaaagataacaatagcagtaatagcaacagctcctctttgtcttcttcttggctcgaaacatatgcaggcggtatgcccaataatatttctgcaatcgattctaatgttatatcctccccaaaagtagatagcgtggaaccacgttttgttatctccaaacaaaaactccaaaaagcatctatggatagtaataatgcaaatgccactcaatctagatctatatcccgttctggttctttctcttctcagcttgggaattttttcttttccaaaaactccaaagaatcttccaattctaactctgcaggcatgtctttttctgccaattccaatggtccttctccaaacattaagaatcccaatgttaccaatggttctacgcctatcccgaagcctatccgcgcaagacaaagcagcatatattctgcatctagacagccaactggttcctatactgataacttttacggttccccctcttctgtacatgaccacttacctccaagtcaaagtgttccaaggtctcaacattcttccatcggtgatttaaagaggttcttcaaaaaaagttctaacagtaacctttcctctaatagtaacaacgtgatcccgaacggatctcctctttctagcggaattgccgttccgtctcactctcattcttcttctcattttgccgcagggaataacagttattccactagttataacggaaatggagatactatttattctcatagtcacggcggttctggaattccgttctccaaaaggtacatcaaaaccggtgccgatttaggcgctggagcaggaggttctgtcaaattagctcaaagaatttctgataacaaaatatttgcagtgaaggagtttagaactaaatttgaaaatgaatccaaaagagattatgtcaagaaaattacaagtgaatactgtattggtacaactttgaatcatcccaatatcattgaaacaattgaaatcgtgtatgaaaatgatagaattctccaagttatggaatattgtgaatacgatttatttgctattgtaatgagtaataaaatgtcctatgaagagatttgttgttgcttcaaacaaatacttactggtgtacaatatttgcatagtatcggcttagctcatagagatttgaagttggataattgtgttataaacgaaaaaggtattgtaaaattaatcgattttggtgctgctgtggtattttcttatccattctccaaaaatcttgtggaagcaagtggaattgttggaagtgatccatatttagcacctgaagtctgtatatttgcgaagtatgacccacgtcccgtagatatttggtcttctgcaatcatttttgcatgtatgatattgaagaaatttccatggaaaattccgaaattaagggacaattctttcaaattattttgttccggacgtgattgcgactccttaagtagcttggttacaagaactcctgatccaccttcctacgatgaatctcactctacagaaaagaaaaaacccgaaagctcttccaataatgtatctgatcctaataatgttaatatcgggccacaaagattgttgcactctttaccagaagagactcagcatattgttggacgtatgattgatttggcgcccgcatgcagaggaaatatcgaagaaatcatggaagatccttggatccgtagcattgatatgtgccacttggttgaagatggattatctttcaaagtggttagaggagaagaccatcatcacacacaagtggatcaaagtgaagcacatattgcaggccttgaaaagaaaaagaaaaagcaaaataatcaatga

SEQ ID NO: 9305 - DNA, 1668 bp, Saccharomyces cerevisiae
atggatgagcaagttatttttacaacaaatacctcaggaacaatagcttctgtacactcatttgaacagataaatttgaggcaatgctccactcaatcaagaaatagctgtgttcaagtaggaaataaatacctttttattgctcaagcacaaaaagcattaatcaatgtctacaatctgtcaggttctttcaaaagagaatctgttgaacagcgcttaccattacctgaaatcctaaaatgtctggaagtagttgaaaatgatggtgtgcagtatgatagaattcaaggtgtcaatcataatttaccagacttcaatcttccgtaccttttacttggctccaccgaatcgggtaaattgtacatatgggagttaaattcagggattttattgaacgtgaagcctatggctcattaccaaagtatcaccaagattaagtccattttaaacggcaagtatattattacttctggtaacgattcgagagttattatatggcaaactgttgacttggtatcagcgtccaatgatgatcctaagcctttatgtatccttcacgatcatactctacccgtgacagatttccaagtttcttctagtcaaggaaaatttttatcatgtactgatacgaaactcttcacagtatctcaagatgctaccattagatgctatgatttgagtttaataggcagcaaaaagaagcagaaggcaaacgaaaatgacgttagtattggtaagaccccagtattgcttgcgacatttacaactccttattctatcaaatccattgtactggatcctgctgacagagcatgctatattggtactgcggaaggttgtttttcattgaatttattttataaactaaagggtaatgctatcgttaatctgctacagtccgccggagtaaacacagttcaaaaaggtagggttttttccctagtgcaacgtaactcactaactggcggcgaaaatgaagatttggatgcactatatgcaatgggccaacttgtctgtgagaatgtcctaaattcaaatgtgtcatgcctagaaatatcaatggatggtacattattattgatcggtgatacggaggggaaagtttctattgcggaaatttactcaaaacaaatcattagaactatccaaactttaactacatcacaggattcagttggagaagtgaccaatctcttaaccaacccttacagactcgaacgtggaaatttactttttgaaggagaatccaaaggcaaacaacctagtaataataatggtcacaattttatgaagataccaaacttacaaagagttatctttgatggtaaaaacaaaggccatttacacgatatttggtatcagataggagaaccagaagcagagacagatcctaacctcgcattaccacttaacgactttaatgcctatttggagcaggtcaaaacgcaagaatcgatattttcacatatcggtaaggtgtcaagcaatgtaaaagtgattgacaataaaatcgacgccacttcatctttagacagcaatgccgctaaagatgaggaaattacagaacttaagaccaacatagaagcattaactcatgcctacaaggagttacgtgacatgcacgaaaagctgtacgaggaacaccaacagatgcttgacaagcaataa

SEQ ID NO: 9306 - DNA, 1668 bp, Artificial Sequence
  Description of Artificial Sequence: Synthetic polynucleotide
atggatgagcaagttatttttacaacaaatacctctggaacaatagcttctgtacacagttttgaacagataaatttgaggcaatgctccactcaatctagaaatagctgtgttcaagtaggaaataaatacctttttattgctcaagcacaaaaagcattaatcaatgtctacaatttatctggttctttcaaaagagaatctgttgaacagcgcttaccattacctgaaatcttgaaatgtttagaagtagttgaaaatgatggtgtgcagtatgatagaattcaaggtgtcaatcataatttaccagacttcaatcttccgtaccttttacttggctccaccgaaagtggtaaattgtacatatgggagttaaatagtgggattttattgaacgtgaagcctatggctcattaccaaagtatcaccaagattaagtccattttaaacggcaagtatattattacttctggtaacgattccagagttattatatggcaaactgttgacttggtatctgcgtccaatgatgatcctaagcctttatgtatccttcacgatcatactttacccgtgacagatttccaagtttcttctagtcaaggaaaatttttaagttgtactgatacgaaactcttcacagtatctcaagatgctaccattagatgctatgatttgagtttaataggcagcaaaaagaagcagaaggcaaacgaaaatgacgttagtattggtaagaccccagtattgcttgcgacatttacaactccttattctatcaaatccattgtattggatcctgctgacagagcatgctatattggtactgcggaaggttgtttttctttgaatttattttataaattgaagggtaatgctatcgttaatttattgcagtccgccggagtaaacacagttcaaaaaggtagggttttttccttagtgcaacgtaactctttgactggcggcgaaaatgaagatttggatgcattatatgcaatgggccaacttgtctgtgagaatgtcttgaatagtaatgtgtcttgcttagaaatatccatggatggtacattattattgatcggtgatacggaggggaaagtttctattgcggaaatttactctaaacaaatcattagaactatccaaactttaactacatctcaggattctgttggagaagtgaccaatctcttaaccaacccttacagactcgaacgtggaaatttactttttgaaggagaatccaaaggcaaacaacctagtaataataatggtcacaattttatgaagataccaaacttacaaagagttatctttgatggtaaaaacaaaggccatttacacgatatttggtatcagataggagaaccagaagcagagacagatcctaacctcgcattaccacttaacgactttaatgcctatttggagcaggtcaaaacgcaagaaagtatattttctcatatcggtaaggtgagtagcaatgtaaaagtgattgacaataaaatcgacgccacttcttctttagacagcaatgccgctaaagatgaggaaattacagaacttaagaccaacatagaagcattaactcatgcctacaaggagttacgtgacatgcacgaaaagttgtacgaggaacaccaacagatgcttgacaagcaatga

SEQ ID NO: 9307 - DNA, 1224 bp, Saccharomyces cerevisiae
atgcctttgaatattattgggacggctctcctagacgggactgacaagattccttactatcaaacaatcaaaaaggtggcaccttatgtgctagcgactggtgccattaaatattggtcgagagggccatcaaatacatgggaaagaaagttgcacggtaaagtttacttggttactggcgctacctctcaaggaatgggaacatccgtggcttataaaatggcagagttaggtgcacaattaatcatcttgactagggaagtagatgaatgggttactgaatggtgcgaagaattacgtgaaaagacaaagaacgagttgatttttgtagaaaaatgtgatttgagcaatttgtgggagattcgtaagtttgccacaagttggttagacaattcgccacctagaagattagatggcgttattgtcatgtccggtgatatggaaccatggggtatcccgaaaatatctttgccacagaggagatcatctaaggatgggctggaattgcaaattgctacaaactatgtagcaattttccatcttttaaacttattacagcctagtttcaaggctcaaccgcctgatagagatgtaagaataattcttgccacctgctggttacaagttgttggtgatattaatatagaagatccgttgtggcaaaatgccaaatacaaaagcgccttgaagtttttcgcaagcagcaagctacaattgggattgagtatgatggaattgcaaagaagacttaccgaagacataaaaaaccaaaagacgaatggcgctgaaagaacaggaaaaaatgttaccattactatggttcaacctggaactatgagatcaaatagcctacgccgcgtcattagtaatggttcggtggtattgttaataatactttactgtattctgttgtaccccatattgtggctgtttaccaagagtggtcgtcgtggtgatcaaagtttcttgtacgctttaatgacaccggaattggaggaagtaaacttaaaagacacgaaggttaagtatatctcagactgttcaattgtgaaatttgctcgtaaagaatttgatgacgaggaattacagaagaaactatttgataatacggaaagagatattttacaattggaaaagaaagtcgcggcaaagagaaatgccaataagaccgggaatcaaaattctaaaaagaagagtcagaacaagagtagaaaagatgattag

SEQ ID NO: 9308 - DNA, 1224 bp, Artificial Sequence
  Description of Artificial Sequence: Synthetic polynucleotide
atgcctttgaatattattgggacggctctcttggacgggactgacaagattccttactatcaaacaatcaaaaaggtggcaccttatgtgttggcgactggtgccattaaatattggtccagagggccatccaatacatgggaaagaaagttgcacggtaaagtttacttggttactggcgctacctctcaaggaatgggaacatccgtggcttataaaatggcagagttaggtgcacaattaatcatcttgactagggaagtagatgaatgggttactgaatggtgcgaagaattacgtgaaaagacaaagaacgagttgatttttgtagaaaaatgtgatttgagcaatttgtgggagattcgtaagtttgccacaagttggttagacaattctccacctagaagattagatggcgttattgtcatgtccggtgatatggaaccatggggtatcccgaaaatatctttgccacagaggagatcttctaaggatgggttggaattgcaaattgctacaaactatgtagcaattttccatcttttaaacttattacagcctagtttcaaggctcaaccgcctgatagagatgtaagaataattcttgccacctgctggttacaagttgttggtgatattaatatagaagatccgttgtggcaaaatgccaaatacaaaagcgccttgaagtttttcgcaagcagcaagttacaattgggattgagtatgatggaattgcaaagaagacttaccgaagacataaaaaaccaaaagacgaatggcgctgaaagaacaggaaaaaatgttaccattactatggttcaacctggaactatgagatctaatagcttgcgccgcgtcattagtaatggttctgtggtattgttaataatactttactgtattttattgtaccccatattgtggttatttaccaagagtggtcgtcgtggtgatcaaagtttcttgtacgctttaatgacaccggaattggaggaagtaaacttaaaagacacgaaggttaagtatatcagtgactgttctattgtgaaatttgctcgtaaagaatttgatgacgaggaattacagaagaaattatttgataatacggaaagagatattttacaattggaaaagaaagtcgcggcaaagagaaatgccaataagaccgggaatcaaaattctaaaaagaagagtcagaacaagagtagaaaagatgattga

SEQ ID NO: 9309 - DNA, 996 bp, Saccharomyces cerevisiae
atgaggtctattaaatgtgtgataattggtgatggtgcagtaggtaaaacgtcacttctaatatcatatactaccaattcgttcccaacagactatgttccaacggtttttgataattattctactacgatagctatcccgaacggaactgcgagtagccccctagagcttgacaatggtaatgataaaagaggttcactttcatctgccagttcttcaccaagtacggacagaaaactatataaaatcaatttatgggacactgcaggacaggaagattacgatcgtttaagaccgttatgttatccccaaacagatatttttttaatatgtttctcagtaagcgaacatgctagttttgccaatgtcacagaaaaatggctacctgaactgaagcagacttccaatattgaaggtacctctctttatactaaattagggaagtatccaattctattggtaggcaccaaaagtgacctaagagatgatccggcaactcagaaaaaattgcaggaagcaaactccgattacgtgtctcaagaggaaatagatgaactcgtacaaagatgtgggtttatgggctataccgaatgttcagctgctacccaagcaggtgtccgggaagtctttgaacaggcggtgaggtacgctatctacgaaccagaatcccctaaccaaaaatcagcaaatcatactctaactgatgaattaacgactgcaacaaccaacaccaatggagataaaaatattcgagaacaaaaacagcaaccacaccataataatagtacagatagtactcttccgaaaggaagcttacagcaggagaaggaagctctcaatatcaaacccacaaaaaagggacaaaaagacaaaattcacgagcaatcaaaaagcaaaggtagtaaaattgcctcaaataatcatcacaacaagcaagctaaaccaaagacgagaaacgacaagaagaaaaagaagtcaaagtgtgtaatactttaa

SEQ ID NO: 9310 - DNA, 996 bp, Artificial Sequence
  Description of Artificial Sequence: Synthetic polynucleotide
atgaggtctattaaatgtgtgataattggtgatggtgcagtaggtaaaacgtcccttttgatatcttatactaccaattctttcccaacagactatgttccaacggtttttgataattattctactacgatagctatcccgaacggaactgcgagtagccccttggagcttgacaatggtaatgataaaagaggttctctttcttctgccagttcttctccaagtacggacagaaaactttataaaatcaatttatgggacactgcaggacaggaagattacgatcgtttaagaccgttatgttatccccaaacagatatttttttaatatgtttcagtgtaagcgaacatgctagttttgccaatgtcacagaaaaatggttacctgaattgaagcagacttccaatattgaaggtacctctctttatactaaattagggaagtatccaattttattggtaggcaccaaaagtgacttgagagatgatccggcaactcagaaaaaattgcaggaagcaaactccgattacgtgtctcaagaggaaatagatgaactcgtacaaagatgtgggtttatgggctataccgaatgttctgctgctacccaagcaggtgtcagagaagtctttgaacaggcggtgaggtacgctatctacgaaccagaatcccctaaccaaaaatctgcaaatcatactttaactgatgaattaacgactgcaacaaccaacaccaatggagataaaaatattagagaacaaaaacagcaaccacaccataataatagtacagatagtactcttccgaaaggaagcttacagcaggagaaggaagctctcaatatcaaacccacaaaaaagggacaaaaagacaaaattcacgagcaaagtaaaagcaaaggtagtaaaattgcctctaataatcatcacaacaagcaagctaaaccaaagacgagaaacgacaagaagaaaaagaagtccaagtgtgtaatactttga

SEQ ID NO: 9311 - DNA, 723 bp, Saccharomyces cerevisiae
atggtcgctttaatctctaagaaaagaaagctagtcgctgacggtgtcttctacgctgaattgaacgaattcttcaccagagaattagctgaagaaggttactccggtgttgaagtccgtgtcactccaaccaagaccgaagttatcatcagagctaccagaactcaagatgttttgggtgaaaacggtagaagaatcaacgaattaactttgttggttcaaaagagattcaagtacgctccaggtactattgtcttatatgctgaaagagttcaagaccgtggtttgtccgctgtcgctcaagctgaatctatgaaattcaaattgttgaacggtttggctatcagaagagctgcttacggtgtcgtcagatacgttatggaatctggtgctaagggttgtgaagttgttgtttccggtaaactaagagctgccagagctaaggctatgaaatttgctgacggtttcttgattcactctggtcaaccagtcaacgacttcattgacactgctactagacacgtcttgatgagacaaggtgttttgggtatcaaggttaagattatgagagacccagctaagagcagaactggtccaaaggctttgccagatgctgtcaccatcattgaaccaaaagaagaagaaccaattcttgctccatctgtcaaggactacagaccagctgaagaaactgaagctcaagctgaaccagttgaagcttag

SEQ ID NO: 9312 - DNA, 723 bp, Artificial Sequence
  Description of Artificial Sequence: Synthetic polynucleotide
atggtcgctttaatctctaagaaaagaaagttggtcgctgacggtgtcttctacgctgaattgaacgaattcttcaccagagaattagctgaagaaggttactccggtgttgaagtccgtgtcactccaaccaagaccgaagttatcatcagagctaccagaactcaagatgttttgggtgaaaacggtagaagaatcaacgaattaactttgttggttcaaaagagattcaagtacgctccaggtactattgtcttatatgctgaaagagttcaagaccgtggtttgtccgctgtcgctcaagctgaatctatgaaattcaaattgttgaacggtttggctatcagaagagctgcttacggtgtcgtcagatacgttatggaatctggtgctaagggttgtgaagttgttgtttccggtaaattgagagctgccagagctaaggctatgaaatttgctgacggtttcttgattcactctggtcaaccagtcaacgacttcattgacactgctactagacacgtcttgatgagacaaggtgttttgggtatcaaggttaagattatgagagacccagctaagagcagaactggtccaaaggctttgccagatgctgtcaccatcattgaaccaaaagaagaagaaccaattcttgctccatctgtcaaggactacagaccagctgaagaaactgaagctcaagctgaaccagttgaagcttga

SEQ ID NO: 9313 - DNA, 930 bp, Saccharomyces cerevisiae
atgaacttccacacggcaagaatatctcaggtcggtgtcatttctagggctctactttcttctgtaagtagacgttggattcatgtaacgccaataagtcttaataattcaggaggatcactattcggaagcattacagaaaataaaccaaaggaaggaaaaaacaggggggatgaagatgcaggcagcttctctaataggttagcgattgcttctgattcttctggagaggctcctgaagttaatagggattcaataaccatagaaaacgataaactactacagcaacatatcatatcgttgcagcaaccggaacaattagcatcacagagcttattatctcctttgaaaagggaaatatatgaagctaattgtaaaattaatggtgggttttacaagaaagatactattgtaaagttaccaaattctagcgaacgttacaagctaaagttaacaaaaagagaaattgaagtactagaaccttccgtatatgctcagtcatatagaattaaatcgtcgatgaaaaaggctacacttttgttgaggttattgggaggcctcgacgttatgaaagctatatctcagtgtcacttttctaataagaaaattgctcgcgaagtagcagaactacttcaaaaaggtgtaaaagatggccaaaaattaggtttgaaaccagaggacttatatatctctcagatttggacagggagtgacgggttttggagaaaacgtgttgaattcaaggcaaggacaagaatcggaatcataagtcatccttacatacatgtcagatgtattctgagaacaaagagtgttacgaaacgaagacttgcttatgaagcacatttaaaagagcaaaaaagagcgccatgggtacagttgggagataagcccattaggggtgttacaggcggcgtatacaagtggtga

SEQ ID NO: 9314 - DNA, 930 bp, Artificial Sequence
  Description of Artificial Sequence: Synthetic polynucleotide
atgaacttccacacggcaagaatatctcaggtcggtgtcatttctagggctttactttcttctgtaagtagacgttggattcatgtaacgccaataagtcttaataattctggaggatctttattcggaagcattacagaaaataaaccaaaggaaggaaaaaacaggggggatgaagatgcaggcagcttctctaataggttagcgattgcttctgattcttctggagaggctcctgaagttaatagggattctataaccatagaaaacgataaattattgcagcaacatatcatatctttgcagcaaccggaacaattagcatcccagagcttattatctcctttgaaaagggaaatatatgaagctaattgtaaaattaatggtgggttttacaagaaagatactattgtaaagttaccaaattctagcgaacgttacaagttgaagttaacaaaaagagaaattgaagtattggaaccttccgtatatgctcagagttatagaattaaaagcagtatgaaaaaggctacacttttgttgaggttattgggaggcctcgacgttatgaaagctatatctcagtgtcacttttctaataagaaaattgctcgcgaagtagcagaattgcttcaaaaaggtgtaaaagatggccaaaaattaggtttgaaaccagaggacttatatatctctcagatttggacagggagtgacgggttttggagaaaacgtgttgaattcaaggcaaggacaagaatcggaatcataagtcatccttacatacatgtcagatgtattttaagaacaaagagtgttacgaaaagaagacttgcttatgaagcacatttaaaagagcaaaaaagagcgccatgggtacagttgggagataagcccattaggggtgttacaggcggcgtatacaagtggtga

SEQ ID NO: 9315 - DNA, 1911 bp, Saccharomyces cerevisiae
atgaactccaatagtaccatcggaaggaccacccttggagaatctgatacgatatccctgtcattcagtgaaccaagtagcagtctgaattcacgatcaacggatgttgtcttcgcatctacttcaactttagtaccccaacaaggaagtctgacctcattaccgcccgtgtctagtacagctactcctacatattattctacaagcttaacatatgatgagactttgcatacatccattgatgtatcttcgacaagtactttagtatcatctaccgacagcagttcatcgagcgagcaagatacgtatagttcccaatatgacccagctacctcctcatactcaataattacaccatccatgtccattttctcatcgacgtcaccaatgtcatcatcgtcgtcaataacgtcggaatggtcatcgttaacatcaacaacaccaacgttatcgtcatcagctacatcgctgtcatcatcatggtcgtcgttatcatcaccatcttcgttactggtatcgtcctcgttgtcattatcactatcttcatcatattcagacactaaattgttttcgttcgacagcagatcttctattttctcaccatcaacacccaccgtaatatcccctagttacacatacttgtcttccatatctgcaacttcatttcaaattagtaccacttcagaactctcttctagttggttctcaacaatttcttctccttctacgatatcaaataaagataccacattcccaagttccagtcggaatacttccacatcgttttacagttcatcgctttcatcgacgaacgatttttcaaccataagcaaatcatcgaaactcagtccatcagcttcatcttcgacagtttccataagcacgatttccgtgccaacgtcaagttctgttagctcatccagcagtaaagtaccttcaaaccgtccttcatcatcatcatcatcagatgatacaacaagtgcttactcaagcacgtatacttttcagtccttacaatctactactagcagcagtataccacccaccactcaaacacccagcactagtacgatttctacgtctcccataccaacatccagtcaggtcttcaatacggtagccatttcaagctccgaagattcaaaaactatttattatttctatacccaaacatatgatattactgactcctctacaacgttcgtgacgggattacctacgaccatagcagttgcaaaaagtgaggtaacctcattttccgctccatcttcgacgatcacagctgacatgtctttctatcagcactggcttgatggcagtttggataataacaaaaaccaaggcacttcaaagacaaatactggtaccattgttggaagtgtggtaggaagcgtcggtggtattcttatatgtgtactagtagtttggttcatgctggttagaaaaaggaaggcaaagaggcatttcaaggaaaacgattccttctgtcacgagattgggcgcagaacgggattcccaacaactgcccaagcaaaagaggcgtcacttcaagctcaagactcgggatcacagcaacgaaacaccgagactgcttctgctaataatccgttcagcaacgaattcaattttaaggcaagaggaaatcctcctccagtgccaccaccaaggaatgttaccgcaatgaatggctcctttcaaaatatgcggagtaatttcatggaccaggaaaacagattttcctatggctcttcatttacatattcgtcattgggttcatctactcaaggtggcttttctactttatcttcaaattcgatacgactcggacgtggtttagataatgacatctctcatgatgagagaaatacagttcagaacaattcacaagggttcttgagggaaattatatga

SEQ ID NO: 9316 - DNA, 1911 bp, Artificial Sequence
  Description of Artificial Sequence: Synthetic polynucleotide
atgaactccaatagtaccatcggaaggaccacccttggagaatctgatacgatatccttatctttcagtgaaccaagtagcagtttgaattctagatctacggatgttgtcttcgcatctacttctactttagtaccccaacaaggaagtttaaccagtttaccgcccgtgtctagtacagctactcctacatattattctacaagcttaacatatgatgagactttgcatacatccattgatgtatcttctacaagtactttagtatcttctaccgacagcagttcttctagcgagcaagatacgtatagttcccaatatgacccagctacctcctcttactctataattacaccatccatgtccattttctcttctacgtctccaatgtcttcttcttcttctataacgagtgaatggtcctctttaacatctacaacaccaacgttatcttcttctgctacatctttatcttcttcttggtcctctttatcttctccatcttctttattggtatcttcctctttgtctttaagtttatcttcttcttattctgacactaaattgttttctttcgacagcagatcttctattttctctccatctacacccaccgtaatatcccctagttacacatacttgtcttccatatctgcaacttcttttcaaattagtaccacttctgaactctcttctagttggttcagtacaatttcttctccttctacgatatccaataaagataccacattcccaagttccagtagaaatacttccacatctttttacagttcttctctttcttctacgaacgatttttccaccataagcaaaagcagtaaactcagtccatctgcttcttcttctacagtttccataagcacgatttccgtgccaacgtccagttctgttagctcttccagcagtaaagtaccttccaaccgtccttcttcttcttcttcttctgatgatacaacaagtgcttactccagcacgtatacttttcagtccttacaatctactactagcagcagtataccacccaccactcaaacacccagcactagtacgatttctacgtctcccataccaacatccagtcaggtcttcaatacggtagccatttctagctccgaagattctaaaactatttattatttctatacccaaacatatgatattactgactcctctacaacgttcgtgacgggattacctacgaccatagcagttgcaaaaagtgaggtaacctctttttccgctccatcttctacgatcacagctgacatgtctttctatcagcactggcttgatggcagtttggataataacaaaaaccaaggcacttctaagacaaatactggtaccattgttggaagtgtggtaggaagcgtcggtggtattcttatatgtgtattggtagtttggttcatgcttgttagaaaaaggaaggcaaagaggcatttcaaggaaaacgattccttctgtcacgagattgggcgcagaacgggattcccaacaactgcccaagcaaaagaggcgtcccttcaagctcaagactctggatctcagcaaagaaacaccgagactgcttctgctaataatccgttcagcaacgaattcaattttaaggcaagaggaaatcctcctccagtgccaccaccaaggaatgttaccgcaatgaatggctcctttcaaaatatgagaagtaatttcatggaccaggaaaacagattttcctatggctcttcttttacatattcttctttgggttcttctactcaaggtggcttttctactttatcttccaattctataagactcggacgtggtttagataatgacatctctcatgatgagagaaatacagttcagaacaattctcaagggttcttgagggaaattatatga

SEQ ID NO: 9317 - DNA, 1212 bp, Saccharomyces cerevisiae
atgtcagaaacagaactgtcgaaagaagatgctgttacaaaaaaggataacgaggaacaagtcaagaaggctttactcgatccaacaaaaaagagaaaagctgaagatgaaattgagattgacctgaaaagctccattcccctatcaaaaaaacagaaacgtctcttgagaagaggtaaagttactctagaggagttgaatgcgaagtacaatatcgaccctaagtcaatcgaggaatacaaagaagatgctgaaaagaaaaagtctggtgcttctgagaaagacgcccagggtgaagaatctacaatcaacactccaacaggagatgaatctggcgaggttgtaaaaaagaagaagaaagatgaaaataaatatggtgtttggattggtaacttatccttcgacaccacaaaggacgatttagtaagattttttattgctaaaacaaaagacaacgaagatgaaaagagcagagtcaccgaacaagacataaccaggttatccatgcctcgtgttgctgccaagaactctaacgccatgaaaaataagggattttgctacatgtttttcaagaacgtcgagcagatgaaagcggtcttagaattatctgaatctcatttaaacggaaggaatatgctaatcaaggactccgaaaattattcaggtaggccagacaaggacgatttagttgccatgtccaaaaatccaccgtcaaggattctatttgtcggtaatttgtcattcgatgtcacagatgatctgttaagaaaacacttccaacattgtggtgatatcgtgaaaatccgcatggcaacattcgaagatagtggtaaatgtaaaggattcgcatttatcgacttcaagaatgaagaaggatctactaatgcattaaaggataaaagttgtagaaaaattgccggaaggccattgcgaatggaatacggtgaagatagaagtaaaagacaagttcgtaagaaggttgaaaatgtatccagaaacaattcctcatcatttgatatctctaacaacaaaggatacgatcgtgcgggacaggataacggcagcaaacccgaatacaagcggtccaacgccaacagacgtccacctgtagattccaataaccgaactaagagcagtgtagctttagccactgctcagagaggttctgcagctattgtcccatcacaaggtaagaaagtgaagtttgactaa

SEQ ID NO: 9318 - DNA, 1212 bp, Artificial Sequence
  Description of Artificial Sequence: Synthetic polynucleotide
atgtctgaaacagaattatccaaagaagatgctgttacaaaaaaggataacgaggaacaagtcaagaaggctttactcgatccaacaaaaaagagaaaagctgaagatgaaattgagattgacttgaaaagctccattcccttatccaaaaaacagaaacgtctcttgagaagaggtaaagttactttagaggagttgaatgcgaagtacaatatcgaccctaagtctatcgaggaatacaaagaagatgctgaaaagaaaaagtctggtgcttctgagaaagacgcccagggtgaagaatctacaatcaacactccaacaggagatgaatctggcgaggttgtaaaaaagaagaagaaagatgaaaataaatatggtgtttggattggtaacttatccttcgacaccacaaaggacgatttagtaagattttttattgctaaaacaaaagacaacgaagatgaaaagagcagagtcaccgaacaagacataaccaggttatccatgcctcgtgttgctgccaagaactctaacgccatgaaaaataagggattttgctacatgtttttcaagaacgtcgagcagatgaaagcggtcttagaattatctgaatctcatttaaacggaaggaatatgttgatcaaggactccgaaaattattctggtaggccagacaaggacgatttagttgccatgtccaaaaatccaccgtctaggattttatttgtcggtaatttgagtttcgatgtcacagatgatttattaagaaaacacttccaacattgtggtgatatcgtgaaaatccgcatggcaacattcgaagatagtggtaaatgtaaaggattcgcatttatcgacttcaagaatgaagaaggatctactaatgcattaaaggataaaagttgtagaaaaattgccggaaggccattgagaatggaatacggtgaagatagaagtaaaagacaagttcgtaagaaggttgaaaatgtatccagaaacaattcctcttcttttgatatctctaacaacaaaggatacgatcgtgcgggacaggataacggcagcaaacccgaatacaagaggtccaacgccaacagacgtccacctgtagattccaataacagaactaagagcagtgtagctttagccactgctcagagaggttctgcagctattgtcccatctcaaggtaagaaagtgaagtttgactga

SEQ ID NO: 9319 - DNA, 1101 bp, Saccharomyces cerevisiae
atgcaatcgagcttacctcaatttacgttcaaatggcccaaaggacccgaagcaattattctgacaggcacgttcgacgactggaaaggtactttgccgatggtgaaggaccccagtggcgccttcgaaataacgctgccagtaacgtttgatagccctagcagcaagttttatttcaagtttattgttgatggccaatggctgccaagcaaagactacaaggtgaacatcgacgagggagtggaaaacaactttattaccgaggaagacgtaataaagcaacgcgaaaatggctctagcacgctggtacctgaaagtgccggattagctgtttcaaagaatgcccctcttatcgaaccagaagctgaaaaacgtgcaaaaaaattaagaaagttcaagatcaagagagtgatcaagacaaataaacaaaccggagaaaggtcgatattttcccaagaagtggttgaattgcccgatagcgaggatgaaacccagcaggtgaacaaaacgggcaagaatgcggatggcttaagcggtactacaacgataattgagaataatgttggtgtaaacgaggaaaaagcaatcaagccgtatgaagagaatcaccccaaagttaatctagttaagagtgaaggatatgttacggacggtttgggtaagacgcaatcttctgagtctagattatatgaactatcggccgaagatcttgaaaaggaagaagaggaagaggacgaagataaaggcggcggtaaggacaccagtacaagtgcagacgctgaagcttcagaagatcaaaataaggaaccattaagtaaatccgctaaatttgaaaaaccggaagaaaaagtacctgtaagctcaattacaagccatgctaaagagacttctgtgaaaccaaccggcaaggttgcgactgagactcaaacttacgagacgaaacagggcgctcctaccgctgccgcaaaaaaaatcgaagctaagaaagctactagaccttcgaaacctaagggcacgaaagaaacaccaaataaaggtgtccaaaagaaccctgctaagaatggagggttctttaaaaagttggcccagcttttgaagtga

SEQ ID NO: 9320 - DNA, 1101 bp, Artificial Sequence
  Description of Artificial Sequence: Synthetic polynucleotide
atgcaaagcagcttacctcaatttacgttcaaatggcccaaaggacccgaagcaattattttaacaggcacgttcgacgactggaaaggtactttgccgatggtgaaggaccccagtggcgccttcgaaataacgttaccagtaacgtttgatagccctagcagcaagttttatttcaagtttattgttgatggccaatggttaccaagcaaagactacaaggtgaacatcgacgagggagtggaaaacaactttattaccgaggaagacgtaataaagcaacgcgaaaatggctctagcacgttggtacctgaaagtgccggattagctgtttccaagaatgcccctcttatcgaaccagaagctgaaaaacgtgcaaaaaaattaagaaagttcaagatcaagagagtgatcaagacaaataaacaaaccggagaaaggtctatattttcccaagaagtggttgaattgcccgatagcgaggatgaaacccagcaggtgaacaaaacgggcaagaatgcggatggcttaagcggtactacaacgataattgagaataatgttggtgtaaacgaggaaaaagcaatcaagccgtatgaagagaatcaccccaaagttaatttggttaagagtgaaggatatgttacggacggtttgggtaagacgcaatcttctgagtctagattatatgaattatctgccgaagatcttgaaaaggaagaagaggaagaggacgaagataaaggcggcggtaaggacaccagtacaagtgcagacgctgaagcttctgaagatcaaaataaggaaccattaagtaaatccgctaaatttgaaaaaccggaagaaaaagtacctgtaagctctattacaagccatgctaaagagacttctgtgaaaccaaccggcaaggttgcgactgagactcaaacttacgagacgaaacagggcgctcctaccgctgccgcaaaaaaaatcgaagctaagaaagctactagaccttccaaacctaagggcacgaaagaaacaccaaataaaggtgtccaaaagaaccctgctaagaatggagggttctttaaaaagttggcccagcttttgaagtga

SEQ ID NO: 9321 - DNA, 5247 bp, Saccharomyces cerevisiae
atgacttctaagccgtctactagaaatgattatttaccaagggaaactcacaatggcgaatatactggtgattctcccgaatggcagttgcagattaatatcacaaacaaaataggtggtataaatggagatatttggttgtcaagggacggaaggagtgttaaatggtgtattgaagaccagtgcttacgtcagtttacttataatcaaaagatcatcaaagctgggtacattgattttgaaaagacaccagattgttttgtggtagttctctctgatattgcgcatgtatatatgttgaaaaatgggggttctacgactgtatgtttcccattccagataggtaatgcattctggtatgcaaatggagtaattttagagagagagacttcagcgtccttcatggatggtggctacgatttaaaacccattgagttcgatttaaaacataaatacatcactttgacggatccgatggcgcctttcggcttgatttcgatcacaaatacctttaaaggcggtataaatagcgcttcaggtaacaaaacggatatcctgcaagactttcagctcgtgctcttcccgagtgacaaggacaagtgtatagctgtttttttagatcgaaattccaaagtgttgcgattttattacagtagaattctatcatcagatcagtcacggaagggagagctaacaatttcctcgaccaaaaaaacaggtttggacgcagcaggcaatagccaaaagagtggcgggattagcaaagatttgcgtaagttttcacatttgacgcgccggtcgacgtctataaactctaactctcatgatttcaatgcagccgaaagagtacttagtggcaatgttggcaacgcttcaggcagaacagatattttcgctttaccttcttcttgttcaagaaggagcttatctgcgaccctagatagaatggggaacaatattgccccgaccaatagagctgcaccttctggattttttgactcgtcatcagcaaatactgctactcactctaatataacgcctgtatcacaaccaatgcaacagcaacagcaagaatatttgaaccaaacagcgacctcttctaaggatattgttttgacggaaatatcgtctttgaaattaccggatgatatcatttttacttcacgacgcttgagctctattttaagtaaattaaagttcctatcgttgagatttgaacgtcgagaaggacttttaatatttcatgagcccacacatttctgcaaaatctggttgattgatcttttacccgatgttctggattctattccattcaaaatatacgggaactctccgcaaaacatgatcagactagagaacttaaagcttaaggaaccctcaagaatacaagctatgtatattcatgaactccttgaaagttgcctgattttggtgtcggagggacagaataaggaagaatacaaagcatgtctatatgaccccttcgttaaaattacatccccttccaaaaatatctccgaagagctcactaaacaaaattctcttccttccttacagaaactattcccttatcccgagactagtttcaccaaactgtgcttcgaagccgtcaagtatattacttctcctgcattcaatatttcatttatatttctatggcaatctgcatattcgatacttctttcaagggctaacgacgacgtagttgggggtttgaaaatggagcacgatgctttttcactggttctttcattgctgattttaccgatacctagctcctctgctcaagaataccaggagtacaaagaaatatatgaacgcgacctgtttcagcatttaaagcaggactcagaaataacaagctctgtgctaccaagaattgttattggattgcatttaataagggaggaatattccctgaatgtattgtgtcgaaatgagcatgcgttgttaggacagtttctaagattcgctactgccgcgatgggctggcctgatctgtggcaatcttactatgtaccgaaaatggattcagaatcgaaaactttcctacatccaagggaacaaaattccactttttttcatcccttagatgaaccgccatcgattaccaagtcgttatacagcataactgaaaacagttcaataccattatgtccgttcattagtttctcgagacttgttgcaaccgatacacaggtcgaattacgcattactccaagaagtttcaaaatcttgggcttgtatgaactcgtacactctccaaattttttaccggattatgttttaggcatcctttccagctttaaagtggataaagacgagttacaaacatatcccttaggcattttggtgcctttacaaaacattttaaaaattctggaagataagctatctgaagtaagagacaacttggagttattagatagggccgatttacaaaggtgtagtgccattatcaatagtataagaagtgattctaaagaagttctcaaaagaggccaaagagatagttatatgttatgcaaagtgccactcgccaagaacagaagctctttgtctaagaagcccagtgacatatattcaatattatccgagattgtgaaaagtgcaagtcaagttccactggatggatcagctatgaggatgtcgaatattcaggatgatgaagatattgatgaaggtcgatctctcaaattaaatgcaggactgattttttcagaagataaaagatttactcatgttgtatcactattagcttattacaggcccacaaaaactcaattttttaccaccaagacagaatatgcccagatactagctcaaaagaaatatttcgctaaaatcatggctttgaggacatgtacaaatggtgttggctggggtgcagtggcatatgcaacagaaaaaccaatatctacccaaaaatgggtcattcaacccctcaacttaatttccgtgtttcctgatgacacaaagataactgtgaaagctccagaagatatagcacacgatattgtggagtgggggcaatttcatgccggtgttagctccggcctccgtatctcaaagaaggcaactggaattacaggtagttggattgcatttaataagccaaaagaactagatgcttatcacggtggtttccttctcggactgggacttaatgggcatttgaagaatttagaggaatggcatatatacaattatctaagccccagaaatactcacataagtattgggttacttttgggaatgagttcaagtatgaaaggtagtatggactctaaactaatcaaagttattagtgtacacctagtggcctttcttccaagcggatctagcgatttgaatatagatctaaaactacaaactgctggtattatagggatgggtatgttatatttaaactcaaggcataaacgaatgagcgattcaatttttgcccagctggtgtcactgctcaatgtaaatgatgaaatggttgctgacgaagaatatcgattagcagcgggtatatcgctgggcctcataaacctaggggctggtcagacgaaactgagaaagtgggattcatcattgttgggcttgggggacgatcttccggaagatgtttatgactctagtgatgttgaacaaaatgtaatgtatgaagacctgactacgaagttattagagatcgtcacaagcacatatgatgtagaaaacgattggataccagagaattcgcaaattggcgcagtaattgcaatcatgtttttatttttgaagtcaaacaattttggaatttccaacatgcttaaagttgacttaaaggaaatattaaaagcaaatattaacacccgccctgaattattaatgtaccgagaatgggcatccaatatgattttatgggaatttataggcgacgacctatcgttcatcatgaaagatgttgatattggagtaaaatttagtgaacttaataccgatttgcttcctatatattacactatggcgggtaggatcttagccatgggtattagatttgcctctactggaaatttgaaaattcggaatatactgctttctctcgttgataagtttctgcctctttatcagtacccaggaaagcagaatctagactttaggttgacaatttctgttattaacgttttaactaatgtcatcgttgtttctttgagcatggttatgtgtgccagtggcgatttagaagttttgaggagggtcaaatatcttcatgaagttgcatctggtccatattcagacttatttcaagaaattcctagttctaaaagtgatgtttcaggtgtaacacaggtgacttcaaacactaacacgcctggaaatagtgatcgtgaaagggttgatgagaccgctgcttctctcgatgacgaaaggtcctcaaatggcagtgatattagtgatccaacagcatatctagaagacaaaaaggatatagatgaccattacggtaagtttatttcgacaaatcttgcactgggttttcttttccttgggtctggacaatacgctctcaatacttctactttagaatctatcgctttcttaagcatgtccgttttacccacatatacaactccacatcccttacaagaattgaagcatttctggagcatggctgtagagcctcgttgccttgttataaaggacatttccactggtgacgcagtaaacaacgttcctattgaattggtggtcgaggaagacgtcgaaaaagaagaagtaataagagagatatcaacaccttgcctgcttcctgatttctccaaaattaaatctattagggtaaaaatgcatggttactttccactggaagtaaatttcactaaggactactcagcttctgatttttttagtggcggtacaattatttatatacaaagaaaatccgaaagtgttttcgagaacaaagcctcttttaggaacgtagaagatattcatgtggcactcaaaagaaaggcagcagaatctaaaaattattcaagattaaacctaaaaaatgaacaaggaaataccacctcttcgcaactggttgaaagtttgggtattcaagatttgacaatggtggaactcgatactcttttgagtgcaggaaataatacagcattaacggattcagaatcttataatttaggtttgctgtgttcagataaaaacagtggagatattttggattgccaactcgaattgtggtacaaaagctttggaccacatgatgaataa

SEQ ID NO: 9322 - DNA, 5247 bp, Artificial Sequence
  Description of Artificial Sequence: Synthetic polynucleotide
atgacttctaagccgtctactagaaatgattatttaccaagggaaactcacaatggcgaatatactggtgattctcccgaatggcagttgcagattaatatcacaaacaaaataggtggtataaatggagatatttggttgagtagggacggaaggagtgttaaatggtgtattgaagaccagtgcttacgtcagtttacttataatcaaaagatcatcaaagctgggtacattgattttgaaaagacaccagattgttttgtggtagttctctctgatattgcgcatgtatatatgttgaaaaatgggggttctacgactgtatgtttcccattccagataggtaatgcattctggtatgcaaatggagtaattttagagagagagactagtgcgtccttcatggatggtggctacgatttaaaacccattgagttcgatttaaaacataaatacatcactttgacggatccgatggcgcctttcggcttgatttccatcacaaatacctttaaaggcggtataaatagcgcttctggtaacaaaacggatatcttgcaagactttcagctcgtgctcttcccgagtgacaaggacaagtgtatagctgtttttttagatagaaattccaaagtgttgagattttattacagtagaattttatcttctgatcagtctagaaagggagagttgacaatttcctccaccaaaaaaacaggtttggacgcagcaggcaatagccaaaagagtggcgggattagcaaagatttgcgtaagttttctcatttgacgcgcagatctacgtctataaactctaactctcatgatttcaatgcagccgaaagagtacttagtggcaatgttggcaacgcttctggcagaacagatattttcgctttaccttcttcttgttccagaaggagcttatctgcgaccttggatagaatggggaacaatattgccccgaccaatagagctgcaccttctggattttttgactcttcttctgcaaatactgctactcactctaatataacgcctgtatctcaaccaatgcaacagcaacagcaagaatatttgaaccaaacagcgacctcttctaaggatattgttttgacggaaatatcttctttgaaattaccggatgatatcatttttacttctcgtcgcttgagctctattttaagtaaattaaagttcttgtctttgagatttgaacgtagagaaggacttttaatatttcatgagcccacacatttctgcaaaatctggttgattgatcttttacccgatgttttggattctattccattcaaaatatacgggaactctccgcaaaacatgatcagattggagaacttaaagcttaaggaacccagtagaatacaagctatgtatattcatgaactccttgaaagttgcttgattttggtgtctgagggacagaataaggaagaatacaaagcatgtttgtatgaccccttcgttaaaattacatccccttccaaaaatatctccgaagagctcactaaacaaaattctcttccttccttacagaaattattcccttatcccgagactagtttcaccaaattatgcttcgaagccgtcaagtatattacttctcctgcattcaatatttcctttatatttttatggcaatctgcatattctatacttctttctagggctaacgacgacgtagttgggggtttgaaaatggagcacgatgctttttctttggttctttctttgttaattttaccgatacctagctcctctgctcaagaataccaggagtacaaagaaatatatgaacgcgacttatttcagcatttaaagcaggactctgaaataacaagctctgtgttaccaagaattgttattggattgcatttaataagggaggaatattccttgaatgtattgtgtaggaatgagcatgcgttgttaggacagtttttaagattcgctactgccgcgatgggctggcctgatttatggcaatcttactatgtaccgaaaatggattctgaaagtaaaactttcttacatccaagggaacaaaattccactttttttcatcccttagatgaaccgccatctattaccaagtctttatacagcataactgaaaacagtagtataccattatgtccgttcattagtttcagtagacttgttgcaaccgatacacaggtcgaattacgcattactccaagaagtttcaaaatcttgggcttgtatgaactcgtacactctccaaattttttaccggattatgttttaggcatcctttccagctttaaagtggataaagacgagttacaaacatatcccttaggcattttggtgcctttacaaaacattttaaaaattttggaagataagttatctgaagtaagagacaacttggagttattagatagggccgatttacaaaggtgtagtgccattatcaatagtataagaagtgattctaaagaagttctcaaaagaggccaaagagatagttatatgttatgcaaagtgccactcgccaagaacagaagctctttgtctaagaagcccagtgacatatattctatattatccgagattgtgaaaagtgcaagtcaagttccattagatggatctgctatgaggatgagtaatattcaggatgatgaagatattgatgaaggtagatctctcaaattaaatgcaggattgattttttctgaagataaaagatttactcatgttgtatctttattagcttattacaggcccacaaaaactcaattttttaccaccaagacagaatatgcccagatattggctcaaaagaaatatttcgctaaaatcatggctttgaggacatgtacaaatggtgttggctggggtgcagtggcatatgcaacagaaaaaccaatatctacccaaaaatgggtcattcaacccctcaacttaatttccgtgtttcctgatgacacaaagataactgtgaaagctccagaagatatagcacacgatattgtggagtgggggcaatttcatgccggtgttagctccggcctccgtatctccaagaaggcaactggaattacaggtagttggattgcatttaataagccaaaagaattagatgcttatcacggtggtttccttctcggacttggacttaatgggcatttgaagaatttagaggaatggcatatatacaattatttgagccccagaaatactcacataagtattgggttacttttgggaatgagtagtagtatgaaaggtagtatggactctaaattaatcaaagttattagtgtacacttggtggcctttcttccaagcggatctagcgatttgaatatagatttgaaattacaaactgctggtattatagggatgggtatgttatatttaaacagcaggcataaaagaatgagcgattctatttttgcccagttggtgtctttactcaatgtaaatgatgaaatggttgctgacgaagaatatagattagcagcgggtatatctttaggcctcataaacttgggggctggtcagacgaaattgagaaagtgggattcttctttgttgggcttgggggacgatcttccggaagatgtttatgactctagtgatgttgaacaaaatgtaatgtatgaagacttgactacgaagttattagagatcgtcacaagcacatatgatgtagaaaacgattggataccagagaattctcaaattggcgcagtaattgcaatcatgtttttatttttgaagtctaacaattttggaatttccaacatgcttaaagttgacttaaaggaaatattaaaagcaaatattaacacccgccctgaattattaatgtacagagaatgggcatccaatatgattttatgggaatttataggcgacgacctttctttcatcatgaaagatgttgatattggagtaaaatttagtgaacttaataccgatttgcttcctatatattacactatggcgggtaggatcttagccatgggtattagatttgcctctactggaaatttgaaaattagaaatatattactttctctcgttgataagtttttacctctttatcagtacccaggaaagcagaatttggactttaggttgacaatttctgttattaacgttttaactaatgtcatcgttgtttctttgagcatggttatgtgtgccagtggcgatttagaagttttgaggagggtcaaatatcttcatgaagttgcatctggtccatattctgacttatttcaagaaattcctagttctaaaagtgatgtttctggtgtaacacaggtgacttctaacactaacacgcctggaaatagtgatcgtgaaagggttgatgagaccgctgcttctctcgatgacgaaaggtcctctaatggcagtgatattagtgatccaacagcatatttggaagacaaaaaggatatagatgaccattacggtaagtttatttctacaaatcttgcattgggttttcttttccttgggtctggacaatacgctctcaatacttctactttagaatctatcgctttcttaagcatgtccgttttacccacatatacaactccacatcccttacaagaattgaagcatttctggagcatggctgtagagcctcgttgccttgttataaaggacatttccactggtgacgcagtaaacaacgttcctattgaattggtggtcgaggaagacgtcgaaaaagaagaagtaataagagagatatctacaccttgcttgcttcctgatttctccaaaattaaatctattagggtaaaaatgcatggttactttccattggaagtaaatttcactaaggactactctgcttctgatttttttagtggcggtacaattatttatatacaaagaaaatccgaaagtgttttcgagaacaaagcctcttttaggaacgtagaagatattcatgtggcactcaaaagaaaggcagcagaatctaaaaattattctagattaaacttgaaaaatgaacaaggaaataccacctcttctcaattggttgaaagtttgggtattcaagatttgacaatggtggaactcgatactcttttgagtgcaggaaataatacagcattaacggattctgaatcttataatttaggtttgttatgttctgataaaaacagtggagatattttggattgccaactcgaattgtggtacaaaagctttggaccacatgatgaatga

SEQ ID NO: 9323 - DNA, 1503 bp, Saccharomyces cerevisiae
atgtcaattatgccagttaagaacgccttggcgcaagggaggacgctcctcatggggaggatgcctgctgtaaagttttctacaagaatgcaattaagaaatagaactgcggtgctatggaatagaaagttttccacgcgtcttttcgttcagcaacgacgcagttctggagagattgtggatcgtgccaaagctgctgccgcaaatagcggaagaaaacaggtctccatgaaatgggttgttttaactagtttcaccattgttctaggaaccattttactagtgtcaaggaatgatagtacagaggaggatgctacagagggcaaaaaagggagaaggacaagaaaaatcaaaatatttaacaataattggctctttttctgctattctactttaccgctgaatgcgatgtctcgattatggggccaagtaaattctcttacgttacccatttgggttagaccatggggttacaggttatattctttcctttttggagttaacttggacgagatggaagatcctgatttgacacattatgcaaatttatccgaatttttctatcgtaacataaaaccaggcacacgtccagtagcacaaggcgaagacgttatagcttctccaagtgatggaaagattttacaagttggtataatcaactctgaaactggcgaaatcgaacaagtcaagggaatgacatattccatcaaagaattccttggcactcactcccaccccttgatgtctaagagtgcatctagtctagatttgacttctgatgaggaaaagcatagagaattcgccagggtaaatagaatacaattagcgggttccgaagacactgaacagcctcttcttaactttaaaaacgagggcgatcaatctgttcgagagttcaaaccaagtgtgtccaaaaatatacatcttttaagtcaactttctttaaactacttctctaatgggttttcgtgctctgagcctcatgatacggaacttttctttgccgtcatttatttggctcccggtgattaccatcatttccactctccagttgactgggtttgtaaggttcgccgccatttcccaggtgatttattctccgtggcaccttatttccagcgtaacttccctaatcttttcgttctaaatgaaagagttgctttgttgggtagttggaagtacggattttttagcatgactcctgttggtgcaacaaatgttggttcaatcaagttgaattttgatcaagaatttgtgacaaattcaaagagcgacaaacacttggaaccacatacctgctaccaggcagtatatgagaatgcaagtaaaatattgggagggatgcctttggttaagggtgaagaaatgggtggctttgaattgggtagcactgttgtactttgttttgaagctcccactgaatttaagttcgatgttagggttggtgataaggttaagatgggacagaaattaggcataattggaaagaatgatttaaaatga

SEQ ID NO: 9324 - DNA, 1503 bp, Artificial Sequence
  Description of Artificial Sequence: Synthetic polynucleotide
atgtctattatgccagttaagaacgccttggcgcaagggaggacgctcctcatggggaggatgcctgctgtaaagttttctacaagaatgcaattaagaaatagaactgcggtgttgtggaatagaaagttttccacgcgtcttttcgttcagcaaaggcgcagttctggagagattgtggatcgtgccaaagctgctgccgcaaatagcggaagaaaacaggtctccatgaaatgggttgttttaactagtttcaccattgttttaggaaccattttattggtgtctaggaatgatagtacagaggaggatgctacagagggcaaaaaagggagaaggacaagaaaaatcaaaatatttaacaataattggctctttttctgctattctactttaccgttaaatgcgatgtctagattatggggccaagtaaattctcttacgttacccatttgggttagaccatggggttacaggttatattctttcctttttggagttaacttggacgagatggaagatcctgatttgacacattatgcaaatttatccgaatttttctatcgtaacataaaaccaggcacacgtccagtagcacaaggcgaagacgttatagcttctccaagtgatggaaagattttacaagttggtataatcaactctgaaactggcgaaatcgaacaagtcaagggaatgacatattccatcaaagaattccttggcactcactcccaccccttgatgtctaagagtgcatctagtttggatttgacttctgatgaggaaaagcatagagaattcgccagggtaaatagaatacaattagcgggttccgaagacactgaacagcctcttcttaactttaaaaacgagggcgatcaatctgttagagagttcaaaccaagtgtgtccaaaaatatacatcttttaagtcaactttctttaaactacttctctaatgggttttcttgctctgagcctcatgatacggaacttttctttgccgtcatttatttggctcccggtgattaccatcatttccactctccagttgactgggtttgtaaggttcgccgccatttcccaggtgatttattctccgtggcaccttatttccagcgtaacttccctaatcttttcgttttgaatgaaagagttgctttgttgggtagttggaagtacggattttttagcatgactcctgttggtgcaacaaatgttggttctatcaagttgaattttgatcaagaatttgtgacaaattctaagagcgacaaacacttggaaccacatacctgctaccaggcagtatatgagaatgcaagtaaaatattgggagggatgcctttggttaagggtgaagaaatgggtggctttgaattgggtagcactgttgtactttgttttgaagctcccactgaatttaagttcgatgttagggttggtgataaggttaagatgggacagaaattaggcataattggaaagaatgatttaaaatga

SEQ ID NO: 9325 - DNA, 780 bp, Saccharomyces cerevisiae
atgagctacaattatttgaaggcagctagaaaaattatatgcattgggcgtaattacgcagcgcatatcaaagagctgaacaattcaactccaaaacaaccgttttttttcctaaaaccaacctcgagtattgtgacaccattgtcttcatcattggtcaagaccactagacctgcaaactcgactttcaatggtttaaatgaagacggaactaaccccgggcccatttttatcccacgcggtgtgaaggttcatcacgaaattgagttggcattgattgtgagcaaacatttgtccaatgtcactaagatgaaacccgaagaagtctatgactctattagtggtgtagctctagcattggatcttacagcaagaaatgtccaagatgaagccaaaaagaaggggctaccttggactataagcaagggttttgacaccttcatgccaatctctgctatagtctcccgcgagaagttctcatcctacaaatcaaacttacaggatattttcagagtcaagtgctctgttaacggacagttgagacaagatggtggtactaacctcatgttgcacccactccataaaatactgcaacacatatctaccatgatatctctggaaccgggtgatatcattttgactggtacacctgcaggtgtaggcgagttaaagcctggtgaccgtgttcactgtgagctattgcagaataatgacaatattgtcgacatgaacttcgaatgtgaaaatcggccgggaccatatgaatttagagaaacataa

SEQ ID NO: 9326 - DNA, 780 bp, Artificial Sequence
  Description of Artificial Sequence: Synthetic polynucleotide
atgagctacaattatttgaaggcagctagaaaaattatatgcattgggcgtaattacgcagcgcatatcaaagagttgaacaattctactccaaaacaaccgttttttttcttgaaaccaacctctagtattgtgacaccattgtcttcttctttggtcaagaccactagacctgcaaactctactttcaatggtttaaatgaagacggaactaaccccgggcccatttttatcccacgcggtgtgaaggttcatcacgaaattgagttggcattgattgtgagcaaacatttgtccaatgtcactaagatgaaacccgaagaagtctatgactctattagtggtgtagctttggcattggatcttacagcaagaaatgtccaagatgaagccaaaaagaaggggttgccttggactataagcaagggttttgacaccttcatgccaatctctgctatagtctcccgcgagaagttctcttcctacaaaagtaacttacaggatattttcagagtcaagtgctctgttaacggacagttgagacaagatggtggtactaacctcatgttgcacccactccataaaatattgcaacacatatctaccatgatatctttggaaccgggtgatatcattttgactggtacacctgcaggtgtaggcgagttaaagcctggtgaccgtgttcactgtgagttattgcagaataatgacaatattgtcgacatgaacttcgaatgtgaaaatagaccgggaccatatgaatttagagaaacatga

SEQ ID NO: 9327 - DNA, 1944 bp, Saccharomyces cerevisiae
atgtcaagcgaggaacgctcgagacaaccaagtactgtttcaactttcgatttagaacccaatccttttgaacaaagcttcgcctcttccaagaaggctttgtcacttccaggcacgatctcccatccgtctctaccaaaagagctttcacgaaacaattctacctcaacgataacacaacattcccaacgttccactcatagtttgaacagtattccagaagaaaatgggaattcaaccgttacagataatagtaatcataatgacgtaaaaaaagactcacctagttttttaccaggccaacaaagacctactataatatctccgcctattctcacacctggtgggtcgaaaagattaccacctctactcctttctccctctattttatatcaggcaaattcaactacgaatcccagtcagaattcacattctgtttcagtctctaattcaaaccctagtgcaataggcgtttcttctacctccggatctctgtatccaaacagctcttctccttcagggacttcacttatacgccagccacgaaactcgaacgtgaccacaagtaattctggtaacggcttccccacgaatgattcacaaatgcctggctttttattaaacttgtccaaatctgggttgacacctaatgagtccaatatcaggaccgggttgacacccggtattcttacgcaatcttacaattatcccgtattgccgtcaattaataaaaatactataacaggtagcaaaaatgtcaacaaaagtgtcacagtgaatggaagtattgaaaaccaccctcatgttaatataatgcacccaactgtaaatggtacaccacttacgccgggattgagttctctgctaaacttaccatctactggagttttggctaatccagtattcaaatcaacacctacaacaaataccacagatggtaccgtcaacaacagcatcagtaattccaatttttccccaaatacttcaacgaaagcggctgtcaaaatggataatccggcagagttcaatgccatcgagcactccgctcataatcacaaggagaatgaaaatttaacgactcaaattgagaacaatgaccagttcaataacaaaacacgaaaaagaaagagaaggatgtctagcacaagttctacttctaaggcttcaagaaaaaattccatatcaagaaaaaactcagcagttacgactgcaccagcacaaaaagatgatgttgaaaataataaaatttcaaacaacgtaacacttgatgagaatgaagagcaagaaagaaaaagaaaggagtttttagaaagaaatagagtagctgcatctaaatttagaaaaagaaagaaagagtacatcaagaaaattgaaaatgatctacaattctatgaatctgaatatgacgatctaactcaggtcattgggaagctatgcggcataataccctcaagctcctcgaattcccaattcaatgtgaatgtttcaactccgtcatcatcatcaccaccatctacatctttaatagcattgttagagagtagcatttcaaggagtgattattcaagtgcaatgtcagtattatcaaacatgaagcaattgatatgtgaaacgaatttttaccgaaggggaggcaaaaacccaagggacgacatggatggccaagaagacagcttcaataaggacactaacgttgtcaaaagcgaaaatgcgggctatccttccgttaattcaagaccaataattctagataaaaaatactcactgaactctggagcaaatatcagcaaaagtaacacaactactaataatgtgggaaatagtgcacagaatataatcaattcatgctactctgttactaatccattggtaataaatgcaaattccgatacccatgatactaataagcatgatgtactatccactctacctcacaataattga

SEQ ID NO: 9328 - DNA, 1944 bp, Artificial Sequence
  Description of Artificial Sequence: Synthetic polynucleotide
atgtctagcgaggaacgctccagacaaccaagtactgtttccactttcgatttagaacccaatccttttgaacaaagcttcgcctcttccaagaaggctttgtctcttccaggcacgatctcccatccgtctttaccaaaagagctttctagaaacaattctacctctacgataacacaacattcccaacgttccactcatagtttgaacagtattccagaagaaaatgggaattctaccgttacagataatagtaatcataatgacgtaaaaaaagactctcctagttttttaccaggccaacaaagacctactataatatctccgcctattctcacacctggtgggtctaaaagattaccacctttactcctttctccctctattttatatcaggcaaattctactacgaatcccagtcagaattctcattctgtttctgtctctaatagcaaccctagtgcaataggcgtttcttctacctccggatctttgtatccaaacagctcttctccttctgggacttctcttatacgccagccaagaaactccaacgtgaccacaagtaattctggtaacggcttccccacgaatgattctcaaatgcctggctttttattaaacttgtccaaatctgggttgacacctaatgagtccaatatcaggaccgggttgacacccggtattcttacgcaatcttacaattatcccgtattgccgtctattaataaaaatactataacaggtagcaaaaatgtcaacaaaagtgtcacagtgaatggaagtattgaaaaccaccctcatgttaatataatgcacccaactgtaaatggtacaccacttacgccgggattgagttctttattaaacttaccatctactggagttttggctaatccagtattcaaatctacacctacaacaaataccacagatggtaccgtcaacaacagcatcagtaattccaatttttccccaaatacttccacgaaagcggctgtcaaaatggataatccggcagagttcaatgccatcgagcactccgctcataatcacaaggagaatgaaaatttaacgactcaaattgagaacaatgaccagttcaataacaaaacaagaaaaagaaagagaaggatgtctagcacaagttctacttctaaggcttccagaaaaaattccatatctagaaaaaactctgcagttacgactgcaccagcacaaaaagatgatgttgaaaataataaaatttccaacaacgtaacacttgatgagaatgaagagcaagaaagaaaaagaaaggagtttttagaaagaaatagagtagctgcatctaaatttagaaaaagaaagaaagagtacatcaagaaaattgaaaatgatttgcaattctatgaatctgaatatgacgatttgactcaggtcattgggaagttgtgcggcataataccctctagctcctctaattcccaattcaatgtgaatgtttccactccgtcttcttcttctccaccatctacatctttaatagcattgttagagagtagcatttctaggagtgattattctagtgcaatgtctgtattatctaacatgaagcaattgatatgtgaaacgaatttttacagaaggggaggcaaaaacccaagggacgacatggatggccaagaagacagcttcaataaggacactaacgttgtcaaaagcgaaaatgcgggctatccttccgttaattctagaccaataattttagataaaaaatactctttgaactctggagcaaatatcagcaaaagtaacacaactactaataatgtgggaaatagtgcacagaatataatcaattcttgctactctgttactaatccattggtaataaatgcaaattccgatacccatgatactaataagcatgatgtattgtccactttacctcacaataattga

SEQ ID NO: 9329 - DNA, 1347 bp, Saccharomyces cerevisiae
atgggcttggaccaggacaagataaagaagaggctttctcaaatagagatagatatcaaccagatgaaccagatgattgacgaaaatttacaattagttgaacctgcggaggacgaagctgtcgaagataatgtcaaggatacgggtgtggtcgacgctgtaaaggtggcagaaacggctctttttagtggcaatgatggagcggatagtaacccaggagattcagctcaggttgaagagcacaaaaccgcacaggtccatattcccactgagaatgaagcgaataagagtacggatgacccatcccagctatcggttactcaaccttttatagcgaaagagcagataactcacaccgccattgctattggtgactcctataattcatttgtcgcaaattccgctggaaatgaaaaggcaaaggactcctgcactgagaacaaagaagatggtacagtcaatatagatcaaaacaggggtgaagctgatgttgaaattatcgaaaataatgatgatgaatgggaggatgaaaaatcggatgttgaagaggggcgagtagataagggaacagaggaaaacagtgagattgaatctttcaaatcacccatgccccagaataacaccttgggcggtgagaacaagttagacgctgaacttgtattagacaaattttcttccgctaataaggatctagatatacaaccgcaaaccatagttgtaggaggtgacaatgaatacaaccatgagagcagccgtttagctgatcaaacaccccatgacgataattcagagaattgtcccaatcgctctggaggaagcactcccttagattctcaaactaaaatttttatccctaaaaagaattctaaagaagatggtaccaatataaatcactttaattcagatggtgatggacagaaaaaaatggcgaatttcgagacacgacgccctacaaatccgttcagagttatctcggtgagcagcaattccaattcaagaaacggaagtcgtaaatcttcactaaataagtatgattcgccagtctcctctcctatcacatcagcgtctgagctgggcagtattgccaagctggaaaaaagacatgattatttatccatgaaatgcattaagttacaaaaggaaattgactatctaaacaagatgaatgcacagggttctttatctatggaagacggaaagagactacatagagccgtagtgaagcttcaagaatatcttgacaagaaaacgaaggagaaatatgaggtcggagtgttattaagtagacatctgagaaagcaaattgatcgtggcgaaaatggccaattttggattggaactaaatga

SEQ ID NO: 9330 - DNA, 1347 bp, Artificial Sequence
  Description of Artificial Sequence: Synthetic polynucleotide
atgggcttggaccaggacaagataaagaagaggctttctcaaatagagatagatatcaaccagatgaaccagatgattgacgaaaatttacaattagttgaacctgcggaggacgaagctgtcgaagataatgtcaaggatacgggtgtggtcgacgctgtaaaggtggcagaaacggctctttttagtggcaatgatggagcggatagtaacccaggagattctgctcaggttgaagagcacaaaaccgcacaggtccatattcccactgagaatgaagcgaataagagtacggatgacccatcccagttaagtgttactcaaccttttatagcgaaagagcagataactcacaccgccattgctattggtgactcctataattcttttgtcgcaaattccgctggaaatgaaaaggcaaaggactcctgcactgagaacaaagaagatggtacagtcaatatagatcaaaacaggggtgaagctgatgttgaaattatcgaaaataatgatgatgaatgggaggatgaaaaatctgatgttgaagaggggagagtagataagggaacagaggaaaacagtgagattgaatctttcaaaagtcccatgccccagaataacaccttgggcggtgagaacaagttagacgctgaacttgtattagacaaattttcttccgctaataaggatttggatatacaaccgcaaaccatagttgtaggaggtgacaatgaatacaaccatgagagcagccgtttagctgatcaaacaccccatgacgataattctgagaattgtcccaatcgctctggaggaagcactcccttagattctcaaactaaaatttttatccctaaaaagaattctaaagaagatggtaccaatataaatcactttaattctgatggtgatggacagaaaaaaatggcgaatttcgagacaagacgccctacaaatccgttcagagttatcagtgtgagcagcaattccaattctagaaacggaagtcgtaaatcttctttgaataagtatgattctccagtctcctctcctatcacatctgcgtctgagttgggcagtattgccaagttggaaaaaagacatgattatttatccatgaaatgcattaagttacaaaaggaaattgactatttgaacaagatgaatgcacagggttctttatctatggaagacggaaagagattacatagagccgtagtgaagcttcaagaatatcttgacaagaaaacgaaggagaaatatgaggtcggagtgttattaagtagacatttaagaaagcaaattgatcgtggcgaaaatggccaattttggattggaactaaatga

SEQ ID NO: 9331 - DNA, 1221 bp, Saccharomyces cerevisiae
atggatagagtacgctctttgattggaaatcgccggggacgccgacataatcgccaacatcctccgtatcctcacagtgggtctccatccaccgtcaatctcttgggagctaatggttatggagacgaccaatctacaatatttgcacgagaaaatgaatctctggaaacctctgccaacgagggcgatgatagtgcggatgcagctactttgaatacagcggtatcagaaggctcaacaattggagacctacaaagacagggttatgttaacagagccccaagattcacgtcagaaagagccatgccattcgtttcggtgctactacaacgagggttttttgcattccccagtgaagaatctctccagctatttttacacaacaagaggaagctcgataacattgatccaaagaggggtctaggacttcccctatttcacgccatttctttaaacctggtcaagtcgcttttcagtgatcaaaatacaccggtaatgaggatatataaatacgttatgatagactcccaatgcgataaacctccattaaactcagaagtggtctctcgaataaacgaaaatgtctccatatataaatatgaattctgcactattctaaaaaaaatggaaagccataatttttcgagcagggtagagcacgattttatatttcatagaaaagatgaacctgatgttcatatccccatgattaattacaatcaaaggaaaaatgcggatacggcaattcatggattaaatcttcgttggtacgggacaactagtttagcttcaccttttggctcaaatagcatcaacctacttgtactcgatgatacgatggcatcctacatgaaccaacaaactattgaagagtttgattcttacagccgttcccgtcccacaagaccgctgggttatctcccagtatgggccagatacacagatgataaagttagtgtcataccgaaaaaaagaactttgagagtagctaccttgtacttacaagaaactgattcgtttgatgatggctctagtttaacatctaccaattatactgaaatgggctctaatatcattgaaaatgtgccgtgggatagtcagatacttacttgcatgtgcatgctattacatgaatatgaatcaagaaaggagaaacgccacaccgcatggggcagctcgaccacatatatgctaaatggaccggcaggattactgatgtaa

SEQ ID NO: 9332 - DNA, 1221 bp, Artificial Sequence
  Description of Artificial Sequence: Synthetic polynucleotide
atggatagagtacgctctttgattggaaatcgcagaggacgccgccataatcgccaacatcctccgtatcctcacagtgggtctccatccaccgtcaatctcttgggagctaatggttatggagacgaccaatctacaatatttgcaagagaaaatgaatctttggaaacctctgccaacgagggcgatgatagtgcggatgcagctactttgaatacagcggtatctgaaggctctacaattggagacttgcaaagacagggttatgttaacagagccccaagattcacgagtgaaagagccatgccattcgtttctgtgcttttacaaagagggttttttgcattccccagtgaagaatctctccagttatttttacacaacaagaggaagctcgataacattgatccaaagaggggtttgggacttcccttatttcacgccatttctttaaacttggtcaagtctcttttcagtgatcaaaatacaccggtaatgaggatatataaatacgttatgatagactcccaatgcgataaacctccattaaactctgaagtggtctctagaataaacgaaaatgtctccatatataaatatgaattctgcactattttgaaaaaaatggaaagccataatttttctagcagggtagagcacgattttatatttcatagaaaagatgaacctgatgttcatatccccatgattaattacaatcaaaggaaaaatgcggatacggcaattcatggattaaatcttcgttggtacgggacaactagtttagcttccccttttggcagtaatagcatcaacttacttgtactcgatgatacgatggcatcctacatgaaccaacaaactattgaagagtttgattcttacagccgttcccgtcccacaagaccgttgggttatctcccagtatgggccagatacacagatgataaagttagtgtcataccgaaaaaaagaactttgagagtagctaccttgtacttacaagaaactgattcttttgatgatggctctagtttaacatctaccaattatactgaaatgggctctaatatcattgaaaatgtgccgtgggatagtcagatacttacttgcatgtgcatgcttttacatgaatatgaatctagaaaggagaaacgccacaccgcatggggcagctctaccacatatatgttgaatggaccggcaggattattgatgtga

SEQ ID NO: 9333 - DNA, 1056 bp, Saccharomyces cerevisiae
atgacacctacaaaccaatctagtggaacgactaatgcatctgtggaggtactttcagaggatggacctatgccaataaacgttatgatgcaagaaggtgtgaaagcgctgactaaaattctttccaatcagcttcaagacagacaagcttttcaaaacgctcctcatgcaatgcaattcgttataagaaatggaggaaaagctttatcaaatgcacggttagaagagctcaaagatgctcttcctaagatggactcgttgagtttggaagatgaacttgcgaaaatagatggccaaagtgcataccacattgattccgcagaggaaaaggaaacctttgaaagtaaaataggccaaatagcttctagaaatagtgcagacttcataatagaggaggacttgcaaaatattttagatgatgatcttaaagactcagaacttaacttggatggcgaagaagccgaaataattttcgattatgagagccaagaactggatacaccggatggtataggggaaaagatttctcaaatgatagaatcggtgttaccgggagggtttggaagtgaagaacagggggggttgcgaactgtaacaaatgtagaggatttagatgttgcagaagaagtcacagatatcgatcatgataccgttgacgcagctcgtttgcatggagacggtcaacattccatatcttctagaaagcacagcaggtcaaagaactcgaaaaagaatgggcatgtaaggcgacatgacttttatgacgaatctagagaccataaaagttgttgcccgcatcatcattatgaaaacttatccaaactacgaaactactattatcatgattttgaatatatttccagaacggaaaaccgtgttccagatttctctgtcctagttaacgaatcaagtcccatgtgtttattttgcgagtactacatggtgtttggtgaaccaccacgtaacatgataaagtggtataatcgtacgtttggttacaatcgtatgccgaatccaccaagagatgaacaagatagtaggaaaaggaatagatag

SEQ ID NO: 9334 - DNA, 1056 bp, Artificial Sequence
  Description of Artificial Sequence: Synthetic polynucleotide
atgacacctacaaaccaatctagtggaacgactaatgcatctgtggaggtactttctgaggatggacctatgccaataaacgttatgatgcaagaaggtgtgaaagcgttgactaaaattctttccaatcagcttcaagacagacaagcttttcaaaacgctcctcatgcaatgcaattcgttataagaaatggaggaaaagctttatccaatgcaagattagaagagctcaaagatgctcttcctaagatggactctttgagtttggaagatgaacttgcgaaaatagatggccaaagtgcataccacattgattccgcagaggaaaaggaaacctttgaaagtaaaataggccaaatagcttctagaaatagtgcagacttcataatagaggaggacttgcaaaatattttagatgatgatcttaaagactctgaacttaacttggatggcgaagaagccgaaataattttcgattatgagagccaagaattagatacaccggatggtataggggaaaagatttctcaaatgatagaatctgtgttaccgggagggtttggaagtgaagaacagggggggttgagaactgtaacaaatgtagaggatttagatgttgcagaagaagtcacagatatcgatcatgataccgttgacgcagctcgtttgcatggagacggtcaacattccatatcttctagaaagcacagcaggtctaagaactccaaaaagaatgggcatgtaaggagacatgacttttatgacgaatctagagaccataaaagttgttgcccgcatcatcattatgaaaacttatccaaacttagaaactactattatcatgattttgaatatatttccagaacggaaaaccgtgttccagatttctctgtcttggttaacgaaagtagtcccatgtgtttattttgcgagtactacatggtgtttggtgaaccaccacgtaacatgataaagtggtataatcgtacgtttggttacaatcgtatgccgaatccaccaagagatgaacaagatagtaggaaaaggaatagatga

SEQ ID NO: 9335 - DNA, 3333 bp, Saccharomyces cerevisiae
atgcctagagtggaatcggagacttacaaacgtctgcaaaatgacccttcctgtataagaaatatatgtattgttgctcatgttgatcacggtaaaacttcactttcagattctcttttggcttcgaatggtattatatcacaaaggcttgccggcaaaattcgattcttagatgccaggcctgacgaacaactacgtggtatcacaatggaatcatcggctatctctttatattttagggtattgcgtaaacaagaaggttccgatgagcctcttgtaagcgagcatctagtaaacttaattgattccccaggtcacattgatttttcaagtgaggtcagtgcagcttcaagactatgtgatggtgctgtcgtactggttgatgtcgtagagggggtatgctcgcaaaccgtcacagtgttgagacaatgttggacggagaagctgaagcccattttagtattgaataagattgatagattgatcacagaactacaactaactccccaagaagcttatattcacttgtccaaagtcattgaacaagtcaactcagttatcgggtcctttttcgcaaacgagagacaattggatgatttattttggagggagcaattagaaaagaacgaaaacgcggaatatattgaaaaggatgattcgggtatttactttaaccctactgataacaacgttatttttgcttccgcaattgatggttggggtttcaacatcggtcaattggccaaattttacgaacaaaaattaggcgctaaaagggaaaacctacagaaagttttatggggtgatttctatatggatcccaagacaaaaaaaattattaacaataaaggccttaagggaagatccctgaaaccccttttcacatcgctaatcctcgaaaatatatggaaaatttatcaaaacataatcacatcgagagattctgaaatggtcgaaaaaatagcaaaaactttaaatattaagctacttgcacgtgatctaaggtcgaaggacgataaacaattgttaagaactatcatgggtcaatggctacccgtcagcacagcagtattgttaacagttattgaaaaattaccttcacctttggaatcacaaaccgatcgtttgaacactattttggtctccgaatccgacacagcagccatggatccaagacttctgaaagccatgaagacatgtgataaagaaggaccagttagtgcatacgtatctaagatgctttcaattcctagagaagaattacctgttgaatctaagaggatagcatcttcggatgagctgatggagagaagtagaaaggcacgtgaggaagcacttaatgctgcaaaacatgctggtatggtagaaaatatggcaatgatggatttgaatgacaattctaaaaatacatcagatttatataaaagagcaaaagataccgttatgacccccgaagtaggagaacagacaaagccaaaaccttcaagaaataatgatgttttctgtgttgtttcagagccttcttccgccttggatttagaatttgaatatgagggggaggatgattcagatagtcaagataacttcggcctagattttgtaccaactgacatagatccaaatgaccctctaagttcaatgtttgaatatgaggaagaagatccacttttggagagtattaagcaaatttcagaggatgtgaacgatgaagtagatgatatttttgacgaaaaggaagaatgcttggtagcatttgcaagaatatacagtggcacactaagagttggtcaggagatttcggtattgggtccaaaatatgatccaaaatgtccagaggagcatattgaaactgcgattattacgcatttatatttgtttatgggtaaggaattggttcctttggacgtttgtccatcaggaaatatagtcggtattcgtggtctggccggtaaagttttaaagagtggtacgttgatagagaagggcgtacaaggcgtcaatctagcgggcgtcaatttccattttacgccaatcgttcgtgttgctgtggagccagccaatcctgtggaaatgagcaagttggtacgaggattaaagttgttggatcaagcagatccttgcgtgcacacatacgttgaaaatactggtgaacacattctgtgtacggccggtgaattacatttagaaagatgcctaaaagatttaacagagagatttgcaggaatagaaattacacattctgaaccggctattccatatagggaaacatttttatcagcctcagatatgaatccaccgcagaattcacagctgggaaggggtgttcatgaactactattgagccagtacaagattacattcagaacgttcccattaagcggtaaagttacagactttttatctcaacatcaaaatagcattaaaaacattttgaagacgtccacttcaagcatggatcccgtcatagaatcaactggaagttcttttctagacaaaaagtctttactcgttgcttttgaagaggtcataaatcaggaggagaagagcagagaactattaagtgggtttaaagtaaagttagcaggttttgggccaagtagagttgggtgcaacattttgctgtcgcaggataatcttcttggaagcctatttgaaggtactccagcagcctttgagtattcagattccatcaaaaatggcttccaactggctgttagcgaaggacctctggcaaatgagcccgtacagggaatgtgtgttcttgttgaaagcgtacataagatgtcacaagacgaaattgaatctattgaagatccgcgctaccaacaacatattgtggacttatcagggaggttgataacttctacaagggacgctatacatgaggcctttttagactggtccccaagaattatgtgggcaatttactcatgtgatattcaaacctctgtcgatgtacttggaaaagtgtatgccgttattctacagaggcatggtaaaatcatttctgaagaaatgaaagaaggtacaccgttttttcaaattgaggcacatgtgcccgttgtggaagcattcggtttaagtgaagatattcgtaaacgaacatctggtgcagcacaacctcaattggtattttccggattcgagtgtatcgatttagatccattttgggtcccaaccacagaagaagaattggaggaactaggtgatacagcagatagagagaatattgcccgtaagcatatgaatgccatcagaagaaggaaaggtctattcattgaagaaaaagttgtcgaaaatgccgaaaaacaacgtactttgaaaaagaattaa

SEQ ID NO: 9336 - DNA, 3333 bp, Artificial Sequence
  Description of Artificial Sequence: Synthetic polynucleotide
atgcctagagtggaaagtgagacttacaaacgtttacaaaatgacccttcctgtataagaaatatatgtattgttgctcatgttgatcacggtaaaacttctctttctgattctcttttggcttctaatggtattatatctcaaaggcttgccggcaaaattagattcttagatgccaggcctgacgaacaattgcgtggtatcacaatggaaagttctgctatctctttatattttagggtattgcgtaaacaagaaggttccgatgagcctcttgtaagcgagcatttggtaaacttaattgattccccaggtcacattgatttttctagtgaggtcagtgcagcttccagattatgtgatggtgctgtcgtattggttgatgtcgtagagggggtatgctctcaaaccgtcacagtgttgagacaatgttggacggagaagttgaagcccattttagtattgaataagattgatagattgatcacagaattacaattgactccccaagaagcttatattcacttgtccaaagtcattgaacaagtcaactctgttatcgggtcctttttcgcaaacgagagacaattggatgatttattttggagggagcaattagaaaagaacgaaaacgcggaatatattgaaaaggatgattctggtatttactttaaccctactgataacaacgttatttttgcttccgcaattgatggttggggtttcaacatcggtcaattggccaaattttacgaacaaaaattaggcgctaaaagggaaaacttacagaaagttttatggggtgatttctatatggatcccaagacaaaaaaaattattaacaataaaggccttaagggaagatccttgaaaccccttttcacatctttgatcctcgaaaatatatggaaaatttatcaaaacataatcacatctagagattctgaaatggtcgaaaaaatagcaaaaactttaaatattaagcttcttgcacgtgatttaaggtctaaggacgataaacaattgttaagaactatcatgggtcaatggttgcccgtcagcacagcagtattgttaacagttattgaaaaattaccttctcctttggaatctcaaaccgatcgtttgaacactattttggtctccgaatccgacacagcagccatggatccaagacttttgaaagccatgaagacatgtgataaagaaggaccagttagtgcatacgtatctaagatgctttctattcctagagaagaattacctgttgaatctaagaggatagcatcttctgatgagttgatggagagaagtagaaaggcacgtgaggaagcacttaatgctgcaaaacatgctggtatggtagaaaatatggcaatgatggatttgaatgacaattctaaaaatacatctgatttatataaaagagcaaaagataccgttatgacccccgaagtaggagaacagacaaagccaaaaccttccagaaataatgatgttttctgtgttgtttctgagccttcttccgccttggatttagaatttgaatatgagggggaggatgattctgatagtcaagataacttcggcttggattttgtaccaactgacatagatccaaatgaccctttgagttctatgtttgaatatgaggaagaagatccacttttggagagtattaagcaaatttctgaggatgtgaacgatgaagtagatgatatttttgacgaaaaggaagaatgcttggtagcatttgcaagaatatacagtggcacattaagagttggtcaggagattagtgtattgggtccaaaatatgatccaaaatgtccagaggagcatattgaaactgcgattattacgcatttatatttgtttatgggtaaggaattggttcctttggacgtttgtccatctggaaatatagtcggtattcgtggtttagccggtaaagttttaaagagtggtacgttgatagagaagggcgtacaaggcgtcaatttggcgggcgtcaatttccattttacgccaatcgttcgtgttgctgtggagccagccaatcctgtggaaatgagcaagttggtaagaggattaaagttgttggatcaagcagatccttgcgtgcacacatacgttgaaaatactggtgaacacattctttgtacggccggtgaattacatttagaaagatgcttgaaagatttaacagagagatttgcaggaatagaaattacacattctgaaccggctattccatatagggaaacatttttatctgcctctgatatgaatccaccgcagaattctcagttaggaaggggtgttcatgaattattattgagccagtacaagattacattcagaacgttcccattaagcggtaaagttacagactttttatctcaacatcaaaatagcattaaaaacattttgaagacgtccacttccagcatggatcccgtcatagaatctactggaagttcttttttggacaaaaagtctttactcgttgcttttgaagaggtcataaatcaggaggagaagagcagagaattattaagtgggtttaaagtaaagttagcaggttttgggccaagtagagttgggtgcaacattttgctttctcaggataatcttcttggaagcttgtttgaaggtactccagcagcctttgagtattctgattccatcaaaaatggcttccaattggctgttagcgaaggacctttggcaaatgagcccgtacagggaatgtgtgttcttgttgaaagcgtacataagatgtctcaagacgaaattgaatctattgaagatccgcgctaccaacaacatattgtggacttaagtgggaggttgataacttctacaagggacgctatacatgaggcctttttagactggtccccaagaattatgtgggcaatttactcttgtgatattcaaacctctgtcgatgtacttggaaaagtgtatgccgttattttacagaggcatggtaaaatcatttctgaagaaatgaaagaaggtacaccgttttttcaaattgaggcacatgtgcccgttgtggaagcattcggtttaagtgaagatattcgtaaaagaacatctggtgcagcacaacctcaattggtattttccggattcgagtgtatcgatttagatccattttgggtcccaaccacagaagaagaattggaggaattgggtgatacagcagatagagagaatattgcccgtaagcatatgaatgccatcagaagaaggaaaggtcttttcattgaagaaaaagttgtcgaaaatgccgaaaaacaacgtactttgaaaaagaattga

SEQ ID NO: 9337 - DNA, 219 bp, Saccharomyces cerevisiae
atgtctgataagcccgactcccaagtattttgtccaaattgcaatgaaagacttcaaaagtgtttagtacagcaaaattatgccattataatatgtcccagcttagtctgcggctacccattcaatcaaagagaagtactcgaaaatctaacgtatgtagacgataatgacgtcttaaaagttgcaaaaaaaagattatcttcacgaagcaaaccataa

SEQ ID NO: 9338 - DNA, 219 bp, Artificial Sequence
  Description of Artificial Sequence: Synthetic polynucleotide
atgtctgataagcccgactcccaagtattttgtccaaattgcaatgaaagacttcaaaagtgtttagtacagcaaaattatgccattataatatgtcccagcttagtctgcggctacccattcaatcaaagagaagtactcgaaaatttaacgtatgtagacgataatgacgtcttaaaagttgcaaaaaaaagattatcttctagaagcaaaccatga

SEQ ID NO: 9339 - DNA, 321 bp, Saccharomyces cerevisiae
atggttaacgttccaaagaccagaaagacctactgtaagggtaagacctgtcgtaagcacactcaacacaaggttactcaatacaaagctggtaaggcttccttgtttgcccaaggtaagagacgttatgaccgtaaacaatctggtttcggtggtcaaaccaagcctgttttccacaagaaagctaagactaccaagaaggttgttttgagattggaatgtgtcaaatgtaagaccagagcccaattgaccttgaagagatgcaagcacttcgaattgggtggtgaaaagaagcaaaagggtcaagctttgcaattctga

SEQ ID NO: 9340 - DNA, 321 bp, Artificial Sequence; identical to SEQ ID NO: 9339
  Description of Artificial Sequence: Synthetic polynucleotide

SEQ ID NO: 9341 - DNA, 2271 bp, Saccharomyces cerevisiae
atgtataatagcagcaccaatcatcatgagggtgcacctacttcaggacatggctattatatgtcccaacaacaagaccaacagcatcaacaacaacaacaatacgccaacgaaatgaatccgtatcagcaaattcctagaccgcctgctgcaggatttagtagcaactacatgaaagagcaaggctctcatcaatcgttacaagagcatttacaacgtgagacaggtaaccttggcagcggttttacagacgttccagccctgaattatccagccacaccaccaccacataataattacgcagcttcaaatcagatgatcaataccccaccgccgtcgatgggtggtctttatagacataataataattcccagagcatggttcagaacggtaatgggagtgggaatgcacaattaccccaattatcaccgggccaatattctatagagtcagagtacaatcaaaatttaaatggcagttcttctagtagtccgttccaccaaccgcaaacgctacggagcaatgggtcatattcaagcgggttaaggagtgtgaaaagcttccagaggttacaacaagaacaggaaaatgtccaagttcagcaacaactttcccaagcacagcaacaaaattcccggcaacaacagcaacaacttcaataccagcagcagcaacaacaacaacaacaacagcaacatatgcaaatacaacaacaacaacagcagcaacaacagcagcagcaatcacaatctcccgttcagagcggctttaataatggtaccatatcaaactatatgtactttgaaagacgaccagatttgttgactaaaggaacgcaagataaagcagcagctgtaaagttgaagattgagaacttttaccaatcctctgttaaatacgccattgaaagaaatgaaagaagagtggagttagaaacagaactaacttctcataattggtcagaagaaaggaaatctaggcaattgagttctttgggtaaaaaagagtcacaatttttaaggctgcgtagaacgagattatcgttagaagatttccacactgtgaaagtcattggaaaaggggcatttggtgaagtcagactggttcagaagaaagacaccggaaaaatatatgcaatgaaaactttattaaaatccgaaatgtacaaaaaggaccaattagcacacgtcaaggctgaaagggatgttctggctggaagtgattctccatgggtggtttcgctatattactcattccaagatgctcaatacttatatttaatcatggaatttttgcccggtggtgatttgatgaccatgctaatcaggtggcaactatttacagaggatgttactagattttacatggctgagtgtattttggccatcgaaaccattcataaattaggattcattcacagagatattaaaccagataatattttgatcgatattagaggtcatataaaattatctgatttcgggttgtctacggggttccataaaactcacgactcaaactactataaaaagcttttgcaacaagatgaggcaactaatggtatttccaagccaggtacttacaatgcaaatacaaccgatactgcaaataaaaggcaaacaatggttgtggattctattagtctaacaatgtcaaacaggcaacaaattcagacatggagaaaatcacgtcgtttaatggcatattctaccgtaggtacaccagattatattgctcctgagatatttttataccaaggttatgggcaagagtgtgattggtggtcacttggagcaattatgtacgagtgtctgattggttggcctccattctgttccgaaactccacaggaaacgtacagaaaaatcatgaattttgagcaaactctacaatttcctgatgatattcatatctcttatgaagccgaagatctaatccgtcgactattaactcatgcagaccaaagacttggtagacatggtggtgcagatgaaataaaaagtcatccattttttcgcggtgttgattggaatacaatcagacaagtagaagcaccgtatataccaaagttgagctccatcaccgatactaggttcttcccaaccgatgagttggagaatgttccagattccccagctatggcacaagctgccaaacaaagggaacagatgacaaagcaaggtggaagtgcgccagtcaaggaagatttaccttttattggctacacttactccagatttgactatttgacaagaaaaaatgcgttgtag

SEQ ID NO: 9342 - DNA, 2271 bp, Artificial Sequence
  Description of Artificial Sequence: Synthetic polynucleotide
atgtataatagcagcaccaatcatcatgagggtgcacctacttctggacatggctattatatgtcccaacaacaagaccaacagcatcaacaacaacaacaatacgccaacgaaatgaatccgtatcagcaaattcctagaccgcctgctgcaggatttagtagcaactacatgaaagagcaaggctctcatcaatctttacaagagcatttacaacgtgagacaggtaaccttggcagcggttttacagacgttccagccttgaattatccagccacaccaccaccacataataattacgcagcttctaatcagatgatcaataccccaccgccgtctatgggtggtctttatagacataataataattcccagagcatggttcagaacggtaatgggagtgggaatgcacaattaccccaattatctccgggccaatattctatagagagtgagtacaatcaaaatttaaatggcagttcttctagtagtccgttccaccaaccgcaaacgttgaggagcaatgggtcttattctagcgggttaaggagtgtgaaaagcttccagaggttacaacaagaacaggaaaatgtccaagttcagcaacaactttcccaagcacagcaacaaaattccagacaacaacagcaacaacttcaataccagcagcagcaacaacaacaacaacaacagcaacatatgcaaatacaacaacaacaacagcagcaacaacagcagcagcaatctcaatctcccgttcagagcggctttaataatggtaccataagcaactatatgtactttgaaagaagaccagatttgttgactaaaggaacgcaagataaagcagcagctgtaaagttgaagattgagaacttttaccaatcctctgttaaatacgccattgaaagaaatgaaagaagagtggagttagaaacagaattgacttctcataattggtctgaagaaaggaaatctaggcaattgagttctttgggtaaaaaagagtctcaatttttaaggttacgtagaacgagattatctttagaagatttccacactgtgaaagtcattggaaaaggggcatttggtgaagtcagattggttcagaagaaagacaccggaaaaatatatgcaatgaaaactttattaaaatccgaaatgtacaaaaaggaccaattagcacacgtcaaggctgaaagggatgttttggctggaagtgattctccatgggtggtttctttgtattactctttccaagatgctcaatacttatatttaatcatggaatttttgcccggtggtgatttgatgaccatgttgatcaggtggcaattatttacagaggatgttactagattttacatggctgagtgtattttggccatcgaaaccattcataaattaggattcattcacagagatattaaaccagataatattttgatcgatattagaggtcatataaaattatctgatttcgggttgtctacggggttccataaaactcacgactccaactactataaaaagcttttgcaacaagatgaggcaactaatggtatttccaagccaggtacttacaatgcaaatacaaccgatactgcaaataaaaggcaaacaatggttgtggattctattagtttgacaatgtccaacaggcaacaaattcagacatggagaaaatctcgtcgtttaatggcatattctaccgtaggtacaccagattatattgctcctgagatatttttataccaaggttatgggcaagagtgtgattggtggagtcttggagcaattatgtacgagtgtttaattggttggcctccattctgttccgaaactccacaggaaacgtacagaaaaatcatgaattttgagcaaactttacaatttcctgatgatattcatatctcttatgaagccgaagatttgatccgtcgtttattaactcatgcagaccaaagacttggtagacatggtggtgcagatgaaataaaaagtcatccattttttcgcggtgttgattggaatacaatcagacaagtagaagcaccgtatataccaaagttgagctccatcaccgatactaggttcttcccaaccgatgagttggagaatgttccagattccccagctatggcacaagctgccaaacaaagggaacagatgacaaagcaaggtggaagtgcgccagtcaaggaagatttaccttttattggctacacttactccagatttgactatttgacaagaaaaaatgcgttgtga

SEQ ID NO: 9343 - DNA, 1065 bp, Saccharomyces cerevisiae
atgaagttccaagttgttttatctgcccttttggcatgttcatctgccgtcgtcgcaagcccaatcgaaaacctattcaaatacagggctgttaaggcatctcacagtaagaatatcaactccactttgccggcctggaatgggtctaactctagcaatgttacctacgctaatggaacaaacagtactaccaatactactactgccgaaagcagtcaattacaaatcattgtaacaggtggtcaagtaccaatcaccaacagttctttgacccacacaaactacaccagattattcaacagttcttctgctttgaacattaccgaattgtacaatgttgcccgtgttgttaacgaaacgatccaagataagtcatccgccggtgccgttgttgttgccaacgccaaatctttggaagctgtctcattcttcttctctatcatttttgacaccgaaaagcctattgttgtcactgaagattccgcttatgccattccagtcgctaacaataagaacgctaccaaacgtggtgtcttgtccgtcacttctgacaaattagtgtactccggtgtcttcactccacctactgcttgttcttacggtgctggtttgcctgttgctatcgttgatgaccaagacgaagttaaatggttcttcgatgcttctaagccaactttaatctcttctgactcgattatcagaaaggaatacagtaacttcactactccttatggtctattagaaaacggtgttccaattgttccaattgtctatgacggtggttactcttccagtttgattgactccttgagttctgccgttcaaggtttggttgttgtttcttctggttctaccaactcaacctcatctactattgaaagcactgaaatcccagtcgtatatgctcaagctaacactccattaaactttattgacaacaaagatgttccaaagaacgctgtgggtgctggttacctatccccaattaaggcccaaatcttgttgtccattgctgccgttaatggtgtcacctccaagtccgctctggaaagcattttcccatga

SEQ ID NO: 9344 - DNA, 1065 bp, Artificial Sequence
  Description of Artificial Sequence: Synthetic polynucleotide
atgaagttccaagttgttttatctgcccttttggcatgttcttctgccgtcgtcgcaagcccaatcgaaaacttgttcaaatacagggctgttaaggcatctcacagtaagaatatcaactccactttgccggcctggaatgggtctaactctagcaatgttacctacgctaatggaacaaacagtactaccaatactactactgccgaaagcagtcaattacaaatcattgtaacaggtggtcaagtaccaatcaccaacagttctttgacccacacaaactacaccagattattcaacagttcttctgctttgaacattaccgaattgtacaatgttgcccgtgttgttaacgaaacgatccaagataagtcttccgccggtgccgttgttgttgccaacgccaaatctttggaagctgtctctttcttcttctctatcatttttgacaccgaaaagcctattgttgtcactgaagattccgcttatgccattccagtcgctaacaataagaacgctaccaaacgtggtgtcttgtccgtcacttctgacaaattagtgtactccggtgtcttcactccacctactgcttgttcttacggtgctggtttgcctgttgctatcgttgatgaccaagacgaagttaaatggttcttcgatgcttctaagccaactttaatctcttctgacagtattatcagaaaggaatacagtaacttcactactccttatggtttattagaaaacggtgttccaattgttccaattgtctatgacggtggttactcttccagtttgattgactccttgagttctgccgttcaaggtttggttgttgtttcttctggttctaccaactctacctcttctactattgaaagcactgaaatcccagtcgtatatgctcaagctaacactccattaaactttattgacaacaaagatgttccaaagaacgctgtgggtgctggttacttgtccccaattaaggcccaaatcttgttgtccattgctgccgttaatggtgtcacctccaagtccgctttggaaagcattttcccatga

SEQ ID NO: 9345 - DNA, 870 bp, Saccharomyces cerevisiae
atggcgaggcctcaaaatcatcgccgcagtaattggacagaaagagacgataatgatgattatctgtttcagcgatttctagaagaatcggaaacgaggcatagtagagagccttcacctgtaaccgagcaatctcagcaagaactacagcaggatgtacagcaagcaatcgatggaatatttaactcccttaggaggaatatgagttctacttcaaatataaatagagcagctaatatggatgcaaccacaaacggaaatggaggaatcaatgcagacactataagagccaccaacgccaatacggccgattccccattcacagcaaggcagcagagccctctcagaacttttcttagaaatttattcattttagattactttattgggctaattttattcccattttccgtatacaacatattaaggagcgggttcaattcaatgaccttttcagagaatgattttataatcgaaatcgtgggatactggaaatttgccaagatatttggttctggtggcacgacattaatagcatataaggatactggtaaattagggttgcttggaaagtttcataacatcattgtattttactcttcacctgtgataaaacatattatgaaaagtagagatggcaatgaacccaacttaaattggataagactaatgttcgctaaagctttcgagctatttgtcaaagtctctaccattctgatctatttagcttatggcgtaagtggtaccgtttacatggttaccgctgggtttttcttcgtattgtgtctattattcactgttattagaagatataaaggtgtccatcgaatgttggtgagccaaaggattacagggccaggcgtattctga

SEQ ID NO: 9346 - DNA, 870 bp, Artificial Sequence
  Description of Artificial Sequence: Synthetic polynucleotide
atggcgaggcctcaaaatcatcgccgcagtaattggacagaaagagacgataatgatgattatttatttcagagatttttggaagaaagtgaaacgaggcatagtagagagccttctcctgtaaccgagcaatctcagcaagaattacagcaggatgtacagcaagcaatcgatggaatatttaactcccttaggaggaatatgagttctacttccaatataaatagagcagctaatatggatgcaaccacaaacggaaatggaggaatcaatgcagacactataagagccaccaacgccaatacggccgattccccattcacagcaaggcagcagagccctctcagaacttttcttagaaatttattcattttagattactttattgggttgattttattcccattttccgtatacaacatattaaggagcgggttcaattctatgaccttttctgagaatgattttataatcgaaatcgtgggatactggaaatttgccaagatatttggttctggtggcacgacattaatagcatataaggatactggtaaattagggttgcttggaaagtttcataacatcattgtattttactcttctcctgtgataaaacatattatgaaaagtagagatggcaatgaacccaacttaaattggataagattaatgttcgctaaagctttcgagttatttgtcaaagtctctaccattttgatctatttagcttatggcgtaagtggtaccgtttacatggttaccgctgggtttttcttcgtattgtgtcttttattcactgttattagaagatataaaggtgtccatagaatgttggtgagccaaaggattacagggccaggcgtattctga

SEQ ID NO: 9347 - DNA, 597 bp, Saccharomyces cerevisiae
atggtccggcctcagaatgttcactggtttatcgctacaattgtatttttcatcggatttgtacacgctaatacagaatcaatcttatataaggttcctcacaactttcccctcaaaaaaccaagagacagctctacttatgcaagagatgtaaacttgatatcttccatatcactatcgggagaagcaatgagtcagatcactatcgaggccaataccactgacttggagttgcataatactacgtatattgaactggcggacttacagcgagacgaaacatatcagattaaagtgtgttggtcagcaatacatccaatttccattaataatctccaaactatcacaataccacgtttcactgaatttcagggaactaagtcagactacgcgagaatactagtgactttccaggtcttgtctgactcgtatcctagtgagcatgccatggttccaatacaagtctcattaatcaccactcggctaggtatccccgtggatatttacccaacattaatcgttatggtgctattagtagcagggcttgttgttacccgggcaccacacgtattgaacgatcttttgctgaaattttag

SEQ ID NO: 9348 - DNA, 597 bp, Artificial Sequence
  Description of Artificial Sequence: Synthetic polynucleotide
atggtcagacctcagaatgttcactggtttatcgctacaattgtatttttcatcggatttgtacacgctaatacagaaagtatcttatataaggttcctcacaactttcccctcaaaaaaccaagagacagctctacttatgcaagagatgtaaacttgatatcttccatatctttatctggagaagcaatgagtcagatcactatcgaggccaataccactgacttggagttgcataatactacgtatattgaattggcggacttacagagagacgaaacatatcagattaaagtgtgttggtctgcaatacatccaatttccattaataatctccaaactatcacaataccacgtttcactgaatttcagggaactaagagtgactacgcgagaatattggtgactttccaggtcttgtctgactcttatcctagtgagcatgccatggttccaatacaagtctctttaatcaccactagattaggtatccccgtggatatttacccaacattaatcgttatggtgttattagtagcagggcttgttgttaccagagcaccacacgtattgaacgatcttttgttgaaattttga

SEQ ID NO: 9349 - DNA, 507 bp, Saccharomyces cerevisiae
atgtcgaatgaaaacttatctcccaatagtagtaacccagatttaactaaactgaataacggcgaaagcggaactattgataccagcaaattctcgcccaacgaaatgaagctatacaaaatgtacggaaagctgccatcaaagaaagatatttttaagcataccatgcagaaaagaaaatatttcgacagtggtgattacgctttgcagaaagctggcattcaaaacaatgatccaataaactatggaaagaataacctgccattaacaaatcccagcaaactacgagaagatataataaaaagaaggataagcacttgtccgtcaactgcctcaaccgctggtgtagtagataatgcgacgttgatacaaaaggagggaagtatatcgagtggaccaccatcgtctaataacggtactattggaggtggtagtacaagttcaacgccagtggggaaccacagctcttcgtcgtccagtttgtatactgaatcacccattagataa

SEQ ID NO: 9350 - DNA, 507 bp, Artificial Sequence
  Description of Artificial Sequence: Synthetic polynucleotide
atgagtaatgaaaacttatctcccaatagtagtaacccagatttaactaaattgaataacggcgaaagcggaactattgataccagcaaattctctcccaacgaaatgaagttgtacaaaatgtacggaaagttaccatctaagaaagatatttttaagcataccatgcagaaaagaaaatatttcgacagtggtgattacgctttgcagaaagctggcattcaaaacaatgatccaataaactatggaaagaataacttaccattaacaaatcccagcaaacttagagaagatataataaaaagaaggataagcacttgtccgtctactgccagcaccgctggtgtagtagataatgcgacgttgatacaaaaggagggaagtatatctagtggaccaccatcttctaataacggtactattggaggtggtagtacaagttccacgccagtggggaaccacagctcttcttcttccagtttgtatactgaaagtcccattagatga

SEQ ID NO: 9351 - DNA, 900 bp, Saccharomyces cerevisiae
atggccaatagaggagaaccggatccaaagaagagcaccgaatcaatctgctctctgactaaaccgcagctttattcattatatgatgatgacgtcgtgagatcggaagataacgaaatttacgaagaattgaaacgctctgtctctatagattctaccaaatatagtagagatcaaactattgattcgactttttacttggcccataaggttggcggctcgctgccaaggaacacagtatcttctaataatttggaaaggattttatcagcatcatccattcacgaaaactttccgtcaagaaccagacaaactcgtcaaaatattcttcattacctgcaagctgtattaattttgtcattgagcggtttcgcatatcatgaactgtccagaaacttgcacgataatcatctcttacatccagattttgcatcgagaccccttctactgggtgtcaaactttgtaactggctatccaatggggttctgccaaactggttaggctacggtgttgaaggactgttatttggttctgttgtaccaattctggataatatttttcaaacagaggttgttaagagctctgtccaccatgacagtttgacctctgttattagaagtatcaatgccatgttgggagtcacatttgggatcaggaaaatacagtggaactcctctttgcaggcggcaggggcatgggggcttctgaatattatactgtggttgttttttgacggctcaatatccatgttaatgagctgcatctgcattggggtgggttgttgtatctcttgctacaaagatattatcgacggttcccaatttttatatttcatggatttttatttccttggttctctaatgtttggaaaactaggaagatatctatattctcattaa

SEQ ID NO: 9352 - DNA, 900 bp, Artificial Sequence
  Description of Artificial Sequence: Synthetic polynucleotide
atggccaatagaggagaaccggatccaaagaagagcaccgaaagtatctgctctttgactaaaccgcagctttattctttatatgatgatgacgtcgtgagaagtgaagataacgaaatttacgaagaattgaaacgctctgtctctatagattctaccaaatatagtagagatcaaactattgattctactttttacttggcccataaggttggcggctctttaccaaggaacacagtatcttctaataatttggaaaggattttaagtgcatcttccattcacgaaaactttccgtccagaaccagacaaactcgtcaaaatattcttcattacttacaagctgtattaattttgtctttgagcggtttcgcatatcatgaattatccagaaacttgcacgataatcatctcttacatccagattttgcatctagaccccttttgttgggtgtcaaactttgtaactggttatccaatggggttttgccaaactggttaggctacggtgttgaaggattattatttggttctgttgtaccaattttagataatatttttcaaacagaggttgttaagagctctgtccaccatgacagtttgacctctgttattagaagtatcaatgccatgttgggagtcacatttgggatcaggaaaatacagtggaactcctctttgcaggcggcaggggcatgggggcttttgaatattatattatggttgttttttgacggctctatatccatgttaatgagctgcatctgcattggggtgggttgttgtatctcttgctacaaagatattatcgacggttcccaatttttatatttcatggatttttatttccttggttctttgatgtttggaaaattaggaagatatttgtattctcattga

SEQ ID NO: 9353 - DNA, 825 bp, Saccharomyces cerevisiae
atgtcggcggctatcgaaaaagaaaccggaatgttggatgtaggaaagcactgtgcatattgtagacaactagacttcctacctttccattgttcgttttgcaatgaagatttctgctcgaaccatagacttaaggaagatcaccactgtaggtggttgctagagcatgaagaagttcataaaactgaaaaaagtcctagcaaaagccgggatggctcaagttctaacgatgaagcatatttcaagagtctgttacctgagagggccagtgttagaatccagagagtaagtgaaacaagagagcctttgagaggttctaacactgccaaagtgagctctactttgaactcaaagacattagacaaaatatttaagttcttccaaaggaatgagaaaagaaagagcaataacaaatcaaaaaagaatttcggttcctcgtcgaataagataattcaattggctaatctcaagaaaattgctaaaggtgaccccaagattcctatgcaaaataggatttacatttggtgttacttggtggatggtgatgagacggatatagccaaggaggatacaagaatgccattatacattaacaaaatgtggcctgtgggtagggccatggactatttgtctatccagctaaacgtgaaatctagcacactaactaattcaagttctaatgacaaatttcaactatgcaaattgaaagagggtaaacaagtttcattttataatattggcgcttccttaagagtcactaatgagatcaaagatcttgatactctgtatttagtacacaataacgccgacgaaaaatctaattaa

SEQ ID NO: 9354 - DNA, 825 bp, Artificial Sequence
  Description of Artificial Sequence: Synthetic polynucleotide
atgagtgcggctatcgaaaaagaaaccggaatgttggatgtaggaaagcactgtgcatattgtagacaattggacttcttacctttccattgttccttttgcaatgaagatttctgcagcaaccatagacttaaggaagatcaccactgtaggtggttgttggagcatgaagaagttcataaaactgaaaaaagtcctagcaaaagcagagatggctccagttctaacgatgaagcatatttcaagagtttgttacctgagagggccagtgttagaatccagagagtaagtgaaacaagagagcctttgagaggttctaacactgccaaagtgagctctactttgaactccaagacattagacaaaatatttaagttcttccaaaggaatgagaaaagaaagagcaataacaaatctaaaaagaatttcggttcctcttccaataagataattcaattggctaatctcaagaaaattgctaaaggtgaccccaagattcctatgcaaaataggatttacatttggtgttacttggtggatggtgatgagacggatatagccaaggaggatacaagaatgccattatacattaacaaaatgtggcctgtgggtagggccatggactatttgtctatccagttgaacgtgaaatctagcacattgactaatagtagttctaatgacaaatttcaattatgcaaattgaaagagggtaaacaagtttctttttataatattggcgcttccttaagagtcactaatgagatcaaagatcttgatactttatatttagtacacaataacgccgacgaaaaatctaattga

SEQ ID NO: 9355 - DNA, 1641 bp, Saccharomyces cerevisiae
atgtctcaagtgcaaagtcctttgacagcaacgaactctggtttagctgtcaataataacacaatgaactcacaaatgcctaaccgtagcaatgttagattggtcaatggtactttacccccatccttacatgttagctctaacctaaatcacaacactggcaatagctctgcctcctattctggctcacaatcacgcgacgattccactatagtcgggctgcactataagataggtaagaaaatcggtgaaggttcatttggtgtactttttgaaggtacaaacatgatcaatggattaccagttgctatcaagtttgaaccaagaaaaacagaagccccacagctaaaggacgaatatcggacctataaaattttagcgggaacacctggtataccacaagaatactactttggtcaggaaggattacataacatattggttattgatctgcttggtccttctttagaagatttattcgattggtgtggaagaagattttcggtaaaaactgttgtacaagtcgcagtacaaatgataactttaattgaagatttgcacgctcatgatttgatataccgtgatattaaacctgataattttttgatcggaagaccgggtcaaccagatgctaacaaagttcatctaattgactttggtatggccaaacaatatcgtgatccaaaaactaaacaacatattccgtacagggaaaagaaatcattaagtggcacagcaagatacatgtcgataaatacacatttgggtagagaacaatcgagaagagacgatatggaagctatgggtcatgtcttcttttatttcttgagggggcagctaccatggcaaggtttgaaagcaccaaataacaagcaaaagtacgaaaaaattggcgaaaagaaaagactaacaaatgtttacgatttagctcagggtctcccaatccaatttggtaggtatttggaaatagtcagaaatttatcgtttgaggaaactcctgattatgagggctaccgcatgttacttttatctgtgttggatgatttaggtgaaacagcagatggacaatatgattggatgaagctgaatggtggccgtggttgggatttgtcgataaacaaaaagccgaacttacatggttatggtcacccaaatccaccaaatgaaaaatcaaaaaggcatagaagtaaaaaccatcaatattcatcacccgatcatcaccatcattacaatcaacagcaacaacaacagcaggctcaggctcaagcacaggctcaagcacaagccaaagtgcagcaacaacaattgcaacaagcccaggcccagcaacaggccaatcgttatcaattacaaccagatgactcgcactatgacgaagaaagagaggcgtcgaagcttgatccaacttcgtatgaagcatatcagcaacaaactcaacaaaaatatgctcagcaacaacaaaagcaaatgcaacagaaatccaaacagtttgccaatacaggtgccaatggtcaaactaacaagtatccatataatgcgcaaccaacggcgaacgacgaacaaaacgctaaaaacgcagcgcaagatagaaatagtaacaaatcatcgaaaggttttttcagtaagctaggatgctgttag

SEQ ID NO: 9356 - DNA, 1641 bp, Artificial Sequence
  Description of Artificial Sequence: Synthetic polynucleotide
atgtctcaagtgcaaagtcctttgacagcaacgaactctggtttagctgtcaataataacacaatgaactctcaaatgcctaaccgtagcaatgttagattggtcaatggtactttacccccatccttacatgttagctctaacttgaatcacaacactggcaatagctctgcctcctattctggctctcaaagtcgcgacgattccactatagtcgggttgcactataagataggtaagaaaatcggtgaaggttcttttggtgtactttttgaaggtacaaacatgatcaatggattaccagttgctatcaagtttgaaccaagaaaaacagaagccccacagttgaaggacgaatatagaacctataaaattttagcgggaacacctggtataccacaagaatactactttggtcaggaaggattacataacatattggttattgatttacttggtccttctttagaagatttattcgattggtgtggaagaagatttagcgtaaaaactgttgtacaagtcgcagtacaaatgataactttaattgaagatttgcacgctcatgatttgatataccgtgatattaaacctgataattttttgatcggaagaccgggtcaaccagatgctaacaaagttcatttgattgactttggtatggccaaacaatatcgtgatccaaaaactaaacaacatattccgtacagggaaaagaaatctttaagtggcacagcaagatacatgagtataaatacacatttgggtagagaacaatctagaagagacgatatggaagctatgggtcatgtcttcttttatttcttgagggggcagttaccatggcaaggtttgaaagcaccaaataacaagcaaaagtacgaaaaaattggcgaaaagaaaagattgacaaatgtttacgatttagctcagggtctcccaatccaatttggtaggtatttggaaatagtcagaaatttatcttttgaggaaactcctgattatgagggctaccgcatgttacttttatctgtgttggatgatttaggtgaaacagcagatggacaatatgattggatgaagttgaatggtggccgtggttgggatttgagcataaacaaaaagccgaacttacatggttatggtcacccaaatccaccaaatgaaaaatctaaaaggcatagaagtaaaaaccatcaatattcttctcccgatcatcaccatcattacaatcaacagcaacaacaacagcaggctcaggctcaagcacaggctcaagcacaagccaaagtgcagcaacaacaattgcaacaagcccaggcccagcaacaggccaatcgttatcaattacaaccagatgactctcactatgacgaagaaagagaggcgtctaagcttgatccaacttcttatgaagcatatcagcaacaaactcaacaaaaatatgctcagcaacaacaaaagcaaatgcaacagaaatccaaacagtttgccaatacaggtgccaatggtcaaactaacaagtatccatataatgcgcaaccaacggcgaacgacgaacaaaacgctaaaaacgcagcgcaagatagaaatagtaacaaaagcagtaaaggttttttcagtaagttgggatgctgttga

SEQ ID NO: 9357 - DNA, 390 bp, Saccharomyces cerevisiae
atggaactgttaccacagggacaaaggaacaacactcaggtaacgttcgaagatcagcaaaagatcaacgagttttcgaagttgattatgcgtaaggacgccattgcgcaggaattgagtttacagagggaggagaaggagtacctcgatgatgtgtctctagaaattgaattgattgacgaagatgagcccgtgcaatacaaggtgggcgacctctttatcttcatgaaacagagcaaagttaccgcacagctcgaaaaagacgcagaacgtctcgacaacaaaatagagactttagaggacaagcaaagagacattgattcccgtcttgatgctctgaaggcgatcctgtatgctaaatttggtgataatatcaaccttgaacgttag

SEQ ID NO: 9358 - DNA, 390 bp, Artificial Sequence
  Description of Artificial Sequence: Synthetic polynucleotide
atggaattattaccacagggacaaaggaacaacactcaggtaacgttcgaagatcagcaaaagatcaacgagttttccaagttgattatgcgtaaggacgccattgcgcaggaattgagtttacagagggaggagaaggagtacctcgatgatgtgtctttggaaattgaattgattgacgaagatgagcccgtgcaatacaaggtgggcgacctctttatcttcatgaaacagagcaaagttaccgcacagctcgaaaaagacgcagaacgtctcgacaacaaaatagagactttagaggacaagcaaagagacattgattcccgtcttgatgctttgaaggcgatcttatatgctaaatttggtgataatatcaaccttgaacgttga

SEQ ID NO: 9359 - DNA, 1230 bp, Saccharomyces cerevisiae
atgtccgaagaagtatggaatggaaaccaaggaatcctctccgtatatgtgagcaaagctagagacttgcctaatttgaataaactggacaagcaaaatgtaatgcttaggttgcgaatagctcatatgacaagagccagcaacactctacatcgagcaggtcaaaaccctgttttccattatttagaaaaatttgatattactccagagataaagcctttaatgtacgtcgaagtttactgcgatagaaggaaaaaatctccgctgccaattggaagatgtgaaatagaccttttaaatgctattagagcagacccgaaggagggttattgtacctggtacgaactgaaaagaagtggggatgaatttgctggcactatattcattgagttgactttcactcccaaagtacctcgtttaaacagggacgatcttaacaaagaaatggacaggttggattcatctatggctatgaggccgataccaccattgccaacagaatcagagtatgactatgttcatggttctacgatgagacagattactccccagtgtgttagcacaagtcacgaggataaggatgagggacagccctacagaaatggcaatgttttctccatgtcatctaaatcagatacagcggtattggcaaatagtaatgacccaataattttacctccaactttttcagcatccatgggtacaacgtctacattagaaactaatgatactgctatatcaaacacttcgaatacaaaattccattttgccaatttaaggaaattaaaggagaagataaatatatttaagaatcctgatagttcaacaaacaactgccaaaatgaatctaacaaggtagatattgaggcacttcaaaaggctattggtgtaacttcgttgtcttacgacgaagatgatgacgatgacgacgaaaatgacgcattttattcttccagccatagagtctcccacaactataaccaaccgcccttacctcctataccgaccagagatgatatgtccaattattcaagttcgcgcaatacgccgttagtaagaagagatagaccctcacgcctagattcctcttcgcctaactcacatcctcatccatcaggcctgaattctccaaaactaccacctctaccgactacttcgaattccaattttaattcgaggaagaattcgatgtctcctacaagaaaaagaccacctccaaggctcagctaa

SEQ ID NO: 9360 - DNA, 1230 bp, Artificial Sequence
  Description of Artificial Sequence: Synthetic polynucleotide
atgtccgaagaagtatggaatggaaaccaaggaatcctctccgtatatgtgagcaaagctagagacttgcctaatttgaataaattagacaagcaaaatgtaatgcttaggttgagaatagctcatatgacaagagccagcaacactttacatagagcaggtcaaaaccctgttttccattatttagaaaaatttgatattactccagagataaagcctttaatgtacgtcgaagtttactgcgatagaaggaaaaaatctccgttaccaattggaagatgtgaaatagaccttttaaatgctattagagcagacccgaaggagggttattgtacctggtacgaattgaaaagaagtggggatgaatttgctggcactatattcattgagttgactttcactcccaaagtacctcgtttaaacagggacgatcttaacaaagaaatggacaggttggattcttctatggctatgaggccgataccaccattgccaacagaaagtgagtatgactatgttcatggttctacgatgagacagattactccccagtgtgttagcacaagtcacgaggataaggatgagggacagccctacagaaatggcaatgttttctccatgtcttctaaatctgatacagcggtattggcaaatagtaatgacccaataattttacctccaactttttctgcatccatgggtacaacgtctacattagaaactaatgatactgctataagcaacacttccaatacaaaattccattttgccaatttaaggaaattaaaggagaagataaatatatttaagaatcctgatagttctacaaacaactgccaaaatgaatctaacaaggtagatattgaggcacttcaaaaggctattggtgtaacttctttgtcttacgacgaagatgatgacgatgacgacgaaaatgacgcattttattcttccagccatagagtctcccacaactataaccaaccgcccttacctcctataccgaccagagatgatatgtccaattattctagttctcgcaatacgccgttagtaagaagagatagaccctctcgcttagattcctcttctcctaactctcatcctcatccaagtggcttgaattctccaaaattaccacctttgccgactacttccaattccaattttaattctaggaagaattctatgtctcctacaagaaaaagaccacctccaaggctcagctga

SEQ ID NO: 9361 - DNA, 756 bp, Saccharomyces cerevisiae
atgagttcttataggggcggcagtagaggtggcgggagcaactatatgagcaatctacccttcggattaggttatggagatgtaggcaaaaatcatattacggaatttccatccatcccattgcccatcaatggtcctataacaaataaggaaagatctttagcagtaaagtacatcaattttggaaagactgttaaagatggcccattttataccggatcaatgagcttgataatagatcaacaggaaaacagcaagagcggtaaacgcaaacccaacataatcctagacgaagacgatactaatgatggcattgaaagatattccgataaatatttgaaaaaaaggaaaataggtatttctattgatgatcatccgtataatttgaacctctttcccaatgaattgtacaatgtaatggggatcaacaagaaaaaattattggcaatctccaagtttaataatgccgatgatgtttttactggtacaggtttacaagatgaaaacatcggactatccatgctggcaaagttaaaggagttggcagaagatgtggatgatgcgtcgacgggtgatggggcagcaaaaggaagtaaaacaggcgaaggagaagatgatgatttggcggatgatgatttcgaagaagatgaagacgaagaagatgatgatgattataatgctgaaaagtatttcaacaatggtgacgatgatgattacggtgatgaagaggatccaaatgaagaggccgccttttag

SEQ ID NO: 9362 - DNA, 756 bp, Artificial Sequence
  Description of Artificial Sequence: Synthetic polynucleotide
atgagttcttataggggcggcagtagaggtggcgggagcaactatatgagcaatttgcccttcggattaggttatggagatgtaggcaaaaatcatattacggaatttccatccatcccattgcccatcaatggtcctataacaaataaggaaagatctttagcagtaaagtacatcaattttggaaagactgttaaagatggcccattttataccggatccatgagcttgataatagatcaacaggaaaacagcaagagcggtaaacgcaaacccaacataatcttggacgaagacgatactaatgatggcattgaaagatattccgataaatatttgaaaaaaaggaaaataggtatttctattgatgatcatccgtataatttgaacctctttcccaatgaattgtacaatgtaatggggatcaacaagaaaaaattattggcaatctccaagtttaataatgccgatgatgtttttactggtacaggtttacaagatgaaaacatcggattatccatgttagcaaagttaaaggagttggcagaagatgtggatgatgcgtctacgggtgatggggcagcaaaaggaagtaaaacaggcgaaggagaagatgatgatttggcggatgatgatttcgaagaagatgaagacgaagaagatgatgatgattataatgctgaaaagtatttcaacaatggtgacgatgatgattacggtgatgaagaggatccaaatgaagaggccgccttttga

SEQ ID NO: 9363 - DNA, 390 bp, Saccharomyces cerevisiae
atgtctgaagtagcggaaacatgggtggatacctggatggcaaaactagtcaactatgactacaagcactttataagattggtgataattgtaggtggttatttactcttaagaaatatcgcatccagggaattggcgaagaagcagttggctgcccaagtggaaaaggacaaacgagacaaagaggaaaagagatcaaaagacctgatcgacaagccagatgatgctgcaacagcagaaacaacttctttcggttggggtaagaaaactagaagaagagttaaaagacaacaggagttgtttgaaaacgctttggaagaggctaagagaagaaaccaagggttggacccagatagtgatgctgatattgaggaactactggaagaatag

SEQ ID NO: 9364 - DNA, 390 bp, Artificial Sequence
  Description of Artificial Sequence: Synthetic polynucleotide
atgtctgaagtagcggaaacatgggtggatacctggatggcaaaattggtcaactatgactacaagcactttataagattggtgataattgtaggtggttatttactcttaagaaatatcgcatccagggaattggcgaagaagcagttggctgcccaagtggaaaaggacaaaagagacaaagaggaaaagagaagtaaagacttgatcgacaagccagatgatgctgcaacagcagaaacaacttctttcggttggggtaagaaaactagaagaagagttaaaagacaacaggagttgtttgaaaacgctttggaagaggctaagagaagaaaccaagggttggacccagatagtgatgctgatattgaggaattattggaagaatga

SEQ ID NO: 9365 - DNA, 765 bp, Saccharomyces cerevisiae
atggttagagttgtcatagagagtgaattggtccgtacagaaaaggaattaccaaattcgcttaaattaaggcagttcaaggaccgattgtaccatgttaccggagtggaaccagaggatatggaaatagttgtgaaaagacagtacgacaacaaggagatatatagtactaaaaaggggggtgcctattcaaatgaggatgaagatgccaacttcctaaaaggagaggaggagcttattgtggttgttacagactctaatgcccaatcaatctctaaccagctggccacgcaagcggaaggaatcccctcaatggaagtaattagcgaggaggattatttgcgaagggatcaatccgtattacgatggaagatggctcacggctatggtaggtttaatgctgcacagcagagccagcgcgctgcgctggcaaagcaggacgaagcatatgcccgagagcaattaacggcggctatcggccgccactgtcgtgtcacagtagacgggagcgctccacgtgaggccattttacggtacgtaggaccactaccgttggacgtgatgggcacatggtgcggtgtggaattcccggaagccgcaggcaaaaacgatgggcgcataaatggggtaacactgtttgggcctgtggcgccgggtcacggatcgtttgtgcgtccgcgggctgtggaaattctatcaaaagacgaagaatccgccgaggtggaagacgtccatgatgacgtggagagcgatgatgaaatttga

SEQ ID NO: 9366 - DNA, 765 bp, Artificial Sequence
  Description of Artificial Sequence: Synthetic polynucleotide
atggttagagttgtcatagagagtgaattggtccgtacagaaaaggaattaccaaattctcttaaattaaggcagttcaaggacagattgtaccatgttaccggagtggaaccagaggatatggaaatagttgtgaaaagacagtacgacaacaaggagatatatagtactaaaaaggggggtgcctattctaatgaggatgaagatgccaacttcttgaaaggagaggaggagcttattgtggttgttacagactctaatgcccaatccatctctaaccagttggccacgcaagcggaaggaatcccctctatggaagtaattagcgaggaggattatttgagaagggatcaatccgtattaagatggaagatggctcacggctatggtaggtttaatgctgcacagcagagccagcgcgctgcgttggcaaagcaggacgaagcatatgccagagagcaattaacggcggctatcggccgccactgtcgtgtcacagtagacgggagcgctccacgtgaggccattttaagatacgtaggaccattaccgttggacgtgatgggcacatggtgcggtgtggaattcccggaagccgcaggcaaaaacgatgggcgcataaatggggtaacattatttgggcctgtggcgccgggtcacggaagttttgtgcgtccgagggctgtggaaattttatccaaagacgaagaatccgccgaggtggaagacgtccatgatgacgtggagagcgatgatgaaatttga

SEQ ID NO: 9367 - DNA, 348 bp, Saccharomyces cerevisiae
atgcatcagcaacactccaaatcagagaacaaaccacaacagcaaaggaaaaaattcgaaggccctaaaagagaagctattctggatttagcgaagtataaagattctaaaattcgcgtcaaattaatgggtggtaaattagttataggtgtcctaaaaggctatgatcaactgatgaacttggtacttgatgatacagtagaatatatgtctaatcctgatgatgaaaacaacactgaactgatttctaaaaacgcaagaaagctaggtttgaccgtcataagaggtactattttggtctctttaagttccgccgaaggttctgatgtactatatatgcaaaaatag

SEQ ID NO: 9368 - DNA, 348 bp, Artificial Sequence
  Description of Artificial Sequence: Synthetic polynucleotide
atgcatcagcaacactccaaaagtgagaacaaaccacaacagcaaaggaaaaaattcgaaggccctaaaagagaagctattttagatttagcgaagtataaagattctaaaattcgcgtcaaattaatgggtggtaaattagttataggtgtcttgaaaggctatgatcaattgatgaacttggtacttgatgatacagtagaatatatgtctaatcctgatgatgaaaacaacactgaattgatttctaaaaacgcaagaaagttgggtttgaccgtcataagaggtactattttggtctctttaagttccgccgaaggttctgatgtattatatatgcaaaaatga

SEQ ID NO: 9369 - DNA, 195 bp, Saccharomyces cerevisiae
atgatctcagtttgtttcgtttttcctcattctctggctttagacttcaaatcgcggtgtaaaaaaaataggacaaaactatgtagcgcatactatgtcagtcaggtattgagaatatgtaaagaaatgccataccgtgatttgattttgttttcaactgtaaggaagggagtttatatgagattatattattaa

SEQ ID NO: 9370 - DNA, 195 bp, Artificial Sequence
  Description of Artificial Sequence: Synthetic polynucleotide
atgatctccgtttgtttcgtttttcctcattctttggctttagacttcaaaagcagatgtaaaaaaaataggacaaaattatgtagcgcatactatgtcagtcaggtattgagaatatgtaaagaaatgccataccgtgatttgattttgttttccactgtaaggaagggagtttatatgagattatattattga

SEQ ID NO: 9371 - DNA, 303 bp, Saccharomyces cerevisiae
atgagcaatactaagcataccacttctcatcacatggaactcaaaaggatcattatccttacacttttattcatactcataatgttgatatttcgaaactcagtgtccttcaaaatgacatttcaagaactactgccacgattttacaaaaagaattcaaactcagttagtaataataacaggccctcatctattttctcggaaaacttggtggattttgatgatgttaacatggtcgataagaccagactgtttatttttttatttttcagtttcatcattactataccgtttatggtataa

SEQ ID NO: 9372 - DNA, 303 bp, Artificial Sequence
  Description of Artificial Sequence: Synthetic polynucleotide
atgagcaatactaagcataccacttctcatcacatggaactcaaaaggatcattatccttacacttttattcatactcataatgttgatatttagaaactctgtgtccttcaaaatgacatttcaagaattattaccaagattttacaaaaagaatagcaactctgttagtaataataacaggccctcttctattttctctgaaaacttggtggattttgatgatgttaacatggtcgataagaccagattatttatttttttatttttcagtttcatcattactataccgtttatggtatga

SEQ ID NO: 9373 - DNA, 117 bp, Saccharomyces cerevisiae
atgcaaccgatcaccactgcttccacacaagccactcagaaggataaatcctctgaaaagaaagacaactatataatcaagggcctcttctgggatcccgcctgtgttatcgcttaa

SEQ ID NO: 9374 - DNA, 117 bp, Artificial Sequence
  Description of Artificial Sequence: Synthetic polynucleotide
atgcaaccgatcaccactgcttccacacaagccactcagaaggataaatcctctgaaaagaaagacaactatataatcaagggcctcttctgggatcccgcctgtgttatcgcttga

SEQ ID NO: 9375 - DNA, 2223 bp, Saccharomyces cerevisiae
atgtcctccagcatctttgaaatgacaatagaccacgacggtatggatagtacggggctgaagctttcacagacagcctcatccatatccatgggcgacgagtttctttgttccagtactactagtaattctattctggattctccgcttccgaaagtgacttttaaccatatcgatagcataacagacattaacacaaacatcatgaacgaaatagtggagccacaatccggagtagatgttgatgttgctgacaaaaacgtgctttactgcatagatccgtacccagtggaacctccgtgttatgattttgcgaatccgtctaaagtcattaggtaccctatatatgagcattgtcgtccgtgcctcacttctgtgaaacctcccagttatacaccgtctgtagaacactatactgtggtttctatgaagatggaaaaactatcgccctttgaaaatgcttcttctcgattatggaacaactttattcttcaaataaactctacgcagataaacttttattctattgacgattcattaaccaggcatattaaaaactatcgtggtggtgacatgtttgaccattcccaccattccaaaactgctagcgatcgccatcattcggctcggtcgttattaaatgcgttcacgacgaaatccacttaccaattcgataaatatgacaaggaaaggatatgcggggaaatagcacgagacgagcacaaatttttatcagatgagcgcctctttaagagttactccctgcaatgtgccaaagttggtctgcctatagattattcctctagagattttgttttaagaatgcgttgtgagggacaacagtttctagtgcagttttctcatgtagacgaattgatctattgggctatgtatttgaacatgggtatatccctgtccttggatctggaattgagggaaatgcccacctatagaagcgttcccagaaggagacatccgagggcaagaagatttaagcaacacaataagaacaaaaacaaaaacaagagcagacaaaatagtgatagaaatgattctcgctcccactctttacttttaagaagatcacacacctcttctgttgtaacaaaagtggccaccggcaacgaacgtccgacaaacaaatcaagatcaagaagtttaagcttgctacctccctctgtatccgatgcgagtcatgactccaatgggcccaatgactctggttcattggcaggggagagttctcaaactgatttttgtggcttatttacatcaaaactaagaaatttctttaaaacagattccagttcgagaaaaaactctaatatggacattggacaaaaaatgagatcgaaggaactgaatagtgttcaagaagaaatcgatgacaatggtagtactactaataccaatacttctgttctatcttccactttttctcccacagcacattctgttttaacggcacaaacatccatccatgaaaacttcagaagtagatcgaattccaaccctatagatcctttgcgctgtgatcggtcagtgttgaaaattaataattttgaaccggtatacgagggaacaggaaggtcaactatttcgaattctgctgagcgtacgaatcgtgaagaaaagttaaaccgtggcaatgaagatgtaaatggagatgaagatgatgacgaagacgaagacgatgctaattacgaagaggatgatgaagatggatatgttgaggatgatgacatcaatagattggtatatttggatgaaagagaatctcgctatgagaatgcggacgttgagtacggtacaatattcagtacgaaaagcttttccgtgactggttgtttaaatcatgattttccaaagaaattgtcactaaaatgtggaaataagaatcaatccagtaacgattcgaagtgggcaccggcgacacaactagtttcaaggaaaagatatatcaaagactcattaagatgcatcaaaccgttaacggaagaccacccatgggtaggtaagattattttcaaaccggcactgccaccagcattcgaaacgaataatccacctataagagtttatagtggtgaagatagtacggacttgatgcacgtgaaaaaccattatttaaagccatacatagtgggatcctgcgggtttttgaaaactggctcaaaactttttcacttttacgatagaactaacgaccttacgaatttatga

SEQ ID NO: 9376 - DNA, 2223 bp, Artificial Sequence
  Description of Artificial Sequence: Synthetic polynucleotide
atgtcctccagcatctttgaaatgacaatagaccacgacggtatggatagtacggggttgaagctttctcagacagcctcttccatatccatgggcgacgagtttctttgttccagtactactagtaattctattttagattctccgcttccgaaagtgacttttaaccatatcgatagcataacagacattaacacaaacatcatgaacgaaatagtggagccacaatccggagtagatgttgatgttgctgacaaaaacgtgctttactgcatagatccgtacccagtggaacctccgtgttatgattttgcgaatccgtctaaagtcattaggtaccctatatatgagcattgtcgtccgtgcctcacttctgtgaaacctcccagttatacaccgtctgtagaacactatactgtggtttctatgaagatggaaaaattatctccctttgaaaatgcttcttctagattatggaacaactttattcttcaaataaactctacgcagataaacttttattctattgacgattctttaaccaggcatattaaaaactatcgtggtggtgacatgtttgaccattcccaccattccaaaactgctagcgatcgccatcattctgctcgttccttattaaatgcgttcacgacgaaatccacttaccaattcgataaatatgacaaggaaaggatatgcggggaaatagcaagagacgagcacaaatttttaagtgatgagcgcctctttaagagttactccttacaatgtgccaaagttggtttgcctatagattattcctctagagattttgttttaagaatgcgttgtgagggacaacagtttttagtgcagttttctcatgtagacgaattgatctattgggctatgtatttgaacatgggtatatccttgtccttggatttggaattgagggaaatgcccacctatagaagcgttcccagaaggagacatccgagggcaagaagatttaagcaacacaataagaacaaaaacaaaaacaagagcagacaaaatagtgatagaaatgattctcgctcccactctttacttttaagaagaagtcacacctcttctgttgtaacaaaagtggccaccggcaacgaacgtccgacaaacaaatctagatctagaagtttaagcttgttacctccctctgtatccgatgcgagtcatgactccaatgggcccaatgactctggttctttggcaggggagagttctcaaactgatttttgtggcttatttacaagtaaattgagaaatttctttaaaacagattccagtagtagaaaaaactctaatatggacattggacaaaaaatgagatccaaggaattgaatagtgttcaagaagaaatcgatgacaatggtagtactactaataccaatacttctgttttatcttccactttttctcccacagcacattctgttttaacggcacaaacatccatccatgaaaacttcagaagtagatctaattccaaccctatagatcctttgcgctgtgatagatctgtgttgaaaattaataattttgaaccggtatacgagggaacaggaaggtctactatttctaattctgctgagcgtacgaatcgtgaagaaaagttaaaccgtggcaatgaagatgtaaatggagatgaagatgatgacgaagacgaagacgatgctaattacgaagaggatgatgaagatggatatgttgaggatgatgacatcaatagattggtatatttggatgaaagagaatctcgctatgagaatgcggacgttgagtacggtacaatattcagtacgaaaagcttttccgtgactggttgtttaaatcatgattttccaaagaaattgtccttgaaatgtggaaataagaatcaatccagtaacgattctaagtgggcaccggcgacacaattggtttccaggaaaagatatatcaaagactctttaagatgcatcaaaccgttaacggaagaccacccatgggtaggtaagattattttcaaaccggcattgccaccagcattcgaaacgaataatccacctataagagtttatagtggtgaagatagtacggacttgatgcacgtgaaaaaccattatttaaagccatacatagtgggatcctgcgggtttttgaaaactggctctaaactttttcacttttacgatagaactaacgaccttacgaatttatga

SEQ ID NO: 9377 - DNA, 393 bp, Saccharomyces cerevisiae
atgcgtgagcaattgaagctttttacgagggaaatagtcgattttacatttcttatcttatctggctttgactattaccagacactcttgataagcagtaacagcagtaagaagagaccgaaggattcttctttgttatcggaaaaaaaaaaaaaaaaaaaaaaaaaaaaaaaagatgtcttatcttatctttcttatcttaaagacctaccatttgttccttttctattttggcagcccgggtattcgcaaagggaaaaaaacccaagacagcattccttgttcattatgactattacaaagccaggaatgatttcgatggccgacatgaattacgtcgtttccaagaacagaagcttaaaccgtcctgctgagcggggcggtaatcggtga

SEQ ID NO: 9378 - DNA, 393 bp, Artificial Sequence
  Description of Artificial Sequence: Synthetic polynucleotide
atgcgtgagcaattgaagctttttacgagggaaatagtcgattttacatttcttatcttatctggctttgactattaccagacactcttgataagcagtaacagcagtaagaagagaccgaaggattcttctttgttatctgaaaaaaaaaaaaaaaaaaaaaaaaaaaaaaaagatgtcttatcttatctttcttatcttaaagacttaccatttgttccttttttgttttggcagcccgggtattctcaaagggaaaaaaacccaagacagcattccttgttcattatgactattacaaagccaggaatgatttccatggccgacatgaattacgtcgtttccaagaacagaagcttaaaccgtcctgctgagagaggcggtaatcgctga

SEQ ID NO: 9379 - DNA, 1500 bp, Saccharomyces cerevisiae
atgtcttacaattttacaggtacgcctacaggcgaaggaacgggtggtaactcgttgacaacagatttgaatacacaatttgacttggccaacatgggatggatcggtgtggcttcagcaggtgtgtggattatggtcccaggtatcggtttattatattctggtttatccaggaaaaagcatgctttatccttgctttgggcctcgatgatggcttccgccgtgtgtattttccaatggtttttctggggatactcattagctttctcacacaacactagaggtaacggttttattggtaccttggaattctttgggtttcgtaacgttttaggagccccatctagtgtcagttctcttcccgatatactgtttgccgtttaccaaggtatgtttgccgcagtcaccggtgccctaatgctaggtggtgcctgcgagagggcaaggttgtttcctatgatggtgttcttgtttttatggatgactattgtttattgtcctattgcatgctgggtctggaatgccgagggttggttggtcaaattgggtagcttggactatgcaggtggtttatgtgtccatttaacatctggacatggtggtctagtttacgctttgatactgggtaagcgtaatgaccctgttacacgtaaagggatgcccaagtacaaaccacattccgtcacctcggtggttttaggcacagtgttcttatggtttggttggatgttctttaacggaggctctgcaggtaatgcaactatacgagcatggtactctattatgtccacaaacttagctgctgcttgcggtggcttgacatggatggttatcgattatttcagatgcggaagaaagtggactacagttggtttgtgttcaggtatcatcgctggcctagtgggtatcaccccagccgccgggttcgtgccaatctggtcagccgttgtcattggtgtggttactggtgcaggatgtaaccttgctgttgacttaaagagtctattgcgcatcgatgatggtctagattgttactctatccatggtgtgggtggttgtattggttctgtattaactggtatctttgctgcagactatgtaaatgccactgcaggctcttacattagtccaattgatggtggctggatcaatcatcactataaacaagttggttatcaattagcaggtatatgcgctgcactagcctggactgttactgtcacatctatcttgcttctaactatgaatgccattccatttttaaaactaagattaagtgctgatgaggaagaattaggtaccgacgctgctcaaattggtgaatttacatacgaggaatccactgcttacatcccagaaccaatcagatctaaaacatcggcacaaatgccacctcctcatgaaaacattgatgataagattgtgggtaacacagacgcagaaaagaattctacgccttccgacgcttcttctactaagaacactgaccatatagtataa

SEQ ID NO: 9380 - DNA, 1500 bp, Artificial Sequence
  Description of Artificial Sequence: Synthetic polynucleotide
atgtcttacaattttacaggtacgcctacaggcgaaggaacgggtggtaactctttgacaacagatttgaatacacaatttgacttggccaacatgggatggatcggtgtggcttctgcaggtgtgtggattatggtcccaggtatcggtttattatattctggtttatccaggaaaaagcatgctttatccttgctttgggcctctatgatggcttccgccgtgtgtattttccaatggtttttctggggatactctttagctttctctcacaacactagaggtaacggttttattggtaccttggaattctttgggtttcgtaacgttttaggagccccatctagtgtcagttctcttcccgatatattgtttgccgtttaccaaggtatgtttgccgcagtcaccggtgccttgatgttgggtggtgcctgcgagagggcaaggttgtttcctatgatggtgttcttgtttttatggatgactattgtttattgtcctattgcatgctgggtctggaatgccgagggttggttggtcaaattgggtagcttggactatgcaggtggtttatgtgtccatttaacatctggacatggtggtttagtttacgctttgatattaggtaagcgtaatgaccctgttacacgtaaagggatgcccaagtacaaaccacattccgtcacctctgtggttttaggcacagtgttcttatggtttggttggatgttctttaacggaggctctgcaggtaatgcaactataagagcatggtactctattatgtccacaaacttagctgctgcttgcggtggcttgacatggatggttatcgattatttcagatgcggaagaaagtggactacagttggtttgtgttctggtatcatcgctggcttggtgggtatcaccccagccgccgggttcgtgccaatctggtctgccgttgtcattggtgtggttactggtgcaggatgtaaccttgctgttgacttaaagagtttattgcgcatcgatgatggtttggattgttactctatccatggtgtgggtggttgtattggttctgtattaactggtatctttgctgcagactatgtaaatgccactgcaggctcttacattagtccaattgatggtggctggatcaatcatcactataaacaagttggttatcaattagcaggtatatgcgctgcattggcctggactgttactgtcacatctatcttgcttttgactatgaatgccattccatttttaaaattgagattaagtgctgatgaggaagaattaggtaccgacgctgctcaaattggtgaatttacatacgaggaatccactgcttacatcccagaaccaatcagatctaaaacaagtgcacaaatgccacctcctcatgaaaacattgatgataagattgtgggtaacacagacgcagaaaagaattctacgccttccgacgcttcttctactaagaacactgaccatatagtatga

SEQ ID NO: 9381 - DNA, 1044 bp, Saccharomyces cerevisiae
atggtttctgtggagtttttacaggagttaccaaaatgtgagcatcacttgcatttggaaggtactctagaacctgacctattgttcccattagctaaaagaaacgatataattctacctgaaggttttcctaaatcggtcgaggaattaaacgaaaagtataagaagtttcgtgatctgcaggatttcttagattactattatattggtactaatgtcttgattagtgaacaagatttctttgatttggcgtgggcctattttaaaaaagttcacaaacaaggcttggtccatgctgaagtgttttacgaccctcagtcacatacatctaggggcatctccatagaaacagtcactaaaggtttccaaagagcttgtgacaaagccttctctgaatttggtattacatccaagctaattatgtgtctgttaagacacattgaaccagaggaatgtttgaaaactatcgaagaagctaccccatttattaaagatggtactatctctgccttaggattagattctgctgagaaaccatttcccccacatttatttgttgaatgttacggaaaggccgcctcattgaataaagatttaaaactaactgcacacgcaggtgaagaaggccccgctcaattcgtctcggatgctttagacttgttgcaagtaacaagaatcgatcacggtatcaacagtcaatacgacgaggagttattggataggttgtcgcgcgaccagaccatgctaactatttgtcctctctccaacgtgaagctacaagtagtccaatccgtttcagagttaccactacaaaagtttcttgacagagatgttccattttctttaaattctgatgaccccgcctattttggtggttatatcttagatgtctacactcaagtttcgaaagatttcccacactgggaccatgaaacatggggtcgtatcgctaagaacgccattaaaggttcatggtgtgacgataaaagaaagaacggtttgttaagtagagtggacgaagtagtcactaaatattcgcattag

SEQ ID NO: 9382 - DNA, 1044 bp, Artificial Sequence
  Description of Artificial Sequence: Synthetic polynucleotide
atggtttctgtggagtttttacaggagttaccaaaatgtgagcatcacttgcatttggaaggtactttggaacctgacttgttgttcccattagctaaaagaaacgatataattttacctgaaggttttcctaaatctgtcgaggaattaaacgaaaagtataagaagtttcgtgatttacaggatttcttagattactattatattggtactaatgtcttgattagtgaacaagatttctttgatttggcgtgggcctattttaaaaaagttcacaaacaaggcttggtccatgctgaagtgttttacgaccctcagtctcatacatctaggggcatctccatagaaacagtcactaaaggtttccaaagagcttgtgacaaagccttctctgaatttggtattacatccaagttgattatgtgtcttttaagacacattgaaccagaggaatgtttgaaaactatcgaagaagctaccccatttattaaagatggtactatctctgccttaggattagattctgctgagaaaccatttcccccacatttatttgttgaatgttacggaaaggccgcctctttgaataaagatttaaaattaactgcacacgcaggtgaagaaggccccgctcaattcgtctctgatgctttagacttgttgcaagtaacaagaatcgatcacggtatcaacagtcaatacgacgaggagttattggataggttgtcccgcgaccagaccatgttgactatttgtcctctctccaacgtgaagttacaagtagtccaatccgtttctgagttaccattgcaaaagtttcttgacagagatgttccattttctttaaattctgatgaccccgcctattttggtggttatatcttagatgtctacactcaagtttccaaagatttcccacactgggaccatgaaacatggggtcgtatcgctaagaacgccattaaaggttcttggtgtgacgataaaagaaagaacggtttgttaagtagagtggacgaagtagtcactaaatattctcattga

SEQ ID NO: 9383 - DNA, 570 bp, Saccharomyces cerevisiae
atgctggaggcaaagatggttatggtagttccaactatagaggaccaagcaatgatcgttctgcacccaaaaatattaagccaatcagtagttatgcacataaaaggtcagaactaccaactagacctagtaaaagtaaaacatataatgatagaagtagggcacttagacccacaggtccggacaggggcgatggttttgatcaaagggataaccgcttacgtgaagagtataagaaaaacagttcacaacgttcacaattacggtttcctgaaaagccatttcaagagggcaaagacagcagcaaagccaacccttaccaagcttcatcttacaagcgcgactcgccttcagaaaatgaagaaaagccgaataaaagattcaagaaggatgaaacaattagaaacaaatttcaaacgcaagattatagaaatacacgagatagcggtgctgcccatagagccaatgaaaatcaaaggtacaacggaaatagaaagagcaatactcaggcgcttccgcaaggtcccaagggtgggaattacgtcagtaggtaccagaggtaattactag

SEQ ID NO: 9384 - DNA, 570 bp, Artificial Sequence
  Description of Artificial Sequence: Synthetic polynucleotide
atgttagaggcaaagatggttatggtagttccaactatagaggaccaagcaatgatcgttttgcacccaaaaatattaagccaaagtgtagttatgcacataaaaggtcagaactaccaattggacttggtaaaagtaaaacatataatgatagaagtagggcacttagacccacaggtcagaacaggggcgatggttttgatcaaagggataaccgcttacgtgaagagtataagaaaaacagttcacaacgttcacaattacggtttcttgaaaagccatttcaagagggcaaagacagcagcaaagccaacccttaccaagcttcatcttacaagcgcgactcgccttcagaaaatgaagaaaagcagaataaaagattccagaaggatgaaacaattagaaacaaatttcaaacgcaagattatagaaatacacgagatagcggtgttacccatagagccaatgaaaatcaaaggtacaacggaaatagaaagagcaatactcaggcgcttccgcaaggtcccaagggtgggaattacgtctgtaggtaccagaggtaattactga

SEQ ID NO: 9385 - DNA, 4794 bp, Saccharomyces cerevisiae
atggcagaacagacgctactttccaaattgaacgctctttctcaaaaagtgataccaccagcttcccctagtcaggcaagcattttaacggaagaggtgatacgaaactggcctgaacgatcaaaaactctctgctccgatttcactgcactggagtcaaatgatgaaaaggaagactggttgaggactttgtttattgaactgtttgatttcataaataaaaacgatgaaaattctcccctcaagctttctgatgttgcatcatttactaatgaattagtgaatcatgaaaggcaagtgtcccaggcttccatagttggtaaaatgtttatcgccgtctcaagcactgttccaaatataaatgatctaacaaccatatcattatgtaaactaataccgtcgttgcatgaagaattgttcaaatttagttggatatcctctaagctgctcaacaaggaacaaaccaccttattaaggcatttgttaaaaaagtcaaaatacgaactgaagaaatataaccttttggtagaaaattcagtgggttatggtcaattggtagccttattaatattggcgtattatgatcccgacaatttttccaaagtgtccgcatatttgaaagaaatctatcatattatggggaaatattccttggattctattcgtactttagatgttattttgaacgtttctagtcagtttatcactgaagggtacaagttctttattgctcttttacgaaagtcggattcttggccatctagccatgtagctaacaattccaattattcttctcttaatgaaggcggtaatatgattgcagcaaacattatttcattcaatttatcgcaatataacgaagaagtcgataaggaaaactatgaacggtatatggatatgtgttgcattttactgaaaaatgggtttgtcaatttttattctatttgggataacgttaaaccagagatggaatttctacaagaatatattcaaaacttagaaactgaactggaagaggagtccactaaaggcgtagaaaatcccttggctatggcagctgctttgtccactgaaaatgaaactgacgaagacaacgcccttgttgtaaatgatgatgttaatatgaaggataaaatctctgaggaaacaaacgctgatatagaatcaaaaggcaagcagaaaactcagcaagatattttattatttggtaaaataaaactcttggaacgcttactcatacatggttgcgttattcccgtgatacatgtgttaaagcaatatccgaaagtgttatatgttagtgaatccttatctagatatttgggaagagtatttgaatatcttttaaatccattgtacacatcaatgacctcatctggtgaatcaaaagatatggcaactgctttgatgataacccgtatagataatggtattctagcccataagccaaggttgatccataaatataaaactcacgagccatttgaatcccttgaattgaattcaagctacgtcttctattacagcgagtggaattccaatttgactccttttgcttctgtaaatgatctatttgaaaactcgcatatctatttatctatcataggaccgtatttggggagaattcctacgcttttgagtaagatttcacgtattggggtagctgacattcaaaagaaccacggttctgagtctctgcatgttacgattgataagtggatagactatgtaagaaaattcatttttccagctacctcgctattgcagaacaatccaattgccacatcggaagtttacgaactaatgaaatttttcccttttgaaaaaagatattttatttacaacgaaatgatgacgaaattatcccaagatattctaccgcttaaggtgagcttcaataaggccgaaagagaagcgaagagtattttgaaggctttgagtatagatacaatcgcaaaagagtccaggagatttgccaaattaatctctacaaatccattggcctcactggtaccagcagttaagcagattgaaaactatgacaaagtttctgagcttgttgtttacaccacgaagtactttaacgattttgcgtatgatgtattgcaatttgtattattgttacgcttaacttataacaggcctgctgttcaatttgatggtgttaaccaggccatgtgggtccagagattatcaatatttattgcaggtttggccaaaaattgtcccaatatggatatctcaaatataatcacctatattttaaagacgttgcataatgggaatatcatagcagtttctatcctaaaggaattaattattacagtcgggggcattagagacttaaacgaagttaatatgaagcaactattaatgttaaactcaggatcaccattaaagcaatatgcaagacatctcatatatgattttagagatgataattcggttatttcgtcgaggctaacctcatttttcactgatcagagcgctatttctgagattattctcctgttatacactttaaacctgaaagcaaatacgcaaaattctcattacaaaattttatccactagatgcgatgaaatgaatacattgttatggtcgtttattgagttaattaaacattgtttgaaagggaaagcatttgaagagaatgttctcccatttgtagaattgaataataggttccatttatcgacaccgtggactttccacatatggagagactacttggataatcaattgaactcaaatgagaatttttctattgatgaattaattgaaggtgcagagtttagcgatgttgatttaacgaaaatatcaaaggatcttttcactactttttggagactttcattatacgatatccatttcgataaatcactatatgacgagcgtaagaatgcactatccggagaaaacacgggccacatgtcaaatagaaaaaaacacctgattcagaatcaaatcaaggatattttggttactggaatttcgcatcaaagagccttcaagaaaacttcagaatttatatctgaaaaatcaaatgtctggaacaaagactgcggggaagatcaaattaagatattcttgcagaattgtgttgtgccaagggttttattttctccttcagatgctctcttctcttcgttttttatctttatggcttttaggacagaaaatttgatgtcgatattgaatacttgtattacatcaaatattttaaaaacgttgctgttctgttgtactagctctgaagcaggcaatttaggtctgtttttcactgacgttcttaaaaagcttgaaaaaatgagattaaatggcgatttcaacgaccaagcttctcgaaagctttatgaatggcattcagtaattaccgagcaagtcattgaccttttatccgaaaaaaattacatgtcaattagaaacggtattgaattcatgaagcacgtcactagtgtcttccctgtagtgaaagctcatatccagttggtttacacaactttagaggaaaacttgataaatgaagaaagggaggatattaaactaccaagcagcgcattgattggccatttgaaagcgcgtttgaaggacgctttagaattggacgaattctgcaccttaactgaagaggaagctgaacaaaagagaatacgtgaaatggaattagaagagatcaaaaattatgaaacagcttgccaaaatgaacaaaagcaagtagctttaagaaagcagttagagcttaataagtcgcaaagacttcaaaatgatccacccaaaagtgttgcaagcggcagtgctggattaaatagcaaggatagatatacttattctcgtaatgagcctgtaatcccaacaaaaccttctagtagtcaatggtcatattccaaagtcaccaggcacgtcgacgatataaaccattatttggccacgaaccatttacaaaaggcaatttccttagtagagaacgacgatgaaactcggaatttaaggaaattatctaagcaaaatatgccaatattcgactttagaaattcgactttggaaatattcgaaaggtactttaggacactcattcaaaatcctcaaaatccagattttgcagaaaaaattgattcgcttaaaaggtatattaaaaatatctcgcgcgagccatacccagatacgactagctcatattctgaagctgctgctcctgaatataccaaaagatcaagtaggtacagcggaaatgctggaggcaaagatggttatggtagttccaactatagaggaccaagcaatgatcgttctgcacccaaaaatattaagccaatcagtagttatgcacataaaaggtcagaactaccaactagacctagtaaaagtaaaacatataatgatagaagtagggcacttagacccacaggtccggacaggggcgatggttttgatcaaagggataaccgcttacgtgaagagtataagaaaaacagttcacaacgttcacaattacggtttcctgaaaagccatttcaagagggcaaagacagcagcaaagccaacccttaccaagcttcatcttacaagcgcgactcgccttcagaaaatgaagaaaagccgaataaaagattcaagaaggatgaaacaattagaaacaaatttcaaacgcaagattatagaaatacacgagatagcggtgctgcccatagagccaatgaaaatcaaaggtacaacggaaatagaaagagcaatactcaggcgcttccgcaaggtcccaagggtgggaattacgtcagtaggtaccagaggtaa

SEQ ID NO: 9386 - DNA, 4794 bp, Artificial Sequence
  Description of Artificial Sequence: Synthetic polynucleotide
atggcagaacagacgttactttccaaattgaacgctctttctcaaaaagtgataccaccagcttcccctagtcaggcaagcattttaacggaagaggtgataagaaactggcctgaaagaagtaaaactctctgctccgatttcactgcattagagagcaatgatgaaaaggaagactggttgaggactttgtttattgaattatttgatttcataaataaaaacgatgaaaattctcccctcaagctttctgatgttgcaagttttactaatgaattagtgaatcatgaaaggcaagtgtcccaggcttccatagttggtaaaatgtttatcgccgtctccagcactgttccaaatataaatgatttaacaaccatatctttatgtaaattgataccgtctttgcatgaagaattgttcaaatttagttggatatcctctaagttactcaacaaggaacaaaccaccttattaaggcatttgttaaaaaagagtaaatacgaattgaagaaatataaccttttggtagaaaattctgtgggttatggtcaattggtagccttattaatattggcgtattatgatcccgacaatttttccaaagtgtccgcatatttgaaagaaatctatcatattatggggaaatattccttggattctattcgtactttagatgttattttgaacgtttctagtcagtttatcactgaagggtacaagttctttattgctcttttaagaaagagtgattcttggccatctagccatgtagctaacaattccaattattcttctcttaatgaaggcggtaatatgattgcagcaaacattatttctttcaatttatctcaatataacgaagaagtcgataaggaaaactatgaaagatatatggatatgtgttgcattttattgaaaaatgggtttgtcaatttttattctatttgggataacgttaaaccagagatggaatttttgcaagaatatattcaaaacttagaaactgaattggaagaggagtccactaaaggcgtagaaaatcccttggctatggcagctgctttgtccactgaaaatgaaactgacgaagacaacgcccttgttgtaaatgatgatgttaatatgaaggataaaatctctgaggaaacaaacgctgatatagaaagtaaaggcaagcagaaaactcagcaagatattttattatttggtaaaataaaactcttggaacgcttactcatacatggttgcgttattcccgtgatacatgtgttaaagcaatatccgaaagtgttatatgttagtgaatccttatctagatatttgggaagagtatttgaatatcttttaaatccattgtacacatctatgacctcttctggtgaaagtaaagatatggcaactgctttgatgataacccgtatagataatggtattttagcccataagccaaggttgatccataaatataaaactcacgagccatttgaatcccttgaattgaatagtagctacgtcttctattacagcgagtggaattccaatttgactccttttgcttctgtaaatgatttatttgaaaactctcatatctatttatctatcataggaccgtatttggggagaattcctacgcttttgagtaagatttctcgtattggggtagctgacattcaaaagaaccacggttctgagtctttgcatgttacgattgataagtggatagactatgtaagaaaattcatttttccagctacctctttgttgcagaacaatccaattgccacaagtgaagtttacgaattgatgaaatttttcccttttgaaaaaagatattttatttacaacgaaatgatgacgaaattatcccaagatattttaccgcttaaggtgagcttcaataaggccgaaagagaagcgaagagtattttgaaggctttgagtatagatacaatcgcaaaagagtccaggagatttgccaaattaatctctacaaatccattggccagtttagtaccagcagttaagcagattgaaaactatgacaaagtttctgagcttgttgtttacaccacgaagtactttaacgattttgcgtatgatgtattgcaatttgtattattgttacgcttaacttataacaggcctgctgttcaatttgatggtgttaaccaggccatgtgggtccagagattatctatatttattgcaggtttggccaaaaattgtcccaatatggatatctctaatataatcacctatattttaaagacgttgcataatgggaatatcatagcagtttctatcttgaaggaattaattattacagtcgggggcattagagacttaaacgaagttaatatgaagcaattattaatgttaaactctggatctccattaaagcaatatgcaagacatctcatatatgattttagagatgataattctgttatttcttccaggttgacctcttttttcactgatcagagcgctatttctgagattattctcttgttatacactttaaacttgaaagcaaatacgcaaaattctcattacaaaattttatccactagatgcgatgaaatgaatacattgttatggtcttttattgagttaattaaacattgtttgaaagggaaagcatttgaagagaatgttctcccatttgtagaattgaataataggttccatttatctacaccgtggactttccacatatggagagactacttggataatcaattgaacagtaatgagaatttttctattgatgaattaattgaaggtgcagagtttagcgatgttgatttaacgaaaatatccaaggatcttttcactactttttggagactttctttatacgatatccatttcgataaatctttgtatgacgagcgtaagaatgcattgtccggagaaaacacgggccacatgagtaatagaaaaaaacacttgattcagaatcaaatcaaggatattttggttactggaatttctcatcaaagagccttcaagaaaacttctgaatttatatctgaaaaatctaatgtctggaacaaagactgcggggaagatcaaattaagatattcttgcagaattgtgttgtgccaagggttttattttctccttctgatgctctcttctcttctttttttatctttatggcttttaggacagaaaatttgatgagtatattgaatacttgtattacaagtaatattttaaaaacgttgttattctgttgtactagctctgaagcaggcaatttaggtttatttttcactgacgttcttaaaaagcttgaaaaaatgagattaaatggcgatttcaacgaccaagcttctagaaagctttatgaatggcattctgtaattaccgagcaagtcattgaccttttatccgaaaaaaattacatgtctattagaaacggtattgaattcatgaagcacgtcactagtgtcttccctgtagtgaaagctcatatccagttggtttacacaactttagaggaaaacttgataaatgaagaaagggaggatattaaattaccaagcagcgcattgattggccatttgaaagcgcgtttgaaggacgctttagaattggacgaattctgcaccttaactgaagaggaagctgaacaaaagagaatacgtgaaatggaattagaagagatcaaaaattatgaaacagcttgccaaaatgaacaaaagcaagtagctttaagaaagcagttagagcttaataagtctcaaagacttcaaaatgatccacccaaaagtgttgcaagcggcagtgctggattaaatagcaaggatagatatacttattctcgtaatgagcctgtaatcccaacaaaaccttctagtagtcaatggagttattccaaagtcaccaggcacgtcgacgatataaaccattatttggccacgaaccatttacaaaaggcaatttccttagtagagaacgacgatgaaactagaaatttaaggaaattatctaagcaaaatatgccaatattcgactttagaaattctactttggaaatattcgaaaggtactttaggacactcattcaaaatcctcaaaatccagattttgcagaaaaaattgattctcttaaaaggtatattaaaaatatcagccgcgagccatacccagatacgactagctcttattctgaagctgctgctcctgaatataccaaaagaagtagtaggtacagcggaaatgctggaggcaaagatggttatggtagttccaactatagaggaccaagcaatgatcgttctgcacccaaaaatattaagccaatcagtagttatgcacataaaaggtctgaattaccaactagacctagtaaaagtaaaacatataatgatagaagtagggcacttagacccacaggtccggacaggggcgatggttttgatcaaagggataaccgcttacgtgaagagtataagaaaaacagttctcaacgttctcaattaagatttcctgaaaagccatttcaagagggcaaagacagcagcaaagccaacccttaccaagcttcttcttacaagcgcgactctccttctgaaaatgaagaaaagccgaataaaagattcaagaaggatgaaacaattagaaacaaatttcaaacgcaagattatagaaatacaagagatagcggtgctgcccatagagccaatgaaaatcaaaggtacaacggaaatagaaagagcaatactcaggcgcttccgcaaggtcccaagggtgggaattacgtcagtaggtaccagaggtga

SEQ ID NO: 9387 - DNA, 258 bp, Saccharomyces cerevisiae
atggcggaaaagcagaggcagttgaagttgcagaagatatacaaacaaaagtacatcggactgggagatgagagcactacacgagaacagtggcagagaaatgtgagaaacgatacactaaatacattacaaggccactccgcatctttggagtacgtttcattgagccgaggagaccttagtatacgtgacactcgtattcacctcctgaaatccatgtcccctggctataaagcctacttacgagaagagaggtag

SEQ ID NO: 9388 - DNA, 258 bp, Artificial Sequence
  Description of Artificial Sequence: Synthetic polynucleotide
atggcggaaaagcagaggcagttgaagttgcagaagatatacaaacaaaagtacatcggacttggagatgagagcactacaagagaacagtggcagagaaatgtgagaaacgatacattaaatacattacaaggccactccgcatctttggagtacgtttctttgagcagaggagaccttagtatacgtgacactcgtattcacctcttgaaatccatgtcccctggctataaagcctacttaagagaagagaggtga

SEQ ID NO: 9389 - DNA, 1581 bp, Saccharomyces cerevisiae
atgcctgactctaagtacacaatgcaaggttataaccttgttaagctattaaaaaggctagaagaagccactgcaagattagaggatgtcaccatctatcaagaaggttatattcagaataaattggaggcatctaaaaataacaagccttccgactccggggccgatgcgaatactacgaatgaaccttctgcagaaaatgctcctgaagtagaacaagatccgaaatgcataactgcgttccaatcttacatcggtgagaatattgatccgctggtagaattatcaggaaagatcgacacggtggtcttagatgctttgcagttgctaaagggaggctttcaatcgcaattgacttttttaagagctgctgtgagatcaagaaaaccggattattcttctcaaactttcgctgattctttaagacctatcaacgaaaatattataaagctgggtcaattgaaggaatcaaaccgtcaaagcaaatacttcgcatatttgagcgctttatctgagggtgctcctttgttctcctgggttgcagtggacactcccgtgtctatggtcacagatttcaaggacgcagcacagttttggactaatagaattttgaaagaatacagagagtctgatcctaatgctgttgaatgggttaagaaatttttggcctctttcgataatttgaaagcctacattaaagagtatcatactactggggtttcctggaaaaaagacggtatggattttgctgacgcgatggcacaatcaacgaagaatacaggtgctacttcatctccttcgccagcaagtgctacagcggctccagcaccaccacctcctccaccagccccaccagcttccgtctttgaaatctctaatgatacaccagcaacgagtagtgatgctaacaaaggcggtattggcgcggtcttcgccgaactaaatcagggtgaaaatatcactaagggtttgaaaaaagtagacaaatcccaacaaactcacaaaaatcctgaattacgtcaatcctctacagtttcttccacaggaagtaaatccggtccaccaccaaggccaaaaaagccatcaacattgaaaactaagaggcctcctagaaaggaattggtaggaaacaaatggtttattgagaattacgaaaatgaaactgaatctctggttattgatgcaaataaagatgagtctatcttcataggtaaatgttctcaagttcttgttcaaataaaaggaaaagttaacgctatctcgttgagtgaaactgagtcatgcagtgttgttcttgattctagcatttccggtatggatgtcatcaaatccaacaagtttggcattcaagttaaccattccctacctcaaatctccattgataaatctgacggcggtaacatctatttatccaaggaatccttgaatactgaaatctacacctcgtgctcaactgctattaacgtcaacttaccaatcggcgaggacgatgattacgtagaattcccaatccctgaacagatgaagcatagcttcgctgatggtaagttcaaatctgctgttttcgaacatgctggttaa

SEQ ID NO: 9390 - DNA, 1581 bp, Artificial Sequence
  Description of Artificial Sequence: Synthetic polynucleotide
atgcctgactctaagtacacaatgcaaggttataaccttgttaagcttttaaaaaggttagaagaagccactgcaagattagaggatgtcaccatctatcaagaaggttatattcagaataaattggaggcatctaaaaataacaagccttccgactccggggccgatgcgaatactacgaatgaaccttctgcagaaaatgctcctgaagtagaacaagatccgaaatgcataactgcgttccaatcttacatcggtgagaatattgatccgttagtagaattatctggaaagatcgacacggtggtcttagatgctttgcagttgttgaagggaggctttcaatctcaattgacttttttaagagctgctgtgagatctagaaaaccggattattcttctcaaactttcgctgattctttaagacctatcaacgaaaatattataaagttgggtcaattgaaggaatctaaccgtcaaagcaaatacttcgcatatttgagcgctttatctgagggtgctcctttgttctcctgggttgcagtggacactcccgtgtctatggtcacagatttcaaggacgcagcacagttttggactaatagaattttgaaagaatacagagagtctgatcctaatgctgttgaatgggttaagaaatttttggcctctttcgataatttgaaagcctacattaaagagtatcatactactggggtttcctggaaaaaagacggtatggattttgctgacgcgatggcacaatctacgaagaatacaggtgctacttcttctccttctccagcaagtgctacagcggctccagcaccaccacctcctccaccagccccaccagcttccgtctttgaaatctctaatgatacaccagcaacgagtagtgatgctaacaaaggcggtattggcgcggtcttcgccgaattgaatcagggtgaaaatatcactaagggtttgaaaaaagtagacaaatcccaacaaactcacaaaaatcctgaattacgtcaatcctctacagtttcttccacaggaagtaaatccggtccaccaccaaggccaaaaaagccatctacattgaaaactaagaggcctcctagaaaggaattggtaggaaacaaatggtttattgagaattacgaaaatgaaactgaatctttggttattgatgcaaataaagatgagtctatcttcataggtaaatgttctcaagttcttgttcaaataaaaggaaaagttaacgctatctctttgagtgaaactgagagttgcagtgttgttcttgattctagcatttccggtatggatgtcatcaaatccaacaagtttggcattcaagttaaccattccttacctcaaatctccattgataaatctgacggcggtaacatctatttatccaaggaatccttgaatactgaaatctacaccagctgctctactgctattaacgtcaacttaccaatcggcgaggacgatgattacgtagaattcccaatccctgaacagatgaagcatagcttcgctgatggtaagttcaaatctgctgttttcgaacatgctggttga

SEQ ID NO: 9391 - DNA, 1461 bp, Saccharomyces cerevisiae
atgccaagaaaggctaatttgctaaaatctttggcaagaggacgagtacgcacttctttcaataagtataatttgtttaatttgtacaaaaagggtggtgtagacttgaagtctaaatctttgtatcaacagaagtggacggcaaagcaggaaacccgagcttatcatggtgaacatttgacagaaaagagatggcaaaccgttttcaaacccaaattggattcagtagcacaattggatgcttcactgcgtggaggtgaaatcaaggaaacaccatttttattacaaacttttgcagtattagaaaaaaggcttgattttgcccttttcagggctatgtttgcttcgtcagtaagacaagctcgtcagttcatcttgcatggaaatgttcgcgttaatggtgtaaaaattaagcatccaagctatactttaaagcctggagatatgttcagtgtcaaaccggacaaagtgctggaagctctcggtgccaagaaaccaagtttccaagaagcgctaaagatcgataagactcaaatagttttatggaacaagtatgttaaggaagcgaaaacggagccaaaggaagtttgggagaagaagttggaaaattttgaaaagatgtcggattctaacccaaagaaacttcagtttcaagaatttttgaggcaatataataagaatctggagtcacagcaatataacgcattaaagggatgcacacaggaaggtatcttgagaaagcttttaaatgtagagaaggaaataggtaagtcgaataatgagcccttgtcgatagatgaactcaaacagggtctccctgagatccaggactctcagttgttagaaagtctaaataacgcttatcaagagtttttcaaatccggtgaaattagaagagaaatcatttctaaatgtcagcctgacgagttgatttcactggctacagaaatgatgaatcctaacgaaaccacaaaaaaagaattatctgatggagccaaatccgctttaagatctggaaaaagaatcatagcggaaagcgtgaaactatggacgaaaaatataacagaccacttcaaaactaggatgagtgatatttctgatggttcactaacgttcgaccccaaatgggccaaaaatttaaaatatcatgatccgattaaattatctgaattggaaggtgatgaaccaaaagcacgtaaattgataaacttgccgtggcagaaaaattatgtttatggtaggcaagatcctaaaaaaccctttttcacaccatggaagccaagaccatttttatcgcctttcgccattttacctcatcatttggaaatatctttcaagacatgccacgctgtatacctaagggatcccgtcgctcgaccaggccaatccgaagtaatttcaccatttgatgttcctgttcatgaacgtgcatatatgtattacttgagaaatggtaaatga

SEQ ID NO: 9392 - DNA, 1461 bp, Artificial Sequence
  Description of Artificial Sequence: Synthetic polynucleotide
atgccaagaaaggctaatttgttgaaatctttggcaagaggaagagtacgcacttctttcaataagtataatttgtttaatttgtacaaaaagggtggtgtagacttgaagtctaaatctttgtatcaacagaagtggacggcaaagcaggaaaccagagcttatcatggtgaacatttgacagaaaagagatggcaaaccgttttcaaacccaaattggattctgtagcacaattggatgcttctttacgtggaggtgaaatcaaggaaacaccatttttattacaaacttttgcagtattagaaaaaaggcttgattttgcccttttcagggctatgtttgcttcttctgtaagacaagctcgtcagttcatcttgcatggaaatgttcgcgttaatggtgtaaaaattaagcatccaagctatactttaaagcctggagatatgttcagtgtcaaaccggacaaagtgttggaagctctcggtgccaagaaaccaagtttccaagaagcgttaaagatcgataagactcaaatagttttatggaacaagtatgttaaggaagcgaaaacggagccaaaggaagtttgggagaagaagttggaaaattttgaaaagatgagtgattctaacccaaagaaacttcagtttcaagaatttttgaggcaatataataagaatttggagagccagcaatataacgcattaaagggatgcacacaggaaggtatcttgagaaagcttttaaatgtagagaaggaaataggtaagagcaataatgagcccttgagcatagatgaactcaaacagggtctccctgagatccaggactctcagttgttagaaagtttgaataacgcttatcaagagtttttcaaatccggtgaaattagaagagaaatcatttctaaatgtcagcctgacgagttgatttctttggctacagaaatgatgaatcctaacgaaaccacaaaaaaagaattatctgatggagccaaatccgctttaagatctggaaaaagaatcatagcggaaagcgtgaaattatggacgaaaaatataacagaccacttcaaaactaggatgagtgatatttctgatggttctttgacgttcgaccccaaatgggccaaaaatttaaaatatcatgatccgattaaattatctgaattggaaggtgatgaaccaaaagcacgtaaattgataaacttgccgtggcagaaaaattatgtttatggtaggcaagatcctaaaaaaccctttttcacaccatggaagccaagaccatttttatctcctttcgccattttacctcatcatttggaaatatctttcaagacatgccacgctgtatacttgagggatcccgtcgctagaccaggccaatccgaagtaatttctccatttgatgttcctgttcatgaacgtgcatatatgtattacttgagaaatggtaaatga

SEQ ID NO: 9393 - DNA, 1278 bp, Saccharomyces cerevisiae
atggtagtacattggacaattgtggatgaaatacgacttcttagatgggcatctgaattcaaaccggccggaattcataagcatttccacatgttttgcatagtggaaagaatgaattcgccagataagtatccagtgacgctattacagaaagaaaccatgaagttggggaaggtatttactgcaaaagacatatgggataagttgagccaatcttacaatttagagaaaattgatgaaatggagaatacatattccttggaagccactacagagagttcacggaatggcaatggaaatggtgacgatgcagaaattcatgaagaaactttacttgaattgaataatcgaataagagtacgcaagcaagattttacattaccttgggaggaatacggtgagttgatcttagaaaatgcaagaaaaagtccaaactctaacgaagagtatcctcgagttgaagatatgaatgagaaagatagtacaattccaaaggaaagtccttctacagacctaaagaacgacaacaataaacaggaaaaaaatgcgacaattaaagtgaaagagttgcctgaatatcatacagaggaaaatgatagccccatagacgtccagaaagaacccattaaggaggtgcaaagcgatgaaaaggaactccagagggaacatatgagtgaagaagaacagaaaatgaaaagtacaaataaaacagcagctccagtaagaaaatctcaaaggttgaaaagaagtaaggaagttaaatttgaagatgaagaaaaggaagagatagaagaagataatacgaaagacgaagaacagaaagaaaagaaagaggagatccaggagccaaaaataacccacaatgaagaagtagataaggaaaaaaacgaaaacgaagaaggtgatgatgagcgtgaaaaatccacctcttatgaaaataccaatggctctgaaagcgaaggagttgacgaaggagttgacgaagaactgggatacgagtctgaacgtgaggcagaaggtaaaggaaaacaaattgaatcagaagggggcaacttaaagaaaaaaacggaaaacaaaaaaggagatgatcaacaggatgataccaaaaaggattctaaggacaaaaatgaaccattagcaaagagaactaggcattcatcatccacaggtaatactagcaatgaaacctcgccgaaaaggaaaaggcggaaggcaggctctcgtaaaaatagccctcctgccacaagagtttccagcaggctacgaaataaaaaataa

SEQ ID NO: 9394 - DNA, 1278 bp, Artificial Sequence
  Description of Artificial Sequence: Synthetic polynucleotide
atggtagtacattggacaattgtggatgaaataaggcttcttagatgggcatctgaattcaaaccggccggaattcataagcatttccacatgttttgcatagtggaaagaatgaattctccagataagtatccagtgacgttattacagaaagaaaccatgaagttggggaaggtatttactgcaaaagacatatgggataagttgagccaatcttacaatttagagaaaattgatgaaatggagaatacatattccttggaagccactacagagagttctagaaatggcaatggaaatggtgacgatgcagaaattcatgaagaaactttacttgaattgaataatagaataagagtacgcaagcaagattttacattaccttgggaggaatacggtgagttgatcttagaaaatgcaagaaaaagtccaaactctaacgaagagtatcctagagttgaagatatgaatgagaaagatagtacaattccaaaggaaagtccttctacagacttgaagaacgacaacaataaacaggaaaaaaatgcgacaattaaagtgaaagagttgcctgaatatcatacagaggaaaatgatagccccatagacgtccagaaagaacccattaaggaggtgcaaagcgatgaaaaggaactccagagggaacatatgagtgaagaagaacagaaaatgaaaagtacaaataaaacagcagctccagtaagaaaatctcaaaggttgaaaagaagtaaggaagttaaatttgaagatgaagaaaaggaagagatagaagaagataatacgaaagacgaagaacagaaagaaaagaaagaggagatccaggagccaaaaataacccacaatgaagaagtagataaggaaaaaaacgaaaacgaagaaggtgatgatgagcgtgaaaaatccacctcttatgaaaataccaatggctctgaaagcgaaggagttgacgaaggagttgacgaagaattaggatacgagtctgaacgtgaggcagaaggtaaaggaaaacaaattgaaagtgaagggggcaacttaaagaaaaaaacggaaaacaaaaaaggagatgatcaacaggatgataccaaaaaggattctaaggacaaaaatgaaccattagcaaagagaactaggcattcttcttccacaggtaatactagcaatgaaacctctccgaaaaggaaaaggcgtaaggcaggctctcgtaaaaatagccctcctgccacaagagtttccagcaggcttagaaataaaaaatga

SEQ ID NO: 9395 - DNA, 345 bp, Saccharomyces cerevisiae
atgtctgaagtaattgaaggtaacgtcaaaattgacagaatttccccaggtgatggtgccaccttcccaaagacaggtgacttggttaccattcattacaccggtaccttggagaacggccaaaaattcgattcctccgttgacaggggctctccattccaatgtaacatcggtgtcggccaagtcatcaagggttgggatgttggtattccaaagttgtctgttggtgaaaaagctaggttaaccatccctggcccatatgcttatggcccacgtggtttcccaggtttgattccaccaaacagtactttggttttcgacgtcgaattgttgaaggtcaactaa

SEQ ID NO: 9396 - DNA, 345 bp, Artificial Sequence
  Description of Artificial Sequence: Synthetic polynucleotide
atgtctgaagtaattgaaggtaacgtcaaaattgacagaatttccccaggtgatggtgccaccttcccaaagacaggtgacttggttaccattcattacaccggtaccttggagaacggccaaaaattcgattcctccgttgacaggggctctccattccaatgtaacatcggtgtcggccaagtcatcaagggttgggatgttggtattccaaagttgtctgttggtgaaaaagctaggttaaccatccctggcccatatgcttatggcccacgtggtttcccaggtttgattccaccaaacagtactttggttttcgacgtcgaattgttgaaggtcaactga

SEQ ID NO: 9397 - DNA, 1131 bp, Saccharomyces cerevisiae
atgtccgcctcgattccagaaaccatgaaagccgttgtcattgaaaatggcaaggctgtagtcaaacaggacattccaattcctgaattagaagaaggatttgttctaattaagactgtcgccgttgccggtaaccctaccgattggaaacatattgatttcaagattggtcctcaaggtgccctcttaggctgtgatgcagccggccaaatcgtaaagttgggcccaaatgttgatgctgcacgctttgccattggtgattacatttatggggttattcacggtgcttcagtgaggttcccctcaaacggtgcctttgctgagtactctgccatttcatccgagactgcttataaaccagccagagagtttagattgtgcggtaaagacaagctaccagaaggccccgtaaaatctttagaaggggcagtatccctcccagtctcattgaccacggctggtatgatccttacacatagttttggcttggacatgacatggaagccctccaaagcgcaaagagatcaacccatcttattttggggtggtgccactgctgttggccagatgcttattcaattggcaaaaaaactaaacggtttcagcaagatcatcgtcgttgcttctcgtaaacatgaaaaattgttgaaagagtacggtgcagatgaactttttgactaccacgatgctgacgttatcgaacagataaaaaagaagtacaacaacattccttacttggtggactgtgtctccaacacagaaactattcaacaggtgtacaaatgtgccgctgatgacttagacgctacggtcgttcaattgaccgttttaaccgaaaaagatatcaaggaggaagacaggaggcaaaacgtcagtattgaaggaacccttctatatttgataggaggtaacgacgtcccatttggcacgtttactttgccagcagaccctgaatacaaggaagccgccataaaatttattaagttcatcaatccaaaaatcaatgatggtgaaatccaccacatcccagtgaaagtttacaagaacgggttagatgatatcccacagttacttgatgatattaagcacgggaggaattctggcgaaaagttggttgccgtcttgaaataa

SEQ ID NO: 9398 - DNA, 1131 bp, Artificial Sequence
  Description of Artificial Sequence: Synthetic polynucleotide
atgtccgcctctattccagaaaccatgaaagccgttgtcattgaaaatggcaaggctgtagtcaaacaggacattccaattcctgaattagaagaaggatttgttttgattaagactgtcgccgttgccggtaaccctaccgattggaaacatattgatttcaagattggtcctcaaggtgccctcttaggctgtgatgcagccggccaaatcgtaaagttgggcccaaatgttgatgctgcacgctttgccattggtgattacatttatggggttattcacggtgcttctgtgaggttcccctctaacggtgcctttgctgagtactctgccatttcttccgagactgcttataaaccagccagagagtttagattgtgcggtaaagacaagttaccagaaggccccgtaaaatctttagaaggggcagtatccctcccagtctctttgaccacggctggtatgatccttacacatagttttggcttggacatgacatggaagccctccaaagcgcaaagagatcaacccatcttattttggggtggtgccactgctgttggccagatgcttattcaattggcaaaaaaattgaacggtttcagcaagatcatcgtcgttgcttctcgtaaacatgaaaaattgttgaaagagtacggtgcagatgaactttttgactaccacgatgctgacgttatcgaacagataaaaaagaagtacaacaacattccttacttggtggactgtgtctccaacacagaaactattcaacaggtgtacaaatgtgccgctgatgacttagacgctacggtcgttcaattgaccgttttaaccgaaaaagatatcaaggaggaagacaggaggcaaaacgtcagtattgaaggaacccttttatatttgataggaggtaacgacgtcccatttggcacgtttactttgccagcagaccctgaatacaaggaagccgccataaaatttattaagttcatcaatccaaaaatcaatgatggtgaaatccaccacatcccagtgaaagtttacaagaacgggttagatgatatcccacagttacttgatgatattaagcacgggaggaattctggcgaaaagttggttgccgtcttgaaatga

SEQ ID NO: 9399 - DNA, 522 bp, Saccharomyces cerevisiae
atgtcatctaccagtgataataatgctaatagtgcaagagagaaaaaaccactgaaattcgtgtcagaaggagttggtaatgtagaggcccagaggatacgagagcaagtggagcaaaaaaaatatgaagcggaatataaaaggaaaaccaggaagtccctgcgagatcagcttaggtctaatgctattagtaaacaaaaacaatataacggtttggtgagagaccgtgaaagttttactaggttgagtaaagaggacctggaattttaccagaagagcaagaatgagttgctaaaaaaggaaaaagaactgaataactacttagacgtcaaggcaatcaattttgaaaagaaaaaaaaagcattactaatggagaacgattctactactaatacagaaaaatatttagagaccggcactagtttgggcagtaaaacacaaataaagggcgtaaagacatccagccctaaaccaaaaatcaaggtatccataaaaaaattgggtagaaaactggagaactga

SEQ ID NO: 9400 - DNA, 522 bp, Artificial Sequence
  Description of Artificial Sequence: Synthetic polynucleotide
atgtcttctaccagtgataataatgctaatagtgcaagagagaaaaaaccattgaaattcgtgtctgaaggagttggtaatgtagaggcccagaggataagagagcaagtggagcaaaaaaaatatgaagcggaatataaaaggaaaaccaggaagtccttgagagatcagcttaggtctaatgctattagtaaacaaaaacaatataacggtttggtgagagaccgtgaaagttttactaggttgagtaaagaggacttggaattttaccagaagagcaagaatgagttgttgaaaaaggaaaaagaattgaataactacttagacgtcaaggcaatcaattttgaaaagaaaaaaaaagcattattgatggagaacgattctactactaatacagaaaaatatttagagaccggcactagtttgggcagtaaaacacaaataaagggcgtaaagacatccagccctaaaccaaaaatcaaggtatccataaaaaaattgggtagaaaattagagaactga

SEQ ID NO: 9401 - DNA, 3171 bp, Saccharomyces cerevisiae
atggccaaaaaagctatcgattcaagaatcccgtcactgatcaggaatggtgttcaaaccaaacaaaggtccatatttgtcatcgttggggacagggcacgtaaccagctcccaaatttacattatttgatgatgagtgctgaccttaagatgaacaagtccgtcttatgggcttataagaagaagcttctaggattcacttcgcacagaaaaaaaagagagaataaaattaagaaagaaattaaaagaggtacaagggaagtgaatgaaatggacccttttgaatcttttatctctaaccaaaatatcagatatgtatactacaaagagagtgagaaaatattgggtaatacctatggtatgtgtattcttcaggacttcgaggcattaaccccaaatcttttagcaagaaccattgaaactgtagaaggtggtggtattgtggttattttattgaaatcaatgtcatcgttaaagcaactgtacaccatgactatggatgttcacgcccgttatcgtactgaggctcatggtgacgttgttgcaagatttaacgaaagattcatactttctttaggttcaaatccaaactgtttagtcgttgatgatgaattaaatgttctaccgctatctggtgccaaaaacgtgaaaccactacctcctaaggaagatgacgaattgcctccaaagcaattagagttgcaagaattaaaagaatccttagaagatgtccaaccagctggttcattggtttctctatccaaaactgtcaatcaagcccacgctattctttctttcattgatgccatttcggaaaaaactttgaatttcacagttgcactaacagctggaagaggtagaggtaagtctgctgctttaggtatttctattgccgcggccgtttctcacgggtattctaatatttttgttacttctccatctcccgaaaatttaaagactctatttgagtttattttcaaaggattcgatgccttaggttaccaagaacacattgattatgatatcattcaatctacgaaccccgacttcaacaaagccattgtgagagttgatattaaaagagatcacagacaaacgattcaatatattgttcctcaagaccatcaagttctgggccaagctgaattagttgtcattgatgaagctgcagctattcctttgccaatcgtcaagaacttgctgggcccatatctagtcttcatggcatccactatcaatggttacgaaggtacgggtagatctttatctctgaagttaattcagcaattgcgtaatcaaaacaacacatccggtcgggaaagtactcaaaccgccgttgtttcgagagataataaggaaaaagactctcacttacattctcaatcccgtcaattacgtgaaatttccttggacgaaccaatcagatatgctcctggtgacccaattgaaaaatggttaaacaagctcttatgtttagatgttactttaattaaaaacccaagatttgcaacaagaggaactcctcacccatcccaatgtaatctatttgttgtcaatagagatactctattttcttatcatcctgtctcagaaaatttcctggaaaaaatgatggcactgtacgtttcatcccattacaagaattctccaaacgacttacaactgatgagtgacgccccagcgcacaaactatttgttcttttaccaccaattgatccaaaggatggcggcaggatccctgaccctctatgtgtcattcaaattgcattggaaggtgaaatcagtaaggagagtgtcagaaattcattatcgagaggccaaagagctggtggtgatttaatcccatggctgatctctcaacaattccaagacgaggaattcgctagtttgagtggtgctcgtatcgtcagaattgccactaatcctgaatacgcatccatgggctatggttctcgtgcaattgaattactgagagactatttcgagggtaaattcactgacatgtctgaagatgttcgtcctaaggattattctataaagagggtgagcgataaggaactggccaaaactaatttattaaaggatgacgttaaattaagagacgcaaaaacgttgccacctctactattaaaactttctgaacagcctcctcattatctacattatttgggtgtttcatatggtttaacgcaatcgttgcataaattctggaagaataacagctttgttcctgtttatttacgtcaaaccgcaaacgatttaactggtgaacatacttgtgttatgttgaacgttttggaaggcagagaatcaaactggctcgttgaatttgccaaagatttccgtaaaagatttctgtcgcttctttcttatgattttcataagtttactgccgttcaagccttaagtgtcattgaaagtagtaagaaagcacaagatttgtctgatgacgaaaagcatgataataaagaattgacgcggacgcatctggatgacattttttctccatttgacttgaaaagattggatagctactcaaataatttgctagattatcacgttatcggtgatatgatacccatgcttgctcttttgtacttcggcgataaaatgggagattcagtaaaactatcaagcgtccagagtgctatcctgttggctatagggttacagcgtaaaaacatcgacactattgccaaggaattgaatttaccttccaatcaaactattgctatgtttgcgaagatcatgagaaaaatgtctcagtacttccgtcagctgttaagccaatcaattgaagaaactctaccaaatatcaaagatgatgctattgctgaaatggatggtgaagaaatcaaaaattacaacgctgcagaagcactggaccaaatggaagaagatttagaagaagccggttctgaagccgttcaggcgatgagggaaaaacaaaaagagctaatcaactccttgaacttagataaatacgccataaatgataacagtgaggaatgggctgaatctcaaaaatctttagaaatagctgccaaggccaaaggcgtcgtcagtttaaaaactggtaaaaagagaacgactgaaaaggctgaagatatctatagacaagagatgaaagctatgaaaaaaccaagaaagtctaaaaaggctgcaaattaa

SEQ ID NO: 9402 - DNA, 3171 bp, Artificial Sequence
  Description of Artificial Sequence: Synthetic polynucleotide
atggccaaaaaagctatcgattccagaatcccgtccttaatcaggaatggtgttcaaaccaaacaaaggtccatatttgtcatcgttggggacagggcacgtaaccagctcccaaatttacattatttgatgatgagtgctgaccttaagatgaacaagtccgtcttatgggcttataagaagaagcttttgggattcacttctcacagaaaaaaaagagagaataaaattaagaaagaaattaaaagaggtacaagggaagtgaatgaaatggacccttttgaatcttttatctctaaccaaaatatcagatatgtatactacaaagagagtgagaaaatattgggtaatacctatggtatgtgtattcttcaggacttcgaggcattaaccccaaatcttttagcaagaaccattgaaactgtagaaggtggtggtattgtggttattttattgaaatctatgtcttctttaaagcaattgtacaccatgactatggatgttcacgcccgttatcgtactgaggctcatggtgacgttgttgcaagatttaacgaaagattcatactttctttaggtagtaatccaaactgtttagtcgttgatgatgaattaaatgttttaccgttatctggtgccaaaaacgtgaaaccattgcctcctaaggaagatgacgaattgcctccaaagcaattagagttgcaagaattaaaagaatccttagaagatgtccaaccagctggttctttggtttctttatccaaaactgtcaatcaagcccacgctattctttctttcattgatgccatttctgaaaaaactttgaatttcacagttgcattaacagctggaagaggtagaggtaagtctgctgctttaggtatttctattgccgcggccgtttctcacgggtattctaatatttttgttacttctccatctcccgaaaatttaaagactttatttgagtttattttcaaaggattcgatgccttaggttaccaagaacacattgattatgatatcattcaatctacgaaccccgacttcaacaaagccattgtgagagttgatattaaaagagatcacagacaaacgattcaatatattgttcctcaagaccatcaagttttaggccaagctgaattagttgtcattgatgaagctgcagctattcctttgccaatcgtcaagaacttgttgggcccatatttagtcttcatggcatccactatcaatggttacgaaggtacgggtagatctttatctttgaagttaattcagcaattgcgtaatcaaaacaacacatccggtagagaaagtactcaaaccgccgttgtttctagagataataaggaaaaagactctcacttacattctcaatcccgtcaattacgtgaaatttccttggacgaaccaatcagatatgctcctggtgacccaattgaaaaatggttaaacaagctcttatgtttagatgttactttaattaaaaacccaagatttgcaacaagaggaactcctcacccatcccaatgtaatttatttgttgtcaatagagatactttattttcttatcatcctgtcagtgaaaatttcttggaaaaaatgatggcattgtacgtttcttcccattacaagaattctccaaacgacttacaattgatgagtgacgccccagcgcacaaattatttgttcttttaccaccaattgatccaaaggatggcggcaggatccctgaccctctttgtgtcattcaaattgcattggaaggtgaaatcagtaaggagagtgtcagaaattctttatctagaggccaaagagctggtggtgatttaatcccatggttgatctctcaacaattccaagacgaggaattcgctagtttgagtggtgctcgtatcgtcagaattgccactaatcctgaatacgcatccatgggctatggttctcgtgcaattgaattattaagagactatttcgagggtaaattcactgacatgtctgaagatgttcgtcctaaggattattctataaagagggtgagcgataaggaattggccaaaactaatttattaaaggatgacgttaaattaagagacgcaaaaacgttgccacctttattattaaaactttctgaacagcctcctcattatttgcattatttgggtgtttcttatggtttaacgcaatctttgcataaattctggaagaataacagctttgttcctgtttatttacgtcaaaccgcaaacgatttaactggtgaacatacttgtgttatgttgaacgttttggaaggcagagaatctaactggctcgttgaatttgccaaagatttccgtaaaagatttttatctcttctttcttatgattttcataagtttactgccgttcaagccttaagtgtcattgaaagtagtaagaaagcacaagatttgtctgatgacgaaaagcatgataataaagaattgacgagaacgcatttggatgacattttttctccatttgacttgaaaagattggatagctactctaataatttgttggattatcacgttatcggtgatatgatacccatgcttgctcttttgtacttcggcgataaaatgggagattctgtaaaattatccagcgtccagagtgctatcttgttggctatagggttacagcgtaaaaacatcgacactattgccaaggaattgaatttaccttccaatcaaactattgctatgtttgcgaagatcatgagaaaaatgtctcagtacttccgtcagcttttaagccaatctattgaagaaactttaccaaatatcaaagatgatgctattgctgaaatggatggtgaagaaatcaaaaattacaacgctgcagaagcattggaccaaatggaagaagatttagaagaagccggttctgaagccgttcaggcgatgagggaaaaacaaaaagagttgatcaactccttgaacttagataaatacgccataaatgataacagtgaggaatgggctgaatctcaaaaatctttagaaatagctgccaaggccaaaggcgtcgtcagtttaaaaactggtaaaaagagaacgactgaaaaggctgaagatatctatagacaagagatgaaagctatgaaaaaaccaagaaagtctaaaaaggctgcaaattga

SEQ ID NO: 9403 - DNA, 459 bp, Saccharomyces cerevisiae
atggtcgaattaactgaaattaaagacgatgtcgttcaattagacgaaccacaattttccagaaatcaggccatcgtggaagaaaaggcttctgcaacaaacaacgacgttgtcgatgatgaagatgactctgatagtgattttgaagatgaatttgatgaaaatgaaacattgttggacagaatcgttgctttaaaagacattgtccccccaggtaagagacaaacaatttctaatttttttggttttactagctcttttgtgagaaatgctttcacaaaatccggaaaccttgcttggactttgaccaccactgctttgttactcggtgtgccactatccttatctatacttgccgaacaacagctaatcgaaatggaaaagacatttgatttacaaagtgatgctaataacatattggcccaaggtgaaaaagatgctgcagcaacagccaattaa

SEQ ID NO: 9404 - DNA, 459 bp, Artificial Sequence
  Description of Artificial Sequence: Synthetic polynucleotide
atggtcgaattaactgaaattaaagacgatgtcgttcaattagacgaaccacaattttccagaaatcaggccatcgtggaagaaaaggcttctgcaacaaacaacgacgttgtcgatgatgaagatgactctgatagtgattttgaagatgaatttgatgaaaatgaaacattgttggacagaatcgttgctttaaaagacattgtccccccaggtaagagacaaacaatttctaatttttttggttttactagctcttttgtgagaaatgctttcacaaaatccggaaaccttgcttggactttgaccaccactgctttgttactcggtgtgccattgtccttatctatacttgccgaacaacagttaatcgaaatggaaaagacatttgatttacaaagtgatgctaataacatattggcccaaggtgaaaaagatgctgcagcaacagccaattga

SEQ ID NO: 9405 - DNA, 1182 bp, Saccharomyces cerevisiae
atgggattctttattcctcagagtagtttgggaaacttgaagctttacaagtatcaaagtgatgaccgctctttcctttcaaaccatgtattgaggcccttttggagaaagtttgcgactatttttccactatggatggcacccaatttggtaacattattagggttctgctttattatatttaatgtgttaacaacactttactacgacccgtattttgaccaggaatcgccacgttggacctatttctcctatgctataggtttgtttttataccagacttttgatgcttgcgatggaatgcatgcacgtcgtacaggccagcagggccctctaggggaattgtttgaccattgtattgattcaatcaacacaactttgtcaatgattcctgtctgttccatgacaggtatgggttacacatatatgaccattttttcacaatttgcgatattgtgcagcttttacttgagcacatgggaagagtatcacacccacaaactttatctagctgaattctgcggtcctgttgaaggtattattgttttgtgtatttctttcattgcagtcggaatttacggacctcaaaccatctggcacactaaagtagcgcaattctcctggcaagattttgtgtttgatgttgaaaccgttcatctaatgtatgcattttgcacaggagcattaatatttaatattgtcacagctcatacaaacgtcgtgaggtattacgaatcccaatcgaccaaatctgcaactccaagcaaaactgcagaaaatataagtaaagcagtaaatggtcttttgccattctttgcatacttctcttcaatttttaccttagtcttgattcaaccatcttttatttctttggctttaattttatcgattggtttttcggttgcctttgtagttggtcggatgattattgctcatttaaccatgcaaccattcccaatggtcaatttcccatttttaatcccaactatccaattggtattgtacgcatttatggtttacgttttagattaccaaaaaggaagcatagtttctgcattggtttggatgggactcggcttgacacttgctatccatggaatgttcatcaatgatattatctatgacatcactacctttctggatatttacgctttatcaattaaacatccaaaagaaatttag

SEQ ID NO: 9406 - DNA, 1182 bp, Artificial Sequence
  Description of Artificial Sequence: Synthetic polynucleotide
atgggattctttattcctcagagtagtttgggaaacttgaagctttacaagtatcaaagtgatgaccgctctttcctttccaaccatgtattgaggcccttttggagaaagtttgcgactatttttccattatggatggcacccaatttggtaacattattagggttctgctttattatatttaatgtgttaacaacactttactacgacccgtattttgaccaggaatctccacgttggacctatttctcctatgctataggtttgtttttataccagacttttgatgcttgcgatggaatgcatgcacgtcgtacaggccagcagggccctttaggggaattgtttgaccattgtattgattctatcaacacaactttgtccatgattcctgtctgttccatgacaggtatgggttacacatatatgaccattttttctcaatttgcgatattgtgcagcttttacttgagcacatgggaagagtatcacacccacaaactttatttggctgaattctgcggtcctgttgaaggtattattgttttgtgtatttctttcattgcagtcggaatttacggacctcaaaccatctggcacactaaagtagcgcaattctcctggcaagattttgtgtttgatgttgaaaccgttcatttaatgtatgcattttgcacaggagcattaatatttaatattgtcacagctcatacaaacgtcgtgaggtattacgaatcccaatccaccaaatctgcaactccaagcaaaactgcagaaaatataagtaaagcagtaaatggtcttttgccattctttgcatacttctcttccatttttaccttagtcttgattcaaccatcttttatttctttggctttaattttatccattggtttttctgttgcctttgtagttggtagaatgattattgctcatttaaccatgcaaccattcccaatggtcaatttcccatttttaatcccaactatccaattggtattgtacgcatttatggtttacgttttagattaccaaaaaggaagcatagtttctgcattggtttggatgggactcggcttgacacttgctatccatggaatgttcatcaatgatattatctatgacatcactacctttttggatatttacgctttatccattaaacatccaaaagaaatttga

SEQ ID NO: 9407 - DNA, 147 bp, Saccharomyces cerevisiae
atgcaagttggttttgtttctcagaccaactgccgttcctttcctgcgtgtattgtttttctgtttcaaatgagtcaacggcaacgatcgttcaatgcaaatcttcgagtatttaaaagcaaatgtaagaaaatttatataggttaa

SEQ ID NO: 9408 - DNA, 147 bp, Artificial Sequence
  Description of Artificial Sequence: Synthetic polynucleotide
atgcaagttggttttgtttctcagaccaactgccgttcctttcctgcgtgtattgtttttttgtttcaaatgagtcaaagacaaagatctttcaatgcaaatcttcgtgtatttaaaagcaaatgtaagaaaatttatataggttga

SEQ ID NO: 9409 - DNA, 723 bp, Saccharomyces cerevisiae
atgacttcgaaaaaagtgatattagttgcattgagtggatgctcctccagtggtaagacgacaattgcgaaacttacagcaagtttattcacgaaggctacattaattcatgaagatgacttttacaaacatgataatgaagtgccagtagatgctaaatataacattcaaaattgggattcgccagaagctcttgattttaaacttttcggtaaagaattagatgtgatcaaacaaactggtaaaatagccaccaaacttatacacaataacaacgtagatgatccctttacaaagttccacattgatagacaagtttgggacgagttaaaggctaagtatgactctattaatgacgacaaatatgaagttgtaattgtagatgggtttatgattttcaataatactggaatatcaaaaaaatttgatttgaagatattagtgcgtgctccctatgaagtactaaaaaaaaggagggcttccagaaaaggataccagactttggattctttctgggtggatccgccgtattatttcgacgaatttgtgtatgaatcttatcgtgcaaatcatgcgcagttatttgttaatggagacgtagaaggtttactagacccaaggaagtcaaagaatataaaagagttcataaatgatgatgacactccaattgcgaaacctttaagctgggtgtgccaagagattctaaagctttgtaaggattag

SEQ ID NO: 9410 - DNA, 723 bp, Artificial Sequence
  Description of Artificial Sequence: Synthetic polynucleotide
atgacttctaaaaaagtgatattagttgcattgagtggatgctcctccagtggtaagacgacaattgcgaaacttacagcaagtttattcacgaaggctacattaattcatgaagatgacttttacaaacatgataatgaagtgccagtagatgctaaatataacattcaaaattgggattctccagaagctcttgattttaaacttttcggtaaagaattagatgtgatcaaacaaactggtaaaatagccaccaaacttatacacaataacaacgtagatgatccctttacaaagttccacattgatagacaagtttgggacgagttaaaggctaagtatgactctattaatgacgacaaatatgaagttgtaattgtagatgggtttatgattttcaataatactggaatatccaaaaaatttgatttgaagatattagtgcgtgctccctatgaagtattgaaaaaaaggagggcttccagaaaaggataccagactttggattctttctgggtggatccgccgtattatttcgacgaatttgtgtatgaatcttatcgtgcaaatcatgcgcagttatttgttaatggagacgtagaaggtttattagacccaaggaagtccaagaatataaaagagttcataaatgatgatgacactccaattgcgaaacctttaagctgggtgtgccaagagattttgaagctttgtaaggattga

SEQ ID NO: 9411 - DNA, 1305 bp, Saccharomyces cerevisiae
atgagagaggaggggagtgaattagaaatggaaaaaggcttccttaaatggaaaccagtcaacttgatgaagaaaatattgtctttaccaatgaaaaaaactaaaaacgatataggtttgagattagatatatcatatattttagttaatctaatagtctgctcatacccggtaaacacgtatccaaaactgctttataggaatagcttggatgacttaatattgtttctaacagtgtaccatggcaagggaaattttagaatttttaattttagaggtgagaaagaagacagcgattataaagataatgatcttattggtatcgctgccaagtttgagagcaaagattttgaaattcaagaattacgttcgacgctgattaatgatggaaagataccaatatcacccattgatctcgaaacaaggaccttggtcgaagaagaaaccaataatgtaatttgtgaaaggatcggttggctagatcattttccaccgccatttgaactgctggaagagattgtagatggtatagaaaattacctgtccgtttcgaagaatagagtggctgttttacattgtcgaatggggaaaggccgatctggtatgataacagtagcatacctcatgaaatacttgcagtgtcctcttggagaagcaagattgatattcatgcaggctagattcaagtatggtatgacgaatggcgtcaccataccctctcaattaagatacttaaggtaccatgagttttttattacccatgaaaaagcagcccaagaaggaatttctaatgaggcggtaaaattcaaatttaaattcaggcttgctaaaatgacgttcctccgcccatcaagcttaatcacttccgagtctgctattgtaactactaagattcaacactacaacgatgatagaaatgccctcctaacccgaaaagtagtatattcagatatcatggcgcatgaatgcggtggtaatatgaccttcatttttggtagggactacttaacactggaaaatgattgtcgtatagaatttaccctggggaccagcaagtccaaagccgccagtagcataatatcttggacttcatgcgccagctgttggctgaatatataccttgagactttgatgcacataattaaagacgattcttcgccagattactttcaagtagagaggttaaagagagacgaaatgcttgggacaaccataagctggcaagagctggacggttttggggagctcagcactcacggcttgaaattatttcaggcactgaaattggaatgggaaattatatag

SEQ ID NO: 9412 - DNA, 1305 bp, Artificial Sequence
  Description of Artificial Sequence: Synthetic polynucleotide
atgagagaggaggggagtgaattagaaatggaaaaaggcttccttaaatggaaaccagtcaacttgatgaagaaaatattgtctttaccaatgaaaaaaactaaaaacgatataggtttgagattagatatatcttatattttagttaatttgatagtctgctcttacccggtaaacacgtatccaaaattactttataggaatagcttggatgacttaatattgtttttaacagtgtaccatggcaagggaaattttagaatttttaattttagaggtgagaaagaagacagcgattataaagataatgatcttattggtatcgctgccaagtttgagagcaaagattttgaaattcaagaattacgttctacgttgattaatgatggaaagataccaatatctcccattgatctcgaaacaaggaccttggtcgaagaagaaaccaataatgtaatttgtgaaaggatcggttggcttgatcattttccaccgccatttgaattattggaagagattgtagatggtatagaaaattacttgtccgtttccaagaatagagtggctgttttacattgtagaatggggaaaggccgttctggtatgataacagtagcatacctcatgaaatacttgcagtgtcctcttggagaagcaagattgatattcatgcaggctagattcaagtatggtatgacgaatggcgtcaccataccctctcaattaagatacttaaggtaccatgagttttttattacccatgaaaaagcagcccaagaaggaatttctaatgaggcggtaaaattcaaatttaaattcaggcttgctaaaatgacgttcctccgcccatccagcttaatcacttccgagtctgctattgtaactactaagattcaacactacaacgatgatagaaatgccctcttgaccagaaaagtagtatattctgatatcatggcgcatgaatgcggtggtaatatgaccttcatttttggtagggactacttaacattagaaaatgattgtcgtatagaatttaccttggggaccagcaagtccaaagccgccagtagcataatatcttggacttcttgcgccagctgttggttaaatatataccttgagactttgatgcacataattaaagacgattcttctccagattactttcaagtagagaggttaaagagagacgaaatgcttgggacaaccataagctggcaagagttggacggttttggggagctcagcactcacggcttgaaattatttcaggcattgaaattggaatgggaaattatatga

SEQ ID NO: 9413 - DNA, 2862 bp, Saccharomyces cerevisiae
atgaatgctagtggaagatctcattccaaaggccccattataaggtctgtgtctttagaagatcttaagagaaactctagtttcaaaggcaatctaaagtacaaagatgaagtcacttcacataaagaaccacaggtcggaacattgagcaacgaagaactgctaaaagatttggacaacatgttgcgcggtaaactgaacatgggaagaaacagttttcatgccgataaaagaaataaatcagatggaaatatcagtgccttaaccttcaaggcaagatcaggtcttgagggagatattcgtaccatagatatacagcaagatagtagtgatgaaaatgataattttaagttcagtgatgatggcgttaataaggatagaaataatgagaaagataataatactgataacgccgttgaatttcaagacgatgctgaagaagctgaagaggagaatgaggatgaatcatttgctaatgtagatgaactggatggctttgatttgaataaggtttctgatggcaagcatgttcctatcaatgaaaagggcgaagttgattataatatgccggtagataaagaatttcagaaatcacttgaccagtgcgcagcttcacttgaggaaagatcaagtgcaccttatgctttacaaagagcagtggactgggaattgaagatgttttattctttggaagatgaactgtcggaatggttttgcagctctgattatatgcattttggacagacacagactctgtttaaacagaaaattacgcaaccacaattattctttgatgatgaaaactatgctgcgagcgtagttgaatgtttaattgaagacatccccaattctttagcatctaatttactcgcattatcatatatttctatgggatgctttgcgtttacgaatagcaaaagtgagcatacaaagattatacgacgcaacaatttaatgcttgttcctcatattcaagaaattgttcatgccttcaagaagattgcaataagttgtagggatgacaacagaaatttaaagaaacaaacaattttgctatttcattcgtcaacaatcctatacttcatatgcagtatttgtatagaaggtagaggagaaaatccggaagcagtaaatgttgttatcgacgcttttgagaaaacagatttgttggaatttttaacaaagtatattgaaaattggaggtggaatagcagattagctatgcgcataagaaatatgatttctttgctcttcaagcttattgtattacaatttggtgacagttctgtctacaaacagaccaaatcatctatttataatctccatggcttaacatatccatcaaagcatccagaaaagctttctatctccccattacattatcaagcattcagggaggacattacttcccgttttcctgattacaatatgcccagttctggcttacctaaagatgttgacaaatcagaatctctttcccagtttctggaaattcctcgtccaaaatcaaagaatcctctaaatatggcgctcattgttcctgaaaaacatattgctacacctgctccttcaccgccaagctctccacaattaatgcatttaggtgaaggtcctagacctcgtaaatctttccaaacaaacatggcatatccgtgtttgtatccatctgataatgaaggatctgaagatgacactctggaagataggatagatttaaatatagagagaaaacctgataacgatatagttattccattcagtaccgaagaggcagcgagaatattaagcgagagtttagaaattaagctgagtacaaaacaactttggtacgaaagggacttattcatgataactgaacgtggttggaaacagcaattagaaaatgagccatatgattatgccgcgcttaatcatgatgcaaactcttcaaaagaggaaaaaagtgcgatttgcattatgcagcgaattgacaaatattataagagctgcctttcgagctttaactctcttgtttttgtcttactgcaaacaatggaatcaagcttgacaaataactttcataggaaaagtgaagtctccgataaaaatcttctaaatatgctgacaccccaattggagatcgtgagagctaaggaattgtccctaaagtcagcagcgggcatattacatgcgttattgaagtggtttaagttaagccatattttgaaatttgaacacttggcggtagttattcacgattcgcgatacatcaacacatgcgcatctattttaagcaaatattctgaggtttatccagagagggttttcaataaatatgtacaaaccccgaattcattttggaaggagtgttctctctctaacgagtcttatcgtgaatcctattcagtagatgactcaggagaggtcgacacggagattatgccttcgtttgcatatctgttaagaatcttgagaaaagtcacagggaataaaacacaaaggttaaaggagctgcccctctccatcggcattctatttaaacgctattatcggctcttcaaccttgacatgtatcatccaatattgaaaataacaagagaactcacaccattcaaaaacaagaggtggaaatccgagcatatggaattgatatcgggggtttacctttatgaaaagctggagttaactgataattgggtaacagggaaggatatatcaggagagttgagcgatgcttgtggtcaagaaattgcactccgggccttgcttcaattttacaattttcaacactatgaaatatctatggaggaccttggatatggacaccgtaatagttccagccaagatctgttaaacaaggaatccgagtatttgaatatttaa

SEQ ID NO: 9414 - DNA, 2862 bp, Artificial Sequence
  Description of Artificial Sequence: Synthetic polynucleotide
atgaatgctagtggaagatctcattccaaaggccccattataaggtctgtgtctttagaagatcttaagagaaactctagtttcaaaggcaatttgaagtacaaagatgaagtcacttctcataaagaaccacaggtcggaacattgagcaacgaagaattattgaaagatttggacaacatgttgcgcggtaaattgaacatgggaagaaacagttttcatgccgataaaagaaataaatctgatggaaatatcagtgccttaaccttcaaggcaagatctggtcttgagggagatattcgtaccatagatatacagcaagatagtagtgatgaaaatgataattttaagttcagtgatgatggcgttaataaggatagaaataatgagaaagataataatactgataacgccgttgaatttcaagacgatgctgaagaagctgaagaggagaatgaggatgaaagttttgctaatgtagatgaattagatggctttgatttgaataaggtttctgatggcaagcatgttcctatcaatgaaaagggcgaagttgattataatatgccggtagataaagaatttcagaaatctcttgaccagtgcgcagcttctcttgaggaaagaagtagtgcaccttatgctttacaaagagcagtggactgggaattgaagatgttttattctttggaagatgaattatctgaatggttttgcagctctgattatatgcattttggacagacacagactttatttaaacagaaaattacgcaaccacaattattctttgatgatgaaaactatgctgcgagcgtagttgaatgtttaattgaagacatccccaattctttagcatctaatttactcgcattatcttatatttctatgggatgctttgcgtttacgaatagcaaaagtgagcatacaaagattataaggcgcaacaatttaatgcttgttcctcatattcaagaaattgttcatgccttcaagaagattgcaataagttgtagggatgacaacagaaatttaaagaaacaaacaattttgttatttcattcttctacaatcttgtacttcatatgcagtatttgtatagaaggtagaggagaaaatccggaagcagtaaatgttgttatcgacgcttttgagaaaacagatttgttggaatttttaacaaagtatattgaaaattggaggtggaatagcagattagctatgcgcataagaaatatgatttctttgctcttcaagcttattgtattacaatttggtgacagttctgtctacaaacagaccaaatcttctatttataatctccatggcttaacatatccatctaagcatccagaaaagctttctatctccccattacattatcaagcattcagggaggacattacttcccgttttcctgattacaatatgcccagttctggcttacctaaagatgttgacaaaagtgaatctctttcccagtttttggaaattcctcgtccaaaatccaagaatcctttaaatatggcgctcattgttcctgaaaaacatattgctacacctgctccttctccgccaagctctccacaattaatgcatttaggtgaaggtcctagacctcgtaaatctttccaaacaaacatggcatatccgtgtttgtatccatctgataatgaaggatctgaagatgacactttggaagataggatagatttaaatatagagagaaaacctgataacgatatagttattccattcagtaccgaagaggcagcgagaatattaagcgagagtttagaaattaagttgagtacaaaacaactttggtacgaaagggacttattcatgataactgaacgtggttggaaacagcaattagaaaatgagccatatgattatgccgcgcttaatcatgatgcaaactcttctaaagaggaaaaaagtgcgatttgcattatgcagcgtattgacaaatattataagagctgcctttctagctttaactctcttgtttttgtcttattacaaacaatggaaagtagcttgacaaataactttcataggaaaagtgaagtctccgataaaaatcttttgaatatgttaacaccccaattggagatcgtgagagctaaggaattgtccttgaagtctgcagcgggcatattacatgcgttattgaagtggtttaagttaagccatattttgaaatttgaacacttggcggtagttattcacgattctcgttacatcaacacatgcgcatctattttaagcaaatattctgaggtttatccagagagggttttcaataaatatgtacaaaccccgaattctttttggaaggagtgttctctctctaacgagtcttatcgtgaatcctattctgtagatgactctggagaggtcgacacggagattatgccttcttttgcatatcttttaagaatcttgagaaaagtcacagggaataaaacacaaaggttaaaggagttgcccctctccatcggcattttatttaaacgctattataggctcttcaaccttgacatgtatcatccaatattgaaaataacaagagaactcacaccattcaaaaacaagaggtggaaatccgagcatatggaattgataagcggggtttacctttatgaaaagttggagttaactgataattgggtaacagggaaggatatatctggagagttgagcgatgcttgtggtcaagaaattgcactcagagccttgcttcaattttacaattttcaacactatgaaatatctatggaggaccttggatatggacaccgtaatagttccagccaagatttattaaacaaggaatccgagtatttgaatatttga

SEQ ID NO: 9415 - DNA, 2541 bp, Saccharomyces cerevisiae
atggaactagagcccactctttttggtataatagaggcattggctcctcaattattgtcgcagagtcatttgcagacatttgtatctgatgtagtcaatttactgcgatcatccaccaaatcggcaactcaattaggccctttaattgatttttacaaattacaatcactagattcgcctgaaacaacaattatgtggcataaaattgagaaatttctcgatgctttatttggaatccagaacaccgatgatatggtaaagtacctctctgtctttcaatctttgcttccatcaaattacagagcaaaaattgtccaaaaatcatctgggctcaatatggagaaccttgctaaccatgaacatttacttagcccagtgcgggctccaagtatatatacagaagcttcatttgaaaacatggaccgattttctgaaagaaggtccatggtatcttcgcctaatcgttacgttccctcttcaacctacagttctgttactttgagacagttgtcaaatccttattatgtgaacactatacccgaggaagatatcctaaaatacgtatcatatacattattagctacgacatcggcactatttccgtttgatcatgagcaaatacaaattccgtctaagatacccaattttgagagtggacttttacatttaatatttgaagcgggtttattatatcaaagtttgggttataaagtggagaagtttaggatgttgaatatatctccaatgaaaaaagcattgattatagaaatttcagaagaattacaaaactacacagcatttgtgaacaatctggtctcttcagggacagtagtgtcattgaaatcgttatatcgtgaaatatatgaaaatataataaggcttcgaatatactgtaggtttacagaacaccttgaagaattgagcggagatacattcttgattgaattaaatattttcaaatcccacggagatcttactataagaaaaatagcaacgaatttgtttaattcaatgatttctctttattatgagtatttaatgaattggttgactaaaggtctactccgagctacttatggagaattcttcattgctgaaaacactgatacaaatggtacagacgatgattttatttaccacattcctatagagttcaaccaagaaagagttccggccttcataccgaaagagttggcatataaaatattcatgatcggcaaatcgtatatcttcctagaaaagtactgtaaagaggttcaatggacaaacgaattttctaaaaagtatcatgtcctgtaccagagcaattcttatcggggaatatcaacgaacttttttgaaattataaatgatcaatattctgaaattgttaatcatactaatcaaattctaaatcagaagtttcattacagagacgtggtatttgcgttaaagaatattcttctcatgggtaaatctgattttatggatgctcttatagaaaaggccaatgatattctcgcgacaccatcggattcattgccaaattataagttaacaagggttttacaggaagccgtgcagctttcttccttaagacatttaatgaatagtccccgtaatagttctgtcattaatggattggatgcgagggtactcgatcttggacatggatccgtgggttgggatgtttttactttagattacatcctctacccccctttgagtttagtattaaacgtaaatcgtccttttggcaggaaagagtatctacgaattttcaattttttatggagatttaaaaagaacaattatttctatcaaaaggaaatgttgaagagtaatgatataatcagatcattcaagaaaatcagaggttacaacccgctcatccgtgatattatcaataaactttctagaatcagtatacttagaactcaattccagcaattcaactcgaagatggaatcttattatttgaactgcattatagaggaaaattttaaagaaatgacccggaaactgcaacgcacagagaataaaagccaaaaccaattcgacttaattagattaaataatggcaccatagaattaaatgggattttaaccccaaaagctgaagtactaacaaagtcttcaagcagtaaaccccaaaaacacgcaatcgaaaagacgctgaatattgatgaattagaaagtgtacataacacgttcttgacgaatattctttctcataagctttttgcaactaacacaagtgaaataagcgttggtgattattctgggcaaccatacccaacttcattggttttacttttaaattcggtttacgagttcgtcaaagtttattgtaatttgaacgacattggatacgaaatcttcattaaaatgaatctcaatgatcacgaagcatctaacggattattgggaaaatttaatacgaatttaaaggaaattgttagccagtataaaaattttaaagacagactgtatatttttagggcagatttaaagaacgatggcgatgaagagcttttcttattgagcaaatcgctccgttaa

SEQ ID NO: 9416 - DNA, 2541 bp, Artificial Sequence
  Description of Artificial Sequence: Synthetic polynucleotide
atggaattagagcccactctttttggtataatagaggcattggctcctcaattattgtctcagagtcatttgcagacatttgtatctgatgtagtcaatttacttcgttcttccaccaaatctgcaactcaattaggccctttaattgatttttacaaattacaatctttagattctcctgaaacaacaattatgtggcataaaattgagaaatttctcgatgctttatttggaatccagaacaccgatgatatggtaaagtacctctctgtctttcaatctttgcttccatccaattacagagcaaaaattgtccaaaaatcttctgggctcaatatggagaaccttgctaaccatgaacatttacttagcccagtgagagctccaagtatatatacagaagcttcttttgaaaacatggacagattttctgaaagaaggtccatggtatcttctcctaatcgttacgttccctcttccacctacagttctgttactttgagacagttgagcaatccttattatgtgaacactatacccgaggaagatatcttgaaatacgtatcttatacattattagctacgacaagtgcattatttccgtttgatcatgagcaaatacaaattccgtctaagatacccaattttgagagtggacttttacatttaatatttgaagcgggtttattatatcaaagtttgggttataaagtggagaagtttaggatgttgaatatatctccaatgaaaaaagcattgattatagaaatttctgaagaattacaaaactacacagcatttgtgaacaatttggtctcttctgggacagtagtgtctttgaaatctttatatcgtgaaatatatgaaaatataataaggcttagaatatactgtaggtttacagaacaccttgaagaattgagcggagatacattcttgattgaattaaatattttcaaatcccacggagatcttactataagaaaaatagcaacgaatttgtttaattctatgatttctctttattatgagtatttaatgaattggttgactaaaggtttactcagagctacttatggagaattcttcattgctgaaaacactgatacaaatggtacagacgatgattttatttaccacattcctatagagttcaaccaagaaagagttccggccttcataccgaaagagttggcatataaaatattcatgatcggcaaaagttatatcttcttggaaaagtactgtaaagaggttcaatggacaaacgaattttctaaaaagtatcatgtcttgtaccagagcaattcttatagaggaatatctacgaacttttttgaaattataaatgatcaatattctgaaattgttaatcatactaatcaaattttgaatcagaagtttcattacagagacgtggtatttgcgttaaagaatattcttctcatgggtaaatctgattttatggatgctcttatagaaaaggccaatgatattctcgcgacaccaagtgattctttgccaaattataagttaacaagggttttacaggaagccgtgcagctttcttccttaagacatttaatgaatagtccccgtaatagttctgtcattaatggattggatgcgagggtactcgatcttggacatggatccgtgggttgggatgtttttactttagattacatcctctacccccctttgagtttagtattaaacgtaaatcgtccttttggcaggaaagagtatttaagaattttcaattttttatggagatttaaaaagaacaattatttctatcaaaaggaaatgttgaagagtaatgatataatcagatctttcaagaaaatcagaggttacaacccgctcatccgtgatattatcaataaactttctagaatcagtatacttagaactcaattccagcaattcaactccaagatggaatcttattatttgaactgcattatagaggaaaattttaaagaaatgaccagaaaattacaacgcacagagaataaaagccaaaaccaattcgacttaattagattaaataatggcaccatagaattaaatgggattttaaccccaaaagctgaagtattaacaaagtcttctagcagtaaaccccaaaaacacgcaatcgaaaagacgttgaatattgatgaattagaaagtgtacataacacgttcttgacgaatattctttctcataagctttttgcaactaacacaagtgaaataagcgttggtgattattctgggcaaccatacccaacttctttggttttacttttaaattctgtttacgagttcgtcaaagtttattgtaatttgaacgacattggatacgaaatcttcattaaaatgaatctcaatgatcacgaagcatctaacggattattgggaaaatttaatacgaatttaaaggaaattgttagccagtataaaaattttaaagacagattatatatttttagggcagatttaaagaacgatggcgatgaagagcttttcttattgagcaaatctctccgttga

SEQ ID NO: 9417 - DNA, 2022 bp, Saccharomyces cerevisiae
atgtcaacgcactcaaacgactacttttctgcttcttccggaatggtctctgagacatcgtccgaggtttcttcgataaactcttcacagcctgtatcattctctaaggcttctattgctgctccggttccatgctctgatctacacagcaccaagtcgaacgatgcatcgagaaaattgtctattagtaggacgttaactaatcggctcaacgacattaaaaaggctgtcgatgacgacaacttgcagacggaagaaaattccgcagacgttaataaaatattagaatctagatttgacgtggccgatgccattaggctacagcacaatgagtcagtccagtcaaagttaaacatcccagtcacacacaccacgactgcaggcgcctcgttgtcggcaccatcttcctctgctttctctgcttcttctattcaaaatgatactacagaacataaagcttccatggactccaaactcatgaggaatagactatatccggcttccacgaaacactccggtaaggatcttgaggcccaaggaataaccgaattcgagcctgatgaaccgactgtaaaaaaagtattcaccaacaagtctaccgggcagctggaactgccccccgacggtggttatggctgggtcgtgacattctgtgtgttcttgaccatgttttccacgtggggctgcaacgcatccttcggtgtcgaccttgcctactacttaaaccatgatacttaccctggtgcttcgaagtacgattatgccttaattgctggcctaactgtctttctcggtcaactcttatccccccttgtgatggcactgatgagaataattggtctgcggaccaccatgctttttggtgatgctgtaatgcttgccgcatatctcttggcctcctttactaccaagttatggcaattgtatgtcacccaaggttttatggtcggttgttcaatatcactgattttcgttccagcaacaaccgtcttaccaggatggttcttgaaaaaaagagctgtcgcaatgggtgtctcattattgggtaccggtgctggtggtgtcgtttacggtttggctacaaacaaaatgctttctgactttggaaatacccggtggtgccttcgtatcataggcatatcgtgtagcataagtgttctagttgctattgcgctcttaaaagaaagaaaccctacacctgccataggattgaaatcgcctcgggccatgtttgaacagctcaaagcaatgttttcattaaaggttataactaagccatttgtggtacttattgcattatggttcatgttcgcattatttgcctacaatatgatggtttttactttatcttcatacgcaatctcgaaaggattatcatcgcacgacgcttccacattgactgccattttgaacggctcgcaatccatcggaagacctctgatgggtttagcgggagataagtttggtagggcaaacgtaacgatcgtattaaccactttgttaacaatatatatgtttgcgttctggatccccgctcatacgtttgttcaactcatctttttttcaattctagttggctcatgcgttggtgtcgccaacgtcatgaataccgttctgattgccgatatggttaaaccagaagagtttttgcccgcttgggccttcgtcaactactgtggtgcgcctttcttattggtttgtgaggtgattgcccaggcattgacggtggagaaagataagagcaatccttacttacatgcacaaattttttgcggttgctgctttattgccgcactaattttaatttctatccttcgtgaatattctatcaggatgaaattaacggaaagacaagctatgacaaacgagaagttaaaagaatggaaggcaagcgaatacgataccgattctgccgatgaagattggggtaaattaaaagaaagaaagactaaatatgaccttcttttaggtccgggcattaaaaaatacttcctaagaatggtatatccaatgaaggtctag

SEQ ID NO: 9418 - DNA, 2022 bp, Artificial Sequence
  Description of Artificial Sequence: Synthetic polynucleotide
atgtctacgcactccaacgactacttttctgcttcttccggaatggtctctgagacatcttccgaggtttcttctataaactcttctcagcctgtatctttctctaaggcttctattgctgctccggttccatgctctgatttacacagcaccaagtctaacgatgcatctagaaaattgtctattagtaggacgttaactaatagactcaacgacattaaaaaggctgtcgatgacgacaacttgcagacggaagaaaattccgcagacgttaataaaatattagaatctagatttgacgtggccgatgccattaggttacagcacaatgagtctgtccagtccaagttaaacatcccagtcacacacaccacgactgcaggcgcctctttgagtgcaccatcttcctctgctttctctgcttcttctattcaaaatgatactacagaacataaagcttccatggactccaaactcatgaggaatagattatatccggcttccacgaaacactccggtaaggatcttgaggcccaaggaataaccgaattcgagcctgatgaaccgactgtaaaaaaagtattcaccaacaagtctaccgggcagttagaattgccccccgacggtggttatggctgggtcgtgacattctgtgtgttcttgaccatgttttccacgtggggctgcaacgcatccttcggtgtcgaccttgcctactacttaaaccatgatacttaccctggtgcttccaagtacgattatgccttaattgctggcttaactgtctttctcggtcaactcttatccccccttgtgatggcattaatgagaataattggtttgagaaccaccatgctttttggtgatgctgtaatgcttgccgcatatctcttggcctcctttactaccaagttatggcaattgtatgtcacccaaggttttatggtcggttgttctatatctttgattttcgttccagcaacaaccgtcttaccaggatggttcttgaaaaaaagagctgtcgcaatgggtgtctctttattgggtaccggtgctggtggtgtcgtttacggtttggctacaaacaaaatgctttctgactttggaaataccagatggtgccttcgtatcataggcatatcttgtagcataagtgttttggttgctattgcgctcttaaaagaaagaaaccctacacctgccataggattgaaatctcctagagccatgtttgaacagctcaaagcaatgttttctttaaaggttataactaagccatttgtggtacttattgcattatggttcatgttcgcattatttgcctacaatatgatggtttttactttatcttcctacgcaatctccaaaggattatcttctcacgacgcttccacattgactgccattttgaacggctctcaatccatcggaagacctttgatgggtttagcgggagataagtttggtagggcaaacgtaacgatcgtattaaccactttgttaacaatatatatgtttgcgttctggatccccgctcatacgtttgttcaactcatctttttttctattttggttggctcctgcgttggtgtcgccaacgtcatgaataccgttttgattgccgatatggttaaaccagaagagtttttgcccgcttgggccttcgtcaactactgtggtgcgcctttcttattggtttgtgaggtgattgcccaggcattgacggtggagaaagataagagcaatccttacttacatgcacaaattttttgcggttgctgctttattgccgcattgattttaatttctatccttcgtgaatattctatcaggatgaaattaacggaaagacaagctatgacaaacgagaagttaaaagaatggaaggcaagcgaatacgataccgattctgccgatgaagattggggtaaattaaaagaaagaaagactaaatatgaccttcttttaggtccgggcattaaaaaatacttcttaagaatggtatatccaatgaaggtctga

SEQ ID NO: 9419 - DNA, 1479 bp, Saccharomyces cerevisiae
atgagcgatgacttgttttctaaggctttggagaatcccgaccaggacttgaacgtggaattgcccaaggatgatgttgatttaggtcttttaggtgatggtgggaacgagaggaagaccgatgaaccggtagcagacgcagaaagatcaacaggcctaggatccggctcttctgaatccgaatcagattccggttctgattctgattctgattctggctcttcaggtagtgaggatgattctgcagatcaggacgttgaaggagaggacgaaggtggtgacgcgattgaaaatgaagacgaagacgaagacccttcaccttccggtcctatactatcgaagaacgaaatactagaggaaactgttcctgaactaccggaagattatgaaatttcagaaaaaacgatcatcactcctattggtgttttgaagtctgcatttgaaaataatataatcattcacgccacgatgtcgggcgaaaagcgtgttttaaaagagggttccattttctgtctcgaggatagaactttgatcgggatgttgacggaggtgtttggacccttgcaaaacccattttatagaattaagttgcccgattcaaaaaaaaacttattcgatgaattaaaagtgcgtttgggtgagaaagcctttatagtcacccctgatgcccactggatagatactttcgagttaaagcgcaacaaaggtactgatgcgtctaatgggtacgatgaagaattacctgaagaggaacaagaattttccgacgacgaaaaagaggcccttttcaagaaaatgaagaaacagcaacggcaacgaaagaaaagggacaaccgcaaactagccaacgatagtgacaatgtcaaggtaaagagagctcggcagcccaaggccaacagtttacctaaactggtaccgccgttgggcatgagcagtaatgctccgatgcaacatgggtacaaatcaagaaacgcacgtgaaaatatcaagcgtgaatccagtgctacctctaatcggaatggctcctccccagtgccaatcacacagcaccaccaacaacagttttctgcaaataattatcccttccctcaacaaccaaacggtatgccttatccaccatactcacctttccctcagccgactaacttccagtatccacctccaccatttgggcaggcgacaccggcccaattctccaacactgttccatatggtagcttacctcccgcatacaacaatatgtcgccgccaacacagcagtcgttcatgccaatgacccaaagtcaaccgccacttccatatggcgtacctcccatgaatcaaatgcaaaacccaatgtacatccaaccgccacctcaagcacctcctcagggaaatggtaatttccaacaagtaatggaattacatcaaatacttttgcagcaacagcaacagcaacaccagtatcagcatcagcatcagcaagatccaagaacctag

SEQ ID NO: 9420 - DNA, 1479 bp, Artificial Sequence
  Description of Artificial Sequence: Synthetic polynucleotide
atgagcgatgacttgttttctaaggctttggagaatcccgaccaggacttgaacgtggaattgcccaaggatgatgttgatttaggtcttttaggtgatggtgggaacgagaggaagaccgatgaaccggtagcagacgcagaaagatctacaggcttgggatccggctcttctgaatccgaaagtgattccggttctgattctgattctgattctggctcttctggtagtgaggatgattctgcagatcaggacgttgaaggagaggacgaaggtggtgacgcgattgaaaatgaagacgaagacgaagacccttctccttccggtcctatattatccaagaacgaaatattggaggaaactgttcctgaattaccggaagattatgaaatttctgaaaaaacgatcatcactcctattggtgttttgaagtctgcatttgaaaataatataatcattcacgccacgatgagtggcgaaaagcgtgttttaaaagagggttccattttctgtctcgaggatagaactttgatcgggatgttgacggaggtgtttggacccttgcaaaacccattttatagaattaagttgcccgattctaaaaaaaacttattcgatgaattaaaagtgcgtttgggtgagaaagcctttatagtcacccctgatgcccactggatagatactttcgagttaaagcgcaacaaaggtactgatgcgtctaatgggtacgatgaagaattacctgaagaggaacaagaattttccgacgacgaaaaagaggcccttttcaagaaaatgaagaaacagcaaagacaaagaaagaaaagggacaaccgcaaattggccaacgatagtgacaatgtcaaggtaaagagagctagacagcccaaggccaacagtttacctaaattagtaccgccgttgggcatgagcagtaatgctccgatgcaacatgggtacaaatctagaaacgcacgtgaaaatatcaagcgtgaatccagtgctacctctaatagaaatggctcctccccagtgccaatcacacagcaccaccaacaacagttttctgcaaataattatcccttccctcaacaaccaaacggtatgccttatccaccatactctcctttccctcagccgactaacttccagtatccacctccaccatttgggcaggcgacaccggcccaattctccaacactgttccatatggtagcttacctcccgcatacaacaatatgtctccgccaacacagcagtctttcatgccaatgacccaaagtcaaccgccacttccatatggcgtacctcccatgaatcaaatgcaaaacccaatgtacatccaaccgccacctcaagcacctcctcagggaaatggtaatttccaacaagtaatggaattacatcaaatacttttgcagcaacagcaacagcaacaccagtatcagcatcagcatcagcaagatccaagaacctga

SEQ ID NO: 9421 - DNA, 2994 bp, Saccharomyces cerevisiae
atgaccatatcgttgagcaatataaagaaaagagaccattctaaaatttccgatggaacttctggtgaatcatcgcttgtaaaaaggaaacagttggaaagcgccaccggagatcaagaggaagaatatacagaccatgaaatcattatagagccgttgcactttgctaataataataacactgtactcacagattcagaaaattatctaagatggcaaaataccatctccaacgttgttaaatcagtggtttccattcatttttcacaagttgcgccattcgattgcgattctgctttggtatctgaagctaccggatttgtcgtggatgctaaattaggtataattctgaccaataggcacgtcgttggtcctggtccgttcgtaggctacgtagttttcgataatcatgaagaatgcgatgttataccaatttacagagatcctgttcatgattttgggttcctcaaattcgatccgaaaaacataaaatattctaagatcaaagcgttaacgctaaaaccaagtttggctaaggtcggctcagaaattagagttgtcggtaatgatgccggtgagaaattaagtatcctagcaggttttattagtagaattgacaggaacgctccagaatatggtgagctgacatacaatgacttcaatacagaatatattcaagctgctgcatctgcttctggcggttcaagtggttctccagtcgtaaatatagatgggtatgctgtggctttacaggcaggtggctctacagaggcatctactgatttttttttaccgttagatagaattcttagagcgttaatttgcatccaaaccaacaaacctatcacacgtggtacgattcaagttcaatggctgctgaagccttatgacgagtgtagaagattaggtttaacttcagagagagaaagtgaggctcgtgctaaatttcccgaaaatatcggactgttggtagcagaaaccgttttaagagaaggcccaggctatgataaaattaaagaaggtgatactctaatttcaataaacggtgaaaccatatcttctttcatgcaagtggataaaattcaagatgaaaatgttgggaaggaaatccaattggttattcaaaggggcggtgtcgaatgtactgtcacctgcactgttggtgatttacatgctatcacccctcatcgttatgtagaggtttgtggtgcgacttttcatgaattatcatatcaaatggcaaggttttatgcgctacctgtcaggggtgtatttttaagtagtgcatcagggtctttcaactttgattcaaaagaaagagtgggttggattgtggattctatagacaataaggaaacccccgacttagatacatttattgaaattatgaaaactattccagatcgtaagcgcgttactgtacgataccaccatctaacagatcagcattctccacttgttacttctatttacattgaccgtcattggtgcaatgaattcagagtttacacaaggaacgatacaactggtatttgggattacaaaaatgttgctgatccacttccagccgatgcgttgaaacctcgttcggccaaaattattcctattcctgttaataatgaaaaagttgcaaaattgtcatcatcgttatgtacagtggctacaatggcagcagttccattggattcactttctgctgatattttaaaaacatcaggcttaatcattgatgctgaaaaaggttatgtcctagtgtccagaagggtagttccacatgattgtcttgatacttttgtcaccattgcagattcccttgtagttccagccacagtagaatttctccatccaactcacaacttcgctattgttaaatatgatccagagttagtaaaggctccactaatcactcccaagctatctaccaccagaatgaaacgtggtgataagcttcagtttataggttttacccagaatgatagaattgttacttcagagaccactgtcaccgatatttcctctgtaagtattccaagtaatttaattccgaggtaccgtgccactaatttagaagctatatctatcgactgcaacgttagcaccagatgtaattccggtattttgacagataatgatggtacagtaagaggtttatggcttccatttttaggcgaaagattagaaaataaagaaaaggtttatttgatgggattagatataatggactgtagggaagttatagatatcttaaaaaatggcggtaaaccaagagtaagtatagttgatgctgggttcggttcaatttccgttctgcaagccagaattagaggtgtgcccgaagaatggatcatgcgtatggaacatgaatcaaataacaggctacagtttatcactgtttctagagtttcttatacagaagacaagattcatttagagaccggtgacgtcattttatctgtgaacggaaaattagtcactgaaatgaatgatttgaatggagttgtaagctcagctgatggtattttgccatcagccatgttagattttaaagttgttcgtgatggtaatattgttgatttgaaaattaaaaccgtggaagttcaggaaaccgaccgttttgtaatatttgcaggtagtatcttacaaaagccgcatcatgctgttttgcaagctatggttgatgttccaaagggtgtctactgtacattcaggggagaatcgtcaccggcgctccagtacggtatatctgccacaaacttcataactcatgtcaatgaaattgaaacacctgatctagatacatttttgaaagttgtcaaaacaatccctgataatagttattgtaaaatgaggttaatgactttcgacaatgtgcccttcgctatttcactgaaaacgaattatcattacttccctactgcagaattgaagagggacaacatcacgcacaaatggattgaaaaggaatttaccggcaacagccaaagtgaaaaatag

SEQ ID NO: 9422 - DNA, 2994 bp, Artificial Sequence
  Description of Artificial Sequence: Synthetic polynucleotide
atgaccatatctttgagcaatataaagaaaagagaccattctaaaatttccgatggaacttctggtgaaagttctcttgtaaaaaggaaacagttggaaagcgccaccggagatcaagaggaagaatatacagaccatgaaatcattatagagccgttgcactttgctaataataataacactgtactcacagattctgaaaattatttaagatggcaaaataccatctccaacgttgttaaatctgtggtttccattcatttttctcaagttgcgccattcgattgcgattctgctttggtatctgaagctaccggatttgtcgtggatgctaaattaggtataattttgaccaataggcacgtcgttggtcctggtccgttcgtaggctacgtagttttcgataatcatgaagaatgcgatgttataccaatttacagagatcctgttcatgattttgggttcctcaaattcgatccgaaaaacataaaatattctaagatcaaagcgttaacgttgaaaccaagtttggctaaggtcggctctgaaattagagttgtcggtaatgatgccggtgagaaattaagtatcttggcaggttttattagtagaattgacaggaacgctccagaatatggtgagttgacatacaatgacttcaatacagaatatattcaagctgctgcatctgcttctggcggtagtagtggttctccagtcgtaaatatagatgggtatgctgtggctttacaggcaggtggctctacagaggcatctactgatttttttttaccgttagatagaattcttagagcgttaatttgcatccaaaccaacaaacctatcacacgtggtacgattcaagttcaatggttgttgaagccttatgacgagtgtagaagattaggtttaacttccgagagagaaagtgaggctcgtgctaaatttcccgaaaatatcggattattggtagcagaaaccgttttaagagaaggcccaggctatgataaaattaaagaaggtgatactttgatttctataaacggtgaaaccatatcttctttcatgcaagtggataaaattcaagatgaaaatgttgggaaggaaatccaattggttattcaaaggggcggtgtcgaatgtactgtcacctgcactgttggtgatttacatgctatcacccctcatcgttatgtagaggtttgtggtgcgacttttcatgaattatcttatcaaatggcaaggttttatgcgttacctgtcaggggtgtatttttaagtagtgcatctgggtctttcaactttgattctaaagaaagagtgggttggattgtggattctatagacaataaggaaacccccgacttagatacatttattgaaattatgaaaactattccagatcgtaagcgcgttactgtacgttaccaccatttaacagatcagcattctccacttgttacttctatttacattgaccgtcattggtgcaatgaattcagagtttacacaaggaacgatacaactggtatttgggattacaaaaatgttgctgatccacttccagccgatgcgttgaaacctcgttctgccaaaattattcctattcctgttaataatgaaaaagttgcaaaattgagttcttctttatgtacagtggctacaatggcagcagttccattggattctctttctgctgatattttaaaaacaagtggcttaatcattgatgctgaaaaaggttatgtcttggtgtccagaagggtagttccacatgattgtcttgatacttttgtcaccattgcagattcccttgtagttccagccacagtagaatttctccatccaactcacaacttcgctattgttaaatatgatccagagttagtaaaggctccattgatcactcccaagttatctaccaccagaatgaaacgtggtgataagcttcagtttataggttttacccagaatgatagaattgttacttccgagaccactgtcaccgatatttcctctgtaagtattccaagtaatttaattccgaggtaccgtgccactaatttagaagctatatctatcgactgcaacgttagcaccagatgtaattccggtattttgacagataatgatggtacagtaagaggtttatggcttccatttttaggcgaaagattagaaaataaagaaaaggtttatttgatgggattagatataatggactgtagggaagttatagatatcttaaaaaatggcggtaaaccaagagtaagtatagttgatgctgggttcggttccatttccgttttgcaagccagaattagaggtgtgcccgaagaatggatcatgcgtatggaacatgaaagtaataacaggttacagtttatcactgtttctagagtttcttatacagaagacaagattcatttagagaccggtgacgtcattttatctgtgaacggaaaattagtcactgaaatgaatgatttgaatggagttgtaagcagtgctgatggtattttgccatctgccatgttagattttaaagttgttcgtgatggtaatattgttgatttgaaaattaaaaccgtggaagttcaggaaaccgaccgttttgtaatatttgcaggtagtatcttacaaaagccgcatcatgctgttttgcaagctatggttgatgttccaaagggtgtctactgtacattcaggggagaatcttctccggcgctccagtacggtatatctgccacaaacttcataactcatgtcaatgaaattgaaacacctgatttggatacatttttgaaagttgtcaaaacaatccctgataatagttattgtaaaatgaggttaatgactttcgacaatgtgcccttcgctatttctttgaaaacgaattatcattacttccctactgcagaattgaagagggacaacatcacgcacaaatggattgaaaaggaatttaccggcaacagccaaagtgaaaaatga

SEQ ID NO: 9423 - DNA, 348 bp, Saccharomyces cerevisiae
atgaaaattagcttgcataacaaacggcaacgaggagaccaaaaccaaaacatgtctgttttcaatgtactcaaaccactacttaaaggttcaaatagtttcaaagtgaagctcaacggctttctattcaataacgtttctacaataacaataagaactttaatgaaaactcataaaggtacagcaaagaggtggaggcgtaccggtaatacttttaaaagaggcatagctggaagaaaacatggcaatataggctggtcccatagatcattaaaagccttaaccggaaggaaaattgcccatccagcttattcaaagcatctaaagcggttattaccctatcattga

SEQ ID NO: 9424 - DNA, 348 bp, Artificial Sequence
  Description of Artificial Sequence: Synthetic polynucleotide
atgaaaattagcttgcataacaaaagacaaagaggagaccaaaaccaaaacatgtctgttttcaatgtactcaaaccattacttaaaggtagtaatagtttcaaagtgaagctcaacggctttcttttcaataacgtttctacaataacaataagaactttaatgaaaactcataaaggtacagcaaagaggtggaggcgtaccggtaatacttttaaaagaggcatagctggaagaaaacatggcaatataggctggtcccatagatctttaaaagccttaaccggaaggaaaattgcccatccagcttattccaagcatttgaagagattattaccctatcattga

SEQ ID NO: 9425 - DNA, 1854 bp, Saccharomyces cerevisiae
atgaagagcttcattacaaggaacaagacagccattttggcaaccgttgctgctacaggtactgccatcggtgcctactattattacaaccaattgcaacaacaacaacaacgaggaaaaaagaacacgatcaacaaagatgaaaaaaaggacacaaaggactctcaaaaggagactgaaggtgctaagaaatctacagccccatcaaatcctcctatctacccggtttctagtaatggcgaaccagatttttccaataaggcaaatttcaccgctgaagaaaaggataaatatgcattagcgttaaaggacaaaggtaaccagttctttagaaataaaaaatatgacgatgctattaagtactataattgggcattagaattgaaagaagacccagttttctactcgaatttatcggcttgctatgtttctgtgggtgacttgaaaaaagttgttgaaatgagtactaaggctcttgaattaaaaccagactactcaaaagttttactgagaagagcttctgctaacgaagggctaggaaaatttgcggatgcgatgttcgatttgtctgtattgtctctaaatggtgacttcaatgacgcctctattgaaccaatgttggagaggaacttgaataagcaagctatgtctaaattgaaagaaaagtttggcgatattgacaccgctactgctactccaactgaattatccacccaaccagctaaagaacgcaaagacaagcaggaaaacttgccttcagttacatccatggcctctttctttggtattttcaaacccgagttgacttttgccaattatgatgaatccaatgaagctgataaagagttaatgaacggtttaagtaatttgtacaaaagatctcccgaaagttacgacaaggctgatgagtctttcacgaaagctgcaaggttatttgaagaacaattggacaagaacaatgaggatgaaaagttaaaggaaaaattggccatctcattagaacacacaggtattttcaagttcttgaaaaacgatccattgggagctcacgaagacatcaagaaagctattgaattgttcccaagagtcaattcatatatctacatggcattaatcatggctgatagaaatgactcgactgaatattataactacttcgataaagcgctgaaactggactcaaacaattcttctgtttactatcaccgcggccaaatgaatttcattttacaaaactatgatcaagcaggaaaagattttgataaagctaaggaattagacccagagaatatcttcccttatattcaattagcatgtctagcgtaccgtgaaaacaagtttgatgactgtgaaactttgtttagtgaagctaagagaaaatttccagaggcaccagaagttccaaatttctttgctgaaattttaacagacaagaacgattttgacaaggctttgaagcagtacgatttggctattgaattagaaaacaagttggatggtatttatgttggaattgcgcctttggtcggtaaagccactttgttgacaagaaatccaacagtagaaaattttattgaagccacgaatttattagaaaaagcgtccaaactagacccaagaagtgagcaagctaaaatcggtttagctcaaatgaaattgcagcaggaagatatcgatgaagctattacattattcgaagaatccgctgatttggctagaactatggaagagaaattacaagccattacttttgctgaagccgctaaagttcaacaaagaattaggtctgatccagtattggctaaaaagattcaagaaactttagctaaattacgcgaacagggtttaatgtaa

SEQ ID NO: 9426 - DNA, 1854 bp, Artificial Sequence
  Description of Artificial Sequence: Synthetic polynucleotide
atgaagagcttcattacaaggaacaagacagccattttggcaaccgttgctgctacaggtactgccatcggtgcctactattattacaaccaattgcaacaacaacaacaaagaggaaaaaagaacacgatcaacaaagatgaaaaaaaggacacaaaggactctcaaaaggagactgaaggtgctaagaaatctacagccccatccaatcctcctatctacccggtttctagtaatggcgaaccagatttttccaataaggcaaatttcaccgctgaagaaaaggataaatatgcattagcgttaaaggacaaaggtaaccagttctttagaaataaaaaatatgacgatgctattaagtactataattgggcattagaattgaaagaagacccagttttctactctaatttatctgcttgctatgtttctgtgggtgacttgaaaaaagttgttgaaatgagtactaaggctcttgaattaaaaccagactactctaaagttttattaagaagagcttctgctaacgaagggttgggaaaatttgcggatgcgatgttcgatttgtctgtattgtctttgaatggtgacttcaatgacgcctctattgaaccaatgttggagaggaacttgaataagcaagctatgtctaaattgaaagaaaagtttggcgatattgacaccgctactgctactccaactgaattatccacccaaccagctaaagaacgcaaagacaagcaggaaaacttgccttctgttacatccatggcctctttctttggtattttcaaacccgagttgacttttgccaattatgatgaatccaatgaagctgataaagagttaatgaacggtttaagtaatttgtacaaaagatctcccgaaagttacgacaaggctgatgagtctttcacgaaagctgcaaggttatttgaagaacaattggacaagaacaatgaggatgaaaagttaaaggaaaaattggccatctctttagaacacacaggtattttcaagttcttgaaaaacgatccattgggagctcacgaagacatcaagaaagctattgaattgttcccaagagtcaattcttatatctacatggcattaatcatggctgatagaaatgactctactgaatattataactacttcgataaagcgttgaaattagactccaacaattcttctgtttactatcaccgcggccaaatgaatttcattttacaaaactatgatcaagcaggaaaagattttgataaagctaaggaattagacccagagaatatcttcccttatattcaattagcatgtttggcgtaccgtgaaaacaagtttgatgactgtgaaactttgtttagtgaagctaagagaaaatttccagaggcaccagaagttccaaatttctttgctgaaattttaacagacaagaacgattttgacaaggctttgaagcagtacgatttggctattgaattagaaaacaagttggatggtatttatgttggaattgcgcctttggtcggtaaagccactttgttgacaagaaatccaacagtagaaaattttattgaagccacgaatttattagaaaaagcgtccaaattagacccaagaagtgagcaagctaaaatcggtttagctcaaatgaaattgcagcaggaagatatcgatgaagctattacattattcgaagaatccgctgatttggctagaactatggaagagaaattacaagccattacttttgctgaagccgctaaagttcaacaaagaattaggtctgatccagtattggctaaaaagattcaagaaactttagctaaattacgcgaacagggtttaatgtga

SEQ ID NO: 9427 - DNA, 1482 bp, Saccharomyces cerevisiae
atggagtgccagaggtgccctgcatctgccagaaatccagcgacagttgagtctagaaaggaaaagttttgcgatgaatgtttcatcaagtttgttagtactaaacaaaggaaacaaatgatgaaggatgaatatttcaggaacctatttaaagttatatacccatttgaaaaagaaggatccgtctctaagattctgctccccttatcacattctgattcaggatctctggttatgttagatattgtgcacgacttgctattggaacaaactaagcaacacaataatcgtacaggctttaccgtcgatgtactcacggtattcaccgaggaaaatgtttctgttatcaaagaacgtatggaatccttgattaatgaaaaaatgtcacaactgaataaaatatccaacatatttaatgtccattttattgatgttaacgaatttttcaacaatgcatcggaagtatcgacttttatcattgacaatgaaaattttgagattttcagcaagtcaaagtcagtagatgatagcaatatattaacattaaaagaaatattaggcaaatactgtctcaataattcatccaggtctgatttaatatcgattataaaaactcaattgatcaagcattttgcatacgaaaatggttataatgccataatgtggggacattccatgacaaagctatctgaagtaattatttctcttgtggtaaaaggtaaaggttctcaaatagcgacgtttctagactcggaatcatttgatactttgaataataaaccatgtaagtataaaaacctatatcctatgaaagatctattatccgtcgagattgaaagttttttacaaatcagaaatctggcacagttcctcattaacgttgaagaaactaatgtgaagcctaattgcttgatcgccagaaaatcactgccgtcacttggtcaacaaaaattggtaaaaaatatgacaatcaacgaaattaccaacaaatactttcaggatattcagaacgattattcaaatataatatcgacagttttaagaaccgcagataaattgacgcaacctaaatcaagtatggctaagccgtcacaatgtcaaatatgtcaatctaaaatatacacaaatccatccaattggttaaataggatcacagttacttcgccttatcctgtggagaccactgaagaaaagtatttatttaaacagtggcaagattcaaaattagggcaatctcacacacattatgttgaattgttgaatgaaatcaaacagggtgccagtaatagcctcgatgttgaagacggtgatgtcaaattgtgttatggttgtttaatcttattgaataccagtatcaaggataagaatttggtttggccaaaagtcgataccatggatattacggcaaatgcgaccaataaaaacaaagaattgagccaaatattggatcagttcgagattaattccgatggggaggaataa

SEQ ID NO: 9428 - DNA, 1482 bp, Artificial Sequence
  Description of Artificial Sequence: Synthetic polynucleotide
atggagtgccagaggtgccctgcatctgccagaaatccagcgacagttgagtctagaaaggaaaagttttgcgatgaatgtttcatcaagtttgttagtactaaacaaaggaaacaaatgatgaaggatgaatatttcaggaacttgtttaaagttatatacccatttgaaaaagaaggatccgtctctaagattttactccccttatctcattctgattctggatctttggttatgttagatattgtgcacgacttgttgttggaacaaactaagcaacacaataatcgtacaggctttaccgtcgatgtactcacggtattcaccgaggaaaatgtttctgttatcaaagaacgtatggaatccttgattaatgaaaaaatgtctcaattgaataaaatatccaacatatttaatgtccattttattgatgttaacgaatttttcaacaatgcatctgaagtatccacttttatcattgacaatgaaaattttgagattttcagcaagtccaagagtgtagatgatagcaatatattaacattaaaagaaatattaggcaaatactgtctcaataattcttccaggtctgatttaatatctattataaaaactcaattgatcaagcattttgcatacgaaaatggttataatgccataatgtggggacattccatgacaaagttatctgaagtaattatttctcttgtggtaaaaggtaaaggttctcaaatagcgacgtttttggactctgaaagttttgatactttgaataataaaccatgtaagtataaaaacttatatcctatgaaagatttattatccgtcgagattgaaagttttttacaaatcagaaatttggcacagttcctcattaacgttgaagaaactaatgtgaagcctaattgcttgatcgccagaaaatctttaccgagtcttggtcaacaaaaattggtaaaaaatatgacaatcaacgaaattaccaacaaatactttcaggatattcagaacgattattctaatataatatctacagttttaagaaccgcagataaattgacgcaacctaaatctagtatggctaagccgtctcaatgtcaaatatgtcaatctaaaatatacacaaatccatccaattggttaaataggatcacagttacttctccttatcctgtggagaccactgaagaaaagtatttatttaaacagtggcaagattctaaattagggcaatctcacacacattatgttgaattgttgaatgaaatcaaacagggtgccagtaatagcctcgatgttgaagacggtgatgtcaaattgtgttatggttgtttaatcttattgaataccagtatcaaggataagaatttggtttggccaaaagtcgataccatggatattacggcaaatgcgaccaataaaaacaaagaattgagccaaatattggatcagttcgagattaattccgatggggaggaatga

SEQ ID NO: 9429 - DNA, 2913 bp, Saccharomyces cerevisiae
atgtcactgccgctacgacacgcattggagaacgttacttctgttgatagaattttagaggacttattagtacgttttattataaattgtccgaatgaagatttatcgagtgtcgagagagagttatttcattttgaagaagcctcatggttttacacggatttcatcaaattgatgaatccaactttaccctccctaaagattaaatcatttgctcaattgatcataaaactatgtcctctggtttggaaatgggacataagagtggatgaggcactccagcaattctccaagtataagaaaagtataccggtgaggggcgctgccatatttaacgagaacctgagtaaaattttattggtacagggtactgaatcggattcttggtcattcccaagggggaagatatctaaagatgaaaatgacatagattgttgcattagagaagtgaaagaagaaattggtttcgatttgacggactatattgacgacaaccaattcattgaaagaaatattcaaggtaaaaattacaaaatatttttgatatctggtgtttcagaagtcttcaattttaaacctcaagttagaaatgaaattgataagatagaatggttcgattttaagaaaatttctaaaacaatgtacaaatcaaatatcaagtattatctgattaattccatgatgagacccttatcaatgtggttaaggcatcagaggcaaataaaaaatgaagatcaattgaaatcctatgcggaagaacaattgaaattgttgttgggtatcactaaggaggagcagattgatcccggtagagagttgctgaatatgttacatactgcagtgcaagctaacagtaataataatgcggtctccaacggacaggtaccctcgagccaagagcttcagcatttgaaagagcaatcaggagaacacaaccaacagaaggatcagcagtcatcgttttcttctcaacaacaaccttcaatatttccatctctttctgaaccgtttgctaacaataagaatgttataccacctactatgccaatggctaacgtattcatgtcaaatcctcaattgtttgcgacaatgaatggccagccttttgcacctttcccatttatgttaccattaactaacaatagtaatagcgctaaccctattccaactccggtcccccctaattttaatgctcctccgaatccgatggcttttggtgttccaaacatgcataacctttctggaccagcagtatctcaaccgttttccttgcctcctgctcctttaccgagggactctggttacagcagctcctcccctgggcagttgttagatatactaaattcgaaaaagcctgacagcaacgtgcaatcaagcaaaaagccaaagcttaaaatcttacagagaggaacggacttgaattcaatcaagcaaaacaataatgatgaaactgctcattcaaactctcaagctttgctagatttgttgaaaaaaccaacatcatcgcagaagatacacgcttccaaaccagatacttcctttttaccaaatgactccgtatctggtatacaagatgcagaatatgaagatttcgagagtagttcagatgaagaggtggagacagctagagatgaaagaaattcattgaatgtagatattggggtgaacgttatgccaagcgaaaaagacagccgaagaagtcaaaaggaaaaaccaaggaacgacgcaagcaaaacaaacttgaacgcttctgcagaatctaatagtgtagaatgggggcctggtaaatcttcaccctcgactcagagtaaacagaattcatcagtaggaatgcagaataaatatcgtcaagaaattcacattggtgatagtgatgcatatgaagtcttcgaaagcagttctgacgaagaagatggaaaaaaattggaagaactggaacaaactcaagacaactccaaattaattagccaagatattttaaaagagaacaatttccaagacggtgaagtgcctcatagagatatgcccactgaaagtaataaatctataaacgaaactgtcgggttatcatcaacaacaaatactgtaaaaaaggtacccaaagttaaaatactaaaacgaggtgaaacctttgccagtctggcgaatgataaaaaagcttttgattcaagctccaatgtgtcttcatcaaaagatttattacagatgctaagaaacccaatttcctctactgtatcttcaaatcagcaatcaccaaaatctcaacatctaagtggggatgaagaaatcatgatgatgttgaagaggaattctgtgtcaaaacctcaaaatagcgaagaaaatgcatcaacttcaagtataaacgatgcgaatgcaagcgaacttttgggaatgttaaaacaaaaggaaaaagacattacagcaccaaaacagccctataatgttgactcatactcgcagaaaaattcagctaaaggattgttgaatattttgaaaaagaacgactctaccgggtaccctcgcactgagggtggaccgtcaagtgaaatgtcaacgtcaatgaaacgcaacgacgctacaaataatcaagaattagataagaattcaacagagttattaaactacttaaagcccaagcctcttaatgatgggtatgagaatatttcaaataaggacagttctcatgaattactgaatatattgcatggtaataaaaacagcagcgccttcaataataatgtatatgcaactgacggatattccttggcatctgataacaacgaaaattcctcaaataaactactaaatatgctgcaaaacaggtctagtgcaataaatgagcccaacttcgacgtccgttcgaatggaacttcagggtctaatgaattattaagcattttgcataggaagtga

SEQ ID NO: 9430 - DNA, 2913 bp, Artificial Sequence
  Description of Artificial Sequence: Synthetic polynucleotide
atgtctttaccgcttcgccacgcattggagaacgttacttctgttgatagaattttagaggacttattagtacgttttattataaattgtccgaatgaagatttatccagtgtcgagagagagttatttcattttgaagaagccagttggttttacacggatttcatcaaattgatgaatccaactttaccctccttgaagattaaaagttttgctcaattgatcataaaattatgtcctttggtttggaaatgggacataagagtggatgaggcactccagcaattctccaagtataagaaaagtataccggtgaggggcgctgccatatttaacgagaacttgagtaaaattttattggtacagggtactgaaagtgattcttggagtttcccaagggggaagatatctaaagatgaaaatgacatagattgttgcattagagaagtgaaagaagaaattggtttcgatttgacggactatattgacgacaaccaattcattgaaagaaatattcaaggtaaaaattacaaaatatttttgatatctggtgtttctgaagtcttcaattttaaacctcaagttagaaatgaaattgataagatagaatggttcgattttaagaaaatttctaaaacaatgtacaaatctaatatcaagtattatttgattaattccatgatgagacccttatctatgtggttaaggcatcagaggcaaataaaaaatgaagatcaattgaaatcctatgcggaagaacaattgaaattgttgttgggtatcactaaggaggagcagattgatcccggtagagagttgttgaatatgttacatactgcagtgcaagctaacagtaataataatgcggtctccaacggacaggtaccctctagccaagagcttcagcatttgaaagagcaaagtggagaacacaaccaacagaaggatcagcagtcttctttttcttctcaacaacaaccttccatatttccatctctttctgaaccgtttgctaacaataagaatgttataccacctactatgccaatggctaacgtattcatgagtaatcctcaattgtttgcgacaatgaatggccagccttttgcacctttcccatttatgttaccattaactaacaatagtaatagcgctaaccctattccaactccggtcccccctaattttaatgctcctccgaatccgatggcttttggtgttccaaacatgcataacctttctggaccagcagtatctcaaccgttttccttgcctcctgctcctttaccgagggactctggttacagcagctcctcccctgggcagttgttagatatattgaattctaaaaagcctgacagcaacgtgcaaagcagcaaaaagccaaagcttaaaatcttacagagaggaacggacttgaattccatcaagcaaaacaataatgatgaaactgctcattccaactctcaagctttgttggatttgttgaaaaaaccaacatcttctcagaagatacacgcttccaaaccagatacttcctttttaccaaatgactccgtatctggtatacaagatgcagaatatgaagatttcgagagtagttctgatgaagaggtggagacagctagagatgaaagaaattctttgaatgtagatattggggtgaacgttatgccaagcgaaaaagacagcagaagaagtcaaaaggaaaaaccaaggaacgacgcaagcaaaacaaacttgaacgcttctgcagaatctaatagtgtagaatgggggcctggtaaatcttctccctccactcagagtaaacagaattcttctgtaggaatgcagaataaatatcgtcaagaaattcacattggtgatagtgatgcatatgaagtcttcgaaagcagttctgacgaagaagatggaaaaaaattggaagaattggaacaaactcaagacaactccaaattaattagccaagatattttaaaagagaacaatttccaagacggtgaagtgcctcatagagatatgcccactgaaagtaataaatctataaacgaaactgtcgggttatcttctacaacaaatactgtaaaaaaggtacccaaagttaaaatattgaaaagaggtgaaacctttgccagtttggcgaatgataaaaaagcttttgattctagctccaatgtgtcttcttctaaagatttattacagatgttgagaaacccaatttcctctactgtatcttccaatcagcaatctccaaaatctcaacatttgagtggggatgaagaaatcatgatgatgttgaagaggaattctgtgtctaaacctcaaaatagcgaagaaaatgcatctacttctagtataaacgatgcgaatgcaagcgaacttttgggaatgttaaaacaaaaggaaaaagacattacagcaccaaaacagccctataatgttgactcttactctcagaaaaattctgctaaaggattgttgaatattttgaaaaagaacgactctaccgggtaccctcgcactgagggtggaccgtccagtgaaatgtctacgtctatgaaacgcaacgacgctacaaataatcaagaattagataagaattctacagagttattaaactacttaaagcccaagcctcttaatgatgggtatgagaatatttctaataaggacagttctcatgaattattgaatatattgcatggtaataaaaacagcagcgccttcaataataatgtatatgcaactgacggatattccttggcatctgataacaacgaaaattcctctaataaattattgaatatgttacaaaacaggtctagtgcaataaatgagcccaacttcgacgtccgttccaatggaacttctgggtctaatgaattattaagcattttgcataggaagtga

SEQ ID NO: 9431 - DNA, 1665 bp, Saccharomyces cerevisiae
atggttaaggtcagtttggataacgtcaaattactggtggatgttgataaggagcctttctttaaaccatctagtactacagtgggagatattcttaccaaggatgctctagagttcattgttcttttacacagaactttcaacaacaagagaaaacaattattggaaaacagacaagttgttcagaagaaattagactcgggctcctatcatctggatttcctgcctgaaactgcaaatattagaaatgatcccacttggcaaggtccaattttggcaccggggttaattaataggtcaacggaaatcacagggcctccattgagaaatatgctgatcaacgctttgaatgctcctgtgaacacctatatgactgattttgaagattcagcttcacctacttggaacaacatggtttacggtcaagttaatctctacgacgcgatcagaaatcaaatcgattttgacacaccaagaaaatcgtacaaattgaatggaaatgtggccaacttgcccactattatcgtgagaccccgtggttggcacatggtggaaaagcacctttatgtagatgatgaaccaatcagcgcttccatctttgattttggtttatatttctaccataatgccaaagaattaatcaaattgggcaaaggtccttacttctatttgccaaagatggagcaccacttggaagctaaactatggaacgacgtcttctgtgtagctcaagattacattgggatcccaaggggtacaatcagagctactgtgttgattgaaactttgcctgctgctttccaaatggaagagatcatctatcaattaagacaacattctagtgggttgaattgcggacgttgggactatattttctctacaatcaagagattaagaaatgatcctaatcacattttgcccaatagaaatcaagtgactatgacttccccattcatggatgcatacgtgaaaagattaatcaatacctgtcatcggaggggtgttcatgccatgggtggtatggctgcgcaaatccctatcaaagacgacccggcagccaatgaaaaggccatgactaaagtccgtaatgataagattagagagctgacaaatggacatgatgggtcatgggttgcacacccagcactggcccctatttgtaatgaagttttcattaatatgggaacaccaaaccaaatctatttcattcctgaaaacgttgtaacggctgctaatctgctggaaaccaaaattccaaatggtgagattactaccgagggaattgtacaaaacttggatatcgggttgcagtacatggaagcttggctcagaggctctggatgtgtgcccatcaacaacttgatggaagacgccgccactgctgaagtgtctcgttgtcaattgtatcaatgggtgaaacacggtgttactctaaaggacacgggagaaaaggtcaccccagaattaaccgaaaagattctaaaagaacaagtggaaagactgtctaaggcaagtccattgggtgacaagaacaaattcgcgctggccgctaagtatttcttgccagaaatcagaggcgagaaattcagtgaatttttgactacattgttgtacgacgaaattgtgtccactaaggcgacgcccactgatttgagcaaattgtga

SEQ ID NO: 9432 - DNA, 1665 bp, Artificial Sequence
  Description of Artificial Sequence: Synthetic polynucleotide
atggttaaggtcagtttggataacgtcaaattattggtggatgttgataaggagcctttctttaaaccatctagtactacagtgggagatattcttaccaaggatgctttggagttcattgttcttttacacagaactttcaacaacaagagaaaacaattattggaaaacagacaagttgttcagaagaaattagacagtggctcctatcatttggatttcttacctgaaactgcaaatattagaaatgatcccacttggcaaggtccaattttggcaccggggttaattaataggtctacggaaatcacagggcctccattgagaaatatgttgatcaacgctttgaatgctcctgtgaacacctatatgactgattttgaagattctgcttcccctacttggaacaacatggtttacggtcaagttaatctctacgacgcgatcagaaatcaaatcgattttgacacaccaagaaaatcttacaaattgaatggaaatgtggccaacttgcccactattatcgtgagaccccgtggttggcacatggtggaaaagcacctttatgtagatgatgaaccaatcagcgcttccatctttgattttggtttatatttctaccataatgccaaagaattaatcaaattgggcaaaggtccttacttctatttgccaaagatggagcaccacttggaagctaaattatggaacgacgtcttctgtgtagctcaagattacattgggatcccaaggggtacaatcagagctactgtgttgattgaaactttgcctgctgctttccaaatggaagagatcatctatcaattaagacaacattctagtgggttgaattgcggacgttgggactatattttctctacaatcaagagattaagaaatgatcctaatcacattttgcccaatagaaatcaagtgactatgacttccccattcatggatgcatacgtgaaaagattaatcaatacctgtcatagaaggggtgttcatgccatgggtggtatggctgcgcaaatccctatcaaagacgacccggcagccaatgaaaaggccatgactaaagtccgtaatgataagattagagagttgacaaatggacatgatgggtcctgggttgcacacccagcattggcccctatttgtaatgaagttttcattaatatgggaacaccaaaccaaatctatttcattcctgaaaacgttgtaacggctgctaatttattggaaaccaaaattccaaatggtgagattactaccgagggaattgtacaaaacttggatatcgggttgcagtacatggaagcttggctcagaggctctggatgtgtgcccatcaacaacttgatggaagacgccgccactgctgaagtgtctcgttgtcaattgtatcaatgggtgaaacacggtgttactttgaaggacacgggagaaaaggtcaccccagaattaaccgaaaagattttgaaagaacaagtggaaagattatctaaggcaagtccattgggtgacaagaacaaattcgcgttggccgctaagtatttcttgccagaaatcagaggcgagaaattcagtgaatttttgactacattgttgtacgacgaaattgtgtccactaaggcgacgcccactgatttgagcaaattgtga

SEQ ID NO: 9433 - DNA, 1569 bp, Saccharomyces cerevisiae
atgtacacgcctatccctgctaatacccctgctcccactgcaccaacttcatcgatgacgtccaactcttcatccgcatcaaatgccaacaccactagcagtagtggcataaacccaaggaacagagccagtggtactccatccaatgagcgggctcgtccggcgtcgggtatcagttcgtttttgaataccttcggaattaggcaaaatagccagacagcttcttcttctgcggctcctgatcagcgtctattcggcacaaccccatctaactcacatatgagtgtggccatggaaagtatcgataccgctccgcaacagcaggaaccacgtctgcatcatcctatacaaatgcctctgtcggcccagttccacgttcatcgcaactatcaactccccatctccatatctctcactgcccctacaaccacagaccaccagcaatcatctgcgcataatttcgaaggcaacaatgttggtaacgttcaagagtctttgaatcagcggcagcctaacggtactaacaataccacaacctcgataatttccatggcgccagcggctacaacgagaaatatagtcggtggtgcagatggatctactattgttaacaacagtcaggaaatgtataagaatttacgtcacttgatatatgctgcaaaccagccaaatgggaccgaaattttacatttggatttacctgcaacaagtgcagaggagtcaaacaatatgttcaatgtagatgaggtcactttgaagcaaaggaaagataagcatggtctttttagtataagactaaccccatttattgatagttcgtccacgacaaatcaaggtttattctttgaaccgattataagaaaggctggccctggatcccaattggttattggccgctatactgagcgtgttcgcgatgcaatttctaaaatacctgaacaatatcatccagttgtatttaaatccaaagttgtttcaaggacacatggttgttttaaagttgactctcaaggtaactggtatataaaggatgtgaaatcatctagtggaactttcttaaatcaccaaaggctctcacccgcttcctctttatcgaaagatacccctcttcgtgatggtgatattttacagttaggaatggattttagaggtggcacggaagaaatctatcgttgtgtaaggatgaggattgagctaaatagatcatggaaactaaaggcaaattcgttcaacaaagaagctttacagcgtttgcagaatttacaaaaattaactacaggtattgaagaagaagattgttcgatttgcctatgtaagatcaaaccgtgtcaagcaattttcatatcaccatgcgcacatagctggcatttccgttgtgtaagaagattggtcatgctctcatatccgcaatttgtttgccccaactgtagatcaagttgtgatttggaggcctcctttgaaagtagtgacgaggaagatgaaagtgatgtggaaagtgaaggtgatcaactggtggatcaacttagcgtcttaatggaaacttcaaaggatgttgatagccatccttaa

SEQ ID NO: 9434 - DNA, 1569 bp, Artificial Sequence
  Description of Artificial Sequence: Synthetic polynucleotide
atgtacacgcctatccctgctaatacccctgctcccactgcaccaacttcttctatgacgtccaactcttcttccgcatctaatgccaacaccactagcagtagtggcataaacccaaggaacagagccagtggtactccatccaatgagagagctcgtccggcgtctggtatcagttcttttttgaataccttcggaattaggcaaaatagccagacagcttcttcttctgcggctcctgatcagcgtttattcggcacaaccccatctaactctcatatgagtgtggccatggaaagtatcgataccgctccgcaacagcaggaaccacgtttgcatcatcctatacaaatgcctttatctgcccagttccacgttcatcgcaactatcaactccccatctccatatctctcactgcccctacaaccacagaccaccagcaatcttctgcgcataatttcgaaggcaacaatgttggtaacgttcaagagtctttgaatcagagacagcctaacggtactaacaataccacaaccagtataatttccatggcgccagcggctacaacgagaaatatagtcggtggtgcagatggatctactattgttaacaacagtcaggaaatgtataagaatttacgtcacttgatatatgctgcaaaccagccaaatgggaccgaaattttacatttggatttacctgcaacaagtgcagaggagagcaacaatatgttcaatgtagatgaggtcactttgaagcaaaggaaagataagcatggtctttttagtataagattgaccccatttattgatagttcttccacgacaaatcaaggtttattctttgaaccgattataagaaaggctggccctggatcccaattggttattggccgctatactgagcgtgttcgcgatgcaatttctaaaatacctgaacaatatcatccagttgtatttaaatccaaagttgtttccaggacacatggttgttttaaagttgactctcaaggtaactggtatataaaggatgtgaaatcttctagtggaactttcttaaatcaccaaaggctctctcccgcttcctctttatccaaagatacccctcttcgtgatggtgatattttacagttaggaatggattttagaggtggcacggaagaaatctatcgttgtgtaaggatgaggattgagttgaatagaagttggaaattgaaggcaaattctttcaacaaagaagctttacagcgtttgcagaatttacaaaaattaactacaggtattgaagaagaagattgttctatttgcttgtgtaagatcaaaccgtgtcaagcaattttcatatctccatgcgcacatagctggcatttccgttgtgtaagaagattggtcatgctctcttatccgcaatttgtttgccccaactgtagaagtagttgtgatttggaggcctcctttgaaagtagtgacgaggaagatgaaagtgatgtggaaagtgaaggtgatcaattagtggatcaacttagcgtcttaatggaaacttctaaggatgttgatagccatccttga

SEQ ID NO: 9435 - DNA, 1935 bp, Saccharomyces cerevisiae
atgaaggctaatggtttagataatgatccggcaaggacgggaatggaaagaacagatatagatagtgaacacccagaagcgcaaccgttgctgaacaacaaccaccggacccttggtgcaggatccgcgaatggcccagcagttaatgaaggtcgtgacattgaatccgatgggttcatcaaagatagtctctttcaaattcgcaaaggttatagaatctttattcataactccaaatggatattaaatatcctaattctaattaacaccatctggctagtcaccactttgatttcagatttctttttcaatatcaatattcttttcggattcagtaacaggtacgcaagttttaacgacttgactttaatattcatctcgatcatagctaattctttcaatctctggtttaataagctgggactgtactcagctttagattacagcttaaatgtaactctctgtgttttgacgttgttcaatctagcattgacctatctaattaaatacactaggcaaagaatcggctttgtgggcacgtttacatatttgtggacttcgttttcattttttattggggcaatattagattggtatctcttgttttacaacaactcaataaatgagccattggaggaacgcagaattgatgatgctaatattagtactttcaacgaaaaccatacaaatagtaccgaaaacagggacagaagccaatatggctctgggtcgccaacccccacccaccgctcgcagctggtccaaaacaaacatacattgacagaatgggtatccattgggttcaggaatactattaagtttttaattttaatattcttcgctttattcaccctgaatacacttttaacgacattggatacctacagattgactcacaaattaccaataaccgttcagtcgccctcgtacgaggcgttccattacgtagatgccgctaaaacctatcagttgcatataacttgttatggtgacgtatttgatcaagaaaacaacacagatttgtctgaaaataagaagcaacctatcatcttgtttgaacacggaggttatgatactggttacctttctgccacctggattgaggaactatatcatttagacaaaattcaaagatattgtctatacgatagaccagggtacgggttgagcgattctcctcccgccccaatctctattgcgatggttgcggaatctttaaggtacgcattgatcaaagatgcaaaaattaaaggtcccttcactacagtaggatacgaccttggcgggctatttacaagagtatttaccgccaagaatgtcgatattgtggatagcatgatgcttgttgaatcatggcatgaagaactattgttaaaaaactacattcaaagattactacctccaggccgtggtgatggcgacgatggcgacgatggcaatggtaatgatggggatggccgcaaccatgataagacttggttaccttcggagatagaaaggcataacgaatttagattatggtggaaaggcatttggtcgagtttaggatggagattacagacttcatggttactagctcatcatgggtctaaagaacgtatatatgggcgtgatatgaaatatcaaggacgtttcttgcgttccaagtttttggaaagcgtgacgagttcaattctaagttacagagatgtgacaaacaatgcagaatctttgcaaaatgtgaagacaagcatcgttagctctaaggaaatggtgaagaagtcggcattatggggcgattggcaaagagatttgaccaaaatttctcacaagactcaagaatggaaaatagttgaaggtgggcatgaaatatataagtatggtctgggcaaacaacaaactcaagaagtcctattaagattaataggtgagcttggcaaactaaccgaggattaa

SEQ ID NO: 9436 - DNA, 1935 bp, Artificial Sequence
  Description of Artificial Sequence: Synthetic polynucleotide
atgaaggctaatggtttagataatgatccggcaaggacgggaatggaaagaacagatatagatagtgaacacccagaagcgcaaccgttgttgaacaacaaccacagaacccttggtgcaggatccgcgaatggcccagcagttaatgaaggtcgtgacattgaatccgatgggttcatcaaagatagtctctttcaaattcgcaaaggttatagaatctttattcataactccaaatggatattaaatatcttgattttaattaacaccatctggttagtcaccactttgatttctgatttctttttcaatatcaatattcttttcggattcagtaacaggtacgcaagttttaacgacttgactttaatattcatctccatcatagctaattctttcaatctctggtttaataagttgggattatactctgctttagattacagcttaaatgtaactctctgtgttttgacgttgttcaatttggcattgacctatttgattaaatacactaggcaaagaatcggctttgtgggcacgtttacatatttgtggacttctttttctttttttattggggcaatattagattggtatctcttgttttacaacaacagcataaatgagccattggaggaacgcagaattgatgatgctaatattagtactttcaacgaaaaccatacaaatagtaccgaaaacagggacagaagccaatatggctctgggtctccaacccccacccaccgctctcagttggtccaaaacaaacatacattgacagaatgggtatccattgggttcaggaatactattaagtttttaattttaatattcttcgctttattcaccttgaatacacttttaacgacattggatacctacagattgactcacaaattaccaataaccgttcagtctccctcttacgaggcgttccattacgtagatgccgctaaaacctatcagttgcatataacttgttatggtgacgtatttgatcaagaaaacaacacagatttgtctgaaaataagaagcaacctatcatcttgtttgaacacggaggttatgatactggttacctttctgccacctggattgaggaattgtatcatttagacaaaattcaaagatattgtctttacgatagaccagggtacgggttgagcgattctcctcccgccccaatctctattgcgatggttgcggaatctttaaggtacgcattgatcaaagatgcaaaaattaaaggtcccttcactacagtaggatacgaccttggcgggttgtttacaagagtatttaccgccaagaatgtcgatattgtggatagcatgatgcttgttgaaagttggcatgaagaattattgttaaaaaactacattcaaagattattgcctccaggccgtggtgatggcgacgatggcgacgatggcaatggtaatgatggggatggccgcaaccatgataagacttggttaccttctgagatagaaaggcataacgaatttagattatggtggaaaggcatttggtctagtttaggatggagattacagacttcttggttattagctcatcatgggtctaaagaacgtatatatgggcgtgatatgaaatatcaaggacgtttcttgcgttccaagtttttggaaagcgtgacgagttctattttaagttacagagatgtgacaaacaatgcagaatctttgcaaaatgtgaagacaagcatcgttagctctaaggaaatggtgaagaagtctgcattatggggcgattggcaaagagatttgaccaaaatttctcacaagactcaagaatggaaaatagttgaaggtgggcatgaaatatataagtatggtcttggcaaacaacaaactcaagaagtccttttaagattaataggtgagcttggcaaattgaccgaggattga

SEQ ID NO: 9437 - DNA, 429 bp, Saccharomyces cerevisiae
atgactgaagacatcgaacaaaaaaagaccgctacagaggtaacaccacaagaaccaaagcacatccaagaagaagaagaacaggatgttgatatgactggcgatgaagaacaggaagaggaaccagacagggaaaaaattaagcttctcacacaggcaacatctgaagatggaactagtgcctcttttcaaattgtagaggaggatcacacgcttggaaatgcccttcgttacgttataatgaaaaatccagacgtagaattttgtggttactcgatacctcatccttctgaaaacctattaaatatcagaattcaaacctacggtgaaacgaccgcggtggatgctcttcaaaaagggctaaaggacttgatggatttatgtgacgttgtagaatctaagtttactgaaaaaatcaagagcatgtag

SEQ ID NO: 9438 - DNA, 429 bp, Artificial Sequence
  Description of Artificial Sequence: Synthetic polynucleotide
atgactgaagacatcgaacaaaaaaagaccgctacagaggtaacaccacaagaaccaaagcacatccaagaagaagaagaacaggatgttgatatgactggcgatgaagaacaggaagaggaaccagacagggaaaaaattaagcttctcacacaggcaacatctgaagatggaactagtgcctcttttcaaattgtagaggaggatcacacgcttggaaatgcccttcgttacgttataatgaaaaatccagacgtagaattttgtggttactctatacctcatccttctgaaaacttattaaatatcagaattcaaacctacggtgaaacgaccgcggtggatgctcttcaaaaagggttgaaggacttgatggatttatgtgacgttgtagaatctaagtttactgaaaaaatcaagagcatgtga

SEQ ID NO: 9439 - DNA, 1641 bp, Saccharomyces cerevisiae
atgacttacggtggtagagatcagcaatataacaagactaactacaagtctagaggtggcgacttccgcggtggaagaaactctgatagaaactcttacaatgacagaccacaaggcggtaactaccgtggtggtttcggtggtcgttccaattacaaccaaccccaggaattgatcaaaccaaactgggatgaagaattacccaaattgccaactttcgaaaagaatttctatgttgaacacgaaagtgttcgcgacagatcggacagtgagattgctcagttcagaaaggaaaatgaaatgactatttccggacacgatattccaaagccaatcaccactttcgatgaagctggtttcccagactacgttttgaatgaagtgaaggctgaaggatttgacaaaccaactggcattcaatgtcagggttggccaatggctttatctggtagggacatggttggtattgctgccactggttccggtaagactttgtcttattgtttaccaggtattgttcatatcaacgctcaaccattattggctccaggcgatggaccaattgttttggttttggctccaactagagaattggctgttcaaattcaaacagaatgttccaagtttggtcatagttccagaatcagaaatacctgtgtctacggtggtgttccaaaaagtcaacaaatcagagatttatctcgtggctctgaaattgttattgctactccaggtcgactaattgatatgctagagattggtaagactaatttgaagagagtcacttacctggttcttgatgaagctgatagaatgttagatatgggttttgaacctcaaatcagaaagattgttgatcaaatcagacctgatagacaaaccttgatgtggtctgccacttggccaaaggaggtgaagcaactagccgctgattacttgaatgatccaattcaagttcaagttggttctctagaactatctgcctcccataatattactcagatcgtcgaagttgtttctgatttcgaaaagagagatcgtttgaacaagtacttagaaacagcctctcaagacaacgaatacaagacattaatctttgcttctacgaaaagaatgtgcgatgatatcaccaagtatctaagagaagatggatggcccgccttggctattcatggtgacaaagaccaaagagaacgtgactgggttctacaagagtttagaaacggtagatccccaattatggttgctactgatgtggccgccagaggtatcgatgtcaaaggtatcaattacgttatcaactacgatatgccaggtaacattgaagattatgttcacagaatcggtagaactggtagagcaggtgctactggtactgctatatctttcttcaccgaacaaaacaaaggtttaggtgctaaattaatctctatcatgagagaagctaatcaaaatattcctcccgaattattgaaatacgacaggagatcttatggtggcggtcacccaagatacggtggtggtcgtggtggtcgtggtggctatggccgtagaggtggttacggtggtggccgtggtggttacggcggtaacaggcagagagatggtggctggggtaacagaggtcgttcaaactattga

SEQ ID NO: 9440 - DNA, 1641 bp, Artificial Sequence
  Description of Artificial Sequence: Synthetic polynucleotide
atgacttacggtggtagagatcagcaatataacaagactaactacaagtctagaggtggcgacttccgcggtggaagaaactctgatagaaactcttacaatgacagaccacaaggcggtaactaccgtggtggtttcggtggtcgttccaattacaaccaaccccaggaattgatcaaaccaaactgggatgaagaattacccaaattgccaactttcgaaaagaatttctatgttgaacacgaaagtgttcgcgacagaagtgacagtgagattgctcagttcagaaaggaaaatgaaatgactatttccggacacgatattccaaagccaatcaccactttcgatgaagctggtttcccagactacgttttgaatgaagtgaaggctgaaggatttgacaaaccaactggcattcaatgtcagggttggccaatggctttatctggtagggacatggttggtattgctgccactggttccggtaagactttgtcttattgtttaccaggtattgttcatatcaacgctcaaccattattggctccaggcgatggaccaattgttttggttttggctccaactagagaattggctgttcaaattcaaacagaatgttccaagtttggtcatagttccagaatcagaaatacctgtgtctacggtggtgttccaaaaagtcaacaaatcagagatttatctcgtggctctgaaattgttattgctactccaggtagattgattgatatgttagagattggtaagactaatttgaagagagtcacttacttggttcttgatgaagctgatagaatgttagatatgggttttgaacctcaaatcagaaagattgttgatcaaatcagacctgatagacaaaccttgatgtggtctgccacttggccaaaggaggtgaagcaattggccgctgattacttgaatgatccaattcaagttcaagttggttctttggaattatctgcctcccataatattactcagatcgtcgaagttgtttctgatttcgaaaagagagatcgtttgaacaagtacttagaaacagcctctcaagacaacgaatacaagacattaatctttgcttctacgaaaagaatgtgcgatgatatcaccaagtatttaagagaagatggatggcccgccttggctattcatggtgacaaagaccaaagagaacgtgactgggttttgcaagagtttagaaacggtagatccccaattatggttgctactgatgtggccgccagaggtatcgatgtcaaaggtatcaattacgttatcaactacgatatgccaggtaacattgaagattatgttcacagaatcggtagaactggtagagcaggtgctactggtactgctatatctttcttcaccgaacaaaacaaaggtttaggtgctaaattaatctctatcatgagagaagctaatcaaaatattcctcccgaattattgaaatacgacaggagatcttatggtggcggtcacccaagatacggtggtggtcgtggtggtcgtggtggctatggccgtagaggtggttacggtggtggccgtggtggttacggcggtaacaggcagagagatggtggctggggtaacagaggtcgttctaactattga

SEQ ID NO: 9441 - DNA, 363 bp, Saccharomyces cerevisiae
atgcctaaagtttacagttaccaagaagttgccgaacacaatggcccagaaaatttctggattatcatcgatgacaaagtttacgatgtttctcaattcaaagatgaacatccaggtggtgatgaaattataatggatttgggtggacaagatgctacagaaagctttgtcgatatcggtcattctgacgaagcattgagactactgaaaggtttatacattggtgacgttgacaagaccagtgagcgcgtttctgtggaaaaggtatctacctctgaaaaccaaagtaaaggtagtggtacattggttgtcatattggccattttaatgctaggtgttgcttattatttgttgaacgaataa

SEQ ID NO: 9442 - DNA, 363 bp, Artificial Sequence
  Description of Artificial Sequence: Synthetic polynucleotide
atgcctaaagtttacagttaccaagaagttgccgaacacaatggcccagaaaatttctggattatcatcgatgacaaagtttacgatgtttctcaattcaaagatgaacatccaggtggtgatgaaattataatggatttgggtggacaagatgctacagaaagctttgtcgatatcggtcattctgacgaagcattgagattattgaaaggtttatacattggtgacgttgacaagaccagtgagcgcgtttctgtggaaaaggtatctacctctgaaaaccaaagtaaaggtagtggtacattggttgtcatattggccattttaatgttgggtgttgcttattatttgttgaacgaatga

SEQ ID NO: 9443 - DNA, 663 bp, Saccharomyces cerevisiae
atggtaaagtcaacaagcaaaacttccaccaaggaaacagtaaccaaacaacccaccgaagaaaaacctatacaggagaaagaagagttggctctagaaacatcgtctagcagttcagatgaagaagacgaaaaagatgaagatgaaattgaaggtttagccgcttctgatgatgagcagagcggtacacacaagattaaaagattgaatcctaagaagcaggctaatgaaaaaaagtcgaaagataaaaagacacttgaagagtattctgggattatttatgtgagtagactgccacatgggttccacgaaaaggaattaagtaaatattttgctcaattcggtgatttaaaagaagtgagattagcacgtaataagaaaactggaaattccagacattatggcttcttagaattcgttaataaagaggatgcaatgatcgcccaagaatctatgaacaattacttgttgatgggtcatctactacaagtgcgtgtattaccaaaaggagctaaaatcgagaaattgtacaaatacaagaagagagttctagtagagaaaggtatcaccaaaccagtaaaacagctaaaggataacatgaagcaaaaacatgaagaaaggataaaaaaattagccaagtcaggtatcgaattcaaatggtga

SEQ ID NO: 9444 - DNA, 663 bp, Artificial Sequence
  Description of Artificial Sequence: Synthetic polynucleotide
atggtaaagagtacaagcaaaacttccaccaaggaaacagtaaccaaacaacccaccgaagaaaaacctatacaggagaaagaagagttggctttggaaacatcttctagcagttctgatgaagaagacgaaaaagatgaagatgaaattgaaggtttagccgcttctgatgatgagcagagcggtacacacaagattaaaagattgaatcctaagaagcaggctaatgaaaaaaagagtaaagataaaaagacacttgaagagtattctgggattatttatgtgagtagattaccacatgggttccacgaaaaggaattaagtaaatattttgctcaattcggtgatttaaaagaagtgagattagcacgtaataagaaaactggaaattccagacattatggcttcttagaattcgttaataaagaggatgcaatgatcgcccaagaatctatgaacaattacttgttgatgggtcatttattacaagtgcgtgtattaccaaaaggagctaaaatcgagaaattgtacaaatacaagaagagagttttggtagagaaaggtatcaccaaaccagtaaaacagttgaaggataacatgaagcaaaaacatgaagaaaggataaaaaaattagccaagtctggtatcgaattcaaatggtga

SEQ ID NO: 9445 - DNA, 813 bp, Saccharomyces cerevisiae
atggctatcgaaaatatatacattgccagacatggttacaggtcaaactggctaccaaagggaccatatccaccaccgcccaccggtattgataacgatgtcccgctttcggaacacggtgttgaacaggcacatgaactggcgaactatatctctaaattagatgtcaaaccagaaatgattttctcctccccattttaccgctgtttagaaactagtaaacccacagtggaggctttaaagattccattatatgtcgatcgtggtgtaggagaatggtataagcctgatagacccattatcccggagcctgctactcatgaagttatgagtaagttttttccaagcatgatctctccagactgggaacctagtattattcctagtaataagggtgaaacagaagaagatatttttgagaggtgccataaattctggcctgtctttattgacagagtggagagaaaatttccaaatgtaaagaccattatgatagttacccacgcagccactaaatccgctcttggtatgaacttgttgaaattctccagtgccaaagagcccattgataacaaaggcacctttataagaaatggaagttgtgctattgataaatttgagctggtgaaaggagaaaatgaaagtataccatttgaagagagagagtggaaacttacaatgaatggcaacacctcctttttaactaatggggaagaaatgaattggacgtttatgaatgcctttgaggctggttcagacgctgatatcaaagcgagaagagcagctgagagcggaaaactaaaaatggagtga

SEQ ID NO: 9446 - DNA, 813 bp, Artificial Sequence
  Description of Artificial Sequence: Synthetic polynucleotide
atggctatcgaaaatatatacattgccagacatggttacaggtctaactggttaccaaagggaccatatccaccaccgcccaccggtattgataacgatgtcccgctttctgaacacggtgttgaacaggcacatgaattggcgaactatatctctaaattagatgtcaaaccagaaatgattttctcctccccattttaccgctgtttagaaactagtaaacccacagtggaggctttaaagattccattatatgtcgatcgtggtgtaggagaatggtataagcctgatagacccattatcccggagcctgctactcatgaagttatgagtaagttttttccaagcatgatctctccagactgggaacctagtattattcctagtaataagggtgaaacagaagaagatatttttgagaggtgccataaattctggcctgtctttattgacagagtggagagaaaatttccaaatgtaaagaccattatgatagttacccacgcagccactaaatccgctcttggtatgaacttgttgaaattctccagtgccaaagagcccattgataacaaaggcacctttataagaaatggaagttgtgctattgataaatttgagttggtgaaaggagaaaatgaaagtataccatttgaagagagagagtggaaacttacaatgaatggcaacacctcctttttaactaatggggaagaaatgaattggacgtttatgaatgcctttgaggctggttctgacgctgatatcaaagcgagaagagcagctgagagcggaaaattgaaaatggagtga

SEQ ID NO: 9447 - DNA, 681 bp, Saccharomyces cerevisiae
atggctccgacaataagcaaaaggataaaaactctctccgtgagcagaccaataatatatggcaatacggctaaaaagatgggtagcgttaaaccaccaaatgctcctgccgaacatactcatttatggacaatttttgtcaggggcccacaaaatgaagatatatcgtactttatcaagaaagtcgtttttaaacttcatgacacctacccaaaccctgtgagatccatagaagcgcctccgtttgaactgactgaaacagggtggggtgaatttgatataaatattaaggtttattttgtagaagaggccaatgaaaaagtgttgaatttttaccatagattacgacttcatccttatgctaatcctgtaccgaattccgacaatggaaatgagcagaatacaacagaccataatagtaaagatgcagaagttagttctgtgtattttgatgaaattgtattcaatgagccaaatgaagagtttttcaaaattttaatgagccgaccaggaaatttgttaccttcaaacaaaactgatgattgtgtatactccaagcaattagaacaggaagaaattgacagaatagagatcggcatagaaaaggttgacaaggaaattgacgaattgaagcagaaactggaaaacttggtaaaacaagaagccattaacggaagttag

SEQ ID NO: 9448 - DNA, 681 bp, Artificial Sequence
  Description of Artificial Sequence: Synthetic polynucleotide
atggctccgacaataagcaaaaggataaaaactctctccgtgagcagaccaataatatatggcaatacggctaaaaagatgggtagcgttaaaccaccaaatgctcctgccgaacatactcatttatggacaatttttgtcaggggcccacaaaatgaagatatatcttactttatcaagaaagtcgtttttaaacttcatgacacctacccaaaccctgtgagatccatagaagcgcctccgtttgaattgactgaaacagggtggggtgaatttgatataaatattaaggtttattttgtagaagaggccaatgaaaaagtgttgaatttttaccatagattaagacttcatccttatgctaatcctgtaccgaattccgacaatggaaatgagcagaatacaacagaccataatagtaaagatgcagaagttagttctgtgtattttgatgaaattgtattcaatgagccaaatgaagagtttttcaaaattttaatgagcagaccaggaaatttgttaccttccaacaaaactgatgattgtgtatactccaagcaattagaacaggaagaaattgacagaatagagatcggcatagaaaaggttgacaaggaaattgacgaattgaagcagaaattagaaaacttggtaaaacaagaagccattaacggaagttga

SEQ ID NO: 9449 - DNA, 3552 bp, Saccharomyces cerevisiae
atgaaaatactcctatcgaaacagcaaactagaaagatagcaatagtttcagaaacacatggactggtatttaggccaataaacagtaagaactctcgcagatctacatgtgccgtggaattggttccgaaagctgaattaaatggtaatggtttcagaagactatctaaccatgaaatatacggttttattggtctcatagaaattgaaggccttatgttcatagcaaccataacaggtaaatctaaggtggcccagccgatcccaaacaaaacggttaacaaaatatatgctgtggattttttttgcttaaataattctaaatgggatttcatggacatcgattcatccggttatccgattgttactaatgatggagattttgcaataagctcgcctcctagtatttccacacattcttctagatcatcgctacgttcttcttcctctaggagtttgaatgctcaagaacaagctcccaagcatccatgtcatgaactaagaaagctattatcaaatggatctttttattacagcaccgattttgatttaacttgtacattgcagaaacgtggattcacggaacactctttgagttttgatgattttgaccgggagtttatgtggaactcgtttcttatggacgaaatcatcacatacagagacagactagatgtaacggccaaagaactattggatcaacgaggattcctcacgaccgtaatccgagggtttgctgaaacaatttttagctatattaataggttgaaagtaggacttaccattatttccaggcaaagttggaaaagagcaggcacaaggtttaatgcacgtggtatagatgatgatggccatgtcgcaaattttgttgaaacagaaatgattatgtactcttctcagtattgttatgctttcacgcagataagaggaagccttccaattttttgggagcaggatacatctttgattagtccaaagattcaaattaccagatctgttgaagcaacacagcccacgtttgatgaacattttataagactatttaagaagtatgggccagttcatataatcaacctgctgtctactaaatcttcagaaattcaattatcgaggcgatacaaggaacagttgaaaaattctgagaaaatgaaaatcggtagagatgtgttcctaacaagctttgatttccatagagaaacttcgcaagatgggtttgcagctgcaagtaggattatccctaaaataagaaacacaattttggacgccggttacttttcatacgatgtaaaagaagggcgattaatatccgaacaagacggtgtctttagaaccaattgcttggattgtttagatagaacaaatttgatccaacagacgatttcactggccgttttcaaactatttttggaagacttccgattggtaaaacccagtagtttcatcgacgataatgaatttgtgcaaaaggtgaatgctttatgggccgacaacggagatcagatatcacaaatttacactgggacaaatgctctgaaatcgtcctattcaaggaaaggtaaaatgtctttttctggcgccctttctgatgcgacgaagtccgttagtagaatgtacatcaacaattttgtagataaaggaaaacagcaaaatattgacacacttttgggcaaactaccgcaccagcaagttgttgaactttatgatccaatctgcgaatacgtcaatgaaaggctgttagagtcagaggaaaaattcaccactcattctaacataaatttgtttgtcggtacattcaatgttaacggaaactctcgaagagcagatttgtcaaaatggttatttccaatcggcgataaattcaaacctgatgtcgttgtgttagggttgcaggaagttatagagttgaccgcagggtctatcttgaatgcagattatacgaaaagttctttttgggaaactatggttactgactgtttgaatcaatacgaagaaaaatatcttttacttagagtggaacagatgtcctctcttttgatactattttttgcaagatcagatagagcctataacataaaagaggtaggtgggtctaccaaaaagactgggtttggtggtattactggaaacaaaggtgcagtagccattagattcgattatggggcaacttcattctgtttcgttaatacacatttatcagcaggtgcgagtaacattgacgaacgtcgcaatgactacaacaatatctacaggaacataacctttccaagatcaaagacaattccacaccatgattcgttgttttggttgggtgaccttaactacaggataactttgacaaatgatgaagttagaagagaattaagggctcaaaaggatggctatattgatagattgcttcaatatgatcagttgactcaagaaataaatgaaggagtggtatttcagggctttaaagaaccgaccctccaattccgtccgacctataaatatgattatggcacagataattatgatacttctgaaaaggcgagaactccgtcttggactgatagaatcatatataaaggtgaaaacctgcatccattggcatattcggacgcacctttaaaaataagcgatcataaaccagtttatgctgcatatagggcaaatgtgaaatttgttgacgaaaaagagaagcttaacctagttgagaagctgtatgcagaatataagaatacgcatcccgaagcactaactacaggtcctgacgaactttctcatgcaagaatggaaaaacaaaaggaaagtatacccttagatgcaaccgttcaatcagcgggcataaaactaattgacctagatgatacttcctcgtgcgtttcgcctctactttctggtcccagtccccaaccgtctgttgttggccctggaggactcagtaacgtatcacccgataaaagtaagctcaatgtgcttcctccgcctcctcctacctcgaggcacaataaggaaccatcttctaaacttctttcccctaccaaagagatttccattgtcagcgtatcgccgcgtaaaggtgagagcaatcttcctgccttagagagacacagtacacccaaaccactgccgccagtgcccgctttatctttatctaagccagtctctttacagaaaagttcttcagaattacagcatgctaaagagaccatagataatgggaaaattgttcctcgaccttgtcctcctattagaaggaagagcagtactgccccggacgaaatctctacatctaccaaaaattcaggtgtgtccactacagaagatcctgagccagcaaaggcctccacaaaacctgagaagccaccagttgtcaaaaaaccgcattatttaagtgttgctgctaacaagcttaacacctctcaagaacactcaataaaagtttccccgtcgaattcaaaatctgaagaggaactcccttgcaagaaaaagtctaaaccaaaagttcctgcgaagaaccctgaactagagaagctaagcgttcatccattgaagccttgcgaccccaattaa

SEQ ID NO: 9450 - DNA, 3552 bp, Artificial Sequence
  Description of Artificial Sequence: Synthetic polynucleotide
atgaaaatactcttgagtaaacagcaaactagaaagatagcaatagtttctgaaacacatggattagtatttaggccaataaacagtaagaactctcgcagatctacatgtgccgtggaattggttccgaaagctgaattaaatggtaatggtttcagaagattatctaaccatgaaatatacggttttattggtctcatagaaattgaaggccttatgttcatagcaaccataacaggtaaatctaaggtggcccagccgatcccaaacaaaacggttaacaaaatatatgctgtggattttttttgcttaaataattctaaatgggatttcatggacatcgattcttccggttatccgattgttactaatgatggagattttgcaataagctctcctcctagtatttccacacattcttctagatcttctttacgttcttcttcctctaggagtttgaatgctcaagaacaagctcccaagcatccatgtcatgaattgagaaagcttttatccaatggatctttttattacagcaccgattttgatttaacttgtacattgcagaaacgtggattcacggaacactctttgagttttgatgattttgacagagagtttatgtggaactcttttcttatggacgaaatcatcacatacagagacagattagatgtaacggccaaagaattattggatcaaagaggattcctcacgaccgtaatcagagggtttgctgaaacaatttttagctatattaataggttgaaagtaggacttaccattatttccaggcaaagttggaaaagagcaggcacaaggtttaatgcacgtggtatagatgatgatggccatgtcgcaaattttgttgaaacagaaatgattatgtactcttctcagtattgttatgctttcacgcagataagaggaagccttccaattttttgggagcaggatacatctttgattagtccaaagattcaaattaccagatctgttgaagcaacacagcccacgtttgatgaacattttataagattatttaagaagtatgggccagttcatataatcaacttattatctactaaatcttctgaaattcaattatctaggcgttacaaggaacagttgaaaaattctgagaaaatgaaaatcggtagagatgtgttcttaacaagctttgatttccatagagaaacttctcaagatgggtttgcagctgcaagtaggattatccctaaaataagaaacacaattttggacgccggttacttttcttacgatgtaaaagaagggcgtttaatatccgaacaagacggtgtctttagaaccaattgcttggattgtttagatagaacaaatttgatccaacagacgatttctttggccgttttcaaattatttttggaagacttcagattggtaaaacccagtagtttcatcgacgataatgaatttgtgcaaaaggtgaatgctttatgggccgacaacggagatcagatatctcaaatttacactgggacaaatgctttgaaatcttcctattctaggaaaggtaaaatgtctttttctggcgccctttctgatgcgacgaagtccgttagtagaatgtacatcaacaattttgtagataaaggaaaacagcaaaatattgacacacttttgggcaaattaccgcaccagcaagttgttgaactttatgatccaatctgcgaatacgtcaatgaaaggttattagagagtgaggaaaaattcaccactcattctaacataaatttgtttgtcggtacattcaatgttaacggaaactctagaagagcagatttgagtaaatggttatttccaatcggcgataaattcaaacctgatgtcgttgtgttagggttgcaggaagttatagagttgaccgcagggtctatcttgaatgcagattatacgaaaagttctttttgggaaactatggttactgactgtttgaatcaatacgaagaaaaatatcttttacttagagtggaacagatgtcctctcttttgatattgttttttgcaagaagtgatagagcctataacataaaagaggtaggtgggtctaccaaaaagactgggtttggtggtattactggaaacaaaggtgcagtagccattagattcgattatggggcaacttctttctgtttcgttaatacacatttaagtgcaggtgcgagtaacattgacgaacgtcgcaatgactacaacaatatctacaggaacataacctttccaagatccaagacaattccacaccatgattctttgttttggttgggtgaccttaactacaggataactttgacaaatgatgaagttagaagagaattaagggctcaaaaggatggctatattgatagattgcttcaatatgatcagttgactcaagaaataaatgaaggagtggtatttcagggctttaaagaaccgaccctccaattccgtccgacctataaatatgattatggcacagataattatgatacttctgaaaaggcgagaactccgtcttggactgatagaatcatatataaaggtgaaaacttacatccattggcatattctgacgcacctttaaaaataagcgatcataaaccagtttatgctgcatatagggcaaatgtgaaatttgttgacgaaaaagagaagcttaacttggttgagaagctttatgcagaatataagaatacgcatcccgaagcattgactacaggtcctgacgaactttctcatgcaagaatggaaaaacaaaaggaaagtatacccttagatgcaaccgttcaaagtgcgggcataaaattgattgacttggatgatacttccagttgcgtttctcctttactttctggtcccagtccccaaccgtctgttgttggccctggaggactcagtaacgtatctcccgataaaagtaagctcaatgtgcttcctccgcctcctcctacctctaggcacaataaggaaccatcttctaaacttctttcccctaccaaagagatttccattgtcagcgtatccccgcgtaaaggtgagagcaatcttcctgccttagagagacacagtacacccaaaccattaccgccagtgcccgctttatctttatctaagccagtctctttacagaaaagttcttctgaattacagcatgctaaagagaccatagataatgggaaaattgttcctagaccttgtcctcctattagaaggaagagcagtactgccccggacgaaatctctacatctaccaaaaattctggtgtgtccactacagaagatcctgagccagcaaaggcctccacaaaacctgagaagccaccagttgtcaaaaaaccgcattatttaagtgttgctgctaacaagcttaacacctctcaagaacactccataaaagtttccccgtccaattctaaatctgaagaggaactcccttgcaagaaaaagtctaaaccaaaagttcctgcgaagaaccctgaattagagaagttgagcgttcatccattgaagccttgcgaccccaattga

SEQ ID NO: 9451 - DNA, 1860 bp, Saccharomyces cerevisiae
atggttaaagagagtattattgctcttgctgagcatgcggcctccagagcctcaagagttattcctccagtgaagctagcctataaaaatatgcttaaggacccttcctccaagtacaagccatttaacgctccaaagctatctaatagaaagtggccggataaccggatcacgagggctcctcgttggttatcaacagatttgagagatggtaaccaatctctgccggatcccatgtcagtggaacaaaagaaagaatactttcacaagctggtcaatattgggttcaaagaaatcgaggtttccttcccctctgcatctcaaacagatttcgacttcactagatatgctgtagaaaacgccccagacgatgttagtattcaatgtcttgtccaatctagagaacacttgattaagagaacggtggaagcattaacaggtgctaaaaaggctactatacatacttacttggcaacaagtgatatgttccgtgaaattgtttttaatatgtctagagaggaagctatttccaaggcagtagaggccaccaaactagttaggaaactaactaaggatgacccttcccaacaagccactcgttggtcctatgagttttcccccgaatgtttcagtgatactccaggtgaatttgctgtagaaatttgcgaagctgttaagaaggcttgggaacctaccgaggaaaatccaatcattttcaacttacctgctaccgtagaagttgcctctccaaatgtttatgctgatcagattgaatacttcgctacccatattactgagcgtgagaaggtttgcatctctacacattgtcacaatgaccgtggttgcggtgtcgccgccacagagttaggtatgcttgcaggtgccgaccgtgtagaaggatgtctctttggtaatggtgaacgtacaggtaatgtggacttggttactgttgctatgaatatgtatacccaaggtgtttctcctaatttggatttctctgacttgacctctgtcctagatgtggttgagcgttgtaataagatcccagtatcgcaaagagcaccatacggcggtgacttggtcgtttgtgccttttccggttctcaccaagacgccattaagaagggtttcaacttacaaaacaagaagcgtgctcaaggtgaaactcaatggagaatcccatacttgccattggatccaaaggacattggccgtgattacgaagctgtcatcagagtcaactctcagtctggtaaaggtggtgccgcttgggttattttgagatctttgggtttggatctaccaagaaacatgcaaatcgaattttctagcgccgttcaagaccatgctgactccttgggtagagaactaaaatcagatgagatttccaagttattcaaagaggcttacaactacaatgacgaacagtaccaagctattagtttagtcaattataatgttgaaaaattcggcactgaacgtagagtgttcactggtcaagtcaaagtaggcgaccagatcgtcgatattgaaggtacaggtaatggtccaatctcttctttggtcgacgccctatcaaacttgttgaacgtgagatttgccgtagcaaactacacagagcattctctaggttctggttcttctacgcaagctgcttcttacatccatctatcgtataggcgtaatgccgacaacgaaaaggcctacaaatggggtgtaggtgtctccgaagatgtcggtgattcttcagtgagagccatctttgccaccattaacaatattatccattctggtgatgtgtccattccatctttggccgaggtcgaaggtaagaatgctgcggcatctggctctgcataa

SEQ ID NO: 9452 - DNA, 1860 bp, Artificial Sequence
  Description of Artificial Sequence: Synthetic polynucleotide
atggttaaagagagtattattgctcttgctgagcatgcggcctccagagcctctagagttattcctccagtgaagttggcctataaaaatatgcttaaggacccttcctccaagtacaagccatttaacgctccaaagttatctaatagaaagtggccggataacagaatcacgagggctcctcgttggttatctacagatttgagagatggtaaccaatctttaccggatcccatgtctgtggaacaaaagaaagaatactttcacaagttggtcaatattgggttcaaagaaatcgaggtttccttcccctctgcatctcaaacagatttcgacttcactagatatgctgtagaaaacgccccagacgatgttagtattcaatgtcttgtccaatctagagaacacttgattaagagaacggtggaagcattaacaggtgctaaaaaggctactatacatacttacttggcaacaagtgatatgttccgtgaaattgtttttaatatgtctagagaggaagctatttccaaggcagtagaggccaccaaattggttaggaaattaactaaggatgacccttcccaacaagccactcgttggtcctatgagttttcccccgaatgtttcagtgatactccaggtgaatttgctgtagaaatttgcgaagctgttaagaaggcttgggaacctaccgaggaaaatccaatcattttcaacttacctgctaccgtagaagttgcctctccaaatgtttatgctgatcagattgaatacttcgctacccatattactgagcgtgagaaggtttgcatctctacacattgtcacaatgaccgtggttgcggtgtcgccgccacagagttaggtatgcttgcaggtgccgaccgtgtagaaggatgtctctttggtaatggtgaacgtacaggtaatgtggacttggttactgttgctatgaatatgtatacccaaggtgtttctcctaatttggatttctctgacttgacctctgtcttggatgtggttgagcgttgtaataagatcccagtatctcaaagagcaccatacggcggtgacttggtcgtttgtgccttttccggttctcaccaagacgccattaagaagggtttcaacttacaaaacaagaagcgtgctcaaggtgaaactcaatggagaatcccatacttgccattggatccaaaggacattggccgtgattacgaagctgtcatcagagtcaactctcagtctggtaaaggtggtgccgcttgggttattttgagatctttgggtttggatttaccaagaaacatgcaaatcgaattttctagcgccgttcaagaccatgctgactccttgggtagagaattgaaatctgatgagatttccaagttattcaaagaggcttacaactacaatgacgaacagtaccaagctattagtttagtcaattataatgttgaaaaattcggcactgaacgtagagtgttcactggtcaagtcaaagtaggcgaccagatcgtcgatattgaaggtacaggtaatggtccaatctcttctttggtcgacgccttgtctaacttgttgaacgtgagatttgccgtagcaaactacacagagcattctttgggttctggttcttctacgcaagctgcttcttacatccatttatcttataggcgtaatgccgacaacgaaaaggcctacaaatggggtgtaggtgtctccgaagatgtcggtgattcttctgtgagagccatctttgccaccattaacaatattatccattctggtgatgtgtccattccatctttggccgaggtcgaaggtaagaatgctgcggcatctggctctgcatga

SEQ ID NO: 9453 - DNA, 2019 bp, Saccharomyces cerevisiae
atgaagcaggagcagtcccacgaaggcgactcatacagcacggaattcataaatctctttggcaaagataccgcaacacaccctagcagcaacaacggtgctaataataatggcatggggagcacgaactcgttggaccagtttgtggcaacagcctcatcgtcatcttctctggtgaccagcagcgagaataggcgccccctaataggtgacgttaccaataggggcaacactaacctatatgaccacgctgtcacgccagaaatactcttagaacagttggcctacgtggataacttcataccatctctggataacgagttctctaatgtggattggaatgtgaataccacccataataatgcaaacaataatggcgcggacactttcagcagcataaatgcaaatccttttgacttggatgaacaactagccattgagttgagtgcgtttgccgacgattctttcatcttcccagacgaggataagccgagcaataacaataacaacagcaataatggtaatgacgaccatagcaaccacgacgtattgcatgaggacccttctaccaataatagacaaagaaatcctcacttcttgactcaaagaaggaatactttcctaacttcccaatacgaccaatcaaagtctcgattttcgtccaaaaacaaaagaaatggcaataacggcgaaacaaacaactttggcgacaatatgcaaaataaccatccttttgagccaaactttatgggaagcccttctcagtttcccgctgacgcaactaatatgacatcaatcgaccatggcggcttcacaaatgttgacattacatcaactgagaacaatactaccggtgacaatggagtggatgcgctatcaaatctactacataggacaacacacacaccgaaccgctcctcccccctaagcaatgtcacttctgctcaaaattcctcttcacaacaacgaaaacattcggaaagcaaagtcgatagtaacagcgataataacagctccaacaaagcccccaatataactgttcctgactattcaattataccaacctctgttttagtaactctattaccgagggtcaacgtgcccaacggcgcatataactcgttgatcagcgcgggatttgacaatgatcaaatagatgctatagccgcaataatggcgtatcatcatcaaaaaaagattagggaaaataacagtaataataataaaaacatcaacaccaatgacagtcaagaggcacccattctaaaaaacatcaacgaacttttaagtgtcttaataccaccctctccggctgaaactgctgcgccaactaccttatcaacgtcgccttcgttcaatgagcacggtgtagtagcagaggcttcttttctaagctccattttggaactgggcataaagcatccaaaaagtaataatattcacaatcaacgacaaccttcacgaaacgatcataaaatatcaagagagagtgacggtaacaatggaaacgataatgtccatcataataacgctgttattaagtcaagtacgacgcgtggagacgaaattgccaagatacgatccgagccaactttaaatgcaagttcttctgatcacaaggaaaatagtttaaaaagatcacactccggagatttgaaaaataaaaaagtacccgtcgaccgcaagtattctgataatgaagacgatgaatatgacgatgcagatttacacggctttgaaaagaagcaactgatcaagaaagagttaggggacgacgatgaagatttattgatacagtcgaaaaaatctcatcaaaaaaaaaaactaaaggaaaaggagttagaatcatcgatacatgaactgaccgaaattgcagcatccttacaaaaacggatacatacgttagaaacggaaaacaagcttttaaagaatttagttctgagtagcggtgaaacggaaggaataaaaaaagctgaaagcttaaagaagcaaatttttgagaaggttcagaaagaataa

SEQ ID NO: 9454 - DNA, 2019 bp, Artificial Sequence
  Description of Artificial Sequence: Synthetic polynucleotide
atgaagcaggagcagtcccacgaaggcgactcttacagcacggaattcataaatctctttggcaaagataccgcaacacaccctagcagcaacaacggtgctaataataatggcatggggagcacgaactctttggaccagtttgtggcaacagcctcttcttcttcttctttggtgaccagcagcgagaataggcgccccttgataggtgacgttaccaataggggcaacactaacttatatgaccacgctgtcacgccagaaatactcttagaacagttggcctacgtggataacttcataccatctttagataacgagttctctaatgtggattggaatgtgaataccacccataataatgcaaacaataatggcgcggacactttcagcagcataaatgcaaatccttttgacttggatgaacaattggccattgagttgagtgcgtttgccgacgattctttcatcttcccagacgaggataagccgagcaataacaataacaacagcaataatggtaatgacgaccatagcaaccacgacgtattgcatgaggacccttctaccaataatagacaaagaaatcctcacttcttgactcaaagaaggaatactttcttgacttcccaatacgaccaatccaagtctagattttcttccaaaaacaaaagaaatggcaataacggcgaaacaaacaactttggcgacaatatgcaaaataaccatccttttgagccaaactttatgggaagcccttctcagtttcccgctgacgcaactaatatgacatctatcgaccatggcggcttcacaaatgttgacattacatctactgagaacaatactaccggtgacaatggagtggatgcgttatccaatttattacataggacaacacacacaccgaaccgctcctcccccttaagcaatgtcacttctgctcaaaattcctcttctcaacaaagaaaacattctgaaagcaaagtcgatagtaacagcgataataacagctccaacaaagcccccaatataactgttcctgactattctattataccaacctctgttttagtaactttattaccgagggtcaacgtgcccaacggcgcatataactctttgatcagcgcgggatttgacaatgatcaaatagatgctatagccgcaataatggcgtatcatcatcaaaaaaagattagggaaaataacagtaataataataaaaacatcaacaccaatgacagtcaagaggcacccattttgaaaaacatcaacgaacttttaagtgtcttaataccaccctctccggctgaaactgctgcgccaactaccttatctacgtctccttctttcaatgagcacggtgtagtagcagaggcttcttttttgagctccattttggaattaggcataaagcatccaaaaagtaataatattcacaatcaaagacaaccttctagaaacgatcataaaatatctagagagagtgacggtaacaatggaaacgataatgtccatcataataacgctgttattaagagtagtacgacgcgtggagacgaaattgccaagataagatccgagccaactttaaatgcaagttcttctgatcacaaggaaaatagtttaaaaagaagtcactccggagatttgaaaaataaaaaagtacccgtcgaccgcaagtattctgataatgaagacgatgaatatgacgatgcagatttacacggctttgaaaagaagcaattgatcaagaaagagttaggggacgacgatgaagatttattgatacagtccaaaaaatctcatcaaaaaaaaaaattgaaggaaaaggagttagaaagtagtatacatgaattgaccgaaattgcagcatccttacaaaaaagaatacatacgttagaaacggaaaacaagcttttaaagaatttagttttgagtagcggtgaaacggaaggaataaaaaaagctgaaagcttaaagaagcaaatttttgagaaggttcagaaagaatga

SEQ ID NO: 9455 - DNA, 4407 bp, Saccharomyces cerevisiae
atgtcttctaaaagtgaaaaattagaaaaattgagaaagctgcaagccgctcgaaatggtacatccatcgatgattacgaaggtgacgaatcagatggtgacagaatatacgacgaaatcgacgaaaaagaatacagggccagaaagcgccaggaattgctgcatgacgattttgttgtagatgacgatggtgtaggctacgtcgatcgtggtgtcgaagaagattggagggaagttgataacagttcaagtgatgaagacactggaaaccttgctagcaaggattctaaaaggaagaagaatataaaaagggagaaagaccaccagattacagatatgctgcgaactcaacattccaaatcaacactgctagcacatgcaaaaaaatcccaaaaaaaaagtatccccatcgataattttgatgacattcttggtgagtttgaatctggtgaagtagaaaaacccaatattttactgccatccaaattaagggaaaatttaaattcttcgccgactagtgaatttaaatcgtcaataaagagagttaacggaaacgatgagtcaagtcatgatgccggtatttctaaaaaagtcaagattgatccagattcaagtactgataaatatttagaaatcgaatcatcaccgttaaaattacaaagcaggaaactgcgctacgcaaatgatgtacaggatttattggatgatgtggaaaattccccagtagtagccacaaagagacagaatgtacttcaagatacgttactagcaaatccaccatccgctcaaagtttggctgatgaagaagatgatgaagatagtgatgaagatattattctgaaaagaagaactatgagaagtgtgacaacaactagacgcgtgaatatagactcaagaagtaacccttcaacttcaccgtttgtcacagcacccggaacgccaatcggtattaaaggactaactccaagtaaatctttgcagagcaacaccgatgttgctacacttgcggttaatgtcaaaaaggaagatgtggtagatccggaaactgatactttccaaatgttttggttggattactgtgaagtgaacaacactttgattttatttggtaaggttaaactaaaggatgataattgtgtgtcagccatggttcaaatcaacggtctctgtagagagctatttttccttccaagagagggtaaaacacctaccgatatacacgaggaaataattccgttactgatggataaatatggactggataatatccgcgctaaacctcaaaaaatgaaatattcgtttgagcttcctgacattccatctgaaagtgattatttgaaagtcttacttccataccaaacaccgaagtccagtcgagacaccattccatcggatttatctagcgataccttttatcatgtttttggtgggaattccaatatttttgaaagttttgttattcaaaataggattatgggaccatgctggttagatataaagggagcagatttcaattcaattcgtaatgcttctcactgtgcggttgaagtttcggtagataagcctcagaatatcacgcctactacaacaaagacaatgcctaatctgagatgtctatctttatcgattcagacgttaatgaatcccaaggaaaataagcaagagattgtttcgataacgttatcagcatatagaaatatctcgttggattcaccgatacctgaaaatataaaaccagacgacttgtgtactttagtaaggccgcctcagtcaactagtttcccattaggtttagctgcactggcaaaacagaaactacccggtagagtcaggttgttcaacaacgaaaaggccatgctatcttgtttttgtgctatgttaaaagtggaagacccagatgttatcataggccatcgtttgcaaaatgtctacttagatgttttagctcatagaatgcatgatctcaacattccaacgttcagctctattggccgtcgtttaagaaggacttggcctgaaaaattcggtagaggaaattcgaatatgaaccatttttttattagtgacatttgctctggtaggctgatatgtgatatcgccaatgaaatgggtcaatcattaacacccaaatgtcaaagttgggatctttcagagatgtatcaagttacatgtgaaaaggagcataagccgttagatattgattatcaaaatccacaataccaaaatgatgtaaatagtatgacaatggccctacaagagaatattactaattgtatgatttctgctgaggtgtcttatagaattcaattattaaccttgactaaacagttgacaaatttggctggtaatgcatgggcccaaacgctaggcggtacaagagctggtagaaatgagtatatcttactacatgaattttcaagaaatggttttattgttcctgacaaagaaggcaatagaagtagagctcagaaacaaagacaaaatgaagaaaatgctgatgcaccagttaattctaaaaaggcaaaatatcagggtggtttagtttttgaacctgagaaaggtcttcataagaattacgttttagtcatggactttaattctttgtatccatctattatccaggaatttaatatatgttttaccaccgttgatagaaataaggaagatatcgatgagttaccaagcgtacctccttcagaggtggatcagggtgttttaccaaggttattagctaatctggtggatcgtcgacgtgaagttaagaaggtgatgaaaactgaaactgatccccataagcgagttcaatgtgatattcgtcaacaagctctaaaattgactgccaattctatgtatggttgtttgggttatgttaacagtagattttacgcaaagccgctcgccatgttagtcactaataagggtcgtgagattttaatgaatacaagacaactagctgaaagtatgaatcttcttgtagtttatggtgatacagattcggtcatgatagataccggttgtgataattatgcggatgcaattaaaattggcttgggatttaaaaggctagtaaatgagcgctatagattattggagattgatattgataatgtttttaagaagttactattacatgccaagaaaaagtacgctgctttgactgtaaatttggacaaaaatggtaatggaactactgttctagaagttaaagggttggacatgaagcgtcgtgaattttgtccactttcgagggacgtttctatacatgttttaaacaccatcctgtcagataaggacccagaagaagcattgcaagaagtgtatgattacttagaagacatcagaataaaagtggaaaccaataacattagaattgataaatataagatcaatatgaagctttcaaaagatcccaaggcctacccaggtggtaaaaacatgcctgcagtccaagtagctctaagaatgcgtaaggctggtagagttgttaaagctggctctgtcatcacttttgtgatcacaaagcaggatgaaatagacaatgcagcggatacgccggctctttctgtggctgaacgtgcccatgcattgaatgaggtaatgattaaaagtaacaatttgatacctgatccacaatattatctcgagaaacaaatattcgcgccggtagaaaggttgttagaaagaattgatagcttcaacgtggtgcgtttgagtgaagcgcttggtttagatagtaaaaagtattttagaagagagggcggtaataacaatggagaagatattaataatttgcaacccttagaaacaacaattacagacgttgaaaggtttaaggatactgtaacattagaattaagttgcccatcatgcgataaaaggtttccatttggtggtattgtatcttcaaattactatcgcgtgtcatataatggtttacagtgcaagcattgtgagcaactttttactcctcttcaattaactagccaaatagagcattctataagggcacacatttccttatattacgcagggtggttacagtgtgatgacagcacatgcggtatagttacaagacaagtctccgtttttggtaagcgttgtttgaatgacggctgcacgggtgtcatgagatacaaatacagtgacaagcaattgtacaatcaacttttatatttcgattctttattcgattgtgaaaaaaataaaaagcaagaattgaagccaatatatctacccgatgatctcgactaccccaaggaacagctgacagaatcatctattaaggctttaacagaacaaaacagagaactaatggaaaccggccggagcgttgttcaaaaatatttgaacgattgtggacgtcgctacgttgatatgactagcatatttgatttcatgctaaattag

SEQ ID NO: 9456 - DNA, 4407 bp, Artificial Sequence
  Description of Artificial Sequence: Synthetic polynucleotide
atgtcttctaaaagtgaaaaattagaaaaattgagaaagttacaagccgctagaaatggtacatccatcgatgattacgaaggtgacgaaagtgatggtgacagaatatacgacgaaatcgacgaaaaagaatacagggccagaaagcgccaggaattgttgcatgacgattttgttgtagatgacgatggtgtaggctacgtcgatcgtggtgtcgaagaagattggagggaagttgataacagtagtagtgatgaagacactggaaaccttgctagcaaggattctaaaaggaagaagaatataaaaagggagaaagaccaccagattacagatatgttaagaactcaacattccaaatctacattgttggcacatgcaaaaaaatcccaaaaaaaaagtatccccatcgataattttgatgacattcttggtgagtttgaatctggtgaagtagaaaaacccaatattttattaccatccaaattaagggaaaatttaaattcttctccgactagtgaatttaaatcttctataaagagagttaacggaaacgatgagagcagtcatgatgccggtatttctaaaaaagtcaagattgatccagattctagtactgataaatatttagaaatcgaatcttctccgttaaaattacaaagcaggaaattgcgctacgcaaatgatgtacaggatttattggatgatgtggaaaattccccagtagtagccacaaagagacagaatgtacttcaagatacgttattggcaaatccaccatccgctcaaagtttggctgatgaagaagatgatgaagatagtgatgaagatattattttgaaaagaagaactatgagaagtgtgacaacaactagacgcgtgaatatagacagtagaagtaacccttccacttctccgtttgtcacagcacccggaacgccaatcggtattaaaggattaactccaagtaaatctttgcagagcaacaccgatgttgctacacttgcggttaatgtcaaaaaggaagatgtggtagatccggaaactgatactttccaaatgttttggttggattactgtgaagtgaacaacactttgattttatttggtaaggttaaattgaaggatgataattgtgtgtctgccatggttcaaatcaacggtctctgtagagagttatttttccttccaagagagggtaaaacacctaccgatatacacgaggaaataattccgttattgatggataaatatggattagataatatccgcgctaaacctcaaaaaatgaaatattcttttgagcttcctgacattccatctgaaagtgattatttgaaagtcttacttccataccaaacaccgaagtccagtagagacaccattccaagtgatttatctagcgataccttttatcatgtttttggtgggaattccaatatttttgaaagttttgttattcaaaataggattatgggaccatgctggttagatataaagggagcagatttcaattctattcgtaatgcttctcactgtgcggttgaagtttctgtagataagcctcagaatatcacgcctactacaacaaagacaatgcctaatttaagatgtttgtctttatccattcagacgttaatgaatcccaaggaaaataagcaagagattgtttctataacgttaagtgcatatagaaatatctctttggattctccgatacctgaaaatataaaaccagacgacttgtgtactttagtaaggccgcctcagtctactagtttcccattaggtttagctgcattggcaaaacagaaattgcccggtagagtcaggttgttcaacaacgaaaaggccatgctttcttgtttttgtgctatgttaaaagtggaagacccagatgttatcataggccatcgtttgcaaaatgtctacttagatgttttagctcatagaatgcatgatctcaacattccaacgttcagctctattggccgtcgtttaagaaggacttggcctgaaaaattcggtagaggaaatagtaatatgaaccatttttttattagtgacatttgctctggtaggttgatatgtgatatcgccaatgaaatgggtcaatctttaacacccaaatgtcaaagttgggatctttctgagatgtatcaagttacatgtgaaaaggagcataagccgttagatattgattatcaaaatccacaataccaaaatgatgtaaatagtatgacaatggccttgcaagagaatattactaattgtatgatttctgctgaggtgtcttatagaattcaattattaaccttgactaaacagttgacaaatttggctggtaatgcatgggcccaaacgttgggcggtacaagagctggtagaaatgagtatatcttattacatgaattttccagaaatggttttattgttcctgacaaagaaggcaatagaagtagagctcagaaacaaagacaaaatgaagaaaatgctgatgcaccagttaattctaaaaaggcaaaatatcagggtggtttagtttttgaacctgagaaaggtcttcataagaattacgttttagtcatggactttaattctttgtatccatctattatccaggaatttaatatatgttttaccaccgttgatagaaataaggaagatatcgatgagttaccaagcgtacctccttctgaggtggatcagggtgttttaccaaggttattagctaatttggtggatcgtcgtcgtgaagttaagaaggtgatgaaaactgaaactgatccccataagagagttcaatgtgatattcgtcaacaagctttgaaattgactgccaattctatgtatggttgtttgggttatgttaacagtagattttacgcaaagccgctcgccatgttagtcactaataagggtcgtgagattttaatgaatacaagacaattggctgaaagtatgaatcttcttgtagtttatggtgatacagattctgtcatgatagataccggttgtgataattatgcggatgcaattaaaattggcttgggatttaaaaggttagtaaatgagcgctatagattattggagattgatattgataatgtttttaagaagttattattacatgccaagaaaaagtacgctgctttgactgtaaatttggacaaaaatggtaatggaactactgttttggaagttaaagggttggacatgaagcgtcgtgaattttgtccactttctagggacgtttctatacatgttttaaacaccatcttaagtgataaggacccagaagaagcattgcaagaagtgtatgattacttagaagacatcagaataaaagtggaaaccaataacattagaattgataaatataagatcaatatgaagctttctaaagatcccaaggcctacccaggtggtaaaaacatgcctgcagtccaagtagctttgagaatgcgtaaggctggtagagttgttaaagctggctctgtcatcacttttgtgatcacaaagcaggatgaaatagacaatgcagcggatacgccggctctttctgtggctgaacgtgcccatgcattgaatgaggtaatgattaaaagtaacaatttgatacctgatccacaatattatctcgagaaacaaatattcgcgccggtagaaaggttgttagaaagaattgatagcttcaacgtggtgcgtttgagtgaagcgcttggtttagatagtaaaaagtattttagaagagagggcggtaataacaatggagaagatattaataatttgcaacccttagaaacaacaattacagacgttgaaaggtttaaggatactgtaacattagaattaagttgcccaagttgcgataaaaggtttccatttggtggtattgtatcttccaattactatcgcgtgtcttataatggtttacagtgcaagcattgtgagcaactttttactcctcttcaattaactagccaaatagagcattctataagggcacacatttccttatattacgcagggtggttacagtgtgatgacagcacatgcggtatagttacaagacaagtctccgtttttggtaagcgttgtttgaatgacggctgcacgggtgtcatgagatacaaatacagtgacaagcaattgtacaatcaacttttatatttcgattctttattcgattgtgaaaaaaataaaaagcaagaattgaagccaatatatttacccgatgatctcgactaccccaaggaacagttgacagaaagctctattaaggctttaacagaacaaaacagagaattgatggaaaccggcagaagcgttgttcaaaaatatttgaacgattgtggacgtcgctacgttgatatgactagcatatttgatttcatgttgaattga

SEQ ID NO: 9457 - DNA, 2142 bp, Saccharomyces cerevisiae
atggtcactaacaatggagatggtgagcaccttgggatccgaagaaacggaaatttaaggcatccttccaataatatgaaaattcccagaagggctcaatcaacagttctcaattcaaacccattttatagtaggaagtattctatgtctaccttaacgccgagggatatatgtcgaagcgttgattctagagtatttgtggatatgtcttctcccaattttcagactctggaggatccccacagagatgagattataaacagtgtacggcttaactacttgaacagtagcaaaagaagttccgtctctcatggaaatgaagcaatccctagggttaatccgactaagaattcttcagcaagtaccatagctgcagcaaatgttgatagtgatgacgatgagactaacctgagtagcgctggaggcgacataacgcatgatatttacaagttggttaaagcagaggatcctaaacggctcagacgccctcggtccatggaaaatgtaacacctaaaattgagcaccatactaaattgtcatcagcaagtggtttaaatgtccccggtggcttcagaagggaatttattgtcaacaaaaaaaggcaagaacatcaattaaatgattccgctagctcagacttcacttcgcatgaaagcgattcgattaaccagtcatctccatcttctaaccaagatatcgataaggtcccctttttaacaagaaactttttggaatttctatacgtgtttggacattttgctggtgaatccttcgaggatgattttatccctgatagctcaaacatgatgatacgcggagaagatgaaaggagtgcattgctgtctcggcctgaccatatgaaagtattaccttcagccaaaggtacgacttcgacaaagaaggtttttttgatattgcttaaatctttcattggaactggcgttttatttttacctaatgcctttcataatggtggtttgtttttctcagtaagtatgctggccttttttggaatttattcatactggtgttactacatattggtgcaggccaaatcttcatgcggtgtatcctcctttggtgatattggtttaaaactgtatggaccttggatgagaataataattcttttctccctagtaataactcaagttggattctctggagcttatatgatatttactgcaaaaaatttacaagcttttcttgataacgtattccatgtgggcgtcctacctttatcttacctgatggtctttcaaacgatcatttttattccactttcgtttattagaaacatttcgaaattgtcactaccatctttactagcaaattttttcatcatggctggtttagtcattgtcattatttttacagccaaaaggttgttttttgacctgatggggaccccagcaatgggtgtcgtctatggcttaaatgcagaccgttggacgctgtttatcgggacggcaatatttgctttcgaaggaatcgggttaattattcctgttcaagactcaatgagaaatcctgaaaaatttcctttagtacttgctttggtgattctaacggcaaccatacttttcatttccatagctacattgggatatttggcatacggctcaaatgttcaaacggttatactgttgaacttacctcaaagtaacatttttgtaaacttaatccagctgttctattccatcgcaattatgttgtccacacctttgcagttgtttccagctattaaaattattgaaaataagttttttccaaagttcactaaaatatatgtcaagcacgatgatctaacaacaagagtcgaattacgtcctaattcaggaaagctgaactggaaaattaaatggctgaagaactttattcgttctataatcgtaatcattgttgtatcaattgcttactttgggtctgataatttagacaagttcgtttcagttataggatccctcgcctgtattcctttggtatatatatacccatcgatgctgcatttacggggcaatagccttccagagactaaaggggaattttggagattcaaaccaatgttagataccattttaattttcttcggtattgcaagcatgctttatacgtcttaccagagtatattcggtgtctag

SEQ ID NO: 9458 - DNA, 2142 bp, Artificial Sequence
  Description of Artificial Sequence: Synthetic polynucleotide
atggtcactaacaatggagatggtgagcaccttgggatcagaagaaacggaaatttaaggcatccttccaataatatgaaaattcccagaagggctcaaagtacagttctcaatagcaacccattttatagtaggaagtattctatgtctaccttaacgccgagggatatatgtcgtagcgttgattctagagtatttgtggatatgtcttctcccaattttcagactttagaggatccccacagagatgagattataaacagtgtacgtcttaactacttgaacagtagcaaaagaagttccgtctctcatggaaatgaagcaatccctagggttaatccgactaagaattcttctgcaagtaccatagctgcagcaaatgttgatagtgatgacgatgagactaacttgagtagcgctggaggcgacataacgcatgatatttacaagttggttaaagcagaggatcctaaaaggctcagacgccctagatccatggaaaatgtaacacctaaaattgagcaccatactaaattgagttctgcaagtggtttaaatgtccccggtggcttcagaagggaatttattgtcaacaaaaaaaggcaagaacatcaattaaatgattccgctagcagtgacttcacttctcatgaaagcgattctattaaccagtcttctccatcttctaaccaagatatcgataaggtcccctttttaacaagaaactttttggaatttttgtacgtgtttggacattttgctggtgaatccttcgaggatgattttatccctgatagcagtaacatgatgatacgcggagaagatgaaaggagtgcattgttatctagacctgaccatatgaaagtattaccttctgccaaaggtacgacttctacaaagaaggtttttttgatattgcttaaatctttcattggaactggcgttttatttttacctaatgcctttcataatggtggtttgtttttcagtgtaagtatgttggccttttttggaatttattcttactggtgttactacatattggtgcaggccaaatctagttgcggtgtatcctcctttggtgatattggtttaaaactttatggaccttggatgagaataataattcttttctccttagtaataactcaagttggattctctggagcttatatgatatttactgcaaaaaatttacaagcttttcttgataacgtattccatgtgggcgtcttacctttatcttacttgatggtctttcaaacgatcatttttattccactttcttttattagaaacatttccaaattgtccttgccatctttattggcaaattttttcatcatggctggtttagtcattgtcattatttttacagccaaaaggttgttttttgacttgatggggaccccagcaatgggtgtcgtctatggcttaaatgcagaccgttggacgttgtttatcgggacggcaatatttgctttcgaaggaatcgggttaattattcctgttcaagactccatgagaaatcctgaaaaatttcctttagtacttgctttggtgattttaacggcaaccatacttttcatttccatagctacattgggatatttggcatacggcagtaatgttcaaacggttatattattgaacttacctcaaagtaacatttttgtaaacttaatccagttattctattccatcgcaattatgttgtccacacctttgcagttgtttccagctattaaaattattgaaaataagttttttccaaagttcactaaaatatatgtcaagcacgatgatttaacaacaagagtcgaattacgtcctaattctggaaagttgaactggaaaattaaatggttaaagaactttattcgttctataatcgtaatcattgttgtatctattgcttactttgggtctgataatttagacaagttcgtttctgttataggatccctcgcctgtattcctttggtatatatatacccaagcatgttgcatttaagaggcaatagccttccagagactaaaggggaattttggagattcaaaccaatgttagataccattttaattttcttcggtattgcaagcatgctttatacgtcttaccagagtatattcggtgtctga

SEQ ID NO: 9459 - DNA, 705 bp, Saccharomyces cerevisiae
atggtaaatttttatgatgacgtggatgagtcgaaatcacacggtgaattcccattaatacccgttgtgcttcaaaattcatcagagctatcagtcagaactatacctaccgggaatgaaatcattgagtcagtgcacctgaccaaatggttacggaaatatagaaacgcacttgccagtcaactagatcgttatgagaaggggtggcaatccaagatagccaactttaggctccaggtccaacatgttatcaattattcgagaaagaatattttcaatgttgattctgaaaataaacatactgtggtcccggggtcattaatagcgttaggtgccttttttgctggaagcatagctgtgaacaggtctaattggggagctaaaaggttgatatttggtcacaaatctagtatcctcgagaaactatgtacgtcattgccatctaggatattgttaccatgggtattggcagcagctacattcaagtattgggctccacagacatcacagaatttggtcaatgccactgaaaatgatttactgccagctgatttcgtcaagtcatatcacaatacttggaaacgaatttatgaggaaggatatgttgccaagaaatgtgatttaaaacgtcaaatcgatcagacattacaaaaaaatataaggtatgcaagggaacagctttatgaaaagttggagcaagcatga

SEQ ID NO: 9460 - DNA, 705 bp, Artificial Sequence
  Description of Artificial Sequence: Synthetic polynucleotide
atggtaaatttttatgatgacgtggatgagagtaaatctcacggtgaattcccattaatacccgttgtgcttcaaaattcttctgagttaagtgtcagaactatacctaccgggaatgaaatcattgagtctgtgcacttgaccaaatggttaagaaaatatagaaacgcacttgccagtcaattggatcgttatgagaaggggtggcaatccaagatagccaactttaggctccaggtccaacatgttatcaattattctagaaagaatattttcaatgttgattctgaaaataaacatactgtggtcccggggtctttaatagcgttaggtgccttttttgctggaagcatagctgtgaacaggtctaattggggagctaaaaggttgatatttggtcacaaatctagtatcctcgagaaattatgtacgtctttgccatctaggatattgttaccatgggtattggcagcagctacattcaagtattgggctccacagacatctcagaatttggtcaatgccactgaaaatgatttattaccagctgatttcgtcaagagttatcacaatacttggaaaagaatttatgaggaaggatatgttgccaagaaatgtgatttaaaacgtcaaatcgatcagacattacaaaaaaatataaggtatgcaagggaacagctttatgaaaagttggagcaagcatga

SEQ ID NO: 9461 - DNA, 717 bp, Saccharomyces cerevisiae
atgacatctaaagttggtgaatatgaggacgttccagaggatgagtcccgcctcacagaagagaacgtatccgtacctgaagaagaagtagaagacgaagacgaggaagaagacgacgatgatgatcatatatatatcaatgaagaaacagaatctggtcgcgaaaaggtcttggtatcacatgccccacaagaacgtatcgttccacctttgaatttctgtcccgttgaaagatacctctatagatctggtcagccttcacctgtgaatttcccctttttactaaacctaaaactgaaaacaattatatggctgtctaacgaagaacctcaagataccctcctagagttttgtgatactcatagaataaacttacaattcgcagccatcaacccggatgccggtgaggacgataatccatgggacggtctcactgaacattctataattaatgtactacaaacgatcgtcactcaagagaattatcccttgctagtgtgctgtggtatgggaagacataggactgggacagtcattggatgtctcagaagaataatgggttggaacttagccagtgtatccgaagaatatagacgctttactggtagcagaggtggtagaattcttgtagagttgcttatagaagctttcgacactaatttagtaaaaatagacaaaaataaagcaccaagttggttactgacagctttggagtag

SEQ ID NO: 9462 - DNA, 717 bp, Artificial Sequence
  Description of Artificial Sequence: Synthetic polynucleotide
atgacatctaaagttggtgaatatgaggacgttccagaggatgagtcccgcctcacagaagagaacgtatccgtacctgaagaagaagtagaagacgaagacgaggaagaagacgacgatgatgatcatatatatatcaatgaagaaacagaatctggtcgcgaaaaggtcttggtatctcatgccccacaagaacgtatcgttccacctttgaatttctgtcccgttgaaagatacctctatagatctggtcagccttctcctgtgaatttcccctttttattaaacttgaaattgaaaacaattatatggttatctaacgaagaacctcaagataccctcttggagttttgtgatactcatagaataaacttacaattcgcagccatcaacccggatgccggtgaggacgataatccatgggacggtctcactgaacattctataattaatgtattacaaacgatcgtcactcaagagaattatcccttgttggtgtgctgtggtatgggaagacataggactgggacagtcattggatgtctcagaagaataatgggttggaacttagccagtgtatccgaagaatatagacgctttactggtagcagaggtggtagaattcttgtagagttgcttatagaagctttcgacactaatttagtaaaaatagacaaaaataaagcaccaagttggttattaacagctttggagtga

SEQ ID NO: 9463 - DNA, 969 bp, Saccharomyces cerevisiae
atgcctttgaacaagtcgaacataagagagtacaagctagtcgtcgttggtggtggtggtgttggtaaatctgctttgaccatacaattgacccaatcgcactttgtagatgaatacgatcccacaattgaggattcatacaggaagcaagtggtgattgatgatgaagtgtctatattggacattttggatactgcagggcaggaagaatactctgctatgagggaacaatacatgcgcaacggcgaaggattcctattggtttactctataacgtccaagtcgtctcttgatgagcttatgacttactatcaacagatattgagagtcaaagataccgactatgttccaattgtggttgttggtaacaaatctgatttagaaaacgaaaaacaggtctcttaccaggacgggttgaacatggcaaagcaaatgaacgctcctttcttggagacatctgctaagcaagcaatcaacgtggaagaggcgttttacactctagcacgtttagttagagacgaaggcggcaagtacaacaagactttgacggaaaatgacaactccaagcaaacttctcaagatacaaaagggagcggtgccaactctgtgcctagaaatagcggtggccacaggaagatgagcaatgctgccaacggtaaaaatgtgaacagtagcacaactgtcgtgaatgccaggaatgcaagcatagagagtaagacagggttggcaggcaaccaggcgacaaatggtaagacacaaactgatcgcaccaatatagacaattccacgggccaagctggtcaggccaacgctcaaagcgctaatacggttaataatcgtgtaaataataatagtaaggccggtcaagtttcaaatgctaaacaggctaggaagcagcaagctgcacccggcggtaacaccagtgaagcctccaagagcggatcgggtggctgttgtattataagttaa

SEQ ID NO: 9464 - DNA, 969 bp, Artificial Sequence
  Description of Artificial Sequence: Synthetic polynucleotide
atgcctttgaacaagtctaacataagagagtacaagttggtcgtcgttggtggtggtggtgttggtaaatctgctttgaccatacaattgacccaatctcactttgtagatgaatacgatcccacaattgaggattcttacaggaagcaagtggtgattgatgatgaagtgtctatattggacattttggatactgcagggcaggaagaatactctgctatgagggaacaatacatgcgcaacggcgaaggattcttgttggtttactctataacgtccaagtcttctcttgatgagcttatgacttactatcaacagatattgagagtcaaagataccgactatgttccaattgtggttgttggtaacaaatctgatttagaaaacgaaaaacaggtctcttaccaggacgggttgaacatggcaaagcaaatgaacgctcctttcttggagacatctgctaagcaagcaatcaacgtggaagaggcgttttacactttggcacgtttagttagagacgaaggcggcaagtacaacaagactttgacggaaaatgacaactccaagcaaacttctcaagatacaaaagggagcggtgccaactctgtgcctagaaatagcggtggccacaggaagatgagcaatgctgccaacggtaaaaatgtgaacagtagcacaactgtcgtgaatgccaggaatgcaagcatagagagtaagacagggttggcaggcaaccaggcgacaaatggtaagacacaaactgatcgcaccaatatagacaattccacgggccaagctggtcaggccaacgctcaaagcgctaatacggttaataatcgtgtaaataataatagtaaggccggtcaagtttctaatgctaaacaggctaggaagcagcaagctgcacccggcggtaacaccagtgaagcctccaagagcggatctggtggctgttgtattataagttga

SEQ ID NO: 9465 - DNA, 123 bp, Saccharomyces cerevisiae
atgacagcaaagacgaaacaaagctggaataaggggatctgggaaaacgggaaacaaggttcacatcagcaaacatttctaccgaaaatctgggtaaacatttatagtaccccaacatcttaa

SEQ ID NO: 9466 - DNA, 123 bp, Artificial Sequence
  Description of Artificial Sequence: Synthetic polynucleotide
atgacagcaaagacgaaacaaagctggaataaggggatctgggaaaacgggaaacaaggttctcatcagcaaacatttttaccgaaaatctgggtaaacatttatagtaccccaacatcttga

SEQ ID NO: 9467 - DNA, 993 bp, Saccharomyces cerevisiae
atgagttcaccagcgaacctattccctggattaaacgacataactgacgtgctggaggaattcccactggccacctccagatatttaacattactacacgaaatagatgcaaaatgtgtgcattctatgccgaatttgaacgagaggatagataagttcttgaagaaagacttcaataaagatcaccaaacacaagtaagactgctcaataatatcaacaagatttatgaagaactgatgccatcgctggaggagaaaatgcatgtctcatccattatgctggataatctagacagattgacgtcccggttagaattggcgtatgaagtcgcaatcaagaacacagaaattcctagaggtttaagactgggtgtggacaaccatccagcaatgcacctccatcatgaactaatggaaaaaatagagagcaaatcaaacagcaaatcgtcgcaggcactgaagagcgaatcaagaagagaagccatggctgccaacaggaggcagggcgaacattactccgccagcacacaccaacaagacgactcaaagaacgacgcaaactacggaggcagcaggcacgagagccaagaccacactggtaacaacacaaactcaagaaaaagagccaacgctgccaataccaacaacgccgatccagagaccaaaaaacgcaagaggagagttgccaccacagccgtttcaccaagcactatcagcacggcaactgccgtcaataatggcaggataggtacatctacagcgtccaggggagttagcagcgtcggaaacagcaacaacagcaggatatcaagaccaaaaaccaacgactacggcgaaccgctctactgctactgtaaccaagtggcatacggggaaatggtggggtgtgatggcgcagactgtgagctagaatggttccatttgccatgtattggactcgaaactctacctaagggcaagtggtattgcgacgactgcaaaaaaaaactgtga

SEQ ID NO: 9468 - DNA, 993 bp, Artificial Sequence
  Description of Artificial Sequence: Synthetic polynucleotide
atgagttctccagcgaacttgttccctggattaaacgacataactgacgtgttggaggaattcccattggccacctccagatatttaacattattacacgaaatagatgcaaaatgtgtgcattctatgccgaatttgaacgagaggatagataagttcttgaagaaagacttcaataaagatcaccaaacacaagtaagattactcaataatatcaacaagatttatgaagaattgatgccatctttggaggagaaaatgcatgtctcttccattatgcttgataatttggacagattgacgtccagattagaattggcgtatgaagtcgcaatcaagaacacagaaattcctagaggtttaagattaggtgtggacaaccatccagcaatgcacctccatcatgaattgatggaaaaaatagagagcaaaagtaacagcaaaagctctcaggcattgaagagcgaatctagaagagaagccatggctgccaacaggaggcagggcgaacattactccgccagcacacaccaacaagacgactccaagaacgacgcaaactacggaggcagcaggcacgagagccaagaccacactggtaacaacacaaactctagaaaaagagccaacgctgccaataccaacaacgccgatccagagaccaaaaaacgcaagaggagagttgccaccacagccgtttctccaagcactatcagcacggcaactgccgtcaataatggcaggataggtacatctacagcgtccaggggagttagcagcgtcggaaacagcaacaacagcaggatatctagaccaaaaaccaacgactacggcgaaccgctctactgctactgtaaccaagtggcatacggggaaatggtggggtgtgatggcgcagactgtgagttagaatggttccatttgccatgtattggactcgaaactttacctaagggcaagtggtattgcgacgactgcaaaaaaaaattatga

SEQ ID NO: 9469 - DNA, 573 bp, Saccharomyces cerevisiae
atgtcctctgtccaatccaagatcttatcccaagctccaagtgagttggaattacaagtcgccaagaccttcatcgatctagaaagctcctctccagaactaaaggctgacttgagaccattgcaaatcaaatctatcagagaaattgatgtcaccggtggtaagaaagcactagtcctttttgtcccagttccagctttgtctgcataccataaggtccaaaccaaattgacccgtgaattggaaaagaaattccctgaccgtcatgttattttcttggctgaaagaagaatcttgccaaaaccatctagaacatctagacaagtccaaaagagaccaagatccagaactttgactgctgttcacgacaaggttttggaagacatggttttcccaactgaaattgtcggtaaaagagttagatatttggttggtggtaacaagatccaaaaggttttgttagactccaaggatgttcaacaaatcgactacaagttggaatctttccaagctgtctacaacaagttgactggcaaacaaattgtttttgaaattccaagccagaccaactaa

SEQ ID NO: 9470 - DNA, 573 bp, Artificial Sequence
  Description of Artificial Sequence: Synthetic polynucleotide
atgtcctctgtccaatccaagatcttatcccaagctccaagtgagttggaattacaagtcgccaagaccttcatcgatttggaaagctcctctccagaattgaaggctgacttgagaccattgcaaatcaaatctatcagagaaattgatgtcaccggtggtaagaaagcattggtcctttttgtcccagttccagctttgtctgcataccataaggtccaaaccaaattgacccgtgaattggaaaagaaattccctgaccgtcatgttattttcttggctgaaagaagaatcttgccaaaaccatctagaacatctagacaagtccaaaagagaccaagatccagaactttgactgctgttcacgacaaggttttggaagacatggttttcccaactgaaattgtcggtaaaagagttagatatttggttggtggtaacaagatccaaaaggttttgttagactccaaggatgttcaacaaatcgactacaagttggaatctttccaagctgtctacaacaagttgactggcaaacaaattgtttttgaaattccaagccagaccaactga

SEQ ID NO: 9471 - DNA, 1929 bp, Saccharomyces cerevisiae
atggtgcacattactctgggtcaagcgatatgggtgtcagttaagccgataatcaagatttatttgattataggagtcggctttctgatggctaaaatgggaattcttacggttgaagcaacaagaattatttctgatatcgtgctaacagttttactaccctctctgtcattcaacaagattgtcgctaatattgaagataaagacatcaaatctgtgggaattatctgtctgtctgccctcctaatatttggttctgggttcttttttgcatacgttgttaggctattcctgcctgttcctaaacaatggtacggtggtattcttgccggtggtatgtttccaaatataagtgatttaccaattgcatatttacaatctatggaccaagggcttgtattttcggaagaagaaggtaacaaaggtgtggctaacgtcattatatttctgacaatgtttctaatttgcattttcaatttgggggggtttcgactgattgaaagcgatttcgagtacaacgacgatgaaagcgccgttagggtttcagaaacgacaaagacacagcccgcagtaagtgcaaacacaactaatacagatactagcgagcgtttcttctcaaacgaacaacagcttttcaacaataagtacaccgctcgcgatagtctcactgaagctataggtacaaagggtgaaaacgcagacgtaccaccaatttcaaggagatcaacaaatagtatagctcccctgtcactaccagacacttcttcgaattcaaagattacaaaaccagttcaggtgaaggcaagaaatactattgcgtgcactcaaagcgaagagtcacaggcaactcgtggttcaaatccattagatagccaatcatctgcttcaacaatacattcttataatacgtcagagagttatgagagtagcatagatactatgagagcacgtagaaccgcgagccagccgagagcttacaatactaccacactcctagaagagaactgtttagatgaaaaatgcccaaaaaatatgtctatggcggcattggaacctatccgctccattgatatgcgtgcattaccttctcaaaatatacaccatcttatcagagagtactccaacgttgaccagtatggtcatcaaaggaggaattccagtttacgcggcgctgatatgaatgatgtgcattcaattagctcaaattccactttacagactataaaaactgctaacctaaccaggatcttaacatcagatgccactgtaagtaaaaaggatattgaaacatccggcgaatcattaccacagtggatgagaaaattttcattaactccattacttgtgtttttcctaaagaattgtttgagaccgtgctctatggccgtgatcatcgccctaactgttgcatttatcccatgggtcaaggctttgttcgtgactaccgctaatactcctcacataagccaagctcctgacaatgcaccaccattaagctttttcatggattttacaggttatgtcggtgccgcatgtgttccatttgggttgatattattaggagcaactttaggaagattaaagattggcaacctttatcctggattttggaaagccgctgtgacactcgtcattttgagacaatgtgtcatgccaatttttggtgtcctatggtgtgatcggttagtgaaagctggatgggttaattggcaagatgatagaatgctactatttgttatagcaatcagctggaacttgccaacgatgactacccttatatatttcaccgccagttttacgccgccagaaacaactgcgccaatccaaatggagtgtgtttcatttttcttaatgctgcaatacccgctaatggttgttagcttgccatttttagtgtcttactttctgaaagtacagatgaacctttag

SEQ ID NO: 9472 - DNA, 1929 bp, Artificial Sequence
  Description of Artificial Sequence: Synthetic polynucleotide
atggtgcacattactttaggtcaagcgatatgggtgtctgttaagccgataatcaagatttatttgattataggagtcggctttttgatggctaaaatgggaattcttacggttgaagcaacaagaattatttctgatatcgtgttaacagttttattgccctctttatctttcaacaagattgtcgctaatattgaagataaagacatcaaatctgtgggaattatctgtttgtctgccctcttaatatttggttctgggttcttttttgcatacgttgttaggttgttcttacctgttcctaaacaatggtacggtggtattcttgccggtggtatgtttccaaatataagtgatttaccaattgcatatttacaatctatggaccaagggcttgtattttctgaagaagaaggtaacaaaggtgtggctaacgtcattatatttttaacaatgtttttgatttgcattttcaatttgggggggtttagattgattgaaagcgatttcgagtacaacgacgatgaaagcgccgttagggtttctgaaacgacaaagacacagcccgcagtaagtgcaaacacaactaatacagatactagcgagcgtttcttcagtaacgaacaacagcttttcaacaataagtacaccgctcgcgatagtctcactgaagctataggtacaaagggtgaaaacgcagacgtaccaccaatttctaggagatctacaaatagtatagctcccttaagtttaccagacacttcttccaattctaagattacaaaaccagttcaggtgaaggcaagaaatactattgcgtgcactcaaagcgaagagagccaggcaactcgtggtagtaatccattagatagccaatcttctgcttctacaatacattcttataatacgagtgagagttatgagagtagcatagatactatgagagcacgtagaaccgcgagccagccgagagcttacaatactaccacactcttggaagagaactgtttagatgaaaaatgcccaaaaaatatgtctatggcggcattggaacctatccgctccattgatatgcgtgcattaccttctcaaaatatacaccatcttatcagagagtactccaacgttgaccagtatggtcatcaaaggaggaattccagtttacgcggcgctgatatgaatgatgtgcattctattagcagtaattccactttacagactataaaaactgctaacttgaccaggatcttaacatctgatgccactgtaagtaaaaaggatattgaaacatccggcgaatctttaccacagtggatgagaaaattttctttaactccattacttgtgtttttcttgaagaattgtttgagaccgtgctctatggccgtgatcatcgccttaactgttgcatttatcccatgggtcaaggctttgttcgtgactaccgctaatactcctcacataagccaagctcctgacaatgcaccaccattaagctttttcatggattttacaggttatgtcggtgccgcatgtgttccatttgggttgatattattaggagcaactttaggaagattaaagattggcaacctttatcctggattttggaaagccgctgtgacactcgtcattttgagacaatgtgtcatgccaatttttggtgtcttgtggtgtgatagattagtgaaagctggatgggttaattggcaagatgatagaatgttactttttgttatagcaatcagctggaacttgccaacgatgactacccttatatatttcaccgccagttttacgccgccagaaacaactgcgccaatccaaatggagtgtgtttcttttttcttaatgttacaatacccgttaatggttgttagcttgccatttttagtgtcttactttttgaaagtacagatgaacctttga

SEQ ID NO: 9473 - DNA, 1764 bp, Saccharomyces cerevisiae
atgaatagtcaaggttacgatgaaagctcttcctctactgctgctactagcggtcctacttctggagacccacgaatgggtaagaaacaacggtttatgaatctcataagaaccacaaaggatgtttatattcctaacctgacgtcatccatttctcaaaagacaatggatggcatcaggagcactacgaattccttcgaaggttataatgacttgcctatggaattgccacataataccacgataacatattttccaacgtataccacaactaatttggttgaccctgacggtttgagtgcgcctcggaaagattttgaaactactgtcagatgtgctgtttcttatccaggaaatcctacaagcaggagaaataggtggttgctttctctttgtaaacaatatcttagaactggaacggcggaggccgatgttgcacctgttgttccccctcatctcgaagaggattctggagatttaaacgactcccaatcaagtatagaaagttctttgtcttcaaagagcgaaaataggtattcacatatgggcatccaagaggaagatgttctgaatgagagaattcaaggattcctgtccaaaaaagttcctaatactccagtggtggttgacctattgcccaaagataagctcagaggggatacggcttccttttttggtaccacggactcttatggtaatttactaatcaaggcagaaacagattttttaccgtccaagattaatattacattagatacccctatagaaggccatgcagatcccatatctgaaacatttccggccaattatgtctcgccctacggtattggtttaatcagtgatattgacgacaccatcaagcatactggcgttacgggtgacaggagatcgatgtttcgtaatgttttcatccatgatgttcaatcgtgggtaatagatggtgttcctctttggtacaaaactttacatgatgtcgcagacgttgatttcttttatgtttctaattcacccatccaaacttttactcttttgaaacaatatatttgcgccaattttcctccgggtccaatttttttgaaacaatactctggtaatttcttttccactatcatgacttcaagtgcgaatagaaaaattcagccgattgcaaatatcttaaaggattttcccaaaaaaaaatttattttggtcggtgattctggtgaacatgacttagaagcgtataccactacggctttacaatttccgaaccagattctggctatttatataagatgttgctctaattccatgagtgatgtcccatcgcatgatgaagaagttatgaatgaagtgaacaatatcatcgaattacaacaacggcccatgcaaatgaccaagtctaccgtacgtaccaggagaagaccaccaccacctcccattccttccactcaaaagccatcgttgacagaagagcaaaccgaaagtataagaatgtcacgccgtaataaagatgagaacaatgctaaaagagttgccccaccaccgttgccgaacagacagttacctaacttagacgctaatacttactatgtaccatcctcacaaaatgactatggcatgtatggtgctttcatggataaaaaagcagatgaatggaagagaagagtaatggactcaattcaaaaattgagcaatcaagacaccacattgatgttcttttcggatccggcattaagtttggaagacagtattcgcagaattagggagaagtattcaaactaa

SEQ ID NO: 9474 - DNA, 1764 bp, Artificial Sequence
  Description of Artificial Sequence: Synthetic polynucleotide
atgaatagtcaaggttacgatgaaagctcttcctctactgctgctactagcggtcctacttctggagacccaagaatgggtaagaaacaaagatttatgaatctcataagaaccacaaaggatgtttatattcctaacttgacgtcttccatttctcaaaagacaatggatggcatcaggagcactacgaattccttcgaaggttataatgacttgcctatggaattgccacataataccacgataacatattttccaacgtataccacaactaatttggttgaccctgacggtttgagtgcgcctagaaaagattttgaaactactgtcagatgtgctgtttcttatccaggaaatcctacaagcaggagaaataggtggttgctttctctttgtaaacaatatcttagaactggaacggcggaggccgatgttgcacctgttgttccccctcatctcgaagaggattctggagatttaaacgactcccaaagtagtatagaaagttctttgtcttccaagagcgaaaataggtattctcatatgggcatccaagaggaagatgttttgaatgagagaattcaaggattcttatccaaaaaagttcctaatactccagtggtggttgacttgttgcccaaagataagctcagaggggatacggcttccttttttggtaccacggactcttatggtaatttattgatcaaggcagaaacagattttttaccgtccaagattaatattacattagatacccctatagaaggccatgcagatcccatatctgaaacatttccggccaattatgtctctccctacggtattggtttaatcagtgatattgacgacaccatcaagcatactggcgttacgggtgacaggagaagtatgtttcgtaatgttttcatccatgatgttcaaagttgggtaatagatggtgttcctctttggtacaaaactttacatgatgtcgcagacgttgatttcttttatgtttctaattctcccatccaaacttttactcttttgaaacaatatatttgcgccaattttcctccgggtccaatttttttgaaacaatactctggtaatttcttttccactatcatgacttctagtgcgaatagaaaaattcagccgattgcaaatatcttaaaggattttcccaaaaaaaaatttattttggtcggtgattctggtgaacatgacttagaagcgtataccactacggctttacaatttccgaaccagattttggctatttatataagatgttgctctaattccatgagtgatgtcccatctcatgatgaagaagttatgaatgaagtgaacaatatcatcgaattacaacaaagacccatgcaaatgaccaagtctaccgtacgtaccaggagaagaccaccaccacctcccattccttccactcaaaagccatctttgacagaagagcaaaccgaaagtataagaatgtctcgccgtaataaagatgagaacaatgctaaaagagttgccccaccaccgttgccgaacagacagttacctaacttagacgctaatacttactatgtaccatcctctcaaaatgactatggcatgtatggtgctttcatggataaaaaagcagatgaatggaagagaagagtaatggacagtattcaaaaattgagcaatcaagacaccacattgatgttcttttctgatccggcattaagtttggaagacagtattcgcagaattagggagaagtattccaactga

SEQ ID NO: 9475 - DNA, 663 bp, Saccharomyces cerevisiae
atggataaacatacagcagctattccaacattaactatcaaagtagtcttactcggagaatctgctgtcgggaagtcctcaatagtcctcaggtttgtatctgacgattttaaagagagcaaagaacctactattggtgccgcatttttaacaaagagaattacaagggatggcaaggtcattaaatttgaaatatgggatacggcaggccaggagagatttgctcctttagcgcctatgtactacagaaatgctcaagctgctttggtagtttttgatgttactaatgaagggtctttttataaggctcaaaactgggtcgaagaactacacgagaaggtaggacatgatatcgttattgccttggtggggaacaaaatggatttgctgaataatgatgacgagaatgaaaatagggctatgaaagcaccagctgtacaaaatctctgtgaaagagagaacctcttatatttcgaagcaagcgctaagactggtgagaatatttaccagatatttcaaacattaggcgaaaaagtaccatgtcctgaacaaaatacacgacaaagctctactcatgatcgcacaattaccgataatcaacgaatcgatctcgaatcaacgactgtagaaagtactagggagactgggggttgtaactgctaa

SEQ ID NO: 9476 - DNA, 663 bp, Artificial Sequence
  Description of Artificial Sequence: Synthetic polynucleotide
atggataaacatacagcagctattccaacattaactatcaaagtagtcttactcggagaatctgctgtcgggaagtcctccatagtcctcaggtttgtatctgacgattttaaagagagcaaagaacctactattggtgccgcatttttaacaaagagaattacaagggatggcaaggtcattaaatttgaaatatgggatacggcaggccaggagagatttgctcctttagcgcctatgtactacagaaatgctcaagctgctttggtagtttttgatgttactaatgaagggtctttttataaggctcaaaactgggtcgaagaattgcacgagaaggtaggacatgatatcgttattgccttggtggggaacaaaatggatttgttgaataatgatgacgagaatgaaaatagggctatgaaagcaccagctgtacaaaatctctgtgaaagagagaacctcttatatttcgaagcaagcgctaagactggtgagaatatttaccagatatttcaaacattaggcgaaaaagtaccatgtcctgaacaaaatacaagacaaagctctactcatgatcgcacaattaccgataatcaaagaatcgatctcgaaagtacgactgtagaaagtactagggagactgggggttgtaactgctga

SEQ ID NO: 9477 - DNA, 1203 bp, Saccharomyces cerevisiae
atggacgagaatgaatttgataatcaaagggagaataaagctgtagctcgagtgatcatatcatttcttaagtatgaagagtatgccctaaaggaaatctacaatttgagagtgaaaaaatgggcatcgatctcagatcgtcaaaaagacatggtaccaaactatacaaaatatttagctaatctgaaagccgcaattatagaaaatggcaagttctttagaagtgtcgccgaatatgccctgcaatcaataagttttgagccaggagaaatcgtacaaccaaacgatttagatatgagtaaaacatgctctttacttacgcaagtttatagggagtggtccgcagaggccatttctgaacgtaattgcttaaattcgaggcttgtaccgtttttgaagaccctatcacccccaaaagccgacattttgataccgggttgcggcacaggacgccttctcgtggatcttagcagaatgggctataattgtgaaggtaacgaattttcatatcacatgctgcttgtatctcaatacatgttgaatgcaggattactccaaaaccaaattattatctatcccttcatacactgtttctcccactggaaaaaaattgaagatcagttgtctcccattaaggtgccggacatagaagcgtggtcttcaaataaaggtatggggtccatgtcgatatgtgctggctcgtttgttgattgttatggtcgtaatcaaggcacaaaaatctcgtcacattatacattttcgcgaaggatgcaactaagtagagcaaaagctgaaaactccaaagacgttgtagtaacaaacttttttatagatacgggatccaacatcttggattatttggatactattggccacgtcttgaagccaggcggaatctggtgcaatttcggcccattgctttatcattttgaaaatgaccatggggttgaaactacctacgaagttaacccttactctgggtttcaagataaaatcaatgactatacaccactgatgggtttagagctttctagcgatgatatcataagcattgccacaaatcatctggactttgaattaatacggagagagtcaggaatactttgtgggtatggccgctacgcgggtccagaaagttgcgccatgcctggatacatgtgccactattggatcctgaagtcgaaccccaccaatgaatcataa

SEQ ID NO: 9478 - DNA, 1203 bp, Artificial Sequence
  Description of Artificial Sequence: Synthetic polynucleotide
atggacgagaatgaatttgataatcaaagggagaataaagctgtagctagagtgatcatatcctttcttaagtatgaagagtatgccttgaaggaaatctacaatttgagagtgaaaaaatgggcatctatcagtgatcgtcaaaaagacatggtaccaaactatacaaaatatttagctaatttgaaagccgcaattatagaaaatggcaagttctttagaagtgtcgccgaatatgccttgcaaagtataagttttgagccaggagaaatcgtacaaccaaacgatttagatatgagtaaaacatgctctttacttacgcaagtttatagggagtggtccgcagaggccatttctgaacgtaattgcttaaattctaggcttgtaccgtttttgaagaccttatctcccccaaaagccgacattttgataccgggttgcggcacaggacgccttctcgtggatcttagcagaatgggctataattgtgaaggtaacgaattttcttatcacatgttacttgtatctcaatacatgttgaatgcaggattactccaaaaccaaattattatctatcccttcatacactgtttctcccactggaaaaaaattgaagatcagttgtctcccattaaggtgccggacatagaagcgtggtcttccaataaaggtatggggtccatgagtatatgtgctggctcttttgttgattgttatggtcgtaatcaaggcacaaaaatctcttctcattatacattttctagaaggatgcaattgagtagagcaaaagctgaaaactccaaagacgttgtagtaacaaacttttttatagatacgggatccaacatcttggattatttggatactattggccacgtcttgaagccaggcggaatctggtgcaatttcggcccattgctttatcattttgaaaatgaccatggggttgaaactacctacgaagttaacccttactctgggtttcaagataaaatcaatgactatacaccattaatgggtttagagctttctagcgatgatatcataagcattgccacaaatcatttggactttgaattaataagaagagagagtggaatactttgtgggtatggccgctacgcgggtccagaaagttgcgccatgcctggatacatgtgccactattggatcttgaagtctaaccccaccaatgaaagttga

SEQ ID NO: 9479 - DNA, 3723 bp, Saccharomyces cerevisiae
atgcccccaaactccaagagtaagagaagaaagaacaaatccaagcaacacaacaagaaaaatggcaactctgatcctgaacaaagtataaatcctacacagctagtacctcgaatggagccagagttgtatcatacagaatcggattacccaacttcaagagtaataaaaagagcgcccaatggcgatgtcatcgtggaaccaataaatacagacgatgataagaaagaacgtacggcgaacttgactcataataaggatagtatggattctgcttcttccttagcttttactctagattctcactgggaatcattatcgccagaagaaaagaaaactattctacgaatcgaaaaggaggaagtatttaatgtcataaggaattaccaggacgatcatagttgtagttgctctgtttgtggacgccgccatttagcaatggatcaagaaatggagcgtatatacaatacactttatgccatggataaggataaagaccctgaaaccaatcctatcaaattccacttaggcataataaaggagctacagatttccaaaaatcaacagcaaaatgatttatcttctacaaagggcgaagttgtaaaaaatttcctttcgtcaagtacagttggctctttgaaagaggaagtgctgcatttcaaacaaaagcaactttcaaaacaagaacaagcgcataatgaaacggcggataatacctcattacttgaagaaaatttgaacaatatacacatcaacaaaacttctagtgaaatttccgcaaatttcaattctgtgagcgatgaagagttgcaacaaaaatattccaacttcacaaaaacgtttatttcatcacatcccaaaatagcagaggagtatgtacaaaaaatgatgatgtatccgaatattagagcactgactgatgacttaatgaatagtaacgggcaaggatttcttaatgcaatcgaagactttgtgcgagatggccagatacaagcatcgaaaaaagacgacagcatcactgaagatgaagcatctagtacagatttgactgatccaaaggagtttaccacaatgctgcatagtggaaaaccacttacagaagatgagtatgccgacctccagcgcaacattgctgaaaggatgactaatgcgtacgataccgcaagtaagaaattcaaagatgtgtcacaattagagaaggagctatttacacgattcatgtcggggagagacaaaaaatctttcagagagttgataattcaatcctttaaaaataaatttgatggggaattaggtccatccgttctagcagccactttaagctcgtgcttttcatctcaatcgaaggatacttcgttagatactgattctatatatgaagatgaagatgaggaagactatgatgactattcagaatatgctgaagatagcgaagaggtttctgagtatgaaggaatagaggcagtcgaaaaaccagagcatgatgaaaaaagcaacgggatacgtgaaacattacatttaagttatgaccacgatcataaacgacagaaccaccctcaccatcactaccatagtaccagtacccacagcgaagatgaactgagtgaagaagagtatatttccgatatagaattaccgcatgatcctcataagcactttcaccgcgatgatgatatattagatggggatgaagatgagccagaggaagaggatgaaaatgaaggcgatgacgaagaagatacttatgacagcggtcttgatgaaactgaccgtttagaagaaggtcggaaattgattcagatagccattacaaagttgcttcaaagtcgaataatggcttcttatcatgagaaacaggcagataataacagactaaaacttctacaagaactagaagaagaaaaaagaaagaaaagagagaaggaagaaaaaaagcagaaaaaaagagaaaaagagaaagaaaagaagaggctgcaacagttagctaaagaggaagaaaaacgaaaaagggaagaagagaaagaaaggctaaagaaggaattagaagagcgtgaaatgagaagacgagaggctcaaaggaaaaaggttgaagaagccaaacggaagaaagacgaggagagaaagcgtagattggaagagcagcagcggagagaagaaatgcaagaaaaacaacggaaacagaaagaggaactaaaacgcaagagggaagaagaaaagaaacgtattagagaacagaaaaggctagaacaagaaaagctacagaaagaaaaagaagaagaagagagacaaagattaattgcagaggatgcgctaagaaaacagaaattaaacgaagaacaaacatctgcgaacatactttccgccaaaccttttactgagaatggagttggcaaccctgtttcatctcaatcacatcccaacatgactaactaccaagaggataatagttgcagtatcaacgatgaaatacttaaaatggttaatagcgtggctgcatccaaaccagtttcacccacaggctttaacgttcatgatctacttcttccttcaactaacaaccagatgcctgctatggaacaatcacacttgccacagccaggtaatcaaaacaaccattttggaactacaactattccgaatgcgttagacttggctacaaaatcttctttacagactgaaaacaactatttaatgaactcacaaactctggaaaatacaagtctattgatgcataataattcatcgccaactaagctattgccaaatgactttggtttatcatcttggggtggtctgacaaatacaatgtccataaatcctacatgtaaaccaccggttattcaaacttcagaaatggaatcacaagcccataaatctagtcctcaagctacaatgccatcttttggactacctaatggtggtactcaccgtaaatcgtttaccgacgagttgaacactttaactagcatgctttcttcttccgggttcgcagatacatcactttcatcatcaggattccccccatcacagcgttctgtgtggaatgatcaaaaaagctcattttcgggaccgtcgactgcaggaaactttaacaacagcagtatacaaagcggtatgctgctcgcacctacattaggaagcgttgaatcgtttccaaatcgaacttctatctgggacagcagcaccactccgatgatgaataaatccgagctttccggtcgcaatataactagtactgcgcaagatagccctgcgttcatggcatcaaatatctggtctagtaacagtcaatacaattcaccatatttgactagcaacgtccttcaatcccctcaaatttcgagtggagtggatgaaagccacattctggatagcatctacaatacttatttagctatttccccacaagatagtttaaacccctacattgctatcgggacactattccaaaatttagtaggacttaacttggattactcgacgtttatcaacaaattgataagcatgcaaggagcctacaattgcgaattctttactgataacaatggatccattacccacgttcgatttgcgagacaaactcccgctggccactcaaaggggttgctgaatcaactctttagtggattgaacgatccaactgctacaccatttacgtcaaggcctcatacctccacaagggctagttttccaattgcctcttcaactacgcaaacgtcttaa

SEQ ID NO: 9480 - DNA, 3723 bp, Artificial Sequence
  Description of Artificial Sequence: Synthetic polynucleotide
atgcccccaaactccaagagtaagagaagaaagaacaaatccaagcaacacaacaagaaaaatggcaactctgatcctgaacaaagtataaatcctacacagttggtacctagaatggagccagagttgtatcatacagaaagtgattacccaacttccagagtaataaaaagagcgcccaatggcgatgtcatcgtggaaccaataaatacagacgatgataagaaagaacgtacggcgaacttgactcataataaggatagtatggattctgcttcttccttagcttttactttagattctcactgggaatctttatctccagaagaaaagaaaactattttaagaatcgaaaaggaggaagtatttaatgtcataaggaattaccaggacgatcatagttgtagttgctctgtttgtggacgccgccatttagcaatggatcaagaaatggagcgtatatacaatacactttatgccatggataaggataaagaccctgaaaccaatcctatcaaattccacttaggcataataaaggagttacagatttccaaaaatcaacagcaaaatgatttatcttctacaaagggcgaagttgtaaaaaatttcctttcttccagtacagttggctctttgaaagaggaagtgttacatttcaaacaaaagcaactttctaaacaagaacaagcgcataatgaaacggcggataataccagtttacttgaagaaaatttgaacaatatacacatcaacaaaacttctagtgaaatttccgcaaatttcaattctgtgagcgatgaagagttgcaacaaaaatattccaacttcacaaaaacgtttatttcttctcatcccaaaatagcagaggagtatgtacaaaaaatgatgatgtatccgaatattagagcattgactgatgacttaatgaatagtaacgggcaaggatttcttaatgcaatcgaagactttgtgagagatggccagatacaagcatccaaaaaagacgacagcatcactgaagatgaagcatctagtacagatttgactgatccaaaggagtttaccacaatgttgcatagtggaaaaccacttacagaagatgagtatgccgacctccagcgcaacattgctgaaaggatgactaatgcgtacgataccgcaagtaagaaattcaaagatgtgagtcaattagagaaggagttatttacaagattcatgagtgggagagacaaaaaatctttcagagagttgataattcaatcctttaaaaataaatttgatggggaattaggtccatccgttttagcagccactttaagctcctgcttttcttctcaatccaaggatacttctttagatactgattctatatatgaagatgaagatgaggaagactatgatgactattctgaatatgctgaagatagcgaagaggtttctgagtatgaaggaatagaggcagtcgaaaaaccagagcatgatgaaaaaagcaacgggatacgtgaaacattacatttaagttatgaccacgatcataaaagacagaaccaccctcaccatcactaccatagtaccagtacccacagcgaagatgaattaagtgaagaagagtatatttccgatatagaattaccgcatgatcctcataagcactttcaccgcgatgatgatatattagatggggatgaagatgagccagaggaagaggatgaaaatgaaggcgatgacgaagaagatacttatgacagcggtcttgatgaaactgaccgtttagaagaaggtagaaaattgattcagatagccattacaaagttgcttcaaagtagaataatggcttcttatcatgagaaacaggcagataataacagattgaaacttttacaagaattggaagaagaaaaaagaaagaaaagagagaaggaagaaaaaaagcagaaaaaaagagaaaaagagaaagaaaagaagaggttacaacagttagctaaagaggaagaaaaaagaaaaagggaagaagagaaagaaaggttaaagaaggaattagaagagcgtgaaatgagaagaagagaggctcaaaggaaaaaggttgaagaagccaaaagaaagaaagacgaggagagaaagcgtagattggaagagcagcagagaagagaagaaatgcaagaaaaacaaagaaaacagaaagaggaattgaaacgcaagagggaagaagaaaagaaacgtattagagaacagaaaaggttagaacaagaaaagttacagaaagaaaaagaagaagaagagagacaaagattaattgcagaggatgcgttaagaaaacagaaattaaacgaagaacaaacatctgcgaacatactttccgccaaaccttttactgagaatggagttggcaaccctgtttcttctcaatctcatcccaacatgactaactaccaagaggataatagttgcagtatcaacgatgaaatacttaaaatggttaatagcgtggctgcatccaaaccagtttctcccacaggctttaacgttcatgatttacttcttccttccactaacaaccagatgcctgctatggaacaatctcacttgccacagccaggtaatcaaaacaaccattttggaactacaactattccgaatgcgttagacttggctacaaaatcttctttacagactgaaaacaactatttaatgaactctcaaactttggaaaatacaagtttattgatgcataataattcttctccaactaagttgttgccaaatgactttggtttatcttcttggggtggtttaacaaatacaatgtccataaatcctacatgtaaaccaccggttattcaaacttctgaaatggaatctcaagcccataaatctagtcctcaagctacaatgccatcttttggattgcctaatggtggtactcaccgtaaaagttttaccgacgagttgaacactttaactagcatgctttcttcttccgggttcgcagatacatctctttcttcttctggattccccccatctcagcgttctgtgtggaatgatcaaaaaagctccttttctggaccgtctactgcaggaaactttaacaacagcagtatacaaagcggtatgttgctcgcacctacattaggaagcgttgaaagttttccaaatagaacttctatctgggacagcagcaccactccgatgatgaataaatccgagctttccggtcgcaatataactagtactgcgcaagatagccctgcgttcatggcatctaatatctggtctagtaacagtcaatacaattctccatatttgactagcaacgtccttcaatcccctcaaatttccagtggagtggatgaaagccacattttagatagcatctacaatacttatttagctatttccccacaagatagtttaaacccctacattgctatcgggacattgttccaaaatttagtaggacttaacttggattactctacgtttatcaacaaattgataagcatgcaaggagcctacaattgcgaattctttactgataacaatggatccattacccacgttagatttgcgagacaaactcccgctggccactccaaggggttgttgaatcaactctttagtggattgaacgatccaactgctacaccatttacgtctaggcctcatacctccacaagggctagttttccaattgcctcttctactacgcaaacgtcttga

SEQ ID NO: 9481 - DNA, 579 bp, Saccharomyces cerevisiae
atgtctgaaaaggccgttagaaggaaacttgttattattggtgatggtgcttgtggcaagacctctttactatatgtatttacattaggaaaattccctgaacaatatcatccgacagtgttcgagaattatgtcactgattgcagagttgacggaataaaagtgtccttaacgctctgggatacagcgggacaagaggaatatgaacgtttacgtccattctcatattcaaaagcagatataatattaattgggtttgctgtagacaattttgaatcactaattaacgcaaggacgaaatgggcggatgaggcattacgatattgtcctgacgcaccaatcgttcttgtaggcttgaaaaaagatttgaggcaagaagcccattttaaagagaatgctaccgatgaaatggttcccattgaagatgcaaaacaagttgcaagggccattggggccaagaaatacatggaatgtagtgcactgactggtgagggtgtggatgatgtctttgaagtagctacaagaaccagtttgcttatgaagaaggaaccaggggctaactgttgcataattttataa

SEQ ID NO: 9482 - DNA, 579 bp, Artificial Sequence
  Description of Artificial Sequence: Synthetic polynucleotide
atgtctgaaaaggccgttagaaggaaacttgttattattggtgatggtgcttgtggcaagacctctttattatatgtatttacattaggaaaattccctgaacaatatcatccgacagtgttcgagaattatgtcactgattgcagagttgacggaataaaagtgtccttaacgctctgggatacagcgggacaagaggaatatgaacgtttacgtccattctcttattctaaagcagatataatattaattgggtttgctgtagacaattttgaatctttgattaacgcaaggacgaaatgggcggatgaggcattaagatattgtcctgacgcaccaatcgttcttgtaggcttgaaaaaagatttgaggcaagaagcccattttaaagagaatgctaccgatgaaatggttcccattgaagatgcaaaacaagttgcaagggccattggggccaagaaatacatggaatgtagtgcattgactggtgagggtgtggatgatgtctttgaagtagctacaagaaccagtttgcttatgaagaaggaaccaggggctaactgttgcataattttatga

SEQ ID NO: 9483 - DNA, 4287 bp, Saccharomyces cerevisiae
atgtcaactgaaccggtaagcgcctctgataaatatcagaaaatttctcaactggaacatatcttaaaaagaccagacacttatatcggttctgttgaaactcaagagcagctgcaatggatatacgatgaagagaccgattgcatgattgaaaaaaatgtcacaattgtaccagggttgttcaaaatctttgatgaaatcttagtcaatgcggcagataataaagttcgtgatccatcgatgaaacgaatcgatgtaaacatacatgctgaggaacatactatagaagtgaaaaatgatggaaaaggtattcccatagagattcataacaaggagaatatttatattcctgaaatgatatttggtcatttgttgacatcatccaattatgatgatgatgagaagaaagtcactggtggtagaaacggttatggtgctaagctttgtaatatattttccactgaattcatattagaaactgcagatctaaatgttggccagaaatatgttcaaaaatgggaaaataacatgagcatttgccaccccccaaaaataacatcttacaagaagggtccatcatatacaaaggtgacatttaagccggatttaaccagattcggaatgaaagagctagataatgatatcttaggagtgatgcgaagaagagtttatgatatcaatggttctgttcgtgacattaatgtctatctgaatggcaagtccttaaagataagaaatttcaaaaattatgttgaactctacttgaaatcactcgaaaaaaaaagacaactagataacggtgaggacggtgccgctaagtctgatatcccgactattctttatgagagaataaacaacagatgggaagttgcttttgcggtttctgatatctcttttcaacaaatttcttttgtgaattccattgcaactaccatgggtggtacccatgtcaattacataacagaccaaattgtaaaaaaaatttcagaaattttgaagaaaaagaagaaaaaaagtgtgaagtcttttcagattaaaaataatatgttcattttcattaattgtttgattgagaatcctgcatttacctcacaaacaaaagagcaactgacaacaagagtcaaagattttgggtcccgttgtgagattcctcttgaatatattaataagattatgaaaactgatttggctacaagaatgtttgaaattgccgacgcaaatgaagaaaatgcgctaaagaagtctgatggtacaaggaaaagcagaattactaattaccctaaactggaagatgccaacaaagccggtacaaaagaaggctataaatgtactttagttctgacagaaggggattccgccttgtcattagctgttgcaggtttagctgttgttggtagagattattatggttgttatccacttcgtggtaaaatgctgaatgttagagaagctagtgctgatcagatactaaaaaacgcggaaattcaagccattaaaaaaattatggggttacaacatcgcaagaaatatgaagatacaaaatctttaagatatgggcatcttatgatcatgaccgatcaagatcatgatggttcgcatattaaaggtttaattataaactttttagaaagctcatttcctggtcttttggatatccaaggtttcttacttgaattcataactccgatcatcaaagtttccatcactaaaccaacaaaaaacactattgcattctacaatatgccggactatgaaaaatggagagaggaagaatcgcacaaatttacttggaagcagaagtattataaaggattagggacttctctagcacaagaagtccgagaatatttttcgaacttggacagacatttgaaaatattccattctttgcagggtaatgataaagattacattgatttagctttctccaagaaaaaggcagatgaccgtaaagaatggctgagacaatacgaacctggtactgttttagaccctactttaaaagagattccaattagcgacttcattaataaggaattaatccttttttctttggccgataatatacggtcgattcccaatgttttagatggatttaaacctggccaaagaaaagttctttatggttgtttcaaaaaaaatttaaagtcggaactgaaagtagctcaacttgcaccatacgtgagcgaatgtacggcatatcaccatggtgagcagtcattggcacaaactattattgggctagcccaaaactttgttgggtccaacaatatttacttgctattacctaacggtgctttcggtacaagagccactggtggtaaagatgcagcggcagcgagatatatctacacagaattgaacaaattaactcgtaagatatttcaccctgctgatgatccattatacaaatatatacaagaagatgagaaaacagtggagccagagtggtatttaccaattcttcctatgattcttgttaacggtgctgagggtattggcactggctggagtacttacattcctccattcaacccattggaaattataaagaatataagacatttaatgaacgacgaggagcttgagcaaatgcatccgtggtttaggggatggaccggtactattgaagaaattgagcctctgcgttacagaatgtacggtaggattgaacaaattggagataacgtcttagaaataactgagttgccagccagaacttggacatcgactataaaggagtacttacttttaggtttaagcggtaacgataaaataaaaccctggatcaaagatatggaggagcagcacgatgataacatcaaattcataatcacgctatcacctgaggaaatggctaaaacaaggaaaataggtttttatgaaagatttaaactaatttcgcctataagtttgatgaatatggtcgcatttgatcctcacgggaaaatcaagaagtacaattccgtgaatgaaatattaagcgaattttactacgtcagactagaatactatcaaaaaagaaaagaccatatgagcgaaaggttacagtgggaggtagagaaatactctttccaagtaaaatttattaaaatgattattgaaaaggagttaacagtcaccaataagcctaggaacgctattatccaagaacttgagaatttagggttccccagatttaataaggaaggtaaaccatattatggaagtcctaacgatgagatagctgaacaaattaacgacgtaaaaggcgcaacttctgatgaagaagatgaagaaagttcacacgaagatactgaaaatgttataaatggtcctgaagaactatatggcacatatgaatatttattaggaatgagaatatggtcattgaccaaggaaagatatcaaaagctgttgaaacaaaaacaagaaaaggagacagagttggaaaacttgttaaaactttccgcgaaagatatatggaacactgacttgaaggcttttgaggtgggatatcaagaatttttgcaacgagatgcagaagctcgcggtggtaatgttcccaataaagggagcaaaacgaaaggtaaaggaaaaagaaagcttgttgacgacgaagactacgacccatcaaaaaaaaacaagaaaagtactgctagaaagggcaaaaaaattaagttagaggataagaattttgaaaggattttgttagaacaaaaactagtaaccaaaagcaaggcgcctacaaagattaaaaaagagaaaacgccttctgtttcagaaacaaaaacagaagaagaagagaatgctccttcttccacgagttcttcttctattttcgacataaagaaagaagataaagatgagggcgaactgagtaagatttcgaacaagtttaaaaaaattagcacgatttttgacaaaatgggttctacttccgctacatcgaaggaaaatacaccagaacaggacgatgtagccactaaaaaaaatcaaacaaccgctaaaaaaacagctgtaaaacctaaattggccaagaagccagtcaggaaacaacaaaaagttgtggaactatctggtgaaagcgacctagaaattttagattcatacactgatcgggaagatagcaataaagatgaagatgatgctataccacaacgatcaaggagacaaagatcgtcgagagctgcgtcggttcctaagaaatcttacgttgaaactttagaattatctgacgacagtttcatcgaagatgatgaagaggaaaaccaaggatcagatgtttcgttcaatgaagaggattga

SEQ ID NO: 9484 - DNA, 4287 bp, Artificial Sequence
  Description of Artificial Sequence: Synthetic polynucleotide
atgtctactgaaccggtaagcgcctctgataaatatcagaaaatttctcaattggaacatatcttaaaaagaccagacacttatatcggttctgttgaaactcaagagcagttacaatggatatacgatgaagagaccgattgcatgattgaaaaaaatgtcacaattgtaccagggttgttcaaaatctttgatgaaatcttagtcaatgcggcagataataaagttcgtgatccaagcatgaaaagaatcgatgtaaacatacatgctgaggaacatactatagaagtgaaaaatgatggaaaaggtattcccatagagattcataacaaggagaatatttatattcctgaaatgatatttggtcatttgttgacatcttccaattatgatgatgatgagaagaaagtcactggtggtagaaacggttatggtgctaagctttgtaatatattttccactgaattcatattagaaactgcagatttgaatgttggccagaaatatgttcaaaaatgggaaaataacatgagcatttgccaccccccaaaaataacatcttacaagaagggtccatcttatacaaaggtgacatttaagccggatttaaccagattcggaatgaaagagttagataatgatatcttaggagtgatgagaagaagagtttatgatatcaatggttctgttcgtgacattaatgtctatttgaatggcaagtccttaaagataagaaatttcaaaaattatgttgaactctacttgaaatctctcgaaaaaaaaagacaattggataacggtgaggacggtgccgctaagtctgatatcccgactattctttatgagagaataaacaacagatgggaagttgcttttgcggtttctgatatctcttttcaacaaatttcttttgtgaattccattgcaactaccatgggtggtacccatgtcaattacataacagaccaaattgtaaaaaaaatttctgaaattttgaagaaaaagaagaaaaaaagtgtgaagtcttttcagattaaaaataatatgttcattttcattaattgtttgattgagaatcctgcatttacctctcaaacaaaagagcaattgacaacaagagtcaaagattttgggtcccgttgtgagattcctcttgaatatattaataagattatgaaaactgatttggctacaagaatgtttgaaattgccgacgcaaatgaagaaaatgcgttaaagaagtctgatggtacaaggaaaagcagaattactaattaccctaaattagaagatgccaacaaagccggtacaaaagaaggctataaatgtactttagttttgacagaaggggattccgccttgtctttagctgttgcaggtttagctgttgttggtagagattattatggttgttatccacttcgtggtaaaatgttgaatgttagagaagctagtgctgatcagatattgaaaaacgcggaaattcaagccattaaaaaaattatggggttacaacatcgcaagaaatatgaagatacaaaatctttaagatatgggcatcttatgatcatgaccgatcaagatcatgatggttctcatattaaaggtttaattataaactttttagaaagctcctttcctggtcttttggatatccaaggtttcttacttgaattcataactccgatcatcaaagtttccatcactaaaccaacaaaaaacactattgcattctacaatatgccggactatgaaaaatggagagaggaagaatctcacaaatttacttggaagcagaagtattataaaggattagggacttctttggcacaagaagtcagagaatatttttccaacttggacagacatttgaaaatattccattctttgcagggtaatgataaagattacattgatttagctttctccaagaaaaaggcagatgaccgtaaagaatggttgagacaatacgaacctggtactgttttagaccctactttaaaagagattccaattagcgacttcattaataaggaattaatccttttttctttggccgataatataaggtctattcccaatgttttagatggatttaaacctggccaaagaaaagttctttatggttgtttcaaaaaaaatttaaagtctgaattgaaagtagctcaacttgcaccatacgtgagcgaatgtacggcatatcaccatggtgagcagtctttggcacaaactattattgggttagcccaaaactttgttgggtccaacaatatttacttgttattacctaacggtgctttcggtacaagagccactggtggtaaagatgcagcggcagcgagatatatctacacagaattgaacaaattaactcgtaagatatttcaccctgctgatgatccattatacaaatatatacaagaagatgagaaaacagtggagccagagtggtatttaccaattcttcctatgattcttgttaacggtgctgagggtattggcactggctggagtacttacattcctccattcaacccattggaaattataaagaatataagacatttaatgaacgacgaggagcttgagcaaatgcatccgtggtttaggggatggaccggtactattgaagaaattgagcctttacgttacagaatgtacggtaggattgaacaaattggagataacgtcttagaaataactgagttgccagccagaacttggacatctactataaaggagtacttacttttaggtttaagcggtaacgataaaataaaaccctggatcaaagatatggaggagcagcacgatgataacatcaaattcataatcacgttatctcctgaggaaatggctaaaacaaggaaaataggtttttatgaaagatttaaattgatttctcctataagtttgatgaatatggtcgcatttgatcctcacgggaaaatcaagaagtacaattccgtgaatgaaatattaagcgaattttactacgtcagattagaatactatcaaaaaagaaaagaccatatgagcgaaaggttacagtgggaggtagagaaatactctttccaagtaaaatttattaaaatgattattgaaaaggagttaacagtcaccaataagcctaggaacgctattatccaagaacttgagaatttagggttccccagatttaataaggaaggtaaaccatattatggaagtcctaacgatgagatagctgaacaaattaacgacgtaaaaggcgcaacttctgatgaagaagatgaagaaagttctcacgaagatactgaaaatgttataaatggtcctgaagaattgtatggcacatatgaatatttattaggaatgagaatatggtctttgaccaaggaaagatatcaaaagttgttgaaacaaaaacaagaaaaggagacagagttggaaaacttgttaaaactttccgcgaaagatatatggaacactgacttgaaggcttttgaggtgggatatcaagaatttttgcaaagagatgcagaagctcgcggtggtaatgttcccaataaagggagcaaaacgaaaggtaaaggaaaaagaaagcttgttgacgacgaagactacgacccatctaaaaaaaacaagaaaagtactgctagaaagggcaaaaaaattaagttagaggataagaattttgaaaggattttgttagaacaaaaattagtaaccaaaagcaaggcgcctacaaagattaaaaaagagaaaacgccttctgtttctgaaacaaaaacagaagaagaagagaatgctccttcttccacgagttcttcttctattttcgacataaagaaagaagataaagatgagggcgaattaagtaagatttccaacaagtttaaaaaaattagcacgatttttgacaaaatgggttctacttccgctacatccaaggaaaatacaccagaacaggacgatgtagccactaaaaaaaatcaaacaaccgctaaaaaaacagctgtaaaacctaaattggccaagaagccagtcaggaaacaacaaaaagttgtggaattatctggtgaaagcgacttggaaattttagattcttacactgatagagaagatagcaataaagatgaagatgatgctataccacaaagaagtaggagacaaagatcttctagagctgcgtccgttcctaagaaatcttacgttgaaactttagaattatctgacgacagtttcatcgaagatgatgaagaggaaaaccaaggaagtgatgtttctttcaatgaagaggattga

SEQ ID NO: 9485 - DNA, 3537 bp, Saccharomyces cerevisiae
atgtctccaaactcgtcgaaaactcgaacggaccagataagctccatgcctggtattaatgaagccacgaaggtggaaagtaagaatgttgtgaaggatgctgttccaataaaatctgaagttgaaaccaatggtacatcaatagtaagagaaaaacaagatccatcgtacgttggttggaaacaagttggtggttgggaggaaaaggacgagttaacttccgaagaccttttagtggacgtaaacaaggacacttttttggggaaccttttaccagataaattctatggtgattggtatcatgaagtcgctattctcatcatcgctggtttatgttcctttgtgctgggctattttaaattctctctcgcgtccgtccttatcgtgatgctaaccacaggaatgttatatagaacttcgtccaaaaaatatagggaatcgttaagggatttagcccagaaagaacaaactgtagagaaaattactagtgattatgaatctgtcgaatggttaaacacctttttagataaatactggcccattatcgaaccttctgtctcccaacaaattgtcgatggtacaaatactgcattatctgaaaatgtggcaattccaaagtttataaaagccatctggctggatcaatttacgttaggtgtgaagcctccaagaattgatgccataaagacattccaaaatacaaaatctgatgtcgtagtcatggacgtatgtctatcattcactccacacgacatgtctgatcttgatgcaaaacaatgcaggaattacgtaaattccaatgtcgtattaaaggcaaagatattcggaatggacatacctgtttcagttgctgatattttttttcaagtttttgttagatttcgtttccaattgatgacaactttgcctcttgttgaaactataaatattcagttattggaagttcctgaagttgattttattagtcgtttattgggtaactccgtctttaattgggaaatcctggctattccaggcttaatgagattgattcaaaaaatggcatttaaatacttgagccctgttttactcccacctttctctttgcaacttaatataccacaacttctttccaagactggcttacctataggtgttttggaaatcaaagtcaaaaatgcccatggattaagaaaacttgtgggcatgatcaagaaaacagttgacccatacttgacatttgagctctctggtaaaatagtcggtaaaactaaggtttttaaaaattctgctaatcctgtttggaatgaatccatttacattctgttgcaatcttttactgatccacttacaatagccgtatatgacaaacgcgaaaccttaagcgacaaaaaaatgggtacagtaattttcaacttgaataagttacatgcaaatcactatcacaaaaatgaaaaggtacatttcctaagaaattctaaacctgtcggtgagttgacatttgatttgcgatttttccccactattgaaccaaaaaaattactgaacggtgatgaggagcctttaccggatatgaatacaggtatcaccaaaattactattcgcgaactcaagggactggatgaactaagtgacaaaaaattcgtctttgcagagttgtatgtcaatgcagaattggtgatgaccacaaagaaagagaaaagaactgcccatttgaaatggaactcagattattattctgtggtaacagaccgtagaaagactatctgtagatttgttttgaaggatcagagtggtaaagtaatttcatcttcggtacaaccattaaatcatttgatagatagaacagaagtcaataaagaatggattcctttaaggaatggaaagggagaattaaaagtcaccacttactggaggccggtagatatcgacctcggattgaaaagtgtaggatatactactcctatcggtatgttgagagtgtttatcaataaggctgaaaacttgagaaatccagatagcttaggaaagataagtccatacgccaaagtatccgtcaatggtgtggcaagaggtaggacaaatgaaagaatagagacattgaatcctatctggaaccaatcaatttatgtgtctgtcacatctcccttacaaaaagtctcaattgactgtttcggtatagatacaaatggcgatgatcataatctcgggagccttaatattcaaactcagaatatatatcataaagacaatgacgataaatataccatttttattgacaacgctccaagaactggcaacttaattggaaagaagggtgtaaaggggaccgttacgtattatttatcattttatccagttgttcctgttttaagcttggaagaggcgaaggaagttgacgagattaatgagaaaaaagataagctagaaaagcagaaaagtacactggatgacaaaaacatctcaaaggaggagaaagaaagaattaaaaaggaagagttcaggctcaccgaaaaatatgacatgtatagttacaaaatgaagcttgacctcgatgaattgctgcaatacaatgctggtgtactaggtgttactgtattaggcggggaactaccccagcctgggctctatgttcaaacattttttgattcctgtggttacgcagcgataactagtgcaaaaaatgctattaggaccattaaaacaggctggtcgggcgatttcatgataaaagagctggaatggtccgtgactacatttagggtaacaaagactaaagacgcgaataaggcggaaaattttatttgcgaagtcaacattccaacaattgaattggtgaggaactgttattacaaaccttccgtattaaatctaatagggaaaaagagtgccaaactattagttcaagtgtcatggttccccgtaactgccacggaattgcctcaatcagacttgataactaactctggtgatttgaaaatcaccgctaaaagtgctgaaaatctaattggtgttaataagaatggttattccgatccatatgtcgaattctttttgaatgaaaagagcacatcacccttctttaaaaccgcagttcaaaaaaagacactaaatcctacctggaacgaaagcaaaactatcgaagtttcaaatcgtgtcaatgactacttgacaattaacgtgaaagactacgaatccactaactccaataggagtattggaaaagccgttgttccattatctactattgatccagagagcgataccacctttaatataccgttagtgggaccaaagggagaagatggcggtgtgctacatcttgaatttgagtttgaaccccgctatactaccaatgtagtcaaacgtgaagccgggcttggaaattttgccacgaaaggattaggtacaggcatcaaagctggttctacagttttcgccttaggaaccaatgttgtaagcaccggattaggaacaattgataaagtaaaggccggagtctttggtggcaagaagtctacaaccactggggacaaaaaatccgaagagaagcaataa

SEQ ID NO: 9486 - DNA, 3537 bp, Artificial Sequence
  Description of Artificial Sequence: Synthetic polynucleotide
atgtctccaaactcttctaaaactagaacggaccagataagctccatgcctggtattaatgaagccacgaaggtggaaagtaagaatgttgtgaaggatgctgttccaataaaatctgaagttgaaaccaatggtacatctatagtaagagaaaaacaagatccatcttacgttggttggaaacaagttggtggttgggaggaaaaggacgagttaacttccgaagaccttttagtggacgtaaacaaggacacttttttggggaaccttttaccagataaattctatggtgattggtatcatgaagtcgctattctcatcatcgctggtttatgttcctttgtgttaggctattttaaattctctctcgcgtccgtccttatcgtgatgttgaccacaggaatgttatatagaacttcttccaaaaaatatagggaatctttaagggatttagcccagaaagaacaaactgtagagaaaattactagtgattatgaatctgtcgaatggttaaacacctttttagataaatactggcccattatcgaaccttctgtctcccaacaaattgtcgatggtacaaatactgcattatctgaaaatgtggcaattccaaagtttataaaagccatctggcttgatcaatttacgttaggtgtgaagcctccaagaattgatgccataaagacattccaaaatacaaaatctgatgtcgtagtcatggacgtatgtttatctttcactccacacgacatgtctgatcttgatgcaaaacaatgcaggaattacgtaaattccaatgtcgtattaaaggcaaagatattcggaatggacatacctgtttctgttgctgatattttttttcaagtttttgttagatttcgtttccaattgatgacaactttgcctcttgttgaaactataaatattcagttattggaagttcctgaagttgattttattagtcgtttattgggtaactccgtctttaattgggaaatcttggctattccaggcttaatgagattgattcaaaaaatggcatttaaatacttgagccctgttttactcccacctttctctttgcaacttaatataccacaacttctttccaagactggcttacctataggtgttttggaaatcaaagtcaaaaatgcccatggattaagaaaacttgtgggcatgatcaagaaaacagttgacccatacttgacatttgagctctctggtaaaatagtcggtaaaactaaggtttttaaaaattctgctaatcctgtttggaatgaatccatttacattttattgcaatcttttactgatccacttacaatagccgtatatgacaaacgcgaaaccttaagcgacaaaaaaatgggtacagtaattttcaacttgaataagttacatgcaaatcactatcacaaaaatgaaaaggtacatttcttaagaaattctaaacctgtcggtgagttgacatttgatttgagatttttccccactattgaaccaaaaaaattattaaacggtgatgaggagcctttaccggatatgaatacaggtatcaccaaaattactattcgcgaactcaagggattagatgaattaagtgacaaaaaattcgtctttgcagagttgtatgtcaatgcagaattggtgatgaccacaaagaaagagaaaagaactgcccatttgaaatggaacagtgattattattctgtggtaacagaccgtagaaagactatctgtagatttgttttgaaggatcagagtggtaaagtaatttcttcttctgtacaaccattaaatcatttgatagatagaacagaagtcaataaagaatggattcctttaaggaatggaaagggagaattaaaagtcaccacttactggaggccggtagatatcgacctcggattgaaaagtgtaggatatactactcctatcggtatgttgagagtgtttatcaataaggctgaaaacttgagaaatccagatagcttaggaaagataagtccatacgccaaagtatccgtcaatggtgtggcaagaggtaggacaaatgaaagaatagagacattgaatcctatctggaaccaatctatttatgtgtctgtcacatctcccttacaaaaagtctctattgactgtttcggtatagatacaaatggcgatgatcataatctcgggagccttaatattcaaactcagaatatatatcataaagacaatgacgataaatataccatttttattgacaacgctccaagaactggcaacttaattggaaagaagggtgtaaaggggaccgttacgtattatttatctttttatccagttgttcctgttttaagcttggaagaggcgaaggaagttgacgagattaatgagaaaaaagataagttggaaaagcagaaaagtacattagatgacaaaaacatctccaaggaggagaaagaaagaattaaaaaggaagagttcaggctcaccgaaaaatatgacatgtatagttacaaaatgaagcttgacctcgatgaattgttgcaatacaatgctggtgtattgggtgttactgtattaggcggggaattgccccagcctgggctctatgttcaaacattttttgattcctgtggttacgcagcgataactagtgcaaaaaatgctattaggaccattaaaacaggctggtctggcgatttcatgataaaagagttagaatggtccgtgactacatttagggtaacaaagactaaagacgcgaataaggcggaaaattttatttgcgaagtcaacattccaacaattgaattggtgaggaactgttattacaaaccttccgtattaaatttgatagggaaaaagagtgccaaattattagttcaagtgtcttggttccccgtaactgccacggaattgcctcaatctgacttgataactaactctggtgatttgaaaatcaccgctaaaagtgctgaaaatttaattggtgttaataagaatggttattccgatccatatgtcgaattctttttgaatgaaaagagcacatctcccttctttaaaaccgcagttcaaaaaaagacattaaatcctacctggaacgaaagcaaaactatcgaagtttctaatcgtgtcaatgactacttgacaattaacgtgaaagactacgaatccactaactccaataggagtattggaaaagccgttgttccattatctactattgatccagagagcgataccacctttaatataccgttagtgggaccaaagggagaagatggcggtgtgttacatcttgaatttgagtttgaaccccgctatactaccaatgtagtcaaacgtgaagccgggcttggaaattttgccacgaaaggattaggtacaggcatcaaagctggttctacagttttcgccttaggaaccaatgttgtaagcaccggattaggaacaattgataaagtaaaggccggagtctttggtggcaagaagtctacaaccactggggacaaaaaatccgaagagaagcaatga

SEQ ID NO: 9487 - DNA, 309 bp, Saccharomyces cerevisiae
atggcaggggatagtataagcgctgacggcactggcgtccatccagttgaactgtcggtgtattcagtattgtccaccgatttagacggactgtatcaatcgatcaatgaattacgcgagtcgcaagcactactcatccttatgcttcggaaggttcgcgataaacttcgaagagaaggtcaagtcctttatgacccagaaccattcaaaccaaccatggataaactggctgacttatctgcccgtgtgcgcattctctcacaaagatacgaggagcttcaggggaatgctagagccctcaacaactaa

SEQ ID NO: 9488 - DNA, 309 bp, Artificial Sequence
  Description of Artificial Sequence: Synthetic polynucleotide
atggcaggggatagtataagcgctgacggcactggcgtccatccagttgaattatctgtgtattctgtattgtccaccgatttagacggattgtatcaatccatcaatgaattacgcgagtctcaagcattgctcatccttatgcttagaaaggttcgcgataaacttagaagagaaggtcaagtcctttatgacccagaaccattcaaaccaaccatggataaattggctgacttatctgcccgtgtgcgcattctctctcaaagatacgaggagcttcaggggaatgctagagccctcaacaactga

SEQ ID NO: 9489 - DNA, 2493 bp, Saccharomyces cerevisiae
atggcaatcaagtcattggaatcgttccttttcgaaagaggtctagtaggatcctatgccattgaggctctgaataattgtaccctggatatagacgtcaaccattatgtttccagattgttgaccaataaaagagaacagtatttggatgccattggtggtttccctaccagtttaaaaatgtatttggaaagcgacttaaagatattcaaggatttcaatattacccctatttttgtctttaatggtggtttgacttacaaccaattagaggcatcgggccattttactgcagcatctgcttctgcgtcgatttcgtcaaccactacttccagcagcggtaccaatgccacaacaagatccaacacggaatccgttcttttgcagagaagtagaggctggacacaatggaacaacttgattagttcgaatcagaattcctatattgaccagcctattcaaccccaagagccattcagacataacaccacaattgactccaaagcttaccaaaacgatttgatcgcttattttattgagcatgggtatatgtaccaagtggctccttactcctcttggtttcaactagcatatttattgaatagcgcttatattgatgcgatctacggcccaactgattgtttgatgctagattgtgttgataggttcattttgggtatggaatttccaaataaagaatttcgattcattgacaggtcaagagtgatgaaggatttaggttgtacccatgaagagtttatcgatattgctatggctgtaggtaatgatttgcaaccaacaactttaccaccattgcaaatttatccagttcctcagctgtttgatattgctctagaaatggttttgaatacaggtacaaacttctatgcctatcaactatctacaaccttacaaaatgactccaaagagaatattcaaaactaccaaagaggtatttctgcattaagatacatgccagtcttgaaagatacaggtaaagttgaattatttgttcaagagatcgttgtttcagaggaggacagtgaaaagaataacaaggatggaaaaaagagtaatctttcctcaccatcttctgcgtcatctagtgcttctcctgctaccaccgtgactaagaacgctagtgaaaagttaacttatgaaaaatccagcactaaagaggttagaaaaccaagagatattcctaatgatgttcatgattttatcggccaaatgttacctcatgaatactatttctatagatccataggactggttactggaaaattatttgacgcaattgtcacaggagtttatcctgaagagcctccattgggcggaggatcttctacatcctacaagaaactggtttccaagtccgttgaaatcttcaagaataaagaaatcaatttattaactcaaccaattaacagatactatcagattaaacaaattaaacaagtcaagtggtatgcggcaaatgagcctaccactttgaccaacaggatgtcaccttctatgtttgaaactatcaaccacttaattgttaaaacagaaacgtctgatgaaaaggaattttctatctctgagttcattacaacaataaatggttctagcaatatggcgaaagattttatatctgaaaaagtcattttcccaaactccgtaccaatcgaatccaaattaaactcaccatttaatttattgtcgaccaatttcttaagattactagtactattggagttcttcacttttgatttcaaggaaaaactgctagagcctacgagatggggtgaggtattcttaaaattaaatgagctcaatattgacagtaagtatcacgaatcagttattatctttttggtatttttgaaatgcgatgtcttaaaacttgacgaagaagttcaaccaccggctccctcagccctatctcaagccactcttcgttcatatcctgaagaatcattgtacgtcctattgattacgcgtgtattaactttatttcaagtggaccaaaagccatcaaattaccacggaccaattgataagaaaactttgatctttagagatcatctttctttcataaaggaaaatttaaatgaactttttgaagccgttttgatctcatctttaacttctggcgagtttaatagattatcacttgataactttggttgggcaagaaagattgttagatatttaccgttcaaattagattccccaaatactataatggctatgatgtgggagtttttcttacaaaaatatcttcacaatggtaatgccaagaatgatgcattgtctttagttgctactgaattcaacacttacaaatccacaccaaatcttgatgaacagtttgtcgaatcccatagatttcttcttgaaatttcaaaagtcatgcaggagctaaatgctgcgaaattaatcgatgaaaacgtgtttaaattattcactaaagcagttgagtttactacaacagctctatctagctga

SEQ ID NO: 9490 - DNA, 2493 bp, Artificial Sequence
  Description of Artificial Sequence: Synthetic polynucleotide
atggcaatcaagtctttggaatctttccttttcgaaagaggtttagtaggatcctatgccattgaggctttgaataattgtaccttggatatagacgtcaaccattatgtttccagattgttgaccaataaaagagaacagtatttggatgccattggtggtttccctaccagtttaaaaatgtatttggaaagcgacttaaagatattcaaggatttcaatattacccctatttttgtctttaatggtggtttgacttacaaccaattagaggcatctggccattttactgcagcatctgcttctgcgtccatttcttccaccactacttccagcagcggtaccaatgccacaacaagatccaacacggaatccgttcttttgcagagaagtagaggctggacacaatggaacaacttgattagtagtaatcagaattcctatattgaccagcctattcaaccccaagagccattcagacataacaccacaattgactccaaagcttaccaaaacgatttgatcgcttattttattgagcatgggtatatgtaccaagtggctccttactcctcttggtttcaattggcatatttattgaatagcgcttatattgatgcgatctacggcccaactgattgtttgatgcttgattgtgttgataggttcattttgggtatggaatttccaaataaagaatttaggttcattgacaggagcagagtgatgaaggatttaggttgtacccatgaagagtttatcgatattgctatggctgtaggtaatgatttgcaaccaacaactttaccaccattgcaaatttatccagttcctcagttatttgatattgctttggaaatggttttgaatacaggtacaaacttctatgcctatcaattatctacaaccttacaaaatgactccaaagagaatattcaaaactaccaaagaggtatttctgcattaagatacatgccagtcttgaaagatacaggtaaagttgaattatttgttcaagagatcgttgtttctgaggaggacagtgaaaagaataacaaggatggaaaaaagagtaatctttcctctccatcttctgcgtcttctagtgcttctcctgctaccaccgtgactaagaacgctagtgaaaagttaacttatgaaaaatccagcactaaagaggttagaaaaccaagagatattcctaatgatgttcatgattttatcggccaaatgttacctcatgaatactatttctatagatccataggattggttactggaaaattatttgacgcaattgtcacaggagtttatcctgaagagcctccattgggcggaggatcttctacatcctacaagaaattggtttccaagtccgttgaaatcttcaagaataaagaaatcaatttattaactcaaccaattaacagatactatcagattaaacaaattaaacaagtcaagtggtatgcggcaaatgagcctaccactttgaccaacaggatgtctccttctatgtttgaaactatcaaccacttaattgttaaaacagaaacgtctgatgaaaaggaattttctatctctgagttcattacaacaataaatggttctagcaatatggcgaaagattttatatctgaaaaagtcattttcccaaactccgtaccaatcgaatccaaattaaactctccatttaatttattgtccaccaatttcttaagattattggtacttttggagttcttcacttttgatttcaaggaaaaattattggagcctacgagatggggtgaggtattcttaaaattaaatgagctcaatattgacagtaagtatcacgaatctgttattatctttttggtatttttgaaatgcgatgtcttaaaacttgacgaagaagttcaaccaccggctccctctgccttatctcaagccactcttcgttcttatcctgaagaatctttgtacgtcttattgattacgcgtgtattaactttatttcaagtggaccaaaagccatccaattaccacggaccaattgataagaaaactttgatctttagagatcatctttctttcataaaggaaaatttaaatgaactttttgaagccgttttgatctcttctttaacttctggcgagtttaatagattatctcttgataactttggttgggcaagaaagattgttagatatttaccgttcaaattagattccccaaatactataatggctatgatgtgggagtttttcttacaaaaatatcttcacaatggtaatgccaagaatgatgcattgtctttagttgctactgaattcaacacttacaaatccacaccaaatcttgatgaacagtttgtcgaatcccatagatttcttcttgaaatttccaaagtcatgcaggagttgaatgctgcgaaattaatcgatgaaaacgtgtttaaattattcactaaagcagttgagtttactacaacagctttatctagctga

SEQ ID NO: 9491 - DNA, 1050 bp, Saccharomyces cerevisiae
atgcccaagttggaacaatttgaaataaaaaaatactggcaaatcttctcgggtttgaaaccaatagagaataaggtaaaccatgaccaggttttaccaattctttataattccaaattagattcatcggttctaaacaagatttggtttttagctgatattgatgacgacgacaatttagactttgaggaatttgtaatttgcatgagattaatatttgatatggttaataaaaacattagctctgttccagatgaattgcctgattggttgattccagggagtaaggtgaatctaatcaaagaaagaaagaagcgcaagcaaatagaaaacgcagacttgcctccaaagaaggaaatcaaagtagattggtacatgtctccagatgatttgaatcaatatgaaaaaatttataatagctgtgcaaaactaaccgatggtactattacattcaacgaactgtcaacaaaactttccacaaaattttttaacatcagtaagacagatttaaataaggtttggagtttaattaacccacaaaatttgccatcaattgatagagatcctactttttattttattcactgtttaagacaaagaaatgatttgggtgctgaaattccagcaagtttaccaaattctctggcggaggtgtgcaataaaaaacaactgagctatgatttacggtcctctcaacctcctacaaagagaaaagaagaagctaacgaagtggacaatctgcgtgacaatgggcagaactcgagttccgatagcagtggcagtaacgtgctttcaaatgaagacagtataaagcaaaaatatgcttctctgacagatgatcaagttgcgaacatgagagaacaattagaaggccttttgaactacaaaaagagtgaaaaaactcaaggaggctcaaaactttctaagcggattaacatcaggtcgataactgatgacttggataacattgaacagcaggttgaagtattggagaattacttgaacaataagagacacgaattgcaagcattacaagcagaaatcaattga

SEQ ID NO: 9492 - DNA, 1050 bp, Artificial Sequence
  Description of Artificial Sequence: Synthetic polynucleotide
atgcccaagttggaacaatttgaaataaaaaaatactggcaaatcttctctggtttgaaaccaatagagaataaggtaaaccatgaccaggttttaccaattctttataattccaaattagattcttctgttttgaacaagatttggtttttagctgatattgatgacgacgacaatttagactttgaggaatttgtaatttgcatgagattaatatttgatatggttaataaaaacattagctctgttccagatgaattgcctgattggttgattccagggagtaaggtgaatttgatcaaagaaagaaagaagcgcaagcaaatagaaaacgcagacttgcctccaaagaaggaaatcaaagtagattggtacatgtctccagatgatttgaatcaatatgaaaaaatttataatagctgtgcaaaattgaccgatggtactattacattcaacgaattatctacaaaactttccacaaaattttttaacatcagtaagacagatttaaataaggtttggagtttaattaacccacaaaatttgccatctattgatagagatcctactttttattttattcactgtttaagacaaagaaatgatttgggtgctgaaattccagcaagtttaccaaattctttagcggaggtgtgcaataaaaaacaattgagctatgatttaagatcctctcaacctcctacaaagagaaaagaagaagctaacgaagtggacaatttacgtgacaatgggcagaacagtagttccgatagcagtggcagtaacgtgctttctaatgaagacagtataaagcaaaaatatgcttctttaacagatgatcaagttgcgaacatgagagaacaattagaaggccttttgaactacaaaaagagtgaaaaaactcaaggaggctctaaactttctaagagaattaacatcaggtctataactgatgacttggataacattgaacagcaggttgaagtattggagaattacttgaacaataagagacacgaattgcaagcattacaagcagaaatcaattga

SEQ ID NO: 9493 - DNA, 1485 bp, Saccharomyces cerevisiae
atgctgctgaaaaattgcgagacggacaagcagcgagatatacggtatgcgtgtttgttcaaggaacttgatgttaagggaaatggtcaagttactctagataatctgataagtgcttttgagaagaacgaccatccgctcaagggaaatgatgaggcaatcaaaatgctgtttactgcaatggatgttaacaaggactctgtagttgatttaagcgatttcaagaagtatgcttccaatgccgaatctcaaatttggaacggcttccagaggatagatttagatcatgacggtaagattggcattaacgaaataaataggtatttgtcagacctcgacaaccagagcatatgtaataatgaacttaatcatgaactttcaaatgaaaagatgaacaaattctcgaggttttttgaatgggcgtttccaaagagaaaagccaacattgcgctacgaggccaggctagccacaaaaagaatactgataatgatcggtcaaagaaaaccaccgactcagatttatacgttacatatgatcaatggagagactttttgctgctggtaccgagaaagcagggttcgagacttcatactgcttattcctatttttacctattcaacgaagatgtcgatctgtcctcagagggagatgttactctcataaacgatttcattcgcgggttcgggttttttattgctggtggtatttcaggtgttatttcaaggacttgtaccgcgccatttgatagactgaaagtgtttctcatcgcaagaacggatctatcctcgatcttgttaaattcaaaaacagatctccttgctaaaaaccccaatgctgacataaacaagatatcatctccattagcaaaggctgtcaaaagcttatataggcaaggcgggataaaggctttttatgttgggaacggtttaaacgtcatcaaagtttttccagaaagttcgataaagtttggttctttcgaggtcaccaagaaaataatgaccaaattagaaggctgccgcgacacaaaagatctttcaaagttctctacttacattgctggtggtttagctggtatggcagctcagttttccgtttatcctatagatactttgaaattcagggtgcagtgcgctcctttggacacaaagttgaaggggaataatttgctctttcagactgcaaaagatatgtttcgagagggggggggtcagattattttacagaggtgtcacagtcggtatagtgggcatatttccctatgctgcattagatttggggactttttctgccttaaaaaaatggtatattgccaaacaggcaaagaccctgaacctaccacaagatcaggtcactctaagcaacctggttgtacttccaatgggtgcattcagtggaactgtaggagcttctgttgtttatccaatcaatcttttaagaacaagactacaagcccaaggaacatatgcacatccttatgtgtataa

SEQ ID NO: 9494 - DNA, 1485 bp, Artificial Sequence
  Description of Artificial Sequence: Synthetic polynucleotide
atgttattgaaaaattgcgagacggacaagcagagagatataagatatgcgtgtttgttcaaggaacttgatgttaagggaaatggtcaagttactttagataatttgataagtgcttttgagaagaacgaccatccgctcaagggaaatgatgaggcaatcaaaatgttatttactgcaatggatgttaacaaggactctgtagttgatttaagcgatttcaagaagtatgcttccaatgccgaatctcaaatttggaacggcttccagaggatagatttagatcatgacggtaagattggcattaacgaaataaataggtatttgagtgacctcgacaaccagagcatatgtaataatgaacttaatcatgaactttctaatgaaaagatgaacaaattctctaggttttttgaatgggcgtttccaaagagaaaagccaacattgcgcttaggggccaggctagccacaaaaagaatactgataatgatagatccaagaaaaccaccgacagtgatttatacgttacatatgatcaatggagagactttttgttgttagtaccgagaaagcagggttccagacttcatactgcttattcctatttttaccttttcaacgaagatgtcgatttatcctctgagggagatgttactctcataaacgatttcattcgcgggttcgggttttttattgctggtggtatttctggtgttatttctaggacttgtaccgcgccatttgatagattgaaagtgtttctcatcgcaagaacggatttatcctctatcttgttaaattctaaaacagatctccttgctaaaaaccccaatgctgacataaacaagatatcttctccattagcaaaggctgtcaaaagcttatataggcaaggcgggataaaggctttttatgttgggaacggtttaaacgtcatcaaagtttttccagaaagtagtataaagtttggttctttcgaggtcaccaagaaaataatgaccaaattagaaggctgccgcgacacaaaagatctttccaagttctctacttacattgctggtggtttagctggtatggcagctcagttttccgtttatcctatagatactttgaaattcagggtgcagtgcgctcctttggacacaaagttgaaggggaataatttgctctttcagactgcaaaagatatgtttagagagggggggggtcagattattttacagaggtgtcacagtagatatagtgggcatatttccttatgctgcattagatttggggactttttctgccttaaaaaaatggtatattgccaaacaggcaaagaccctgaacctaccacaagatctggtcactctaagcaacctggttgtacttccaatgggtgcattcagtggaactgtaggagcttctgttgtttatccaatcaatcttttaagaacaagactacaagcccaaggaacatatgcacatccttatgtgtatga

SEQ ID NO: 9495 - DNA, 2622 bp, Saccharomyces cerevisiae
atgacacaaattcatcagataaacgatatagatgttcatcgaattacatctggacaagttatcaccgacttaacaactgcagtgaaagaactcgttgataatagtatagatgcgaacgcaaaccagatcgaaataatctttaaagattatggtcttgaatctatcgaatgttctgataatggtgatggcatagacccttcaaattatgagttcttagctttaaaacattacacatcaaaaattgcgaaatttcaagatgttgctaaagtacagacgttagggtttagaggggaggccctatcttctttatgtggcatagctaaactaagtgtgataacaacaacttcaccaccaaaagcggataagttggagtatgatatggtcggtcacattacttcaaagacaacgacatcaagaaataaagggacgaccgtgttagtttcgcagttatttcataacttgcccgttagacagaaagaatttagcaaaacttttaagcgccagtttaccaaatgtctcacagttatacaaggttatgcaatcataaatgctgccattaaattttcagtttggaatatcacaccaaagggtaaaaaaaatctaattctatcaacaatgagaaattcaagtatgagaaagaatatatcctcagtattcggtgcaggtggtatgcgtgggcttgaagaggttgatttagtgcttgatttaaatcccttcaagaatagaatgcttgggaaatacaccgatgatcctgatttcttagacctcgattataaaattcgagtgaagggctatatatcacagaattcgtttggttgtggtagaaatagtaaggataggcaattcatttatgtgaataaaaggccagtggaatactctacgcttttaaaatgctgcaatgaggtttacaaaacgttcaataatgttcaatttccggctgtatttctcaatcttgaattacccatgagcttaattgatgtaaacgtcactccagacaaaagagtgatactgttgcacaacgaacgggccgtcattgatattttcaaaacaactctcagtgattattacaatagacaagaattagctcttcccaaaagaatgtgctcacaatcagaacaacaagctcagaaaagacttaaaacggaagtctttgatgatagaagcacaacacacgaatccgataatgaaaactatcataccgccagaagcgaaagtaatcaatccaatcatgcacattttaatagtactactggcgtaatagacaaaagtaatggtacagaactaacttctgtgatggacggtaattatactaatgtcactgatgtcatcggttcggagtgtgaagtttcggttgattcatcagttgtattggatgagggcaactcaagtacaccgactaagaagctgccaagtatcaaaacagattctcaaaacctaagtgatctgaacctgaataatttttccaatcctgaatttcaaaatataactagtccagataaagcacgtagcttggaaaaagttgttgaagaaccagtttattttgatattgatggtgaaaagttccaagaaaaagcggttctatcacaagcagatggtttagtttttgtagataatgaatgtcatgagcatacaaatgactgctgtcatcaagaaagaagaggaagtactgacacagaacaagatgatgaagctgactctatatacgcagagattgagccagttgaaatcaatgtgagaactcctctaaagaactcacgtaaatcgatttccaaagataattataggtcattgagtgatggattgacgcatcgcaaattcgaagatgagatattggagtacaatttaagcacaaaaaattttaaagaaataagtaaaaatggcaaacaaatgagtagcatcataagtaaaagaaaatcagaagctcaagaaaacattatcaaaaataaggacgaactagaggatttcgaacaaggagaaaagtatctgacgttaacagtttcaaaaaatgattttaaaaaaatggaggttgttggacaatttaatttaggatttatcatagtgaccagaaaagttgataacaaatatgatctgtttattgtcgatcagcatgcaagtgatgaaaagtataatttcgaaacactgcaggccgtgacagtttttaaatcgcagaaattgataatacctcagccggtagaattaagtgtcattgatgaacttgtggtgctggacaatttaccagtttttgaaaagaatggattcaaattgaaaattgacgaagaagaagagtttggctccagagttaagctgttaagcttacctacttccaaacaaaccctttttgatttgggtgattttaatgaactgatacatttgatcaaagaagacggtgggttacgaagagacaacatcagatgttccaagattcgttctatgtttgctatgagagcatgtagaagtagtataatgataggtaaaccgctgaataagaagactatgaccagagtcgttcataatctcagtgaacttgataagccttggaattgtccccatggacgtccaacaatgagacatttaatggaattacgtgattggagctcattttcgaaggattacgaaatatga

SEQ ID NO: 9496 - DNA, 2622 bp, Artificial Sequence
  Description of Artificial Sequence: Synthetic polynucleotide
atgacacaaattcatcagataaacgatatagatgttcatagaattacatctggacaagttatcaccgacttaacaactgcagtgaaagaactcgttgataatagtatagatgcgaacgcaaaccagatcgaaataatctttaaagattatggtcttgaatctatcgaatgttctgataatggtgatggcatagacccttccaattatgagttcttagctttaaaacattacacaagtaaaattgcgaaatttcaagatgttgctaaagtacagacgttagggtttagaggggaggccttatcttctttatgtggcatagctaaattaagtgtgataacaacaacttctccaccaaaagcggataagttggagtatgatatggtcggtcacattacttctaagacaacgacatctagaaataaagggacgaccgtgttagtttctcagttatttcataacttgcccgttagacagaaagaatttagcaaaacttttaagcgccagtttaccaaatgtctcacagttatacaaggttatgcaatcataaatgctgccattaaattttctgtttggaatatcacaccaaagggtaaaaaaaatttaattttatctacaatgagaaatagtagtatgagaaagaatatatcctctgtattcggtgcaggtggtatgcgtgggcttgaagaggttgatttagtgcttgatttaaatcccttcaagaatagaatgcttgggaaatacaccgatgatcctgatttcttagacctcgattataaaattagagtgaagggctatatatctcagaattcttttggttgtggtagaaatagtaaggataggcaattcatttatgtgaataaaaggccagtggaatactctacgcttttaaaatgctgcaatgaggtttacaaaacgttcaataatgttcaatttccggctgtatttctcaatcttgaattacccatgagcttaattgatgtaaacgtcactccagacaaaagagtgatattattgcacaacgaaagagccgtcattgatattttcaaaacaactctcagtgattattacaatagacaagaattagctcttcccaaaagaatgtgctctcaaagtgaacaacaagctcagaaaagacttaaaacggaagtctttgatgatagaagcacaacacacgaatccgataatgaaaactatcataccgccagaagcgaaagtaatcaatccaatcatgcacattttaatagtactactggcgtaatagacaaaagtaatggtacagaattgacttctgtgatggacggtaattatactaatgtcactgatgtcatcggttctgagtgtgaagtttctgttgattcttctgttgtattggatgagggcaacagtagtacaccgactaagaagttaccaagtatcaaaacagattctcaaaacttgagtgatttgaacttgaataatttttccaatcctgaatttcaaaatataactagtccagataaagcacgtagcttggaaaaagttgttgaagaaccagtttattttgatattgatggtgaaaagttccaagaaaaagcggttttatctcaagcagatggtttagtttttgtagataatgaatgtcatgagcatacaaatgactgctgtcatcaagaaagaagaggaagtactgacacagaacaagatgatgaagctgactctatatacgcagagattgagccagttgaaatcaatgtgagaactcctttgaagaactctcgtaaatccatttccaaagataattataggtctttgagtgatggattgacgcatcgcaaattcgaagatgagatattggagtacaatttaagcacaaaaaattttaaagaaataagtaaaaatggcaaacaaatgagtagcatcataagtaaaagaaaaagtgaagctcaagaaaacattatcaaaaataaggacgaattagaggatttcgaacaaggagaaaagtatttgacgttaacagtttccaaaaatgattttaaaaaaatggaggttgttggacaatttaatttaggatttatcatagtgaccagaaaagttgataacaaatatgatttatttattgtcgatcagcatgcaagtgatgaaaagtataatttcgaaacattacaggccgtgacagtttttaaatctcagaaattgataatacctcagccggtagaattaagtgtcattgatgaacttgtggtgcttgacaatttaccagtttttgaaaagaatggattcaaattgaaaattgacgaagaagaagagtttggctccagagttaagcttttaagcttacctacttccaaacaaaccctttttgatttgggtgattttaatgaattgatacatttgatcaaagaagacggtgggttaagaagagacaacatcagatgttccaagattcgttctatgtttgctatgagagcatgtagaagtagtataatgataggtaaaccgttaaataagaagactatgaccagagtcgttcataatctcagtgaacttgataagccttggaattgtccccatggacgtccaacaatgagacatttaatggaattacgtgattggagctccttttccaaggattacgaaatatga

SEQ ID NO: 9497 - DNA, 432 bp, Saccharomyces cerevisiae
atggtcgttcacatcttgggtaaaggtttcaaaggtaaagaggtcattaaaatcgcactggcctctaaattttacggcataggtaaaacaacagccgaaaagatatgctcgaagttagggttctacccttggatgaggatgcaccaactatcagaaccccaaatcatgagtatagctagtgaactgtcgacaatgacgattgaaggagacgctagagcaatcgtaaaagacaatatagctctaaaaagaaaaattgggagttatagcggtatgagacatacattgcatctgccagttaggggccagcatacaagaaacaacgcgaaaactgcaaggaagcttaataaaatcgatagacgtggaattcacacattttctcaagcaaaagtacaacataatccgtccctttggtcttgtatctttggcaagtga

SEQ ID NO: 9498 - DNA, 432 bp, Artificial Sequence
  Description of Artificial Sequence: Synthetic polynucleotide
atggtcgttcacatcttgggtaaaggtttcaaaggtaaagaggtcattaaaatcgcattggcctctaaattttacggcataggtaaaacaacagccgaaaagatatgctctaagttagggttctacccttggatgaggatgcaccaattatctgaaccccaaatcatgagtatagctagtgaattatctacaatgacgattgaaggagacgctagagcaatcgtaaaagacaatatagctttgaaaagaaaaattgggagttatagcggtatgagacatacattgcatttaccagttaggggccagcatacaagaaacaacgcgaaaactgcaaggaagcttaataaaatcgatagacgtggaattcacacattttctcaagcaaaagtacaacataatccgtccctttggtcttgtatctttggcaagtga

SEQ ID NO: 9499 - DNA, 1101 bp, Saccharomyces cerevisiae
atgacgtggatactaagtactggtatgggccctcatgaggacaagtatgccaagcatgagcgagcgacctttaaaaagacgtacagttctatgaaaacgctgtctttgaatcatttaactgccaagcagcatatgctgatggccttatgcagggacatatcccttttaccgccgttaacttacatcttcacatctctgcggaaggcttggagagtctccatgcgcaccagcataacgctttacgagccacaatcactaagagatgcgttcacttatttctggcaaaaactcaatagcgcttacgacaataactcatcatttgaaggagcttcgcaaaaggctgtgaatggcgacggtaaggattcactcctattatccgcactcactacagcaagagcgtctgaatatctcctttgctcactttggtgcctggtgtctttatacctctcgtatgccattctcgactctttgatggtccgatggatcgtcaagtactctactgtggccgccattttaagaatgttttccatgtcattgatcattgtcaccttagaactccttcttttgtcgtctttgtctccggaactcgactattttttgcatacatggatactcattagttgtgtactaacagcagtgtacatttggcaaagttatcttacctcggatctgaggtatatcaggaaccaggaaggcgaagtacaagaggatactaatgttccagaagaaacagaagactatgaggatggtgaagatgacgctgatgaagactcacatgttgtggtagccgacgaaagtacagtagatgttccttccaacgacagtctctccgataacagtgatggcggattgtttcctgttaacaggccctcagtctctcattcacaaagccctaaaagacccaaaaaatatccaaaaaaagcattcaattttaccactaagcgaacgatagatctatataaaatcacggttctttgtgtcgtccctgtgggactagctagttttatcaccatgttaggtttactgcgaaacctgttcatccaaagattggatgtagagcaattagaaagaatactgcatgaaatgcatccccccgcatga

SEQ ID NO: 9500 - DNA, 1101 bp, Artificial Sequence
  Description of Artificial Sequence: Synthetic polynucleotide
atgacgtggatattgagtactggtatgggccctcatgaggacaagtatgccaagcatgagagagcgacctttaaaaagacgtacagttctatgaaaacgttgtctttgaatcatttaactgccaagcagcatatgttaatggccttatgcagggacatatcccttttaccgccgttaacttacatcttcacatctttaagaaaggcttggagagtctccatgcgcaccagcataacgctttacgagccacaatctttgagagatgcgttcacttatttctggcaaaaactcaatagcgcttacgacaataactcttcttttgaaggagcttctcaaaaggctgtgaatggcgacggtaaggattctctcttgttatccgcactcactacagcaagagcgtctgaatatctcctttgcagcctttggtgccttgtgtctttatacctctcttatgccattctcgactctttgatggtcaggtggatcgtcaagtactctactgtggccgccattttaagaatgttttccatgtctttgatcattgtcaccttagaactccttcttttgtcttctttgtctccggaactcgactattttttgcatacatggatactcattagttgtgtattaacagcagtgtacatttggcaaagttatcttacctctgatttaaggtatatcaggaaccaggaaggcgaagtacaagaggatactaatgttccagaagaaacagaagactatgaggatggtgaagatgacgctgatgaagactctcatgttgtggtagccgacgaaagtacagtagatgttccttccaacgacagtctctccgataacagtgatggcggattgtttcctgttaacaggccctctgtctctcattctcaaagccctaaaagacccaaaaaatatccaaaaaaagcattcaattttaccactaagagaacgatagatttatataaaatcacggttctttgtgtcgtccctgtgggattggctagttttatcaccatgttaggtttacttagaaacttgttcatccaaagattggatgtagagcaattagaaagaatattacatgaaatgcatccccccgcatga

SEQ ID NO: 9501 - DNA, 600 bp, Saccharomyces cerevisiae
atggacaaaatcagagaaaagctaagcaacttgaagttggaagccgaatcatggcaggagaagtacgaggagttgaaagagaagaacaaggacttggagcaagagaacgtcgaaaaggagaatcagatcaagtctttaaccgtcaaaaaccagcaattggaggatgagatcgagaagctggaagcgggactttctgactctaagcaaacagaacaggataacgttgaaaaagaaaatcagatcaagtccttgacggtgaagaaccaccaattggaggaagagatcgagaagttggaagcagaattggctgaatccaagcaattgtccgaggactctcaccacttgcagtccaacaacgacaatttctccaagaagaaccagcaattggaagaagacttggaggaaagcgacaccaagctaaaggaaaccactgagaaattgagagagtccgacttgaaggcagatcaattggaaagaagagtagctgccttggaagaacaaagagaagaatgggaaagaaagaacgaggaattgaccgtcaagtacgaagacgcaaagaaggaactggacgaaattgctgcatctctggaaaacttgtga

SEQ ID NO: 9502 - DNA, 600 bp, Artificial Sequence
  Description of Artificial Sequence: Synthetic polynucleotide
atggacaaaatcagagaaaagttgagcaacttgaagttggaagccgaaagttggcaggagaagtacgaggagttgaaagagaagaacaaggacttggagcaagagaacgtcgaaaaggagaatcagatcaagtctttaaccgtcaaaaaccagcaattggaggatgagatcgagaagttggaagcgggactttctgactctaagcaaacagaacaggataacgttgaaaaagaaaatcagatcaagtccttgacggtgaagaaccaccaattggaggaagagatcgagaagttggaagcagaattggctgaatccaagcaattgtccgaggactctcaccacttgcagtccaacaacgacaatttctccaagaagaaccagcaattggaagaagacttggaggaaagcgacaccaagttgaaggaaaccactgagaaattgagagagtccgacttgaaggcagatcaattggaaagaagagtagctgccttggaagaacaaagagaagaatgggaaagaaagaacgaggaattgaccgtcaagtacgaagacgcaaagaaggaattagacgaaattgctgcatctttggaaaacttgtga

SEQ ID NO: 9503 - DNA, 1224 bp, Saccharomyces cerevisiae
atggagacatacgagactagcattgggactcagtcttatcccccgactttgttcccacctcccctgggtaccggtgggtttaccacttcaggttatatacatgcgcttgtggattctacatcgaactcgaactcgaactcgaacacaaattcgaacacaaattcgaacacaaattcaaattcagataccaagattcctatagtgcaaatatcggatgactctcatataacacacgacagcttcaaaccatatatggagtaccacgatgcttcgcacttgaggaaccgtaacataagcaaagcggaccaggttgaaagcactgaagtgatggaacagtttacgcaatggtcgaattataagatgaggtctcgctctcctaccataaacgcaaagccaattcgacacacttcacaacgaagaacagactttaccagcaaaaatgaactctccaagttcagcaagaatcataatttcatttttcacaaagggtttttgaagaggcaacactccatacgcagggaagacaggcaagcaaaggtacggtcaagattcaggagcaagaaggagctgacatccgttttgaactatatagaactggaacaaatggatattgcaaatgtcctggcttcgcaaccggtaaacttacacgctatcagaaatctcactagcagggaccctgcggtaactcctatcccatttttaagaagccagatgtatgcaaccagtagtcgtccaccgtatctaaggaaccgctccataagtaggaaactacccaaatcacaaccaggtagtctcccgacgactatgcctgcgacggcgacgaaaacaattaaacagaattcaacgaccccaaccacaagatctgtttataacaagaatgtggggcggtccaatacttcccctagtgtgttgtaccacccaaaaagaagaggaaaattgaacaccaaatcgcatgcaagaaaggagcaactgctgttggaactgtggagagaatacttaatgctggttataacacagaggacgcaactgcgcctgactttgctttgctctccgggttcagcatcgaatgaaagctctgtctgctcttctaacgccagcgacttagacatgtcccttttatctactccttcaagtctcttccagatggcaggtgagaccaaaagcaatcctataattatacccgacagtcaagacgatagtatacttagtagcgaccccttttaa

SEQ ID NO: 9504 - DNA, 1224 bp, Artificial Sequence
  Description of Artificial Sequence: Synthetic polynucleotide
atggagacatacgagactagcattgggactcagtcttatcccccgactttgttcccacctcccttaggtaccggtgggtttaccacttctggttatatacatgcgcttgtggattctacaagtaactccaactccaactccaacacaaatagcaacacaaatagcaacacaaatagtaattctgataccaagattcctatagtgcaaatatctgatgactctcatataacacacgacagcttcaaaccatatatggagtaccacgatgcttctcacttgaggaaccgtaacataagcaaagcggaccaggttgaaagcactgaagtgatggaacagtttacgcaatggtctaattataagatgaggtctcgctctcctaccataaacgcaaagccaattagacacacttctcaaagaagaacagactttaccagcaaaaatgaactctccaagttcagcaagaatcataatttcatttttcacaaagggtttttgaagaggcaacactccatacgcagggaagacaggcaagcaaaggtaagatctagattcaggagcaagaaggagttgacatccgttttgaactatatagaattggaacaaatggatattgcaaatgtcttggcttctcaaccggtaaacttacacgctatcagaaatctcactagcagggaccctgcggtaactcctatcccatttttaagaagccagatgtatgcaaccagtagtcgtccaccgtatttgaggaaccgctccataagtaggaaattgcccaaatctcaaccaggtagtctcccgacgactatgcctgcgacggcgacgaaaacaattaaacagaattctacgaccccaaccacaagatctgtttataacaagaatgtggggaggtccaatacttcccctagtgtgttgtaccacccaaaaagaagaggaaaattgaacaccaaatctcatgcaagaaaggagcaattattattggaattatggagagaatacttaatgcttgttataacacagaggacgcaattgcgcttgactttgctttgctctccgggttctgcatctaatgaaagctctgtctgctcttctaacgccagcgacttagacatgtcccttttatctactccttctagtctcttccagatggcaggtgagaccaaaagcaatcctataattatacccgacagtcaagacgatagtatacttagtagcgaccccttttga

SEQ ID NO: 9505 - DNA, 1587 bp, Saccharomyces cerevisiae
atgcaacaaaacacgtctttatatgactctttgaacgttactgccgctgcatccacatctgagattaagaaagcttacaggaacgctgcattaaaatatcatcctgataaaaacaatcatacagaagaatccaagcgaaagtttcaagagatatgccaggcatacgaaatacttaaagacaatcgtttaagagctttgtatgaccagtacggtaccacagatgaagtcctgattcaagagcagcaggcgcaggcgcaacgccaacaagccgggccgttcagttcatcctcaaatttcgatacggaagcaatgtcattcccggatctatctccaggtgatcttttcgcgcagttttttaatagttctgctaccccctcttctaatggctccaaaagcagttttaattttagcttcaataatagctctacgccgagcttctcctttgttaatggcagtggcgtgaacaatctgtactcctcgtcagcaaaatacaactccaacgatgaggaccatcatttggatagaggccctgatatcaaacataatctaaagtgcacattgaaggaactctacatgggtaagactgcaaagttgggtttgaataggacaaggatttgcagtgtttgtgatgggcacggtggtctaaagaaatgcacttgtaaaacatgcaaagggcaaggtattcaaacccaaactaggcgtatgggacctctagtacaaagttggtctcaaacttgtgcagattgcgggggtgccggggtttttgtcaaaaataaagatatttgccaacagtgccaaggtcttggcttcattaaggagaggaagattctacaagtcaccgttcaaccgggatcgtgtcataaccaacttatagtacttacgggcgaaggtgacgaagttattagtactaagggaggcggtcacgaaaaggtaatacctggtgacgtcgttatcaccattttacgtttaaaagatccgaatttccaggttatcaactactccaatttgatatgtaagaagtgcaaaatcgacttcatgaccagtttatgtggaggcgtagtttatattgaagggcaccctagcggtaagttgatcaaacttgatattatacctggcgagatactgaagcctggttgtttcaagactgttgaggacatggggatgcccaagtttatcaacggtgttcggagcggtttcggtcatctatatgtcaaattcgatgtgacgtatccagagagactggaacctgaaaatgctaagaaaatacaaaatattctggctaatgataaatacattaaagcagaacgttccaccatggaaaccgcagattcagactgctattgcgatttggagaagtcatatgacagtgtggaagagcatgtgttaagtagctttgaggcccctaatttaaacaatgaagttattgaagacgacgaccttggtgatttgattaatgaaagagattctcggaaaaggaacaaccgtcgattcgacgaaagtaatattaataataataatgaaacgaaacgaaataaatattcttcaccggtaagcggtttttatgaccatgatattaatggatattga

SEQ ID NO: 9506 - DNA, 1587 bp, Artificial Sequence
  Description of Artificial Sequence: Synthetic polynucleotide
atgcaacaaaacacgtctttatatgactctttgaacgttactgccgctgcatccacatctgagattaagaaagcttacaggaacgctgcattaaaatatcatcctgataaaaacaatcatacagaagaatccaagagaaagtttcaagagatatgccaggcatacgaaatacttaaagacaatcgtttaagagctttgtatgaccagtacggtaccacagatgaagtcttgattcaagagcagcaggcgcaggcgcaacgccaacaagccgggccgttcagttcttcctctaatttcgatacggaagcaatgagtttcccggatttatctccaggtgatcttttcgcgcagttttttaatagttctgctaccccctcttctaatggctccaaaagcagttttaattttagcttcaataatagctctacgccgagcttctcctttgttaatggcagtggcgtgaacaatctttactcctcttctgcaaaatacaactccaacgatgaggaccatcatttggatagaggccctgatatcaaacataatttgaagtgcacattgaaggaactctacatgggtaagactgcaaagttgggtttgaataggacaaggatttgcagtgtttgtgatgggcacggtggtttgaagaaatgcacttgtaaaacatgcaaagggcaaggtattcaaacccaaactaggcgtatgggacctttggtacaaagttggtctcaaacttgtgcagattgcgggggtgccggggtttttgtcaaaaataaagatatttgccaacagtgccaaggtcttggcttcattaaggagaggaagattttacaagtcaccgttcaaccgggatcttgtcataaccaacttatagtacttacgggcgaaggtgacgaagttattagtactaagggaggcggtcacgaaaaggtaatacctggtgacgtcgttatcaccattttacgtttaaaagatccgaatttccaggttatcaactactccaatttgatatgtaagaagtgcaaaatcgacttcatgaccagtttatgtggaggcgtagtttatattgaagggcaccctagcggtaagttgatcaaacttgatattatacctggcgagatattgaagcctggttgtttcaagactgttgaggacatggggatgcccaagtttatcaacggtgttaggagcggtttcggtcatttatatgtcaaattcgatgtgacgtatccagagagattagaacctgaaaatgctaagaaaatacaaaatattttggctaatgataaatacattaaagcagaacgttccaccatggaaaccgcagattctgactgctattgcgatttggagaagagttatgacagtgtggaagagcatgtgttaagtagctttgaggcccctaatttaaacaatgaagttattgaagacgacgaccttggtgatttgattaatgaaagagattctagaaaaaggaacaaccgtagattcgacgaaagtaatattaataataataatgaaacgaaaagaaataaatattcttctccggtaagcggtttttatgaccatgatattaatggatattga

SEQ ID NO: 9507 - DNA, 1755 bp, Saccharomyces cerevisiae
atgtcgcgggaggcatttgatgtaccgaatataggtactaacaagtttttaaaagtcacacctaatttatttaccccagagcgattgaatttatttgatgatgtcgaactatatcttacgttaataaaagcatccaaatgtgtcgagcagggagaaaggctgcacaatataagttggagaattctgaataaagctgttctaaaggagcataatattaatcgatctaaaaaaagagacggcgtgaagaacatatattatgtgttaaatccaaacaacaaacagccaataaagccaaagcaggcagcagtaaagcagccaccattacaaaaggccaatttgcctcccacaacggcaaaacagaacgttttaactcggccaatgacatcaccagctatcgcacagggtgctcacgatagatccttggataatcctaattctacaaacaatgatgtgaaaaatgacgttgctccaaacagacaattctccaaatctactacgtcagggttgttttcaaattttgcagacaaatatcaaaaaatgaaaaatgtgaaccatgttgctaataaggaagaaccacaaactattatcactggttttgatacaagcactgttataaccaagaaacctttacaatcaagacgctcaagatcacctttccagcatataggagacatgaacatgaactgcattgataatgagacttccaagagtaccagtcctactcttgaaaatatgggaagtagaaaatcctcttttcctcagaaggaatctttattcggaaggccaaggtcttacaagaatgaccaaaatggtcaactgtcactttcgaaaacatcctctagaaaaggaaaaaacaagatatttttcagcagtgaagatgaagattccgattgggacagcgtttcgaatgattcagaattctacgctgatgaagatgatgaagagtacgatgattataatgaggaagaagcagatcagtactatagaagacaatgggacaagcttttatttgccaaaaatcaacagaatcttgactcaacgaaatcatctgtttcatcagcgaacacaatcaactcaaacacatcccatgatcccgtacgaaaaagtttactcagtggactattccttagtgaggcaaatagcaacagtaataaccacaatactgcacatagtgaatacgcttctaaacacgtttcgccgactcctcagtcctctcatagtaatatcggtcctcaaccgcagcaaaatccaccgagcgctaatggtataaaacaacaaaaaccttctttgaaaacaagcaacgtgacagctctagcatcgctatctcccccgcaaccatccaacaatgagcggttatcgatggatatacaaaaggacttcaaaactgataatgagtccaatcatttatatgaatctaatgctccgctaactgctcaaactatactgcccaccgccttatctactcacatgtttttgccaaataacattcaccaacaacgaatggcgattgccactggtagtaatacgcgacatcgtttttcgaggcggcagtcgatggatatcccatccaagaacaggaatactgggtttttgaagaccagaatggagatctctgaggaagaaaagatggtacgtacaatatcacggcttgacaatacgagtattgcaaacagtaatggaaatggtaatgatgacacctctaatcagagaacggaagcactggggcgtaagacgagtaatggagggcgaatatga

SEQ ID NO: 9508 - DNA, 1755 bp, Artificial Sequence
  Description of Artificial Sequence: Synthetic polynucleotide
atgtctagagaggcatttgatgtaccgaatataggtactaacaagtttttaaaagtcacacctaatttatttaccccagagagattgaatttatttgatgatgtcgaattgtatcttacgttaataaaagcatccaaatgtgtcgagcagggagaaaggttacacaatataagttggagaattttgaataaagctgttttgaaggagcataatattaatagatctaaaaaaagagacggcgtgaagaacatatattatgtgttaaatccaaacaacaaacagccaataaagccaaagcaggcagcagtaaagcagccaccattacaaaaggccaatttgcctcccacaacggcaaaacagaacgttttaactagaccaatgacatctccagctatcgcacagggtgctcacgatagatccttggataatcctaattctacaaacaatgatgtgaaaaatgacgttgctccaaacagacaattctccaaatctactacgtctgggttgttttctaattttgcagacaaatatcaaaaaatgaaaaatgtgaaccatgttgctaataaggaagaaccacaaactattatcactggttttgatacaagcactgttataaccaagaaacctttacaatctagacgctccagatctcctttccagcatataggagacatgaacatgaactgcattgataatgagacttccaagagtaccagtcctactcttgaaaatatgggaagtagaaaatcctcttttcctcagaaggaatctttattcggaaggccaaggtcttacaagaatgaccaaaatggtcaattatctctttctaaaacatcctctagaaaaggaaaaaacaagatatttttcagcagtgaagatgaagattccgattgggacagcgtttctaatgattctgaattctacgctgatgaagatgatgaagagtacgatgattataatgaggaagaagcagatcagtactatagaagacaatgggacaagcttttatttgccaaaaatcaacagaatcttgacagtacgaaatcttctgtttcttctgcgaacacaatcaactccaacacatcccatgatcccgtaagaaaaagtttactcagtggattattccttagtgaggcaaatagcaacagtaataaccacaatactgcacatagtgaatacgcttctaaacacgtttctccgactcctcagtcctctcatagtaatatcggtcctcaaccgcagcaaaatccaccgagcgctaatggtataaaacaacaaaaaccttctttgaaaacaagcaacgtgacagctttggcatctttatctcccccgcaaccatccaacaatgagagattatctatggatatacaaaaggacttcaaaactgataatgagtccaatcatttatatgaatctaatgctccgttgactgctcaaactatattgcccaccgccttatctactcacatgtttttgccaaataacattcaccaacaaagaatggcgattgccactggtagtaatacgaggcatcgttttagcaggaggcagtccatggatatcccatccaagaacaggaatactgggtttttgaagaccagaatggagatctctgaggaagaaaagatggtacgtacaatatcccgtcttgacaatacgagtattgcaaacagtaatggaaatggtaatgatgacacctctaatcagagaacggaagcattggggcgtaagacgagtaatggagggagaatatga

SEQ ID NO: 9509 - DNA, 873 bp, Saccharomyces cerevisiae
atgctaagaagacaagcccgtgaaaggagagaatatctatacagaaaagcgcaagaattacaagattctcaactgcaacaaaaacgtcaaataattaaacaagcgctagctcaggggaagccattgccaaaggaactagcagaagatgagagtttacaaaaggatttcagatatgaccaaagtttaaaggagagcgaagaagcagatgatctacaggttgatgatgaatatgctgccacaagtggtataatggatccaagaatcatcgtcacaacatctcgtgacccaagcactcgtctctcgcaatttgccaaagaaattaaactgctatttccaaatgctgtcaggctgaacagaggtaattatgtgatgccaaatctagtggatgcttgtaaaaaatccggtactacagatttggtggtattacatgaacatagaggtgttccaacttctttgaccatatcacattttccacatggacccactgcacagtttagtttacacaatgttgttatgagacatgatattataaatgctggtaaccaaagcgaagtgaatccacatctaatatttgataactttactaccgctttagggaaaagagtagtctgtattttaaagcacttgttcaatgcggggcccaaaaaagattccgaaagagtaatcacttttgcgaataggggtgatttcattagcgttagacagcatgtatatgtgagaacaagagagggagtagagattgccgaagttggtcctagatttgagatgaggttgtttgaactgaggttgggaactttagaaaataaggacgctgatgttgagtggcagttgagaagattcataaggactgccaataaaaaagactatttgtga

SEQ ID NO: 9510 - DNA, 873 bp, Artificial Sequence
  Description of Artificial Sequence: Synthetic polynucleotide
atgttgagaagacaagcccgtgaaaggagagaatatttgtacagaaaagcgcaagaattacaagattctcaattacaacaaaaacgtcaaataattaaacaagcgttagctcaggggaagccattgccaaaggaattggcagaagatgagagtttacaaaaggatttcagatatgaccaaagtttaaaggagagcgaagaagcagatgatttacaggttgatgatgaatatgctgccacaagtggtataatggatccaagaatcatcgtcacaacatctcgtgacccaagcactcgtctctctcaatttgccaaagaaattaaattactttttccaaatgctgtcaggttaaacagaggtaattatgtgatgccaaatttggtggatgcttgtaaaaaatccggtactacagatttggtggtattacatgaacatagaggtgttccaacttctttgaccatatctcattttccacatggacccactgcacagtttagtttacacaatgttgttatgagacatgatattataaatgctggtaaccaaagcgaagtgaatccacatttgatatttgataactttactaccgctttagggaaaagagtagtctgtattttaaagcacttgttcaatgcggggcccaaaaaagattccgaaagagtaatcacttttgcgaataggggtgatttcattagcgttagacagcatgtatatgtgagaacaagagagggagtagagattgccgaagttggtcctagatttgagatgaggttgtttgaattgaggttgggaactttagaaaataaggacgctgatgttgagtggcagttgagaagattcataaggactgccaataaaaaagactatttgtga

SEQ ID NO: 9511 - DNA, 1359 bp, Saccharomyces cerevisiae
atgtgcgtgtacaagtcaaattcgaacaacagcaacccttcttttatcttcgaaagaaccgtgcaagaggcaagttcaaacgatttatttcttcaacctccggtttccgcctccaacacatctcatagctcaagatctaatagtttttacaacttgcagaccatttctccgatacctatctctggtagcgaggttagaactccatcgttgaggaagaactccaataatgtttcctctccgctagataacgtcataccaacgtctaggtcggcgtcgaactccaccacaagctcgctagcacatcaagagtacatcttgaaccccatttgcaacatgcaaaatcatcaccatcgccgtcgtacgttagaaaactcggtggctccagctttagatgctagttgctcaatagtgaacgatgagaacactgacctgagcgatgtcgatatggtttattcaagaagaccttcctctgctgtgagcctaaacatggccctgttggctagaacgaatagtgccactcttccctcatcagaatcttcgccagcatcgccagatcttaaactttcgagatctcattcgcattctgcggctacacgtcccaccttgaataacatcaataacaccgggatgaccaccacaacttcaaatggcgaaccaaactccagaatactaagattctactcttacgtcgatatgttgaatgatgaaaaacttgcacaggccaataatacgcctacatctagaccacctatgaaatcccaagcgtactcatgccctttcatcctcaagaggtccccaccacaagcctattcttcatcgtcagcaacaacgacattttccaaccccttcatcaaaactacagaattaccagctacttcgccttatgtatctccgcagcaatctgcgagacaatattcaaataatgctaataacaatgcaaaatccccaaaaaaccggtcatcttcgatactatttcaaagacaatccattttatcaaacgttgaccctgttgcaaacatgcacaagaatcccaagttccaaatagaatcaagtgacagcgaagaagaagatttaaccatggacatgctagatccttcctttccgttaagttcgtctttgcgttcaagtgcaaacttggcaagtaatcccgaattagcaacccagacgcctttatcgacatcttcgtcatatacagcaataggcaagcccatgcctttatcaacagatccttcttacgtgtcttcttctaatacgttatcctccgaacatgagttaagagttgaaaaagtcagtgaagtgcttaagaaaaaagtttcaaatggtggattttcaactgaatttaatagttgtgatacataa

SEQ ID NO: 9512 - DNA, 1359 bp, Artificial Sequence
  Description of Artificial Sequence: Synthetic polynucleotide
atgtgcgtgtacaagagcaatagcaacaacagcaacccttcttttatcttcgaaagaaccgtgcaagaggcaagtagtaacgatttatttcttcaacctccggtttccgcctccaacacatctcatagcagcagatctaatagtttttacaacttgcagaccatttctccgatacctatctctggtagcgaggttagaactccatctttgaggaagaactccaataatgtttcctctccgttagataacgtcataccaacgtctaggtctgcgtccaactccaccacaagctctttggcacatcaagagtacatcttgaaccccatttgcaacatgcaaaatcatcaccatcgccgtcgtacgttagaaaactctgtggctccagctttagatgctagttgctctatagtgaacgatgagaacactgacttgagcgatgtcgatatggtttattctagaagaccttcctctgctgtgagcttgaacatggccttattggctagaacgaatagtgccactcttccctcttctgaatcttctccagcatctccagatcttaaactttctagatctcattctcattctgcggctacacgtcccaccttgaataacatcaataacaccgggatgaccaccacaacttccaatggcgaaccaaactccagaatattaagattctactcttacgtcgatatgttgaatgatgaaaaacttgcacaggccaataatacgcctacatctagaccacctatgaaatcccaagcgtactcttgccctttcatcctcaagaggtccccaccacaagcctattcttcttcttctgcaacaacgacattttccaaccccttcatcaaaactacagaattaccagctacttctccttatgtatctccgcagcaatctgcgagacaatattctaataatgctaataacaatgcaaaatccccaaaaaacagatcttcttctatattgtttcaaagacaatccattttatctaacgttgaccctgttgcaaacatgcacaagaatcccaagttccaaatagaaagtagtgacagcgaagaagaagatttaaccatggacatgcttgatccttcctttccgttaagttcttctttgcgttctagtgcaaacttggcaagtaatcccgaattagcaacccagacgcctttatctacatcttcttcttatacagcaataggcaagcccatgcctttatctacagatccttcttacgtgtcttcttctaatacgttatcctccgaacatgagttaagagttgaaaaagtcagtgaagtgcttaagaaaaaagtttctaatggtggattttccactgaatttaatagttgtgatacatga

SEQ ID NO: 9513 - DNA, 1731 bp, Saccharomyces cerevisiae
atgaatgtgctgttaaaaagacgcagtttaacgtttgcaccgagatggctgtggtgcaagtgtcgaagtagcaggagcaggccgtattctctggcacacgcggtcgacacaagtaagatggaggcaaccaggaggaacggtcagattgtgaaggacctgggtagatactatccgtcaatgtcagaatcagcactccacgatctttgccaggagtataaagaagtcactatcgcagactttaatgagagattcttgggcaacccagccacattacaccatgaggataatcctaatttgttacttagtattaatggcaggattaaaagcattaggttttcaggccagaagattgtttttatagatctttacaacggcagtagcggattgaagaatgatacgcaactgcagttgatcgtaaactacaataaaattggtgggagtagtgaggataaggcgaatttctcagaatatatgaactttttgaagaaaggagattatattaaggcgctcggttatcccgggttttcccaatccagagtcaagatgctgtccttgatatgtaataagctacctatagtattgtctgtttcgcaactgccgttaccttccagactgaatgatgaaaccaagatcaaatctaatagagttgttgactaccaattaaacggcactcagacactgctagtaagggcgcgtatcatcaaacttttgaggaagtttctcgacgacagaaacttcgttgaggttgaaacgcctatactgtcatcaaagtccaacggtgccatggcgaagccctttataacgtcgtccaaggacttcgaccatttggagttgcgtattgcaccagaattatggctgaagaggcttataattagtggtttacaaaaagtatacgaaataggaaaggtctttcgaaacgaaggcattgattccacgcataatgctgagttttccactttagaattctatgaaacttacatgtcaatggacgatatagtcacaaggactgaagatttgttcaaatttttgattactaacttgcaaaagttctttcaagatacccgtctgcctgtccctaagacgtttagtgaattacatctggcactatccgagaataattggaagtttagaaaagtcgaattcctgcccactttgaacaaagagcttggcattgatctaatgaactctggattggatatcaataagccgagcgaacttttgaaggctttaccgaaagacattgcgaagaagtattttccttctgcagataacactgggcaattatcttcgctgcaaatcctaaataaactatcggacgtgttcctcgagcagcgccattgtcaatcaaccttgcctacggtaatataccatcaacctgcaatattatcgcccttagccaagacggatccgcaaaataagcaagtcacgaagagattcgaagtcttcatcaaaggtaaggaatacatcaatgcttacgaagaggaaaattgcccccaattacaactgcagaagtttctacaacaaaagcagattaacgaattgacaggaaacaaaactgagaccttatcgcctgttattgactaccagtatgttgagacgatgaaatacggtatgcctccagtaggtggctttggccttggcatagatagattgtgcatgctattttgcgacaagaagaggatagaagaggttctgccctttggctgtgtggatgatgtaaacaggcagtaa

SEQ ID NO: 9514 - DNA, 1731 bp, Artificial Sequence
  Description of Artificial Sequence: Synthetic polynucleotide
atgaatgtgttattaaaaagacgcagtttaacgtttgcaccgagatggttatggtgcaagtgtaggagtagcaggagcaggccgtattctttggcacacgcggtcgacacaagtaagatggaggcaaccaggaggaacggtcagattgtgaaggacttgggtagatactatccgtctatgtctgaaagtgcactccacgatctttgccaggagtataaagaagtcactatcgcagactttaatgagagattcttgggcaacccagccacattacaccatgaggataatcctaatttgttacttagtattaatggcaggattaaaagcattaggttttctggccagaagattgtttttatagatctttacaacggcagtagcggattgaagaatgatacgcaattgcagttgatcgtaaactacaataaaattggtgggagtagtgaggataaggcgaatttctctgaatatatgaactttttgaagaaaggagattatattaaggcgctcggttatcccgggttttcccaatccagagtcaagatgctttccttgatatgtaataagttacctatagtattgtctgtttctcaattgccgttaccttccagattgaatgatgaaaccaagatcaaatctaatagagttgttgactaccaattaaacggcactcagacattgttagtaagggcgcgtatcatcaaacttttgaggaagtttctcgacgacagaaacttcgttgaggttgaaacgcctatattatcttccaagtccaacggtgccatggcgaagccctttataacgtcttccaaggacttcgaccatttggagttgcgtattgcaccagaattatggttaaagaggcttataattagtggtttacaaaaagtatacgaaataggaaaggtctttagaaacgaaggcattgattccacgcataatgctgagttttccactttagaattctatgaaacttacatgtccatggacgatatagtcacaaggactgaagatttgttcaaatttttgattactaacttgcaaaagttctttcaagatacccgtttacctgtccctaagacgtttagtgaattacatttagcattgtccgagaataattggaagtttagaaaagtcgaattcttgcccactttgaacaaagagcttggcattgatttgatgaactctggattggatatcaataagccgagcgaacttttgaaggctttaccgaaagacattgcgaagaagtattttccttctgcagataacactgggcaattatcttctttacaaatcttgaataaattaagtgacgtgttcctcgagcagcgccattgtcaatccaccttgcctacggtaatataccatcaacctgcaatattatctcccttagccaagacggatccgcaaaataagcaagtcacgaagagattcgaagtcttcatcaaaggtaaggaatacatcaatgcttacgaagaggaaaattgcccccaattacaattgcagaagtttttgcaacaaaagcagattaacgaattgacaggaaacaaaactgagaccttatctcctgttattgactaccagtatgttgagacgatgaaatacggtatgcctccagtaggtggctttggccttggcatagatagattgtgcatgttattttgcgacaagaagaggatagaagaggttttgccctttggctgtgtggatgatgtaaacaggcagtga

SEQ ID NO: 9515 - DNA, 924 bp, Saccharomyces cerevisiae
atggtaccccccacggtagaagcatccttggagtctccttacactaagtcgtacttttcacctgtcccaagcgcgctcttggaacagaatgactctccaataataatgggtatcgatgaagctggcagagggcccgtattagggccaatggtctacgcagtagcctattctacacagaaatatcaggacgaaactataatccctaactacgagtttgacgactctaaaaaacttacagatcccatcagaagaatgctgttttccaagatataccaggacaacgaagaactaacccagatcggctacgcaactacgtgcatcactccgttggatatctctagaggaatgagcaagttcccaccgacgagaaactataacttgaatgagcaggcgcacgatgtcacaatggcactcattgatggcgtgataaagcagaacgtgaagctcagtcacgtgtatgtggatactgttggaccaccagcgtcctatcagaagaaactggagcaacgatttcctggtgtcaagtttacggtcgccaagaaggcagactcgctctactgcatggtcagtgtggcgagtgtcgttgcaaaagtgaccagagatatactagtcgaatccttgaagagggatcccgatgagatcctgggttctggatacccctccgacccgaagacagtcgcatggctgaagcgcaaccagacaagtcttatgggctggcccgccaacatggtaagattctcatggcagacatgccagactctgttagatgacgccagtaagaatagtatccctatcaagtgggaagaacaatatatggacagcaggaagaacgccgcacaaaaaaccaagcaattgcagctccagatggtcgctaagcctgttagaaggaagaggctgagaaccctagataattggtaccggtga

SEQ ID NO: 9516 - DNA, 924 bp, Artificial Sequence
  Description of Artificial Sequence: Synthetic polynucleotide
atggtaccccccacggtagaagcatccttggagtctccttacactaagtcctacttttctcctgtcccaagcgcgctcttggaacagaatgactctccaataataatgggtatcgatgaagctggcagagggcccgtattagggccaatggtctacgcagtagcctattctacacagaaatatcaggacgaaactataatccctaactacgagtttgacgactctaaaaaacttacagatcccatcagaagaatgttattttccaagatataccaggacaacgaagaattgacccagatcggctacgcaactacgtgcatcactccgttggatatctctagaggaatgagcaagttcccaccgacgagaaactataacttgaatgagcaggcgcacgatgtcacaatggcactcattgatggcgtgataaagcagaacgtgaagctcagtcacgtgtatgtggatactgttggaccaccagcgtcctatcagaagaaattagagcaaagatttcctggtgtcaagtttacggtcgccaagaaggcagactctctctactgcatggtcagtgtggcgagtgtcgttgcaaaagtgaccagagatatattggtcgaatccttgaagagggatcccgatgagatcttgggttctggatacccctccgacccgaagacagtcgcatggttaaagcgcaaccagacaagtcttatgggctggcccgccaacatggtaagattcagttggcagacatgccagactttattagatgacgccagtaagaatagtatccctatcaagtgggaagaacaatatatggacagcaggaagaacgccgcacaaaaaaccaagcaattgcagctccagatggtcgctaagcctgttagaaggaagaggttaagaaccttggataattggtacaggtga

SEQ ID NO: 9517 - DNA, 1449 bp, Saccharomyces cerevisiae
atgtctgcctttgtcagggtggttccaagaatatccagaagttcagtactcaccagatcattgagactgcaattgagatgctacgcatcgtacccagagcacaccattattggtatgccggcactgtctcctacgatgacgcaaggtaatcttgctgcttggactaagaaggaaggtgaccaattgtctcccggtgaagttattgccgaaatagaaacagacaaggctcaaatggactttgagttccaagaagatggttacttagccaagattctagttcctgaaggtacaaaggacattcctgtcaacaagcctattgccgtctatgtggaggacaaagctgatgtgccagcttttaaggactttaagctggaggattcaggttctgattcaaagaccagtacgaaggctcagcctgccgaaccacaggcagaaaagaaacaagaagcgccagctgaagagaccaagacttctgcacctgaagctaagaaatctgacgttgctgctcctcaaggtaggatttttgcctctccacttgccaagactatcgccttggaaaagggtatttctttgaaggatgttcacggcactggaccccgcggtagaattaccaaggctgacattgagtcatatctagaaaagtcgtctaagcagtcttctcaaaccagtggtgctgccgccgccactcctgccgccgctacctcaagcactactgctggctctgctccatcgccttcttctacagcatcatatgaggatgttccaatttcaaccatgagaagcatcattggagaacgtttattgcaatctactcaaggcattccatcatacatcgtttcctccaagatatccatctccaaacttttgaaattgagacagtccttgaacgctacagcaaacgacaagtacaaactgtccattaatgacctattagtaaaagccatcactgttgcggctaagagggtgccagatgccaatgcctactggttacctaatgagaacgttatccgtaaattcaagaatgtcgatgtctcagtcgctgttgccacaccaacaggattattgacaccaattgtcaagaattgtgaggccaagggcttgtcgcaaatctctaacgaaatcaaggaactagtcaagcgtgccagaataaacaaattggcaccagaggaattccaaggtgggaccatttgcatatccaatatgggcatgaataatgctgttaacatgtttacttcgattatcaacccaccacagtctacaatcttggccatcgctactgttgaaagggtcgctgtggaagacgccgctgctgagaacggattctcctttgataaccaggttaccataacagggacctttgatcatagaaccattgatggcgccaaaggtgcagaattcatgaaggaattgaaaactgttattgaaaatcctttggaaatgctattgtga

SEQ ID NO: 9518 - DNA, 1449 bp, Artificial Sequence
  Description of Artificial Sequence: Synthetic polynucleotide
atgtctgcctttgtcagggtggttccaagaatatccagaagttctgtactcaccagaagtttgagattacaattgagatgctacgcaagctacccagagcacaccattattggtatgccggcattatctcctacgatgacgcaaggtaatcttgctgcttggactaagaaggaaggtgaccaattgtctcccggtgaagttattgccgaaatagaaacagacaaggctcaaatggactttgagttccaagaagatggttacttagccaagattttggttcctgaaggtacaaaggacattcctgtcaacaagcctattgccgtctatgtggaggacaaagctgatgtgccagcttttaaggactttaagttggaggattctggttctgattctaagaccagtacgaaggctcagcctgccgaaccacaggcagaaaagaaacaagaagcgccagctgaagagaccaagacttctgcacctgaagctaagaaatctgacgttgctgctcctcaaggtaggatttttgcctctccacttgccaagactatcgccttggaaaagggtatttctttgaaggatgttcacggcactggaccccgcggtagaattaccaaggctgacattgagtcttatttggaaaagtcttctaagcagtcttctcaaaccagtggtgctgccgccgccactcctgccgccgctaccagtagcactactgctggctctgctccatctccttcttctacagcaagttatgaggatgttccaatttctaccatgagaagcatcattggagaacgtttattgcaatctactcaaggcattccatcttacatcgtttcctccaagatatccatctccaaacttttgaaattgagacagtccttgaacgctacagcaaacgacaagtacaaactttccattaatgacttattagtaaaagccatcactgttgcggctaagagggtgccagatgccaatgcctactggttacctaatgagaacgttatccgtaaattcaagaatgtcgatgtcagtgtcgctgttgccacaccaacaggattattgacaccaattgtcaagaattgtgaggccaagggcttgtctcaaatctctaacgaaatcaaggaattggtcaagcgtgccagaataaacaaattggcaccagaggaattccaaggtgggaccatttgcatatccaatatgggcatgaataatgctgttaacatgtttacttctattatcaacccaccacagtctacaatcttggccatcgctactgttgaaagggtcgctgtggaagacgccgctgctgagaacggattctcctttgataaccaggttaccataacagggacctttgatcatagaaccattgatggcgccaaaggtgcagaattcatgaaggaattgaaaactgttattgaaaatcctttggaaatgcttttgtga

SEQ ID NO: 9519 - DNA, 183 bp, Saccharomyces cerevisiae
atgagtttcctaccatcttttatcttaagcgatgaatctaaagaacgtatttccaaaattttaactttgactcataatgtagcacattatggctggatcccatttgttttgtatttgggctgggcacacacttctaatagaccaaactttttgaacttactgtctccgttaccaagtgtttaa

SEQ ID NO: 9520 - DNA, 183 bp, Artificial Sequence
  Description of Artificial Sequence: Synthetic polynucleotide
atgagtttcttaccatcttttatcttaagcgatgaatctaaagaacgtatttccaaaattttaactttgactcataatgtagcacattatggctggatcccatttgttttgtatttgggctgggcacacacttctaatagaccaaactttttgaacttattatctccgttaccaagtgtttga

SEQ ID NO: 9521 - DNA, 597 bp, Saccharomyces cerevisiae
atgtctcaaccagtcgttgttattgatgctaaggatcatttgttgggtcgtttggcctccactattgccaagcaagtattgaacggtcaaaagattgtcgttgtcagagctgaagctttgaacatttctggtgaattcttcagaaacaagttgaagtaccacgactttttgagaaaggctactgctttcaacaagacccgtggtccattccatttcagagctccatctagaattctttacaaggctattcgtggtatggtttcccacaagaccgcccgtggtaaggctgccttggaacgtttaaagatcttcgaaggtattccacctccatacgacaaaaagaagagagttgtcgttcctcaagctttgagagttttgagattgaaaccaggtagaaagtacaccactttgggtaagttgtctacttctgttggttggaaatacgaagatgttgttgctaaattagaagacaagagaaaggtcagatccgccgaatattacgccaagaagagagctttcaccaaaaaggtctcctctgcttctgctgctgcttctgaatccgatgttgctaagcaattggcttctttcggttactaa

SEQ ID NO: 9522 - DNA, 597 bp, Artificial Sequence
  Description of Artificial Sequence: Synthetic polynucleotide
atgtctcaaccagtcgttgttattgatgctaaggatcatttgttgggtcgtttggcctccactattgccaagcaagtattgaacggtcaaaagattgtcgttgtcagagctgaagctttgaacatttctggtgaattcttcagaaacaagttgaagtaccacgactttttgagaaaggctactgctttcaacaagacccgtggtccattccatttcagagctccatctagaattctttacaaggctattcgtggtatggtttcccacaagaccgcccgtggtaaggctgccttggaacgtttaaagatcttcgaaggtattccacctccatacgacaaaaagaagagagttgtcgttcctcaagctttgagagttttgagattgaaaccaggtagaaagtacaccactttgggtaagttgtctacttctgttggttggaaatacgaagatgttgttgctaaattagaagacaagagaaaggtcagatccgccgaatattacgccaagaagagagctttcaccaaaaaggtctcctctgcttctgctgctgcttctgaatccgatgttgctaagcaattggcttctttcggttactga

SEQ ID NO: 9523 - DNA, 2589 bp, Saccharomyces cerevisiae
atgtccagcagcaattttaacgagatgaacgaactaaatatgactcaaacaaattatggcagcacaaaatataccgctcagcatcatcaaggtgtaataaatgccatcatctcttcactgacagccccagatcagccaactaccgtatcattacaatattccaacgacaagaacatggcgacggaaatacaagcttatgctaaactctccggaccaaactggacctattatgtgaaggatttggaagtttctattggtagaaatactgatcccttaaacagtgcactacaggaaaattcagatggtgtaaaaaactcatatagagtgaatattgatctcggacctgccaaagtcgtttctagaaagcacgccataataaaatacaacatgaatatcggcggttgggaattgcacatattgggccgtaacggcgctaaagtaaactttcaaaggactcataatggacccaacaatcctcccattcgattatcttccggaaccctgctagacataggaggaacacaaatgatgtttatcctgcccgacagtgacccggttgttgctcctatttgtatagaacacctgatgcctaatttaataaacatgttcggattggaaggcaacaacaaccccctgctaagagacattataaaacagtctaattatgctaagcaaaggcaattaacctctaatcaacaaatcaaagggtttaagctttatggaagtggtggcaatgctccttttggtagcggagcgaacttgggccctagcgaacaaggcatcttcaacaacaataataatagtaagaacaagaatggctactttacgtccataaacccaaactatacagcatctacaacaacaagcaataccatcaatccacaagcggcttctccacagggtcctccaaataccatcatcgctgcaaattttgtagattcatacaagtcatcaaatgcctatcctcaagctttggattttacttcggacctatcccatgacgaaaacaggaacgttaaaccacctcattcatacgcaactatgataacacaggccatactgtcgtcgccggagggagttatttcactagccgatatctacaagtatatttcttccaattatgcatactacaggtttgctaaatccggttggcaaaactccattaggcataatttatcattaaataaggcgtttgaaaaggttccgagaagacccaatgagccgggcaaaggtatgaaatggagaattagcgaatcttatcagcaagaatttctaaacaagtggaataccggaaaagtggggaaaatcaggcggggatcctcagtagcaaggcaactacagttacatatggcaaaattcaacagtttacccatggaaatggactataggttatcgcttaacatggctcaaccccctaaacgacaactacaatctcacaatgtgctagaaccatccaacaataacatcatagaagggttcgtacaacatgtcccatccaaaggtaaccttcctgcatcgcaacaatcacagccccctgtgtcacatcaaaatcagtcacagcagccgccaccacaggaacaacgtcaagagattcaatttaccttcgcggatacccaaaatcgaaatatagcgttagcaagacctatcaagacgccacaattgcaagctcccaattcaaatgctaacttaaatcaaaacaatatgaaagaatacaaagagtcacttcatccgcctgcaatatcaatatcacaaatgaataggcaatctccaaacaacgctctagtctcgttcactaatgcatgtgctaattccaaaataataaacaacatcagcgatagcgccgacaaatcgacaaacaataacggcggtaccaaaatgaatctacccgccatatctacttcttcacttgatgaaaatggtaatttggagccgacaactaccacgtcttccggtaattctaactcagttccgcaaactggaacaacaacttcctcattggcagcgaacagtctacgcctttctcaaccatatgacacgctattacgatctcctactaaggcatttcatattactgcgatggaagcatatacaccagaaagaggaagcgctaatagggctaggtcacctcttcatagtaatagcaacaatactaataataacggcgcaaataattctaatttacagactagcggaatggaaaacaaacaaacaggtctagtattggattctaatgtcttgaaaagcatggaatcaaacaatgataatagacggctgacaccatcaacaagtaaatcgcagaatgtcaaaagttctccaggtgtatggaatttattgcagtttagctcaacaaacaacactcctgccgcagatagcggaggcaacaagagaggattttccataaatccggacattaaagccaaagaaaacgagaatgctacttcagaaaaagattcggactctaactcaaatgatctggaaactaaagatattaattcttcacctttgaaaaaccaaggtggtagcaccgccaatgccaaggaactaatactagatacggatggtgcaaagatcagtattatcaacaactaa

SEQ ID NO: 9524 - DNA, 2589 bp, Artificial Sequence
  Description of Artificial Sequence: Synthetic polynucleotide
atgtccagcagcaattttaacgagatgaacgaattgaatatgactcaaacaaattatggcagcacaaaatataccgctcagcatcatcaaggtgtaataaatgccatcatctcttctttaacagccccagatcagccaactaccgtatctttacaatattccaacgacaagaacatggcgacggaaatacaagcttatgctaaactctccggaccaaactggacctattatgtgaaggatttggaagtttctattggtagaaatactgatcccttaaacagtgcattacaggaaaattctgatggtgtaaaaaacagttatagagtgaatattgatctcggacctgccaaagtcgtttctagaaagcacgccataataaaatacaacatgaatatcggcggttgggaattgcacatattgggccgtaacggcgctaaagtaaactttcaaaggactcataatggacccaacaatcctcccattagattatcttccggaaccttattagacataggaggaacacaaatgatgtttatcttgcccgacagtgacccggttgttgctcctatttgtatagaacacttgatgcctaatttaataaacatgttcggattggaaggcaacaacaaccccttattaagagacattataaaacagtctaattatgctaagcaaaggcaattaacctctaatcaacaaatcaaagggtttaagctttatggaagtggtggcaatgctccttttggtagcggagcgaacttgggccctagcgaacaaggcatcttcaacaacaataataatagtaagaacaagaatggctactttacgtccataaacccaaactatacagcatctacaacaacaagcaataccatcaatccacaagcggcttctccacagggtcctccaaataccatcatcgctgcaaattttgtagattcttacaagagtagtaatgcctatcctcaagctttggattttacttctgacttatcccatgacgaaaacaggaacgttaaaccacctcattcttacgcaactatgataacacaggccatattatcttctccggagggagttatttctttggccgatatctacaagtatatttcttccaattatgcatactacaggtttgctaaatccggttggcaaaactccattaggcataatttatctttaaataaggcgtttgaaaaggttccgagaagacccaatgagccgggcaaaggtatgaaatggagaattagcgaatcttatcagcaagaatttttgaacaagtggaataccggaaaagtggggaaaatcaggagaggatcctctgtagcaaggcaattgcagttacatatggcaaaattcaacagtttacccatggaaatggactataggttatctcttaacatggctcaaccccctaaaagacaattacaatctcacaatgtgttggaaccatccaacaataacatcatagaagggttcgtacaacatgtcccatccaaaggtaaccttcctgcatctcaacaatctcagccccctgtgtctcatcaaaatcagtctcagcagccgccaccacaggaacaacgtcaagagattcaatttaccttcgcggatacccaaaatagaaatatagcgttagcaagacctatcaagacgccacaattgcaagctcccaatagtaatgctaacttaaatcaaaacaatatgaaagaatacaaagagtctcttcatccgcctgcaatatccatatctcaaatgaataggcaatctccaaacaacgctttggtctctttcactaatgcatgtgctaattccaaaataataaacaacatcagcgatagcgccgacaaatctacaaacaataacggcggtaccaaaatgaatttgcccgccatatctacttcttctcttgatgaaaatggtaatttggagccgacaactaccacgtcttccggtaattctaactctgttccgcaaactggaacaacaacttcctctttggcagcgaacagtttacgcctttctcaaccatatgacacgttattaagatctcctactaaggcatttcatattactgcgatggaagcatatacaccagaaagaggaagcgctaatagggctaggtctcctcttcatagtaatagcaacaatactaataataacggcgcaaataattctaatttacagactagcggaatggaaaacaaacaaacaggtttagtattggattctaatgtcttgaaaagcatggaatctaacaatgataatagaagattgacaccatctacaagtaaatctcagaatgtcaaaagttctccaggtgtatggaatttattgcagtttagctctacaaacaacactcctgccgcagatagcggaggcaacaagagaggattttccataaatccggacattaaagccaaagaaaacgagaatgctacttctgaaaaagattctgactctaacagtaatgatttggaaactaaagatattaattcttctcctttgaaaaaccaaggtggtagcaccgccaatgccaaggaattgatattggatacggatggtgcaaagatcagtattatcaacaactga

SEQ ID NO: 9525 - DNA, 141 bp, Saccharomyces cerevisiae
atgtgtaaactcatgtggtgcactggtgttgtttccaagactgcactattaactgggaatttttttttttcttctagtgaatttttttttaaagcgacgcacaggaaaagtgaaaattatttaaacggacggcaaacatga

SEQ ID NO: 9526 - DNA, 141 bp, Artificial Sequence
  Description of Artificial Sequence: Synthetic polynucleotide
atgtgtaaactcatgtggtgcactggtgttgtttccaagactgcattattaactgggaatttttttttttcttctagtgaatttttttttaaagcgacgcacaggaaaagtgaaaattatttaaacggaagacaaacatga

SEQ ID NO: 9527 - DNA, 576 bp, Saccharomyces cerevisiae
atgaagtacattcaaaccgaacaacaaattgaaatcccagaaggtgttactgtcagcattaagtccagaatcgtcaaggttgtcggtccaagaggtactttgaccaagaacttgaagcatattgatgttaccttcaccaaggtcaacaaccaattgatcaaggttgctgttcacaacggtgacagaaagcacgttgccgctttgagaaccgttaaatctttggttgacaacatgatcactggtgtcaccaagggttacaagtacaagatgagatacgtctacgcgcatttcccaatcaacgtcaacattgttgaaaaggatggtgctaaattcattgaagtcagaaactttttgggtgacaagaagatcagaaacgtcccagttagagatggtgttactatcgaattctctactaacgtaaaggacgaaatcgtcttatctggtaactctgttgaagacgtttcccaaaatgccgctgacttgcaacaaatctgtcgtgttagaaacaaggatatccgtaagtttttggatggtatctacgtttcccacaagggtttcattgtcgaagacatgtaa

SEQ ID NO: 9528 - DNA, 576 bp, Artificial Sequence
  Description of Artificial Sequence: Synthetic polynucleotide
atgaagtacattcaaaccgaacaacaaattgaaatcccagaaggtgttactgtcagcattaagtccagaatcgtcaaggttgtcggtccaagaggtactttgaccaagaacttgaagcatattgatgttaccttcaccaaggtcaacaaccaattgatcaaggttgctgttcacaacggtgacagaaagcacgttgccgctttgagaaccgttaaatctttggttgacaacatgatcactggtgtcaccaagggttacaagtacaagatgagatacgtctacgcgcatttcccaatcaacgtcaacattgttgaaaaggatggtgctaaattcattgaagtcagaaactttttgggtgacaagaagatcagaaacgtcccagttagagatggtgttactatcgaattctctactaacgtaaaggacgaaatcgtcttatctggtaactctgttgaagacgtttcccaaaatgccgctgacttgcaacaaatctgtcgtgttagaaacaaggatatccgtaagtttttggatggtatctacgtttcccacaagggtttcattgtcgaagacatgtga

SEQ ID NO: 9529 - DNA, 1263 bp, Saccharomyces cerevisiae
atgaaactgtccgccaccactcttaccgcggcttcattgatcggttatagcacaatcgtttccgctttgccgtatgcggctgatattgacacaggatgtactactactgctcatggttcacaccagcataagagggccgttgcagttacatacgtttacgaaacagtcactgtcgataaaaatggtcagaccgtcactccaacctcaactgaagcctcttctacagttgcttccactactactctgatttccgaatcttcggtcaccaagtcttcttccaaagttgcttcttcttctgagagtactgaacaaatcgctaccacctcgtcttcggctcaaacaactctgacatcttcagaaacttctactagcgaatcctctgtgcctatttccacatctgggtcagcttccacatcttcagcagcttccagtgcaactggaagtatctacggtgatttggctgacttttcaggtccatatgaaaaatttgaagacggtaccattccttgcggccaatttccatctggtcaaggtgttatccccatcagctggttagatgaaggtggctggtctggtgttgaaaatactgacacttctacgggtggctcttgtaaagaagggtcttactgctcatacgcttgccaaccaggtatgtccaagacacaatggccttctgaccaaccatctgacggcagatccattggtggtttgctatgtaaggacggctacctgtaccgttcaaatacagatactgactatttatgcgaatggggcgttgatgccgcttacgtcgtctctgaattgagcaacgatgttgctatctgcaggaccgattacccgggtaccgaaaacatggtgattcctacatatgtgcaagcaggtgactctttacccttgactgtcgttgatcaggacacctactacacttggcaaggattgaagacatccgcgcaatactacgttaacaatgccggtatttctgtcgaagatgcttgtgtttggggttcttcaagttcaggcgtcggtaattgggctccattgaactttggcgctggttcttctgatggtgtcgcctacctttctttgattcccaacccaaacaacggtaacgcattgaatttcaatgtcaaaattgtcgccgctgatgactcttctacagtcaacggtgaatgtatctatgaaaacggtagcttcagcggtggctctgacggttgtaccgtttccgttactgctggcaaagctaagtttgttctatacaactaa

SEQ ID NO: 9530 - DNA, 1263 bp, Artificial Sequence
  Description of Artificial Sequence: Synthetic polynucleotide
atgaaactttccgccaccactcttaccgcggcttctttgatcggttatagcacaatcgtttccgctttgccgtatgcggctgatattgacacaggatgtactactactgctcatggttctcaccagcataagagggccgttgcagttacatacgtttacgaaacagtcactgtcgataaaaatggtcagaccgtcactccaacctctactgaagcctcttctacagttgcttccactactactttgatttccgaatcttctgtcaccaagtcttcttccaaagttgcttcttcttctgagagtactgaacaaatcgctaccacctcttcttctgctcaaacaactttgacatcttctgaaacttctactagcgaatcctctgtgcctatttccacatctgggtctgcttccacatcttctgcagcttccagtgcaactggaagtatctacggtgatttggctgacttttctggtccatatgaaaaatttgaagacggtaccattccttgcggccaatttccatctggtcaaggtgttatccccatcagctggttagatgaaggtggctggtctggtgttgaaaatactgacacttctacgggtggctcttgtaaagaagggtcttactgctcttacgcttgccaaccaggtatgtccaagacacaatggccttctgaccaaccatctgacggcagatccattggtggtttgttatgtaaggacggctacttgtaccgttccaatacagatactgactatttatgcgaatggggcgttgatgccgcttacgtcgtctctgaattgagcaacgatgttgctatctgcaggaccgattacccgggtaccgaaaacatggtgattcctacatatgtgcaagcaggtgactctttacccttgactgtcgttgatcaggacacctactacacttggcaaggattgaagacatccgcgcaatactacgttaacaatgccggtatttctgtcgaagatgcttgtgtttggggttcttccagttctggcgtcggtaattgggctccattgaactttggcgctggttcttctgatggtgtcgcctacctttctttgattcccaacccaaacaacggtaacgcattgaatttcaatgtcaaaattgtcgccgctgatgactcttctacagtcaacggtgaatgtatctatgaaaacggtagcttcagcggtggctctgacggttgtaccgtttccgttactgctggcaaagctaagtttgttctttacaactga

SEQ ID NO: 9531 - DNA, 1761 bp, Saccharomyces cerevisiae
atgtcacgaagtaacagtatatacacagaagatattgagatgtatcctactcacaatgagcagcatctgacgagagaatacacaaaaccagatggtcaaacgaaaagtgaaaaactaaatttcgaaggcgcttatatcaacagtcacgggactctatccaagactaccacaagggaaatagaaggcgatttagactctgagacttcttctcactccagtgatgataaagttgatccaacccaacagataactgcagagacaaaagcgccatatactttactaagttacggtcagaagtggggaatggttgcaattctaacaatgtgtggcttttggtcttcattgggatcaccgatctattatcccgctttgaggcagttggaaaagcaatttaatgtggatgaaaatatggttaacgttactgtggttgtgtatctgttgtttcaaggtatatctcccacagttagcggtggtctggcggattgctttggacggagacctataattttagcaggtatgctgatatacgttattgcatccatcgggctagcatgtgctccatcatacggtgttattatcttcttgaggtgtattcagagtattggtatttcccccacaattgcaatcagttctggtgttgtcggggacttcactttgaagcatgaaagaggtacatttgttggcgccacctcagggtttgttttactgggtcaatgttttggtagtcttattggtgccgtcctgactgcaaggtgggattggagagctatcttttggtttttgaccattggttgtggaagttgttttctaattgcctttcttattttgccagaaacaaagcgaaccattgcaggtaacctttccattaagcctaaaagattcatcaacagagcgccgattttcctactgggcccagttagaaggagattcaagtacgataatcctgattatgagacattagatcccaccattccgaaactagatttgtcatccgccgggaagatccttgtattgccagaaattattctgtctttatttccatcagggctcttatttgctatgtggacgttaatgctttcctctatttcatccggtttatcagtggcgccatacaactatcatttggtcattattggtgtgtgttatctacccggtggtattggcggtttaatgggttccttcttcacaggtagaattattgacatgtatttcaagagaaagatcaagaaattcgagcaagacaaagctaacgggttgattccacaagacgcagagattaatatgttcaaagtccgtttagtttgtcttctgccccaaaatttcttggccgtcgtagcctatcttttatttggttggagtatagataagggctggaggatcgaatctattttaattacttcatttgtctgttcatactgtgctatgagtacattatcaacatcaactacgttattggtcgatttgtacccaacgaaatcatctacagcaagtagttgtttcaactttgttaggtgcagtttgagtaccatcttcatgggttgctttgccaaaatgaaagctgcgatgactgtaggtggtacttttacatttttatgtgcgctggtatttttcttcaacttcttaatgtttattccgatgaaatatggtatgaagtggagggaggatagattattgaaacaacaaagacagtcttggttaaacaccttggcagtcaaagccaaaaagggaacaaaaagagaccagaacgataatcataattaa

SEQ ID NO: 9532 - DNA, 1761 bp, Artificial Sequence
  Description of Artificial Sequence: Synthetic polynucleotide
atgtctagaagtaacagtatatacacagaagatattgagatgtatcctactcacaatgagcagcatttaacgagagaatacacaaaaccagatggtcaaacgaaaagtgaaaaattgaatttcgaaggcgcttatatcaacagtcacgggactttatccaagactaccacaagggaaatagaaggcgatttagactctgagacttcttctcactccagtgatgataaagttgatccaacccaacagataactgcagagacaaaagcgccatatactttattaagttacggtcagaagtggggaatggttgcaattttaacaatgtgtggcttttggtcttctttgggatctccgatctattatcccgctttgaggcagttggaaaagcaatttaatgtggatgaaaatatggttaacgttactgtggttgtgtatcttttgtttcaaggtatatctcccacagttagcggtggtttggcggattgctttggaagaagacctataattttagcaggtatgttgatatacgttattgcatccatcgggttagcatgtgctccatcttacggtgttattatcttcttgaggtgtattcagagtattggtatttcccccacaattgcaatcagttctggtgttgtcggggacttcactttgaagcatgaaagaggtacatttgttggcgccacctctgggtttgttttattgggtcaatgttttggtagtcttattggtgccgtcttgactgcaaggtgggattggagagctatcttttggtttttgaccattggttgtggaagttgttttttgattgcctttcttattttgccagaaacaaagagaaccattgcaggtaacctttccattaagcctaaaagattcatcaacagagcgccgattttcttattaggcccagttagaaggagattcaagtacgataatcctgattatgagacattagatcccaccattccgaaattggatttgtcttccgccgggaagatccttgtattgccagaaattattttatctttatttccatctgggctcttatttgctatgtggacgttaatgctttcctctatttcttccggtttatctgtggcgccatacaactatcatttggtcattattggtgtgtgttatttacccggtggtattggcggtttaatgggttccttcttcacaggtagaattattgacatgtatttcaagagaaagatcaagaaattcgagcaagacaaagctaacgggttgattccacaagacgcagagattaatatgttcaaagtccgtttagtttgtcttttgccccaaaatttcttggccgtcgtagcctatcttttatttggttggagtatagataagggctggaggatcgaatctattttaattacttcttttgtctgttcttactgtgctatgagtacattatctacatctactacgttattggtcgatttgtacccaacgaaatcttctacagcaagtagttgtttcaactttgttaggtgcagtttgagtaccatcttcatgggttgctttgccaaaatgaaagctgcgatgactgtaggtggtacttttacatttttatgtgcgttggtatttttcttcaacttcttaatgtttattccgatgaaatatggtatgaagtggagggaggatagattattgaaacaacaaagacagtcttggttaaacaccttggcagtcaaagccaaaaagggaacaaaaagagaccagaacgataatcataattga

SEQ ID NO: 9533 - DNA, 1230 bp, Saccharomyces cerevisiae
atggttaaagaaactaagttttacgatattctaggtgttccagtaactgccactgatgtcgaaattaagaaagcttatagaaaatgcgccttaaaataccatccagataagaatccaagtgaggaagctgcagaaaagttcaaagaagcttcagcagcctatgaaattttatcagatcctgaaaagagagatatatatgaccaatttggtgaagatggtctaagtggtgctggtggcgctggcggattcccaggtggtggattcggttttggtgacgatatcttttcccaattctttggtgctggtggcgcacaaagaccaagaggtccccaaagaggtaaagatatcaagcatgaaatttctgcctcacttgaagaattatataagggtaggacagctaagttagcccttaacaaacagatcctatgtaaagaatgtgaaggtcgtggtggtaagaaaggcgccgtcaagaagtgtaccagctgtaatggtcaaggtattaaatttgtaacaagacaaatgggtccaatgatccaaagattccaaacagagtgtgatgtctgtcacggtactggtgatatcattgatcctaaggatcgttgtaaatcttgtaacggtaagaaagttgaaaacgaaaggaagatcctagaagtccatgtcgaaccaggtatgaaagatggtcaaagaatcgttttcaaaggtgaagctgaccaagccccagatgtcattccaggtgatgttgtcttcatagtttctgagagaccacacaagagcttcaagagagatggtgatgatttagtatatgaggctgaaattgatctattgactgctatcgctggtggtgaatttgcattggaacatgtttctggtgattggttaaaggtcggtattgttccaggtgaagttattgccccaggtatgcgtaaggtcatcgaaggtaaaggtatgccaattccaaaatacggtggctatggtaatttaatcatcaaatttactatcaagttcccagaaaaccatttcacatcagaagaaaacttgaagaagttagaagaaattttgcctccaagaattgtcccagccattccaaagaaagctactgtggacgaatgtgtactcgcagactttgacccagccaaatacaacagaacacgggcctccaggggtggtgcaaactatgattccgatgaagaagaacaaggtggcgaaggtgttcaatgtgcatctcaatga

SEQ ID NO: 9534 - DNA, 1230 bp, Artificial Sequence
  Description of Artificial Sequence: Synthetic polynucleotide
atggttaaagaaactaagttttacgatattttgggtgttccagtaactgccactgatgtcgaaattaagaaagcttatagaaaatgcgccttaaaataccatccagataagaatccaagtgaggaagctgcagaaaagttcaaagaagcttctgcagcctatgaaattttaagtgatcctgaaaagagagatatatatgaccaatttggtgaagatggtttgagtggtgctggtggcgctggcggattcccaggtggtggattcggttttggtgacgatatcttttcccaattctttggtgctggtggcgcacaaagaccaagaggtccccaaagaggtaaagatatcaagcatgaaatttctgcctctcttgaagaattatataagggtaggacagctaagttagcccttaacaaacagatcttgtgtaaagaatgtgaaggtcgtggtggtaagaaaggcgccgtcaagaagtgtaccagctgtaatggtcaaggtattaaatttgtaacaagacaaatgggtccaatgatccaaagattccaaacagagtgtgatgtctgtcacggtactggtgatatcattgatcctaaggatcgttgtaaatcttgtaacggtaagaaagttgaaaacgaaaggaagatcttggaagtccatgtcgaaccaggtatgaaagatggtcaaagaatcgttttcaaaggtgaagctgaccaagccccagatgtcattccaggtgatgttgtcttcatagtttctgagagaccacacaagagcttcaagagagatggtgatgatttagtatatgaggctgaaattgatttattgactgctatcgctggtggtgaatttgcattggaacatgtttctggtgattggttaaaggtcggtattgttccaggtgaagttattgccccaggtatgcgtaaggtcatcgaaggtaaaggtatgccaattccaaaatacggtggctatggtaatttaatcatcaaatttactatcaagttcccagaaaaccatttcacaagtgaagaaaacttgaagaagttagaagaaattttgcctccaagaattgtcccagccattccaaagaaagctactgtggacgaatgtgtactcgcagactttgacccagccaaatacaacagaacaagagcctccaggggtggtgcaaactatgattccgatgaagaagaacaaggtggcgaaggtgttcaatgtgcatctcaatga

SEQ ID NO: 9535 - DNA, 945 bp, Saccharomyces cerevisiae
atgcctcgaatatctacatcattgataagaaaagcttcgagaatacgacctggtttgcatcttttgcttccagaatgtaggactctcgagcaagcgaaactcgagtacaaatggctcaccgaagagctgcctccggataaatcaatccgctgggcttgcttacagagatacaaacacgtcccattgcagtacatcttaagatcgcaaccgtttggggccttggacatagtttgcaagcctggtgttcttataccaagatgggaaaccgaggaatgggtgatggccataataagagctctaaacaactctatgctttcaaggcatactataccactgcatatttgtgatacgtttacaggaacagggtgtattgctctcgctttgagtcatggtatagcaaattgcacgttcactgccattgacgtgtcaacaagagcaattaagttggttaaagaaaatatgctgaaaaacaaggtgagtggtggtaagctcgtgcaacataatatattgtcctcaaaagctagcgatgaatatccatcccatatagatatattaaccggtaaccccccctacattcgaaagcgtgacttcaatagagatgttaaaacttccgtaaagctgttcgaaccaaggctagcgctagtgggtgagcttgaatgctatataaatctagtaaattattggctgccgaagacagactccttcttttatgagattggagacgttgaacagtttaattacgtggagaggcgcattaaagaagattcatatctcagccgtatttggtctattggtttgaaatatgactcgaatgggaaagcaagagtcgtatatgggtttaaggccactcccaaagggcgaatactacaccagatttttgcatcctttgggactataagacatttagcaaccgcactcagtgggcacaaagctaattgcaactaa

SEQ ID NO: 9536 - DNA, 945 bp, Artificial Sequence
  Description of Artificial Sequence: Synthetic polynucleotide
atgcctagaatatctacatctttgataagaaaagcttccagaataaggcctggtttgcatcttttgcttccagaatgtaggactctcgagcaagcgaaactcgagtacaaatggctcaccgaagagcttcctccggataaatctatccgctgggcttgcttacagagatacaaacacgtcccattgcagtacatcttaagatctcaaccgtttggggccttggacatagtttgcaagcctggtgttcttataccaagatgggaaaccgaggaatgggtgatggccataataagagctttgaacaactctatgctttctaggcatactataccattgcatatttgtgatacgtttacaggaacagggtgtattgctctcgctttgagtcatggtatagcaaattgcacgttcactgccattgacgtgtctacaagagcaattaagttggttaaagaaaatatgttgaaaaacaaggtgagtggtggtaagctcgtgcaacataatatattgtcctctaaagctagcgatgaatatccatcccatatagatatattaaccggtaaccccccctacattagaaagcgtgacttcaatagagatgttaaaacttccgtaaagcttttcgaaccaaggttagcgttagtgggtgagcttgaatgctatataaatttggtaaattattggcttccgaagacagactccttcttttatgagattggagacgttgaacagtttaattacgtggagaggcgcattaaagaagattcttatctcagccgtatttggtctattggtttgaaatatgactctaatgggaaagcaagagtcgtatatgggtttaaggccactcccaaagggagaatattacaccagatttttgcatcctttgggactataagacatttagcaaccgcactcagtgggcacaaagctaattgcaactga

SEQ ID NO: 9537 - DNA, 1437 bp, Saccharomyces cerevisiae
atgaatgctttgacaaccatagattttaatcagcacgttatcgtccggctgccatcaaaaaattacaagatagtggaactaaagcccaacacctctgtatcattaggaaaattcggtgctttcgaggttaatgacataattggttatcctttcgggttgactttcgagatatattatgatggcgaagaggtttcatccgatgaaaatagagattcgaaaccaaagaacaaaattcccatcgggaaagtaaggctattatcgcaggagatcaaagatgtcaataatgataaagacgatggtcaaagcgagcctcctttatctattaaggaaaaatctgtgtctcttgaattgtctagcattgacagcagtgctacgaatcagaatctggttaacatgggcagcaaggcccaagagttaaccgttgaagaaattgaaaaaatgaaacaagaatctttatctagtaaagaaataatcgacaaaattatcaaatctcacaaaagttttcacaacaagaccgtatattctcaagagaaatatgtgaataggaagaaacaaaaattcgccaagtacttcaccgttgagtatttaagtagctctaaccttttacaattcttaatcgacaaaggcgatatccaaagggtattggatatgtctcaggaatcgatggggatgctgttaaatcttgcgaacatccaatcagaaggcaactatctctgtatggatgaaacgggtgggttattggtttactttctgttggaaagaatgtttggcggtgacaatgaaagcaaatccaagggcaaagtcatagttattcacgaaaatgaacatgccaacttggatttgctgaagtttgctaattattctgagaaatttattaaagagcatgtacacaccatttctctattagatttttttgaaccgcctacactacaagagattcagagcagatttacaccattacctaaagaagaagcccgtgcattaaaaggtggtaagaaaaactcgtactaccgaaaactcagatggtacaatacacaatggcaaattttagaactaacaggagaattcctatatgacggtcttgtaatggctactacactacatttaccaacactagtgccaaagttggccgaaaaaatccatggttcaaggccgattgtatgctatggtcaattcaaagaaactttgttggaattagctcatactttatattcagacctcaggtttttagcaccatcaattttggaaactagatgtaggccgtaccaaagtataaggggtaagctacaccctctgatgaccatgaaaggtggtggtggatatctaatgtggtgtcacagagtcatccctgctcctgaacctgtatcggaaaacgcgactgcagctgactccagtgaaaagcttgctgaacatggagctaagaaacaaaaaatataa

SEQ ID NO: 9538 - DNA, 1437 bp, Artificial Sequence
  Description of Artificial Sequence: Synthetic polynucleotide
atgaatgctttgacaaccatagattttaatcagcacgttatcgtcagattaccatctaaaaattacaagatagtggaattgaagcccaacacctctgtatctttaggaaaattcggtgctttcgaggttaatgacataattggttatcctttcgggttgactttcgagatatattatgatggcgaagaggtttcttccgatgaaaatagagattctaaaccaaagaacaaaattcccatcgggaaagtaaggttattatctcaggagatcaaagatgtcaataatgataaagacgatggtcaaagcgagcctcctttatctattaaggaaaaatctgtgtctcttgaattgtctagcattgacagcagtgctacgaatcagaatttggttaacatgggcagcaaggcccaagagttaaccgttgaagaaattgaaaaaatgaaacaagaatctttatctagtaaagaaataatcgacaaaattatcaaatctcacaaaagttttcacaacaagaccgtatattctcaagagaaatatgtgaataggaagaaacaaaaattcgccaagtacttcaccgttgagtatttaagtagctctaaccttttacaattcttaatcgacaaaggcgatatccaaagggtattggatatgtctcaggaaagtatggggatgcttttaaatcttgcgaacatccaaagtgaaggcaactatctctgtatggatgaaacgggtgggttattggtttactttttattggaaagaatgtttggcggtgacaatgaaagcaaatccaagggcaaagtcatagttattcacgaaaatgaacatgccaacttggatttgttgaagtttgctaattattctgagaaatttattaaagagcatgtacacaccatttctttattagatttttttgaaccgcctacattacaagagattcagagcagatttacaccattacctaaagaagaagcccgtgcattaaaaggtggtaagaaaaactcttactacagaaaactcagatggtacaatacacaatggcaaattttagaattaacaggagaattcctctatgacggtcttgtaatggctactacattgcatttaccaacattagtgccaaagttggccgaaaaaatccatggttctaggccgattgtatgctatggtcaattcaaagaaactttgttggaattagctcatactttatattctgacctcaggtttttagcaccatctattttggaaactagatgtaggccgtaccaaagtataaggggtaagttgcaccctttgatgaccatgaaaggtggtggtggatatttaatgtggtgtcacagagtcatccctgctcctgaacctgtatctgaaaacgcgactgcagctgactccagtgaaaagcttgctgaacatggagctaagaaacaaaaaatatga

SEQ ID NO: 9539 - DNA, 1857 bp, Saccharomyces cerevisiae
atgggtagtagacgtcataagaacaagcaagccgccccaccaaccctggaggagtttcaggcaagaaaggaaaagaaggctaatagaaagctagaaaaaggaaagagaccttctaccacgcaaggggatgaagtttctgatagaaagaaaaagaagtcgaagccattcaagaaatctagaaaagaggaggaagaagttgttgaagaggataaggatttgccagaagttgatcttgaagaattatcaaaagccaggaaatctttatttgatgatgaagaagatgacgatgaagcaggattggtggatgaagaactaaaagatgaatttgacttggaacaagaatatgattacgatgaagatgaagataatgacgcccacccaattttttcagatgacgacgatgaggctgatcttgaagaactaaatgcacaaaacatggaagctctttctaagaaacttgatgaagaagaagctgaagaagctgaagaagccgaaatggagttagtggaagcggagaacatgcaaccaagagcagacatattgcccactgaggagcaggaagaaatgatggcacaagaaactcctaatttaacttccacaagaacaagaatgattgaaattgtaaaggttttggaaaattttaagactcttggtgcagaaggcagatcgagaggagaatacgttgacagacttttgaaagatatttgtgagtactttggttatacaccatttttggcggaaaagttattcaatctattctcaccagcagaggcgatggagtttttcgaagccaatgaaattgcaagaccaataaccatcagaaccaacaccttgaagaccagaaggagagacttagctcaaactcttgtgaatagaggtgttaatctacaacctattggttcttggactaaagttggtcttcaaatattcgattcccaagtcccaattggtgctacgccagaatatttggcaggtcactatattttacaagcggcatcatcttttctaccagttattgctctagatcctcatgaaaatgagcgtatcttggatatggcagctgctccaggtggtaagaccacttatatatcagctatgatgaaaaacacaggttgtgttttcgctaacgacgccaataaatctagaacaaaatctttaattgctaatatccaccgtctaggctgtaccaacactattgtatgcaattacgatgcccgtgagttccctaaggtaattggaggttttgacagaattttactggatgccccatgttccggtactggtgttatcggtaaggatcaatctgtcaaggtgtctcgtaccgagaaggacttcattcaaattccacatctacaaaaacaattgcttctatccgccattgattctgttgattgcaactcgaaacatggtggtgtaatagtatattcgacatgttctgttgcagtggaagaggacgaagctgtcatagactatgcattgagaaaaagaccgaatgtcaagttagtcgatactggtttagcgatcggtaaagaagcgtttactagttacagaggcaaaaagtttcatcctagtgtgaaattagcgaggaggtactatccacatacgtacaacgtcgatgggttctttgtcgctaaattccaaaagatcggtccatcttcgtttgatgataaccaagcaagtgcaaaagaaaaggaaactgctgctagaaaggaagctttggaagaaggtatcattcactctgacttcgcaaccttcgaggacgaagaagacgataagtacattgaaaagtctgtgaaaaacaatcttttgaaaaagggtgtcaatccaaaagctaaaagaccttctaacgaaaaataa

SEQ ID NO: 9540 - DNA, 1857 bp, Artificial Sequence
  Description of Artificial Sequence: Synthetic polynucleotide
atgggtagtagacgtcataagaacaagcaagccgccccaccaaccttagaggagtttcaggcaagaaaggaaaagaaggctaatagaaagttggaaaaaggaaagagaccttctaccacgcaaggggatgaagtttctgatagaaagaaaaagaagtccaagccattcaagaaatctagaaaagaggaggaagaagttgttgaagaggataaggatttgccagaagttgatcttgaagaattatccaaagccaggaaatctttatttgatgatgaagaagatgacgatgaagcaggattggtggatgaagaattgaaagatgaatttgacttggaacaagaatatgattacgatgaagatgaagataatgacgcccacccaattttttctgatgacgacgatgaggctgatcttgaagaattgaatgcacaaaacatggaagctctttctaagaaacttgatgaagaagaagctgaagaagctgaagaagccgaaatggagttagtggaagcggagaacatgcaaccaagagcagacatattgcccactgaggagcaggaagaaatgatggcacaagaaactcctaatttaacttccacaagaacaagaatgattgaaattgtaaaggttttggaaaattttaagactcttggtgcagaaggcagatctagaggagaatacgttgacagacttttgaaagatatttgtgagtactttggttatacaccatttttggcggaaaagttattcaatttattctctccagcagaggcgatggagtttttcgaagccaatgaaattgcaagaccaataaccatcagaaccaacaccttgaagaccagaaggagagacttagctcaaactcttgtgaatagaggtgttaatttacaacctattggttcttggactaaagttggtcttcaaatattcgattcccaagtcccaattggtgctacgccagaatatttggcaggtcactatattttacaagcggcatcttcttttttaccagttattgctttagatcctcatgaaaatgagcgtatcttggatatggcagctgctccaggtggtaagaccacttatatatctgctatgatgaaaaacacaggttgtgttttcgctaacgacgccaataaatctagaacaaaatctttaattgctaatatccaccgtttaggctgtaccaacactattgtatgcaattacgatgcccgtgagttccctaaggtaattggaggttttgacagaattttattagatgccccatgttccggtactggtgttatcggtaaggatcaatctgtcaaggtgtctcgtaccgagaaggacttcattcaaattccacatttacaaaaacaattgcttctttccgccattgattctgttgattgcaactccaaacatggtggtgtaatagtatattctacatgttctgttgcagtggaagaggacgaagctgtcatagactatgcattgagaaaaagaccgaatgtcaagttagtcgatactggtttagcgatcggtaaagaagcgtttactagttacagaggcaaaaagtttcatcctagtgtgaaattagcgaggaggtactatccacatacgtacaacgtcgatgggttctttgtcgctaaattccaaaagatcggtccatcttcttttgatgataaccaagcaagtgcaaaagaaaaggaaactgctgctagaaaggaagctttggaagaaggtatcattcactctgacttcgcaaccttcgaggacgaagaagacgataagtacattgaaaagtctgtgaaaaacaatcttttgaaaaagggtgtcaatccaaaagctaaaagaccttctaacgaaaaatga

SEQ ID NO: 9541 - DNA, 2268 bp, Saccharomyces cerevisiae
atgtctagcagagacgcctctttgactcctcttaaggcagtagtgatagacgaccctccattgagacaaaccccagaaccattcgatgaacagtcagcttacaatccccagtcgcccattgccattgattttggatcaagcaaactgagagcaggattcgttaaccatgctacccctacacatatttttccgaatgcattgaccaagtttagagacagaaagttaaacaaaaatttcacttttgtcggtaatgacaccttgttggatcaagctgtgcgttcgcaatcgagaagcccctttgacggaccatttgtaaccaattggaatctcactgaagaaatattggactacacttttcatcatttgggagtggtaccagataacggaattcctaatccaatattacttaccgaaagactggcaactgttcaatcacaacggacaaattggtaccagattttgtttgaaacttacaatgtaccaggcgttactttcggaatagacagtctgtttagtttttacaattataacccaagcggaaataaaacaggtttggtcatcagttgtggccatgaggacaccaatgtaattcccgtagttgatggtgcaggtatcttgacagatgcaaaaaggattaattggggaggacatcaagcagttgactacttgaatgatttgatggctttgaagtatccatattttccaacaaagatgtcttatttgcagtatgaaacgatgtataaagattattgctatgtttcgcgaaattatgatgaagatattgaaaaaatcctcaccttggagaaccttgatacaaatgatgtggtagtggaagccccttttacagaagtccttcaacctcaaaagacagaagaagaattacgaattcaagccgaaaaaagaaaggaaactgggaaacgcttgcaagaacaggcacgtttgaaaagaatggaaaaattggttcagaagcaggaagaatttgaatacttctcaaaagttagagaccaattaattgacgaacctaagaagaaagtactctcggttttgcaaaacgctggttttgatgacgaacgtgattttaaaaagtatcttcatagcctagaacaatcattaaaaaaagcccaaatggttgaagcagaagatgatagtcacctggatgaaatgaatgaagacaaaacagcccagaaatttgatttgcttgatattgcagacgaagatctaaatgaagatcaaatcaaggagaaaaggaagcaaagatttttgaaggccagtcaagacgccaggcaaaaggctaaagaagaaaaggaaagagtcgccaaggaagaagaagaaaaaaaattaaaagagcaacaatggcgtgaaactgacttaaatggttggataaaggacaaaagattgaaattaaacaaattaataaaaaggagaaaagaaaagttaaaactacgtgacgaaatgaaggacagaaaatctcaagtttcacagaacagaatgaaaaatctagcttcattggctgaggataatgtcaaacaaggggccaaacgtaatagacaccaagcgacaatagataatgatccaaatgacacttttggcgctaatgatgaagactggcttatttatactgatattactcaaaatcctgaggcttttgaagaagcattagagtacgagtacaaagacatcgtggaactggagagactacttttagaacacgatccaaactttactgaagaagatacgctggaagcacagtacgattggagaaattctatcctccacctgtttttaagaggacctagacctcatgatagcgaaaatatacatgaacaacatcaaatgcatttgaatgtagaacgtataagggtaccagaagtgatatttcaaccgacaatgggcggacaagaccaagccggtatttgcgaattatcagaaaccattttactaaagaagtttggttctcaaccaggaaaattgagtcaaacttccatagacatggtgaacaacgttcttattaccggcggtaatgctaaggtgccaggattgaaagaacgtattgtgaaggaattcactggattccttcctaccggtaccaatatcactgtaaatatgtcttcagatccttcattggatgcctggaagggtatggcagctctagcacgaaacgaagaacagtataggaaaacagttatcagtaagaaagaatacgaagagtacggtccagagtacatcaaagagcataagttagggaatacgaagtattttgaagactaa

SEQ ID NO: 9542 - DNA, 2268 bp, Artificial Sequence
  Description of Artificial Sequence: Synthetic polynucleotide
atgtctagcagagacgcctctttgactcctcttaaggcagtagtgatagacgaccctccattgagacaaaccccagaaccattcgatgaacagtctgcttacaatccccagtctcccattgccattgattttggaagcagcaaattgagagcaggattcgttaaccatgctacccctacacatatttttccgaatgcattgaccaagtttagagacagaaagttaaacaaaaatttcacttttgtcggtaatgacaccttgttggatcaagctgtgcgttctcaatctagaagcccctttgacggaccatttgtaaccaattggaatctcactgaagaaatattggactacacttttcatcatttgggagtggtaccagataacggaattcctaatccaatattacttaccgaaagattagcaactgttcaatctcaaagaacaaattggtaccagattttgtttgaaacttacaatgtaccaggcgttactttcggaatagacagtttatttagtttttacaattataacccaagcggaaataaaacaggtttggtcatcagttgtggccatgaggacaccaatgtaattcccgtagttgatggtgcaggtatcttgacagatgcaaaaaggattaattggggaggacatcaagcagttgactacttgaatgatttgatggctttgaagtatccatattttccaacaaagatgtcttatttgcagtatgaaacgatgtataaagattattgctatgtttccagaaattatgatgaagatattgaaaaaatcctcaccttggagaaccttgatacaaatgatgtggtagtggaagccccttttacagaagtccttcaacctcaaaagacagaagaagaattaagaattcaagccgaaaaaagaaaggaaactgggaaacgcttgcaagaacaggcacgtttgaaaagaatggaaaaattggttcagaagcaggaagaatttgaatacttctccaaagttagagaccaattaattgacgaacctaagaagaaagtactcagtgttttgcaaaacgctggttttgatgacgaacgtgattttaaaaagtatcttcatagcttggaacaatctttaaaaaaagcccaaatggttgaagcagaagatgatagtcacttggatgaaatgaatgaagacaaaacagcccagaaatttgatttgcttgatattgcagacgaagatttgaatgaagatcaaatcaaggagaaaaggaagcaaagatttttgaaggccagtcaagacgccaggcaaaaggctaaagaagaaaaggaaagagtcgccaaggaagaagaagaaaaaaaattaaaagagcaacaatggcgtgaaactgacttaaatggttggataaaggacaaaagattgaaattaaacaaattaataaaaaggagaaaagaaaagttaaaattacgtgacgaaatgaaggacagaaaatctcaagtttctcagaacagaatgaaaaatttggcttctttggctgaggataatgtcaaacaaggggccaaacgtaatagacaccaagcgacaatagataatgatccaaatgacacttttggcgctaatgatgaagactggcttatttatactgatattactcaaaatcctgaggcttttgaagaagcattagagtacgagtacaaagacatcgtggaattagagagattacttttagaacacgatccaaactttactgaagaagatacgttagaagcacagtacgattggagaaattctatcctccacctttttttaagaggacctagacctcatgatagcgaaaatatacatgaacaacatcaaatgcatttgaatgtagaacgtataagggtaccagaagtgatatttcaaccgacaatgggcggacaagaccaagccggtatttgcgaattatctgaaaccattttattgaagaagtttggttctcaaccaggaaaattgagtcaaacttccatagacatggtgaacaacgttcttattaccggcggtaatgctaaggtgccaggattgaaagaacgtattgtgaaggaattcactggattccttcctaccggtaccaatatcactgtaaatatgtcttctgatccttctttggatgcctggaagggtatggcagctttggcaagaaacgaagaacagtataggaaaacagttatcagtaagaaagaatacgaagagtacggtccagagtacatcaaagagcataagttagggaatacgaagtattttgaagactga

SEQ ID NO: 9543 - DNA, 951 bp, Saccharomyces cerevisiae
atggttaagaaaaactttatcccgtctgtatcgctggtcagaagagaccttcctactttagttactactacaactagttcaaccgccctgtcaaagcccacgtcaagtgtagtgtccgaaacgagttccaagtcccttccatcgttaacatcttcggctttctcaacttccagtggagcaacatcctcctcatcactaattgtcgcaagtataacacccccatctacagcaggaaacccatttattttaaatgctgctgataaaccaaatggaactgtatacattgctgtgggtgctgtcataggtgccatttttatcagtattcttatatggtggttagtgtccagttatttgtctcgtcgtttcacaatgacaaattcttatgcaaatgatagtaaaaatttgtacaggggacaccacaagcatagttcttctttacaaagcaatccctttgacatcaatgatgagaaatcatatatgcaggatgattgggattctatgagccaattagaatctagccaatacgaggatgctgcctcaccattcaacccaattcaggatccgttcacagacaacagaagatccttatttatatctcctactttacaagtgtcacaatatgaaaaaagtcatagccgccatcaatcaaaagacactaacatttttattgacgatccatttttatacgtaggtacctatctagaagaagaagaagaagaagaagaagagagaaagctgaacctcaatagaccacaaagagcagcgtcacctgaaagaaaggaaaagaaaattaactcaatggaaggctaccataagagaaaccaatcctccttgggcctcataccagtcgcttctgctacctcaaatactagctctcctaaaaaggctcataaaagacaggcgccatcgatgtttttggatgatgtcctgaatggtagagaaataatctag

SEQ ID NO: 9544 - DNA, 951 bp, Artificial Sequence
  Description of Artificial Sequence: Synthetic polynucleotide
atggttaagaaaaactttatcccgtctgtatctttggtcagaagagaccttcctactttagttactactacaactagttctaccgccttgtccaagcccacgtccagtgtagtgtccgaaacgagttccaagtcccttccatctttaacatcttctgctttctctacttccagtggagcaacatcctcctcttctttgattgtcgcaagtataacacccccatctacagcaggaaacccatttattttaaatgctgctgataaaccaaatggaactgtatacattgctgtgggtgctgtcataggtgccatttttatcagtattcttatatggtggttagtgtccagttatttgtctcgtcgtttcacaatgacaaattcttatgcaaatgatagtaaaaatttgtacaggggacaccacaagcatagttcttctttacaaagcaatccctttgacatcaatgatgagaaaagttatatgcaggatgattgggattctatgagccaattagaatctagccaatacgaggatgctgcctctccattcaacccaattcaggatccgttcacagacaacagaagatccttatttatatctcctactttacaagtgagtcaatatgaaaaaagtcatagccgccatcaaagtaaagacactaacatttttattgacgatccatttttatacgtaggtacctatttggaagaagaagaagaagaagaagaagagagaaagttgaacctcaatagaccacaaagagcagcgtcccctgaaagaaaggaaaagaaaattaactccatggaaggctaccataagagaaaccaatcctccttgggcctcataccagtcgcttctgctacctctaatactagctctcctaaaaaggctcataaaagacaggcgccaagcatgtttttggatgatgtcttgaatggtagagaaataatctga

SEQ ID NO: 9545 - DNA, 594 bp, Saccharomyces cerevisiae
atgaaatacatacccccattaaatttttcgccagtggtgagcacggatgtatcgttatatcgatcgggatacccgatgccgttaaattatagtttcatcaagcatcagttacacttgaagaccataatatatattggcgataaagataggcctctcgaagaatatcaaagcttcctggagtcagaaaagataaaatactatcacatatttatggattcaagccgcgatgaaggaattcaagaaagaatgaaccaggtcttgcacttggtgctggatgtcagaaactatcccatcttagtgcattccaataagggcaagcaccgtgttggtgtagttgtgggaatcataagaaagttgttacagggatggtccactgcaggtatatgccaagagtacgggttattttctggtgggatgaaagatggagtagatttggagtttatcacaatgttcgaaaccaatctgaaaataccgagaaacgttatccctggctttgctaaacactgcttgtatttgaatgagctagaggctgcggaaggaagtgatgatgagtcaggaagtgagtctattctcactgccaagcaaccaatatga

SEQ ID NO: 9546 - DNA, 594 bp, Artificial Sequence
  Description of Artificial Sequence: Synthetic polynucleotide
atgaaatacatacccccattaaatttttctccagtggtgagcacggatgtatctttatatagatctggatacccgatgccgttaaattatagtttcatcaagcatcagttacacttgaagaccataatatatattggcgataaagataggcctctcgaagaatatcaaagcttcttggagagtgaaaagataaaatactatcacatatttatggattctagccgcgatgaaggaattcaagaaagaatgaaccaggtcttgcacttggtgttggatgtcagaaactatcccatcttagtgcattccaataagggcaagcaccgtgttggtgtagttgtgggaatcataagaaagttgttacagggatggtccactgcaggtatatgccaagagtacgggttattttctggtgggatgaaagatggagtagatttggagtttatcacaatgttcgaaaccaatttgaaaataccgagaaacgttatccctggctttgctaaacactgcttgtatttgaatgagttagaggctgcggaaggaagtgatgatgagagtggaagtgagtctattctcactgccaagcaaccaatatga

SEQ ID NO: 9547 - DNA, 852 bp, Saccharomyces cerevisiae
atgtctcctccagtttacagcgatatctccagaaatatcaatgacctattgaacaaggatttctatcatgctaccccagctgcctttgatgtgcaaacaacaaccgccaatggcattaagttctcattgaaggctaaacagcctgtcaaagacggtccactgtctactaacgtggaagcaaagttgaatgacaagcaaaccggcttgggtctaactcaaggctggtctaacacaaacaacttgcaaaccaaattagagtttgccaacttgacccctggtctaaagaacgaattgatcacttctttgactccaggcgtcgccaagtccgccgtcttaaacactacgttcacacaacctttcttcaccgcaagaggtgcctttgacttgtgtttgaagtcaccaacatttgttggtgacttaactatggcccacgaaggtattgttggtggcgcagagtttggttacgatatcagcgccggttccatttctcgttatgccatggctttaagttatttcgccaaagactactccttgggcgctacattgaacaacgagcaaataactaccgttgacttcttccaaaacgtcaacgcctttttacaggtcggtgctaaggctacaatgaactgcaaactacctaactccaatgtcaacatcgaattcgccactagatatttgcctgatgcatcttcccaagttaaggctaaggtgtccgattccggtattgtcactttggcttacaagcaattgttaagacctggcgtcactctgggtgtcggttcctctttcgatgctttgaagttgtctgaacctgttcacaagctaggttggtctttgtccttcgacgcttga

SEQ ID NO: 9548 - DNA, 852 bp, Artificial Sequence
  Description of Artificial Sequence: Synthetic polynucleotide
atgtctcctccagtttacagcgatatctccagaaatatcaatgacttgttgaacaaggatttctatcatgctaccccagctgcctttgatgtgcaaacaacaaccgccaatggcattaagttcagtttgaaggctaaacagcctgtcaaagacggtccattatctactaacgtggaagcaaagttgaatgacaagcaaaccggcttgggtttgactcaaggctggtctaacacaaacaacttgcaaaccaaattagagtttgccaacttgacccctggtttgaagaacgaattgatcacttctttgactccaggcgtcgccaagtccgccgtcttaaacactacgttcacacaacctttcttcaccgcaagaggtgcctttgacttgtgtttgaagtctccaacatttgttggtgacttaactatggcccacgaaggtattgttggtggcgcagagtttggttacgatatcagcgccggttccatttctcgttatgccatggctttaagttatttcgccaaagactactccttgggcgctacattgaacaacgagcaaataactaccgttgacttcttccaaaacgtcaacgcctttttacaggtcggtgctaaggctacaatgaactgcaaattacctaactccaatgtcaacatcgaattcgccactagatatttgcctgatgcatcttcccaagttaaggctaaggtgtccgattccggtattgtcactttggcttacaagcaattgttaagacctggcgtcactttaggtgtcggttcctctttcgatgctttgaagttgtctgaacctgttcacaagttgggttggtctttgtccttcgacgcttga

SEQ ID NO: 9549 - DNA, 3498 bp, Saccharomyces cerevisiae
atgacagaagaagatagaaagctcactgtagagacagaaacagttgaggcacccgtggcaaataatcttttattgtcgaataacagtaatgtagtagcacctaatccttctattccctctgcctccacatctacctctccgctacacagggaaatagttgatgattctgtcgctactgctaacaccaccagcaacgttgtacagcataatttgcccaccatagataacaatttaatggattccgatgccacgtcacataatcaagatcattggcattcagacataaacagggcaggaacatcaatgtcaacgagtgatatcccaacagatttacatttagaacatatcggctctgtttcatcaactaataataatagtaacaatgccctaatcaaccacaaccctctgtcatctcatctttccaatccgtcatcttcattacgaaacaagaagagctctttgttggtagcttctaaccctgcgtttgcttcagatgttgaactctcgaagaagaaacctgccgtcatctccaataatatgcctacaagtaacattgccctttatcaaacagcgagatcggcgaatattcatggtccatcatcaacttccgcatctaaagcgttcagaaaggcttcggccttctccaataacacggcacccagcactagtaataacatcggctcgaatacacctccagctcctcttttacctctaccttcactatcacaacaaaataagccaaaaataatagagaggcccacaatgcacgtcactaattcaagagaaatacttttaggtgaaaacctgttagatgatacaaaggcgaagaatgctcccgcgaattcaaccacacacgataatggtccagtagcaaatgatgggctgcgtataccgaatcactcgaacgcagatgataatgaaaataacaacaaaatgaagaagaataaaaacattaatagtgggaaaaatgaacgtaatgatgacaccagcaaaatatgcactacatctactaaaacagcgccttcaaccgcacctttgggcagtacagacaatactcaggctctcactgctagtgtctccagcagtaatgctgacaatcacaataataacaagaagaaaaccagcagcaacaacaacggcaataacagtaatagtgcatccaataaaaccaatgccgatatcaagaattctaacgccgacttgagcgcttctacctctaacaataatgcaataaatgacgactcacatgagagtaattcagaaaaaccaacaaaggcggattttttcgctgcaaggctggctacagctgtaggtgaaaatgaaattagtgattctgaggaaacatttgtttatgaatcggcagctaattcgactaaaaacctaatatttcctgactcctccagccagcagcagcagcagcaacagcaacctccaaaacaacagcaacagcaacaaaatcatggaataacctcaaagataagcgccccattgctaaacaataacaaaaaattattaagccgactgaaaaattcaagacatattagcactggtgccatattgaataacacaatcgcgactataagcacaaatccgaacttgaattctaatgtgatgcagaacaataacaatctgatgtcgggacacaatcacctggacgagttgagcagtataaaacaggagccaccgcatcaattgcagcagcagcaaccaccaatggatgtacaatcggtagattcgtatacctctgacaacccagacagcaatgttattgccaagtcgcctgataagaggtcaagcttagtatccctatctaaagtttctccacatttactttcatccacatcaagcaacggtaacacaatatcgtgtcccaatgttgccacaaattcgcaggaattggaaccaaacaatgatatttcaacgaagaaatctctttccaattctactttgagacattcctctgctaatagaaattctaattatggtgacaacaaaaggcctcttagaacaacagtgtcaaagatatttgattcaaaccctaatggagctcctttacggagatactctggggtaccggatcacgttaatctagaagattacatcgaacagccgcataattatccaacaatgcaaaatagtgtgaaaaaggatgaattttataacagcaggaacaataagtttccccatggtttaaacttttatggtgataacaatgttattgaagaggaaaataatggtgactcgtctaatgtaaatcgaccgcaacacactaaccttcagcatgagtttattccagaagataacgaaagtgatgaaaacgatattcactccatgttttattataatcataagaacgatttagaaacaaaaccgctaatatccgattatggtgaagatgaagacgtagatgattatgatcgcccaaatgctactttcaacagttactatggctcagcatccaacacgcacgaacttccattacatggaaggatgccttcaagatcaaataatgattactacgattttatggttggcaacaatactggcaataacaaccaattgaatgaatatacccccttaagaatgaaacgtggtcaaagacacctatcaagaacaaacaatagcataatgaatggtagcatccatatgaatggtaacgatgacgttacccattccaatatcaataataacgatattgttggttactcaccgcacaacttttactcaaggaagtccccatttgtgaaagtaaagaattttctttatcttgcatttgttatatcatcactattgatgacaggattcattctgggatttttattggccactaataaagaactacaagatgtagacgtggtagtgatggataatgtgatttcaagttcggacgagttgatcttcgacatcacagtaagtgcttttaatccaggattcttcagtataagcgtttcccaagtcgatttggacatttttgcaaaaagttcttacctgaagtgcgattctaatggtgactgtacagtaatggaacaggaacggaaaattttacaaataacgacaaatctttcgttagttgaagagagtgctaataatgatattagtggtgggaacatagagacggtattactaggaaccgctaaaaaactagagacaccattaaagttccagggcggcgcatttaataggaactacgatgtgtcagtctcgagtgtcaagcttttaagtcctgggtctcgtgaagccaagcacgaaaacgacgatgatgacgatgatgatggcgacgatggtgacgatgaaaacaatactaatgaaagacaatacaaaagcaaaccaaatgctagagatgacaaagaagatgatactaaaaaatggaagctactaatcaagcatgattacgaattgatagtccgtggaagcatgaagtatgaggtgccctttttcaatacgcaaaaatctacggctattcaaaaggattccatggtccatcctggtaagaagtga

SEQ ID NO: 9550 - DNA, 3498 bp, Artificial Sequence
  Description of Artificial Sequence: Synthetic polynucleotide
atgacagaagaagatagaaagctcactgtagagacagaaacagttgaggcacccgtggcaaataatcttttattgagcaataacagtaatgtagtagcacctaatccttctattccctctgcctccacatctacctctccgttgcacagggaaatagttgatgattctgtcgctactgctaacaccaccagcaacgttgtacagcataatttgcccaccatagataacaatttaatggattccgatgccacgagtcataatcaagatcattggcattctgacataaacagggcaggaacatctatgtctacgagtgatatcccaacagatttacatttagaacatatcggctctgtttcttctactaataataatagtaacaatgccttgatcaaccacaaccctttatcttctcatctttccaatccgtcttcttctttaagaaacaagaagagctctttgttggtagcttctaaccctgcgtttgcttctgatgttgaactctctaagaagaaacctgccgtcatctccaataatatgcctacaagtaacattgccctttatcaaacagcgagatctgcgaatattcatggtccatcttctacttccgcatctaaagcgttcagaaaggcttctgccttctccaataacacggcacccagcactagtaataacatcggcagtaatacacctccagctcctcttttacctttgccttctttatctcaacaaaataagccaaaaataatagagaggcccacaatgcacgtcactaattctagagaaatacttttaggtgaaaacttattagatgatacaaaggcgaagaatgctcccgcgaattctaccacacacgataatggtccagtagcaaatgatgggttacgtataccgaatcactccaacgcagatgataatgaaaataacaacaaaatgaagaagaataaaaacattaatagtgggaaaaatgaacgtaatgatgacaccagcaaaatatgcactacatctactaaaacagcgccttctaccgcacctttgggcagtacagacaatactcaggctctcactgctagtgtctccagcagtaatgctgacaatcacaataataacaagaagaaaaccagcagcaacaacaacggcaataacagtaatagtgcatccaataaaaccaatgccgatatcaagaattctaacgccgacttgagcgcttctacctctaacaataatgcaataaatgacgactctcatgagagtaattctgaaaaaccaacaaaggcggattttttcgctgcaaggttggctacagctgtaggtgaaaatgaaattagtgattctgaggaaacatttgtttatgaaagtgcagctaattctactaaaaacttgatatttcctgactcctccagccagcagcagcagcagcaacagcaacctccaaaacaacagcaacagcaacaaaatcatggaataacctccaagataagcgccccattgttgaacaataacaaaaaattattaagcaggttgaaaaattctagacatattagcactggtgccatattgaataacacaatcgcgactataagcacaaatccgaacttgaattctaatgtgatgcagaacaataacaatttaatgtctggacacaatcacttagacgagttgagcagtataaaacaggagccaccgcatcaattgcagcagcagcaaccaccaatggatgtacaaagtgtagattcttatacctctgacaacccagacagcaatgttattgccaagtctcctgataagaggagcagcttagtatccttatctaaagtttctccacatttactttcctccacatctagcaacggtaacacaatatcttgtcccaatgttgccacaaattctcaggaattggaaccaaacaatgatatttctacgaagaaatctctttccaattctactttgagacattcctctgctaatagaaattctaattatggtgacaacaaaaggcctcttagaacaacagtgagcaagatatttgattccaaccctaatggagctcctttaagaagatactctggggtaccggatcacgttaatttggaagattacatcgaacagccgcataattatccaacaatgcaaaatagtgtgaaaaaggatgaattttataacagcaggaacaataagtttccccatggtttaaacttttatggtgataacaatgttattgaagaggaaaataatggtgactcttctaatgtaaatagaccgcaacacactaaccttcagcatgagtttattccagaagataacgaaagtgatgaaaacgatattcactccatgttttattataatcataagaacgatttagaaacaaaaccgttgatatccgattatggtgaagatgaagacgtagatgattatgatcgcccaaatgctactttcaacagttactatggcagtgcatccaacacgcacgaacttccattacatggaaggatgccttccagatctaataatgattactacgattttatggttggcaacaatactggcaataacaaccaattgaatgaatatacccccttaagaatgaaacgtggtcaaagacacttatctagaacaaacaatagcataatgaatggtagcatccatatgaatggtaacgatgacgttacccattccaatatcaataataacgatattgttggttactctccgcacaacttttactctaggaagtccccatttgtgaaagtaaagaattttctttatcttgcatttgttatatcttctttgttgatgacaggattcattttaggatttttattggccactaataaagaattacaagatgtagacgtggtagtgatggataatgtgatttccagtagtgacgagttgatcttcgacatcacagtaagtgcttttaatccaggattcttcagtataagcgtttcccaagtcgatttggacatttttgcaaaaagttcttacttgaagtgcgattctaatggtgactgtacagtaatggaacaggaaagaaaaattttacaaataacgacaaatctttctttagttgaagagagtgctaataatgatattagtggtgggaacatagagacggtattattaggaaccgctaaaaaattagagacaccattaaagttccagggcggcgcatttaataggaactacgatgtgtctgtctctagtgtcaagcttttaagtcctgggtctcgtgaagccaagcacgaaaacgacgatgatgacgatgatgatggcgacgatggtgacgatgaaaacaatactaatgaaagacaatacaaaagcaaaccaaatgctagagatgacaaagaagatgatactaaaaaatggaagttattgatcaagcatgattacgaattgatagtccgtggaagcatgaagtatgaggtgccctttttcaatacgcaaaaatctacggctattcaaaaggattccatggtccatcctggtaagaagtga

SEQ ID NO: 9551 - DNA, 1470 bp, Saccharomyces cerevisiae
atgcaatttcactcagataagcagcatttggacagtaaaaccgacatcgatttcaagccaaactcaccgcgttccttacaaaataggaataccaaaaatttatctttagatatagcagcactccatccattaatggaattctcatcgccaagccaagatgtgccaggttcagtaaaattcccatcgccgacacctttgaatctatttatgaagcccaaacctattgtgttggagaaatgtccaccaaaagtaagtccaaggccaacgccaccatcgctgtcgatgaggcgaagcgaggcctctatatacacactaccaacatctttgaagaaccgaactgtttctccaagcgtgtatacaaaatcatccacagtatcgtctatcagtaagctgtcatcatcatcaccgttatcgtcattttcagaaaaacctcatctgaatagagtccattcattatccgtgaaaactaaagacttgaagttgaagggaattagaggacgttctcaaacgatctcagggttagagacatccacgccaatttctagtactcgtgaaggtactttagatagtacggatgtcaacagattttctaaccaaaagaatatgcaaacaacattgattttcccggaggaggactcggatctgaatattgatatggtgcatgcagagatttatcaacgaacggtttatttagatggaccattgctggtactgccgcctaatttgtatctatattcagaacccaaactagaagatatattatcgtttgatttagtcattaatgttgccaaagaaataccgaacctggagtttttaataccgccggaaatggcacataaaataaaatattaccatattgaatggacacacacatccaagatcgtcaaggacttatcccgattgacacgcattatacataccgctcattcgcaaggcaagaaaatactcgtacactgtcagtgtggagtatcaagatcggcgtcattgattgtggcgtatatcatgcgatattatggcttgagtttaaatgatgcatacaataagctgaaaggtgttgctaaggatataagtccaaacatgggtctcatcttccaacttatggaatggggaaccatgttgtccaagaactcaccgggcgaagaaggagagactgttcacatgcctgaggaagatgacatcggaaacaacgaagtttcctcgactacgaagtcctactcttctgcgtcctttagaagttttcccatggtaacgaatctatcatcgtcgccgaatgacagttctgtcaattcttcggaagtaacgccaagaactcctgctacgttgactggagcaaggaccgcactggccacagaacgcggggaagatgatgagcactgtaaaagtttgtctcaacccgcagattcactggaagcttctgtggacaacgaatcaatatctactgccccggaacagatgatgtttcttccttaa

SEQ ID NO: 9552 - DNA, 1470 bp, Artificial Sequence
  Description of Artificial Sequence: Synthetic polynucleotide
atgcaatttcacagtgataagcagcatttggacagtaaaaccgacatcgatttcaagccaaactctccgcgttccttacaaaataggaataccaaaaatttatctttagatatagcagcactccatccattaatggaattctcttctccaagccaagatgtgccaggttctgtaaaattcccatctccgacacctttgaatttatttatgaagcccaaacctattgtgttggagaaatgtccaccaaaagtaagtccaaggccaacgccaccatctttatctatgaggagaagcgaggcctctatatacacattaccaacatctttgaagaacagaactgtttctccaagcgtgtatacaaaatcttccacagtatcttctatcagtaagttatcttcttcttctccgttatcttctttttctgaaaaacctcatttgaatagagtccattctttatccgtgaaaactaaagacttgaagttgaagggaattagaggacgttctcaaacgatctctgggttagagacatccacgccaatttctagtactcgtgaaggtactttagatagtacggatgtcaacagattttctaaccaaaagaatatgcaaacaacattgattttcccggaggaggacagtgatttgaatattgatatggtgcatgcagagatttatcaaagaacggtttatttagatggaccattgttagtattaccgcctaatttgtatttgtattctgaacccaaattagaagatatattatcttttgatttagtcattaatgttgccaaagaaataccgaacttggagtttttaataccgccggaaatggcacataaaataaaatattaccatattgaatggacacacacatccaagatcgtcaaggacttatccagattgacacgcattatacataccgctcattctcaaggcaagaaaatactcgtacactgtcagtgtggagtatctagatctgcgtctttgattgtggcgtatatcatgagatattatggcttgagtttaaatgatgcatacaataagttgaaaggtgttgctaaggatataagtccaaacatgggtctcatcttccaacttatggaatggggaaccatgttgtccaagaactctccgggcgaagaaggagagactgttcacatgcctgaggaagatgacatcggaaacaacgaagtttccagcactacgaagtcctactcttctgcgtcctttagaagttttcccatggtaacgaatttatcttcttctccgaatgacagttctgtcaattcttctgaagtaacgccaagaactcctgctacgttgactggagcaaggaccgcattggccacagaacgcggggaagatgatgagcactgtaaaagtttgtctcaacccgcagattctttggaagcttctgtggacaacgaaagtatatctactgccccggaacagatgatgtttcttccttga

SEQ ID NO: 9553 - DNA, 462 bp, Saccharomyces cerevisiae
atgttacgtaacacttttactagagctggtggactatcacgtattacatccgtaagattcgctcaaacacatgctctttccaacgctgctgtaatggatctgcaatccagatgggagaacatgccctccactgagcagcaggatattgtcagtaagttgagtgaacgtcaaaaattaccatgggcacagcttactgagcctgaaaagcaagctgtgtggtacatttcttacggagaatggggcccaagaagacctgtattgaataagggtgattccagttttattgccaaaggtgttgctgcaggcctactattttcagtgggactttttgctgtcgtcaggatggcgggtggccaagacgcaaagaccatgaataaggagtggcagctaaagagtgacgaatatttgaagtcgaagaatgctaatccttggggtggttattctcaggtccaatctaaatga

SEQ ID NO: 9554 - DNA, 462 bp, Artificial Sequence
  Description of Artificial Sequence: Synthetic polynucleotide
atgttacgtaacacttttactagagctggtggattatctcgtattacatccgtaagattcgctcaaacacatgctctttccaacgctgctgtaatggatttgcaatccagatgggagaacatgccctccactgagcagcaggatattgtcagtaagttgagtgaacgtcaaaaattaccatgggcacagcttactgagcctgaaaagcaagctgtgtggtacatttcttacggagaatggggcccaagaagacctgtattgaataagggtgattccagttttattgccaaaggtgttgctgcaggcttacttttttctgtgggactttttgctgtcgtcaggatggcgggtggccaagacgcaaagaccatgaataaggagtggcagttgaagagtgacgaatatttgaagtccaagaatgctaatccttggggtggttattctcaggtccaatctaaatga

SEQ ID NO: 9555 - DNA, 1212 bp, Saccharomyces cerevisiae
atgacaatagcgccaatggcaaacgatttagaagattttgagtctctgctggagcctgattttgatgctaaacaatttggtaatgacttactgaaggctactaataacaatgacacaaccattttagaccttaacacgcctcttaaaaagctaaactatgatctacatgagattgactctagaatagaccaattgatgaatagcaacccattggagataatagagttaatttacaaaaatgaacacgtcaattcaaccatagttggtgagttgaaaccaagtttgggatatatgaatatgtcgtacgatagactaaagaatcaagttctagatccttatgaaagagcgaggaaagtccaactagcgttgagtaaagtttaccaaacatcttttctcttgcgcggagcattgctttatattcatttatcaaacaaattaaacgcactgtctaaaacagcccaactaagcacatcaacagctattaatttagcctccttacactaccaacttgaaattactttggaagaaaataaaaatctaaaatccttgcggaaaattaaacaattagatcaggacattgtttcccccaacaaaagagagttaataacatttttgtctttacaaatgtgtaaagagtgcttgaactctattaaaatcaaatcgaacaaagaaataatatctcagctggcctactccttatatctactttcatctcaagaattcgagtctgcaataaacaagattgtactatctaatgttacaatgagctcacaaatcctatcaaaaattttaaattctatcaggatgtttcctgatgcgttcaatgaagttgttgaaaaaggttataacatctacattttagaaacactactacagaacatcaaaacggataatgttacgaattcctcgagatctattgctgctaataaatcacgccttggcaatcttttatcagaatatacctcaatgaagagtaaagcaggttctggtacaccgagagatctgttttggagcaaagtttcatctgccttcaaaaaggactttgatatatctgttaatagaggaggccctgtgggcaagtcgctgttaaaaaataaagattttattataaacactatgaagcaaagtatgaaaaaatcttctgataatagtgattaccaaagctacttggatgtaatgctaaactcagtatctatttctctaaataagtga

SEQ ID NO: 9556 - DNA, 1212 bp, Artificial Sequence
  Description of Artificial Sequence: Synthetic polynucleotide
atgacaatagcgccaatggcaaacgatttagaagattttgagtctttattggagcctgattttgatgctaaacaatttggtaatgacttattgaaggctactaataacaatgacacaaccattttagaccttaacacgcctcttaaaaagttgaactatgatttgcatgagattgactctagaatagaccaattgatgaatagcaacccattggagataatagagttaatttacaaaaatgaacacgtcaattctaccatagttggtgagttgaaaccaagtttgggatatatgaatatgagttacgatagattaaagaatcaagttttggatccttatgaaagagcgaggaaagtccaattggcgttgagtaaagtttaccaaacatcttttctcttgcgcggagcattgctttatattcatttatctaacaaattaaacgcattatctaaaacagcccaattgagcacatctacagctattaatttagcctccttacactaccaacttgaaattactttggaagaaaataaaaatttgaaatccttgagaaaaattaaacaattagatcaggacattgtttcccccaacaaaagagagttaataacatttttgtctttacaaatgtgtaaagagtgcttgaactctattaaaatcaaaagtaacaaagaaataatatctcagttggcctactccttatatttactttcttctcaagaattcgagtctgcaataaacaagattgtattatctaatgttacaatgagctctcaaatcttatccaaaattttaaattctatcaggatgtttcctgatgcgttcaatgaagttgttgaaaaaggttataacatctacattttagaaacattgttacagaacatcaaaacggataatgttacgaattccagcagatctattgctgctaataaaagccgccttggcaatcttttatctgaatatacctccatgaagagtaaagcaggttctggtacaccgagagatttattttggagcaaagtttcttctgccttcaaaaaggactttgatatatctgttaatagaggaggccctgtgggcaagtctttattaaaaaataaagattttattataaacactatgaagcaaagtatgaaaaaatcttctgataatagtgattaccaaagctacttggatgtaatgttgaactctgtatctatttctttgaataagtga

SEQ ID NO: 9557 - DNA, 813 bp, Saccharomyces cerevisiae
atgtctgaatttaagatagtatcaagaaaagatctttataatgaaggagagggattaggagaagattatgattccaatagtagtagtaaaaataatagtgagcatgtagaggtattagtaccgccaacagaatttgaattcgttgaagttgaaagaaccgactcatcattagatctcaaagaaagtaataacagcgcacatgaacaaaaggaagaaaaacaagaagaattcgagttcccgttattttcgtttggtgtggttgaagcatcgactagcccagctcaagaagaacaaggttcatcaactcaagagaaggatacgccacagactgaagtaagtttgatgaaaatttcattgaaggaacctgaagaagaaataatcaaccaagaaaggcccaaagactactactttgcaagctattctgcagaccaaaagctgcaattccaacagagctctatcgactatgatgtgataatacaagaaagtacaaaaattctggaggatgatctacgtattcgtgataaatggccatattgccagggtcgaataatagatctgtataagcacaatgcgagaatagagttagagcagcagaaggaattgaagattaaaaagaggagacctggtcaaaagcaacgtgcagccaaaaaactggcacttgaaagaaccaaggagcgtgataccaaagctcgtgagataaagaaacagttgaagaaaaagtttcataagcgtggtggaaagaaaaacaaaaaaaaggtacctttgaacccactggcaaaagctggcagtacccctaagtttaggacagaatga

SEQ ID NO: 9558 - DNA, 813 bp, Artificial Sequence
  Description of Artificial Sequence: Synthetic polynucleotide
atgtctgaatttaagatagtatctagaaaagatctttataatgaaggagagggattaggagaagattatgattccaatagtagtagtaaaaataatagtgagcatgtagaggtattagtaccgccaacagaatttgaattcgttgaagttgaaagaaccgactcttctttagatctcaaagaaagtaataacagcgcacatgaacaaaaggaagaaaaacaagaagaattcgagttcccgttattttcttttggtgtggttgaagcatctactagcccagctcaagaagaacaaggttcttctactcaagagaaggatacgccacagactgaagtaagtttgatgaaaatttctttgaaggaacctgaagaagaaataatcaaccaagaaaggcccaaagactactactttgcaagctattctgcagaccaaaagttacaattccaacagagctctatcgactatgatgtgataatacaagaaagtacaaaaattttagaggatgatttacgtattcgtgataaatggccatattgccagggtagaataatagatttatataagcacaatgcgagaatagagttagagcagcagaaggaattgaagattaaaaagaggagacctggtcaaaagcaacgtgcagccaaaaaattggcacttgaaagaaccaaggagcgtgataccaaagctcgtgagataaagaaacagttgaagaaaaagtttcataagcgtggtggaaagaaaaacaaaaaaaaggtacctttgaacccattggcaaaagctggcagtacccctaagtttaggacagaatga

SEQ ID NO: 9559 - DNA, 2631 bp, Saccharomyces cerevisiae
atgtctcatcataagaagagggtgtaccctcaagctcaggtgccatacattgcaagtatgccaatagttgcagagcaacagcagtctcaacaacaaatcgaccaaacagcttatgcaatgggcaacctacaattgaacaatagggctaactcatttacacagctagctcaaaatcaacagtttcctggttctgggaaagtggtcaatcaactataccctgtggatttgtttacagaattacctccgccaatccgtgacctgtctttaccacctcttccaatcaccatttctcaggataacattgtgactccatccgaatattcaaatgttccataccagtacgtcagatctactttgaaagcggtgccaaaaacaaactctctgctgaagaaaacgaagttaccatttgccattgttattagaccatatttgcatttgcaagattcagacaaccaagtaccgctaaatactgacggagtcattgtccgctgtcgccgttgtcgttcatatatgaacccttttgtcgttttcattaaccaagggagaaaatggcaatgtaatatatgccgtttcaaaaatgatgtcccatttgggtttgatcagaacttacaaggcgctccaatcaacagatatgaaagaaacgaaattaaaaactctgtcgtggattacttggctcccgtagaatattctgttagggaacccccaccatctgtttatgtatttcttttagatgtttctcaaaacgctgtcaaaaatggtttattggctacttctgccagaaccattttagaaaacatagaatttctaccaaatcatgatggaaggaccagaattgctattatatgtgttgatcatagccttcattatttttacgttcctttggatgatgattatgaagtatcggatgaggatgatgaagaatcagatggtgaagaagaagatgaagacgaggaagaggaagacgttgataattcagaaacaattcaaatgtttgatattggcgatttggatgaaccatttttaccaatgccgagtgatgaattagtagttccactaaaatattgtaaaaataatctggaaacattgttgaaaaagatacctgaaatttttcaagacacacacagtagcaagtttgcacttggacctgccctaaaagctgcgtcaaatttgataaaaagcactggaggcaaagttgaagtcatttcatcaactttaccaaatactggcatcgggaaattgaaaaaaagaagtgaacagggcatattaaacacaccaaaagaaagctctcagctactgtcgtgtaaagattccttttataaaacattcacaattgagtgtaataaactacaaataacagtggacatgtttctggcatcagaggactacatggacgttgccactctatctcacctgggccgtttttctggtggtcaaacacatttttatcctggttttaatgccaccagtttgaacgatgttactaagtttactagggaattatcaaggcatttatccatggatatttcaatggaagctgttatgagagttcgttgttctactggcttgagggccacatcgttttttggccatttttttaacagatcctctgatttatgcgctttttccacaatgcctagagatcagtcttatcttttcgggatatccatcgaagactcattaatggcagaatattgctacttgcaagtgtcaacattgttgactctaaacactggtgaacgtagaattagagtcatgacgttagctctaccaacgtccgaatcagctagggaagtgtttgcatccgcagatcaactagccattactgatttcatgacacaaaacgcggtgactaaggctttgaattcaagcatgtactctgcgagggattttatcacaaaatcgctcgaagatattttaaatgcctacaaaaaagaaatttcgatgtctaatataaattcagtaacctcacttaacctatgcgcaaatttgagaatgttacctctattaatgaatggactaagtaaacatatagccctcagaccgggcgttgttccaagcgattaccgtgcaagtgcgttgaatagattggaaacggagcctcttcattatttgataaagagcatttaccctacagtttactccctgcacgacatgcccgacgaagtcggtctacctgactttgaaggaaaaacggttcttcctgaacctataaatgccactatatctcttttcgaaagatatggcctgtatttaattgacaattccgcagaattatttttatgggttggcggagatgctgttcctgagttactaatagatgtattcaatactgacaccatatctcaaattcctgtggggaaaagtgaactgcctcttttgaacgattcgcctttcaatgaaagactaaggaggataatcggtagaattagagaaaacaatgatacaatcacatttcaatcattatacataataagaggaccatctattaacgagcccgccaacctaaactccgaaaaagatatggcttctttaaggctatgggtattaagtactcttgtcgaagacaaagttttaaattgtgctagttatagagaatacttacagagtatgaagactagtatcaacagataa

SEQ ID NO: 9560 - DNA, 2631 bp, Artificial Sequence
  Description of Artificial Sequence: Synthetic polynucleotide
atgtctcatcataagaagagggtgtaccctcaagctcaggtgccatacattgcaagtatgccaatagttgcagagcaacagcagtctcaacaacaaatcgaccaaacagcttatgcaatgggcaacttacaattgaacaatagggctaactcttttacacagttagctcaaaatcaacagtttcctggttctgggaaagtggtcaatcaattgtaccctgtggatttgtttacagaattacctccgccaatccgtgacttgtctttaccacctcttccaatcaccatttctcaggataacattgtgactccatccgaatattctaatgttccataccagtacgtcagatctactttgaaagcggtgccaaaaacaaactctttattgaagaaaacgaagttaccatttgccattgttattagaccatatttgcatttgcaagattctgacaaccaagtaccgttaaatactgacggagtcattgtccgctgtcgccgttgtcgttcttatatgaacccttttgtcgttttcattaaccaagggagaaaatggcaatgtaatatatgccgtttcaaaaatgatgtcccatttgggtttgatcagaacttacaaggcgctccaatcaacagatatgaaagaaacgaaattaaaaactctgtcgtggattacttggctcccgtagaatattctgttagggaacccccaccatctgtttatgtatttcttttagatgtttctcaaaacgctgtcaaaaatggtttattggctacttctgccagaaccattttagaaaacatagaatttttaccaaatcatgatggaaggaccagaattgctattatatgtgttgatcatagccttcattatttttacgttcctttggatgatgattatgaagtatctgatgaggatgatgaagaaagtgatggtgaagaagaagatgaagacgaggaagaggaagacgttgataattctgaaacaattcaaatgtttgatattggcgatttggatgaaccatttttaccaatgccgagtgatgaattagtagttccattgaaatattgtaaaaataatttggaaacattgttgaaaaagatacctgaaatttttcaagacacacacagtagcaagtttgcacttggacctgccttgaaagctgcgtctaatttgataaaaagcactggaggcaaagttgaagtcatttcttctactttaccaaatactggcatcgggaaattgaaaaaaagaagtgaacagggcatattaaacacaccaaaagaaagctctcagttattaagttgtaaagattccttttataaaacattcacaattgagtgtaataaattacaaataacagtggacatgtttttggcaagtgaggactacatggacgttgccactttatctcacttgggccgtttttctggtggtcaaacacatttttatcctggttttaatgccaccagtttgaacgatgttactaagtttactagggaattatctaggcatttatccatggatatttccatggaagctgttatgagagttcgttgttctactggcttgagggccacatctttttttggccatttttttaacagatcctctgatttatgcgctttttccacaatgcctagagatcagtcttatcttttcgggatatccatcgaagactctttaatggcagaatattgctacttgcaagtgtctacattgttgactttgaacactggtgaacgtagaattagagtcatgacgttagctttgccaacgtccgaatctgctagggaagtgtttgcatccgcagatcaattggccattactgatttcatgacacaaaacgcggtgactaaggctttgaatagtagcatgtactctgcgagggattttatcacaaaatctctcgaagatattttaaatgcctacaaaaaagaaatttccatgtctaatataaattctgtaacctctcttaacttatgcgcaaatttgagaatgttacctttattaatgaatggattgagtaaacatatagccctcagaccgggcgttgttccaagcgattaccgtgcaagtgcgttgaatagattggaaacggagcctcttcattatttgataaagagcatttaccctacagtttactccttgcacgacatgcccgacgaagtcggtttgcctgactttgaaggaaaaacggttcttcctgaacctataaatgccactatatctcttttcgaaagatatggcttgtatttaattgacaattccgcagaattatttttatgggttggcggagatgctgttcctgagttattgatagatgtattcaatactgacaccatatctcaaattcctgtggggaaaagtgaattacctcttttgaacgattctcctttcaatgaaagattaaggaggataatcggtagaattagagaaaacaatgatacaatcacatttcaatctttatacataataagaggaccatctattaacgagcccgccaacttgaactccgaaaaagatatggcttctttaaggctttgggtattaagtactcttgtcgaagacaaagttttaaattgtgctagttatagagaatacttacagagtatgaagactagtatcaacagatga

SEQ ID NO: 9561 - DNA, 1647 bp, Saccharomyces cerevisiae
atgggcagtgcttggacaaactacaattttgaagaggttaagtctcattttgggttcaaaaaatatgttgtatcatctttagtactagtgtatggactaattaaggttctcacgtggatcttccgtcaatgggtgtattccagcttgaatccgttctccaaaaaatcttcattactgaacagagcagttgcctcctgtggtgagaagaatgtgaaagtttttggtttttttcatccgtattgtaatgctggtggtggtggggaaaaagtgctctggaaagctgtagatatcactttgagaaaagatgctaagaacgttattgtcatttattcaggggattttgtgaatggagagaatgttactccggagaatattctaaataatgtgaaagcgaagttcgattacgacttggattcggatagaatatttttcatttcattgaagctaagatacttggtggattcttcaacatggaagcatttcacgttgattggacaagcaattggatcaatgattctcgcatttgaatccattattcagtgtccacctgatatatggattgatacaatggggtaccctttcagctatcctattattgctaggtttttgaggagaattcctatcgtcacatatacgcattatccgataatgtcaaaagacatgttaaataagctgttcaaaatgcccaagaagggtatcaaagtttacggtaaaatattatactggaaagtttttatgttaatttatcaatccattggttctaaaattgatattgtaatcacaaactcaacatggacaaataaccacataaagcaaatttggcaatccaatacgtgtaaaattatatatcctccatgctctactgagaaattagtagattggaagcaaaagtttggtactgcaaagggtgagagattaaatcaagcaattgtgttggcacaatttcgtcctgagaaacgtcataagttaatcattgagtcctttgcaactttcttgaaaaatttaccggattctgtatcgccaattaaattgataatggcggggtccactagatccaagcaagatgaaaattatgttaaaagtttacaagactggtcagaaaatgtattaaaaattcctaaacatttgatatcattcgaaaaaaatctgcccttcgataagattgaaatattactaaacaaatctactttcggtgttaatgccatgtggaatgagcactttggaattgcagttgtagagtatatggcttccggtttgatccccatagttcatgcctcggcgggcccattgttagatatagttactccatgggatgccaacgggaatatcggaaaagctccaccacaatgggagttacaaaagaaatattttgcaaaactcgaagatgatggtgaaactactggatttttctttaaagagccgagtgatcctgattataacacaaccaaagatcctctgagataccctaatttgtccgaccttttcttacaaattacgaaactggactatgactgcctaagggtgatgggcgcaagaaaccagcagtattcattgtataaattctctgatttgaagtttgataaagattgggaaaactttgtactgaatcctatttgtaaattattagaagaggaggaaaggggctga

SEQ ID NO: 9562 - DNA, 1647 bp, Artificial Sequence
  Description of Artificial Sequence: Synthetic polynucleotide
atgggcagtgcttggacaaactacaattttgaagaggttaagtctcattttgggttcaaaaaatatgttgtatcttctttagtattggtgtatggattgattaaggttctcacgtggatcttccgtcaatgggtgtattccagcttgaatccgttctccaaaaaatcttctttattaaacagagcagttgcctcctgtggtgagaagaatgtgaaagtttttggtttttttcatccgtattgtaatgctggtggtggtggggaaaaagtgctctggaaagctgtagatatcactttgagaaaagatgctaagaacgttattgtcatttattctggggattttgtgaatggagagaatgttactccggagaatattttgaataatgtgaaagcgaagttcgattacgacttggattctgatagaatatttttcatttctttgaagttgagatacttggtggattcttctacatggaagcatttcacgttgattggacaagcaattggatccatgattctcgcatttgaatccattattcagtgtccacctgatatatggattgatacaatggggtaccctttcagctatcctattattgctaggtttttgaggagaattcctatcgtcacatatacgcattatccgataatgtccaaagacatgttaaataagcttttcaaaatgcccaagaagggtatcaaagtttacggtaaaatattatactggaaagtttttatgttaatttatcaatccattggttctaaaattgatattgtaatcacaaactccacatggacaaataaccacataaagcaaatttggcaatccaatacgtgtaaaattatatatcctccatgctctactgagaaattagtagattggaagcaaaagtttggtactgcaaagggtgagagattaaatcaagcaattgtgttggcacaatttcgtcctgagaaacgtcataagttaatcattgagtcctttgcaactttcttgaaaaatttaccggattctgtatctccaattaaattgataatggcggggtccactagatccaagcaagatgaaaattatgttaaaagtttacaagactggtctgaaaatgtattaaaaattcctaaacatttgatatctttcgaaaaaaatttgcccttcgataagattgaaatattattaaacaaatctactttcggtgttaatgccatgtggaatgagcactttggaattgcagttgtagagtatatggcttccggtttgatccccatagttcatgcctctgcgggcccattgttagatatagttactccatgggatgccaacgggaatatcggaaaagctccaccacaatgggagttacaaaagaaatattttgcaaaactcgaagatgatggtgaaactactggatttttctttaaagagccgagtgatcctgattataacacaaccaaagatcctttgagataccctaatttgtccgaccttttcttacaaattacgaaattagactatgactgcctcagggtgatgggcgcaagaaaccagcagtattctttgtataaattctctgatttgaagtttgataaagattgggaaaactttgtattgaatcctatttgtaaattattagaagaggaggaaaggggctga

SEQ ID NO: 9563 - DNA, 1971 bp, Saccharomyces cerevisiae
atgtcttaccaacggaacagtgcaagagcctctcttgacctcagaagtcaatatcaacaactggaaggcagaatgaggtcagaacattttaatcccgcctatcaacagcagcaacaaaaaggccagaacatacccctgtcactaccctcgtcgcttgcgcaacgcaatcctataccttaccctatcgacgctgtgacttccgatcccactatcccggctcagttgaacgtatatgatcacgatcggcaaaattcgatagtcgatgctgcggctggcaccaatacgacgcactctttgaactctaataatattccatcatcacaaaataataatattaataataacaatatcaataatgttggttccttcactgacccttccatgctaacgctgccaaaaatgtctttacatagccaccagaagcagtatgattctaaccaaaacgatcctaggtcccctctggcgatactgataccgacttctgcgcagcccactgatgtcttgtctgctaggttttctgcctggagaaatgttattcgtgccatcttggtatatctctctgagaccgcctcaatacaggacgaaatagttagacagcaactgaggttgtcccatgctgtgcagttcccctttttcagcattgaaaaccaatatcaaccggtctctaatgaagacaagtccatgcagaaattttttctgcccttaggaagtggatccgttcaagatttgcccacgatgctgaccaagtatcatgataatctggcctctttggcatcgaaaagttccaaggagttgaccagtgaaattatacccaggctagaggatttgagaagagatttactagtcaagattaaagaaattaaggctttgcaatctgattttaaaaattcctgtaacaaagagcttcagcaaactaaacacttgatgaagctttttaatgaatcattaaaagaatgtaaattaggtacaccaaagagtgacccatttttgataaaattgcaattggaaaagcaaatcaaaagacagttggtggaagaaaattatttgcacgaggcattcgataacttgcagaattcaggggcccagttagaaagtgttattgtaatggaaatacagaacggattgaccagctacgctagaattcttggcaaagaagcccaagttgtatttgactcagttatctctaaattagattccacgatactgaacaaaaacacgaatcttgaatgggatagtttcattctaaggaatatttccaattttgtgcctccaaatttacccatgaggaggtttaaagagatctcgtatagcaatcaaaacgatccttttacttttgaagttaaatctgggtttctggagaaaagatcaaaatttttaaagtcatactcacgtgggttttatgtcctcactccaagctttttacatgaatttaagacaccagataagcataaattttccacaccgttaatgtcaataccattagtggaatgtactgtcactgagcattccaaaaagacgaaatccaactcagagcagggcaagaacaagtttatattgcgtacgaattctaacggactaatacataggggtcacaactgggtattcaaagtagactcttatgacgatatgatagaatggtttggaaatatcaaagccttatcaagtttgcccaactatgacgacaaatgcaaatatgtgagtaaagttgccaaactgtctaaagaaaaagccaagagtaatgaaaacaccacggagagcgtgaccccccaggtaactaatgagcaacatacgagatacgatgatgtgagtagtagcaattttcccttgaattccattccaaaattagacaatttgacaatcactaacaccacgtcatcgataccggaaacgaatgattcacaaattcagaatagggttcctgaattttacattgaaaatgtagattcccctagaaaaagcaatcagctgtga

SEQ ID NO: 9564 - DNA, 1971 bp, Artificial Sequence
  Description of Artificial Sequence: Synthetic polynucleotide
atgtcttaccaaagaaacagtgcaagagcctctcttgacctcagaagtcaatatcaacaattggaaggcagaatgaggtctgaacattttaatcccgcctatcaacagcagcaacaaaaaggccagaacatacccttaagtttaccctcttctcttgcgcaacgcaatcctataccttaccctatcgacgctgtgacttccgatcccactatcccggctcagttgaacgtatatgatcacgatagacaaaattctatagtcgatgctgcggctggcaccaatacgacgcactctttgaactctaataatattccatcttctcaaaataataatattaataataacaatatcaataatgttggttccttcactgacccttccatgcttacgttaccaaaaatgtctttacatagccaccagaagcagtatgattctaaccaaaacgatcctaggtcccctttagcgatattaataccgacttctgcgcagcccactgatgtcttgtctgctaggttttctgcctggagaaatgttattcgtgccatcttggtatatctctctgagaccgcctctatacaggacgaaatagttagacagcaattaaggttgtcccatgctgtgcagttcccctttttcagcattgaaaaccaatatcaaccggtctctaatgaagacaagtccatgcagaaattttttttgcccttaggaagtggatccgttcaagatttgcccacgatgttgaccaagtatcatgataatttggcctctttggcatccaaaagttccaaggagttgaccagtgaaattatacccaggttagaggatttgagaagagatttattggtcaagattaaagaaattaaggctttgcaatctgattttaaaaattcctgtaacaaagagcttcagcaaactaaacacttgatgaagctttttaatgaatctttaaaagaatgtaaattaggtacaccaaagagtgacccatttttgataaaattgcaattggaaaagcaaatcaaaagacagttggtggaagaaaattatttgcacgaggcattcgataacttgcagaatagtggggcccagttagaaagtgttattgtaatggaaatacagaacggattgaccagctacgctagaattcttggcaaagaagcccaagttgtatttgactctgttatctctaaattagattccacgatattaaacaaaaacacgaatcttgaatgggatagtttcattttaaggaatatttccaattttgtgcctccaaatttacccatgaggaggtttaaagagatcagttatagcaatcaaaacgatccttttacttttgaagttaaatctgggtttttggagaaaagaagtaaatttttaaagtcctactctcgtgggttttatgtcctcactccaagctttttacatgaatttaagacaccagataagcataaattttccacaccgttaatgagtataccattagtggaatgtactgtcactgagcattccaaaaagacgaaatccaacagtgagcagggcaagaacaagtttatattgcgtacgaattctaacggattgatacataggggtcacaactgggtattcaaagtagactcttatgacgatatgatagaatggtttggaaatatcaaagccttatccagtttgcccaactatgacgacaaatgcaaatatgtgagtaaagttgccaaattatctaaagaaaaagccaagagtaatgaaaacaccacggagagcgtgaccccccaggtaactaatgagcaacatacgagatacgatgatgtgagtagtagcaattttcccttgaattccattccaaaattagacaatttgacaatcactaacaccacgtcttctataccggaaacgaatgattctcaaattcagaatagggttcctgaattttacattgaaaatgtagattcccctagaaaaagcaatcagttatga

SEQ ID NO: 9565 - DNA, 519 bp, Saccharomyces cerevisiae
atggagcacgtatcaaagaggtcaattgggcaattctttaagaggaaaacttcaactgtagatggaagcaaatcacagaaatgcggaaccactaaccaactgcggaagctgctgcataaaagaagggtacagaagcaggcagtgccggttgaatcccagtacagaattccgggtgattttagggataatcaaagcgtgagagtcaaaaactctatgtacaacagctcaccgtcagtaacgccatctacgcatcatatcaatgaaaggtatgttcgctatgacatcaacacaaggcctttggttgttgtgctcgcgatctcaattgtattttttggctgtctcctggtcctcaaggacatcatcatccagtcatcagaaaacatcctgagtgtttccaaatggaaaatcataggggcctccttcatgggtacgccctacacaggtcttctcacggggctcgttggccctctcctgtcaccattttcggctgtttcgtcgtggctttcattcatcttttga

SEQ ID NO: 9566 - DNA, 519 bp, Artificial Sequence
  Description of Artificial Sequence: Synthetic polynucleotide
atggagcacgtatccaagaggtctattgggcaattctttaagaggaaaacttctactgtagatggaagcaaatctcagaaatgcggaaccactaaccaattaagaaagttattacataaaagaagggtacagaagcaggcagtgccggttgaatcccagtacagaattccgggtgattttagggataatcaaagcgtgagagtcaaaaactctatgtacaacagctctccgtctgtaacgccatctacgcatcatatcaatgaaaggtatgttcgctatgacatcaacacaaggcctttggttgttgtgctcgcgatctctattgtattttttggctgtctcttggtcctcaaggacatcatcatccagtcttctgaaaacatcttaagtgtttccaaatggaaaatcataggggcctccttcatgggtacgccctacacaggtcttctcacggggctcgttggccctctcttgtctccattttctgctgtttcttcttggctttctttcatcttttga

SEQ ID NO: 9567 - DNA, 2016 bp, Saccharomyces cerevisiae
atgttcttgcttccatttgtcattcgtcattccagctctatttacctgcccacgcttcgatttcgaggtttacttactgtaatctcaagaaacatacacatttccacccctcataaaatgttgcctctttcaattgagcagagaagaccttcccgctcccccgaatacgatcagtctactttatcaaattataaggacttcgcagttcttcacaccgatttaaacctgtctgtttccttcgaaaagtcagccatttcagggagcgttacattccaattgaaaaaactgcacgaaggtaaaaataaatcggatgaattacatctggatacatcctatttggatgtccaggaggttcatattgatggttccaaggcagattttcaaattgagcaaagaaaggagccattgggctccaggttagtcatcaataacgcttcttgcaacgataactttaccttgaatattcaatttcgtacgactgacaagtgcaccgctttgcaatggttgaacagcaagcaaaccaagggcggtaaaccgtacgtgttttcacagttggaagctattcatgcgaggtctttgttcccctgctttgatactccctctgtgaagtctactttcactgcatctatcgagtccccactaccagtggttttttcaggcatcaggattgaagatacaagcaaggatactaatatttacagatttgaacagaaagtccctatcccagcctacctgatcggtattgcttccggtgatttgtcaagcgctccaattggacctcgttccacagtttacactgaaccatttcgtttgaaagattgtcaatgggaatttgaaaacgatgtagagaaattcattcaaactgcagagaaaattatctttgaatacgagtggggcacttatgatatcttagttaacgtcgattcgtacccttacggcggtatggagtctccgaatatgacttttgctacgcccaccttgattgcacatgacagatccaacattgatgtcatcgcccatgaacttgctcactcatggtctggtaacttagtgaccaattgttcgtggaatcatttttggttgaatgaaggttggaccgtttacttagaaagaagaattattggtgccattcatggcgaaccaactagacatttcagtgctctgattggttggagcgatttgcagaattctattgattctatgaaagatcctgaaagattttccactttggtacaaaacttgaacgataacactgaccctgacgatgccttttccactgttccgtacgaaaaggggttcaacttactatttcacttggaaactattttgggtggtaaggctgaatttgatccatttattagacactatttcaagaagtttgccaaaaaatcattggatactttccagtttttggatactttgtatgagttctatcccgaaaagaaagaaattttggattccgttgactgggaaacttggctgtataaaccaggtatgccaccaaggcctcattttattacggctttggctgataatgtttatcaattggctgacaagtgggtcgaaatggctcaacatttgaaaaccacagaggatttccggtctgaatttaacgctattgacattaaggattttaattcaaatcaattggttttgttcttggaaactttgacacaaaatggccattccaacaagaaaccaaaagattttgactgggccaagtttcccgtggcatctagggcactgttagatatctatcaagataacattgttaaatcacagaacgcggaagttgttttcaagatgttcaaatttcagatctttgccaagctgcaagaagaatataagcatttggccgattggttgggaactgtaggtagaatgaagtttgtccgtcccggttacagactattaaactctgtagaccgtcgattggcacttgcaactttcgacaaattcaaggacacgtatcatccaatctgtaaagctcttgtgaaacaagatttaggtctttga

SEQ ID NO: 9568 - DNA, 2016 bp, Artificial Sequence
  Description of Artificial Sequence: Synthetic polynucleotide
atgttcttgcttccatttgtcattcgtcattccagctctatttacttgcccacgcttagatttagaggtttacttactgtaatctccagaaacatacacatttccacccctcataaaatgttgcctctttctattgagcagagaagaccttcccgctcccccgaatacgatcagtctactttatccaattataaggacttcgcagttcttcacaccgatttaaacttatctgtttccttcgaaaagtctgccatttctgggagcgttacattccaattgaaaaaattacacgaaggtaaaaataaatctgatgaattacatttggatacatcctatttggatgtccaggaggttcatattgatggttccaaggcagattttcaaattgagcaaagaaaggagccattgggctccaggttagtcatcaataacgcttcttgcaacgataactttaccttgaatattcaatttcgtacgactgacaagtgcaccgctttgcaatggttgaacagcaagcaaaccaagggcggtaaaccgtacgtgttttcccagttggaagctattcatgcgaggtctttgttcccctgctttgatactccctctgtgaagtctactttcactgcatctatcgagtccccattaccagtggttttttctggcatcaggattgaagatacaagcaaggatactaatatttacagatttgaacagaaagtccctatcccagcctacttgatcggtattgcttccggtgatttgagtagcgctccaattggacctcgttccacagtttacactgaaccatttcgtttgaaagattgtcaatgggaatttgaaaacgatgtagagaaattcattcaaactgcagagaaaattatctttgaatacgagtggggcacttatgatatcttagttaacgtcgattcttacccttacggcggtatggagtctccgaatatgacttttgctacgcccaccttgattgcacatgacagatccaacattgatgtcatcgcccatgaacttgctcactcttggtctggtaacttagtgaccaattgttcttggaatcatttttggttgaatgaaggttggaccgtttacttagaaagaagaattattggtgccattcatggcgaaccaactagacatttcagtgctttgattggttggagcgatttgcagaattctattgattctatgaaagatcctgaaagattttccactttggtacaaaacttgaacgataacactgaccctgacgatgccttttccactgttccgtacgaaaaggggttcaacttactttttcacttggaaactattttgggtggtaaggctgaatttgatccatttattagacactatttcaagaagtttgccaaaaaatctttggatactttccagtttttggatactttgtatgagttctatcccgaaaagaaagaaattttggattccgttgactgggaaacttggttatataaaccaggtatgccaccaaggcctcattttattacggctttggctgataatgtttatcaattggctgacaagtgggtcgaaatggctcaacatttgaaaaccacagaggatttcagatctgaatttaacgctattgacattaaggattttaatagtaatcaattggttttgttcttggaaactttgacacaaaatggccattccaacaagaaaccaaaagattttgactgggccaagtttcccgtggcatctagggcattattagatatctatcaagataacattgttaaatctcagaacgcggaagttgttttcaagatgttcaaatttcagatctttgccaagttacaagaagaatataagcatttggccgattggttgggaactgtaggtagaatgaagtttgtccgtcccggttacagattattaaactctgtagaccgtcgtttggcacttgcaactttcgacaaattcaaggacacgtatcatccaatctgtaaagctcttgtgaaacaagatttaggtctttga

SEQ ID NO: 9569 - DNA, 531 bp, Saccharomyces cerevisiae
atgaatcagttaggagctttagcccaagtttcacgtttcactcaaaacttctccatggaaaatattaagagcgagttccaatccttgcaatctaaattagcaacccttcgcaccccgcaagaatttttcaatttcaagaaaatttccaaacctcaaaactttggggaagttcaatccagagtggcgtataacctgaagtacttttccagtaactatggtttgattattggttgtttgagcatttacacattattaacaaacttgttgctactctttgttattgttctagtcgtagctggtattgttggtataaacaaactaaagggtgaggagctcgtaactccatttggttctttcaagaccaaccaactatacaccggactggtttgtgttgctgtgccaataggtttcttagcttcgccaatctcaactttgctatggttgatcggtgcttctgccgtcagcgttttcggacatgcatcattgatggaaaaacccatcgaaactgtatttgatgaagaaactgtttga

SEQ ID NO: 9570 - DNA, 531 bp, Artificial Sequence
  Description of Artificial Sequence: Synthetic polynucleotide
atgaatcagttaggagctttagcccaagtttctcgtttcactcaaaacttctccatggaaaatattaagagcgagttccaatccttgcaatctaaattagcaacccttcgcaccccgcaagaatttttcaatttcaagaaaatttccaaacctcaaaactttggggaagttcaatccagagtggcgtataacttgaagtacttttccagtaactatggtttgattattggttgtttgagcatttacacattattaacaaacttgttgttgctctttgttattgttttggtcgtagctggtattgttggtataaacaaattgaagggtgaggagctcgtaactccatttggttctttcaagaccaaccaattgtacaccggattggtttgtgttgctgtgccaataggtttcttagcttctccaatctctactttgttatggttgatcggtgcttctgccgtcagcgttttcggacatgcaagtttgatggaaaaacccatcgaaactgtatttgatgaagaaactgtttga

SEQ ID NO: 9571 - DNA, 258 bp, Saccharomyces cerevisiae
atgattctcgctttgggcgacttcctgcctaaacaggaagacaaagcatgcgagaggccctgggttcaattcccagctcgccccgttatcttttttcaccatcagggcggaatttttttgtttagcatcaatcaacctaacctctcatgcttctccaagctgaaagaagtaaactcactctatgtacgtgttgcaacatatatctgccaaaagaatgaaagtaggttcagaacaaacagattgaaaggagaccagtaa

SEQ ID NO: 9572 - DNA, 258 bp, Artificial Sequence
  Description of Artificial Sequence: Synthetic polynucleotide
atgattctcgctttgggcgacttcttacctaaacaggaagacaaagcatgcgagaggccctgggttcaattcccagctcgccccgttatcttttttcaccatcagggcggaatttttttgtttagcatcaatcaacctaacctctcttgcttctccaagttgaaagaagtaaactctctctatgtacgtgttgcaacatatatctgccaaaagaatgaaagtaggttcagaacaaacagattgaaaggagaccagtga

SEQ ID NO: 9573 - DNA, 1191 bp, Saccharomyces cerevisiae
atgagtactttcaacagttacagccagccaaaggaaagcaatgataatagtcataataatgtcaacaagagcaaatcgctgttagatataatatttggtactaatgtatcggaatgggctttttctgagaatgctttaatgaaagctatggatttgaaaatagaacaagaaaagactaagcagcaatattataaacttgaaaacttgaatcgttcgatagagttgtttaagcttgcttccagttcaggtctgcccataaatcaaatacataaactattcaacaccgaccatggcgtaccggcgtcttcgccgatgaaggcagggggcaatcaaccacataacaatacagaaggcacgcaatcttcagaaaatctgcccagattgaatggttctatgaagtcattaaaacctctaaatatgaacacagtgtcaccaactccaatgagtcgacagccctctccatataagtttccagcatcatcctctaccggcggtatatcacactccacagttacaaatgtacaacgaagagctaattctcctgcaagaataggtgcatccgcagttgctgcgttgaatgacaatatttccattaaggaggaagatgtggctaggcgaattccctctggtacaaaatctcaagaatcgcctttaaacaagaagccgacttctcttcacagccgtaacttgtcacttccaataggaaagttcaccaatcctaatattccttctacaatgacatccatactaagtttcaatagagaccaacagcagccgctatctcaaccactgcctcctcctccacaacagcaacaggatctccacacgcacaatttacatactataccaaggaaacctggaatggttcaaaaaaagcataggcgtgcaagatccacatcctcctttggagtgatcgatttaagtattatcgatgaagcaaaagaaaaacaagtacagagatcaccatcccctatacattctaacgtgtccgtagcacttacctcacatgacaaaccaattgaatccaatatgaaggaacaaccaaatatgctgcaatcggttcgtgaaggacgtcaagtacacgatgacttggatgacagaacatgcagtgaaagcagtagtagaaacgaaagccccgtaagaaccatcacaaaggataattctgtaggcaagattttaaatagtacttga

SEQ ID NO: 9574 - DNA, 1191 bp, Artificial Sequence
  Description of Artificial Sequence: Synthetic polynucleotide
atgagtactttcaacagttacagccagccaaaggaaagcaatgataatagtcataataatgtcaacaagagcaaatctttattagatataatatttggtactaatgtatctgaatgggctttttctgagaatgctttaatgaaagctatggatttgaaaatagaacaagaaaagactaagcagcaatattataaacttgaaaacttgaatcgttctatagagttgtttaagcttgcttccagttctggtttgcccataaatcaaatacataaattattcaacaccgaccatggcgtaccggcgtcttctccgatgaaggcagggggcaatcaaccacataacaatacagaaggcacgcaatcttctgaaaatttgcccagattgaatggttctatgaagtctttaaaacctttaaatatgaacacagtgtctccaactccaatgagtaggcagccctctccatataagtttccagcatcttcctctaccggcggtatatctcactccacagttacaaatgtacaaagaagagctaattctcctgcaagaataggtgcatccgcagttgctgcgttgaatgacaatatttccattaaggaggaagatgtggctaggagaattccctctggtacaaaatctcaagaatctcctttaaacaagaagccgacttctcttcacagccgtaacttgtctcttccaataggaaagttcaccaatcctaatattccttctacaatgacatccatattgagtttcaatagagaccaacagcagccgttatctcaaccattgcctcctcctccacaacagcaacaggatctccacacgcacaatttacatactataccaaggaaacctggaatggttcaaaaaaagcataggcgtgcaagatccacatcctcctttggagtgatcgatttaagtattatcgatgaagcaaaagaaaaacaagtacagagatctccatcccctatacattctaacgtgtccgtagcacttaccagtcatgacaaaccaattgaatccaatatgaaggaacaaccaaatatgttacaatctgttcgtgaaggacgtcaagtacacgatgacttggatgacagaacatgcagtgaaagcagtagtagaaacgaaagccccgtaagaaccatcacaaaggataattctgtaggcaagattttaaatagtacttga

SEQ ID NO: 9575 - DNA, 2520 bp, Saccharomyces cerevisiae
atggatttcgttgtagactatcagacctacgcaatggcggatactgccacgccagaattaccagaacctgagccaagactaaacttaacctcagatgcacagtcacagcccaccggtaaactagatctacagtttaagttgcccgaccttcaacgttattccaataataatgcaactttgccagtagataatgatggtgctggttcgaaagacctacataagaaaatgacacattacgcaatgtcttccattgataaaatacagctttcaaatccaagcaaacaattagggcaaaattcccaggatgaaaaactatcgcagcaagaatctcaaaatttcacgaattacgagccaaaaaaccttgatttatcaaaattagtatccccgtcaagtggttccaacaaaaataccacaaatttggttctttcgaataaactatccaagatattgaacaattacacattgattaactatcaggccacagtccaactaagaaaatccctaaaggttctagaagagaataaagagagattgtcccttgatgaacaaaagctcatgaatcctgaatatgtaggtactttggcaagaagagcattgaggactgatttggaatctcaactgctaaaggaacatattacggtacttgaggaattcaaacctatcattagaaggattaaacgattatcttcttccgtcgaaaaaatacaaagaacgagcgaaaaattactaagtaatgagacaaatgaggttccaacaaataacgtggtacttcaggaaatagatcaataccgtttaaaggcagagcagttgaagctgaaaaaaaaaatactgttatctataagggataggtttactttgaatcaggtagaggacgatgtaatcaccaatggtactatagacaacatctttttcgaggtagtaaagaaagtaatcaatattaaagatgaatcaagtttcttgctgacgcttcctaatttgaatgctggaaatgctttgataatgggagttaatgaaattttagaaaagacaaacaaaaaaatcttcaattatttgatcgattttttatatagttttgaatcctcttcaaatttattaaatgaccatggtactactgaacaagaaagcttaaacatttttcggaagagtctggtcttcctgtcaagtgatctagaattatttaatgagttgttgaaaagagtgaccacactgagatccaagagtattctggatgagtttttgtctcaattcgatatgaattcaactacctctaaacccatcatattatcggcacacgatccaattaggtatattggtgacgtactagcgtccgttcattccatcatcgcaaatgaagctgatttcgtgaagtcactatttgactttcaggatgaagacttaaaagataccccaatttctatacttcaacaaaacaagacattcttgaaaggcatcgacaacaaattgctgaacgatatcatccagtcgctatccaattcgtgtcgtattcgtatcgagcaaatcgtgaggtttgaagaaaatccgatcatcaatttcgagattgtgaggctgctgaaactttacagagttatgttcgagagaaagggaattcaggacgatagttctattattaacaatttaaagtcgttggaagacatttccaaaaacagaattattggatactatgaagactatatgaagcaaacagtcatggcggaaacaaaaaattcttcagatgatttactgccaccagagtggctatcagagtatatgaataaattggtagagttatttgaaatttatgaaaagacacatgctgccgaagatgaggaatcagaagataataaattgctctcatctaagaatttacaaacaattgtagaacaaccaataaaagatgttctgttaaaacaattgcaaacatcttttcctttggcgaaaaaaaatgaaaaagaaaaggcatcattgctaactatagagataaactgtttcgatttaattaaatctagacttcaaccttttgagggattgtttgcacaagatgatgacagccggaaaatcaccatctgggtttgtgataaactgaaggaatatactaagcaaatgctaactttacaaataaaattcctatttgagaatacaggtttagacctttacagcaatttggtcaatatgatttttcctgtggactcagtaaaggatgaattggattatgatatgtacttagccctgagggataattcattgatggaattagacatggtcagaaaaaatgtgcatgataagttgaactattatctacctcaggcgttaacagatgttcaaggtaatttactatttaaattaacgtcaccaatgatagctgatgaaatatgcgatgaatgtttcaagaagttgtcgctattttataatatcttcaggaaactgttgattcatttgtatccgaacaagaaggatcaggtattcgaaattttaaatttttccactgatgaatttgacatgttgataggtattgatcactga

SEQ ID NO: 9576 - DNA, 2520 bp, Artificial Sequence
  Description of Artificial Sequence: Synthetic polynucleotide
atggatttcgttgtagactatcagacctacgcaatggcggatactgccacgccagaattaccagaacctgagccaagattgaacttaacctctgatgcacagtctcagcccaccggtaaattggatttacagtttaagttgcccgaccttcaacgttattccaataataatgcaactttgccagtagataatgatggtgctggttccaaagacttgcataagaaaatgacacattacgcaatgtcttccattgataaaatacagctttctaatccaagcaaacaattagggcaaaattcccaggatgaaaaattatctcagcaagaatctcaaaatttcacgaattacgagccaaaaaaccttgatttatccaaattagtatccccgtccagtggttccaacaaaaataccacaaatttggttctttctaataaactttccaagatattgaacaattacacattgattaactatcaggccacagtccaattgagaaaatccttgaaggttttggaagagaataaagagagattgtcccttgatgaacaaaagctcatgaatcctgaatatgtaggtactttggcaagaagagcattgaggactgatttggaatctcaattattgaaggaacatattacggtacttgaggaattcaaacctatcattagaaggattaaaagattatcttcttccgtcgaaaaaatacaaagaacgagcgaaaaattattaagtaatgagacaaatgaggttccaacaaataacgtggtacttcaggaaatagatcaataccgtttaaaggcagagcagttgaagttgaaaaaaaaaatattattatctataagggataggtttactttgaatcaggtagaggacgatgtaatcaccaatggtactatagacaacatctttttcgaggtagtaaagaaagtaatcaatattaaagatgaaagtagtttcttgttgacgcttcctaatttgaatgctggaaatgctttgataatgggagttaatgaaattttagaaaagacaaacaaaaaaatcttcaattatttgatcgattttttatatagttttgaatcctcttccaatttattaaatgaccatggtactactgaacaagaaagcttaaacatttttagaaagagtttagtcttcttatccagtgatttggaattatttaatgagttgttgaaaagagtgaccacattaagatccaagagtattttagatgagtttttgtctcaattcgatatgaattctactacctctaaacccatcatattaagtgcacacgatccaattaggtatattggtgacgtattggcgtccgttcattccatcatcgcaaatgaagctgatttcgtgaagtctttatttgactttcaggatgaagacttaaaagataccccaatttctatacttcaacaaaacaagacattcttgaaaggcatcgacaacaaattgttgaacgatatcatccagtccttgtccaattcttgtcgtattcgtatcgagcaaatcgtgaggtttgaagaaaatccgatcatcaatttcgagattgtgaggttattgaaactttacagagttatgttcgagagaaagggaattcaggacgatagttctattattaacaatttaaagtctttggaagacatttccaaaaacagaattattggatactatgaagactatatgaagcaaacagtcatggcggaaacaaaaaattcttctgatgatttattaccaccagagtggttatctgagtatatgaataaattggtagagttatttgaaatttatgaaaagacacatgctgccgaagatgaggaaagtgaagataataaattgctctcttctaagaatttacaaacaattgtagaacaaccaataaaagatgttttattaaaacaattgcaaacatcttttcctttggcgaaaaaaaatgaaaaagaaaaggcaagtttgttgactatagagataaactgtttcgatttaattaaatctagacttcaaccttttgagggattgtttgcacaagatgatgacagcagaaaaatcaccatctgggtttgtgataaattgaaggaatatactaagcaaatgttgactttacaaataaaattcttatttgagaatacaggtttagacctttacagcaatttggtcaatatgatttttcctgtggactctgtaaaggatgaattggattatgatatgtacttagccttaagggataattctttgatggaattagacatggtcagaaaaaatgtgcatgataagttgaactattatttacctcaggcgttaacagatgttcaaggtaatttactttttaaattaacgtctccaatgatagctgatgaaatatgcgatgaatgtttcaagaagttgtccttattttataatatcttcaggaaacttttgattcatttgtatccgaacaagaaggatcaggtattcgaaattttaaatttttccactgatgaatttgacatgttgataggtattgatcactga

SEQ ID NO: 9577 - DNA, 1371 bp, Saccharomyces cerevisiae
atgcccacacctatgacgcctgtcaaggtcggcgctttagcctgccagaggaactcatttctcttcgatgggttcaaaacactggttgtttcttgcgaaccaacgaagaataaaaagggagagattgaaggttatgagattgaactacaagatactattctgttccccgaaggtgggggccaaccaagtgattctggttttttgaaaattgttgaagggaatcgtaattcgtcgaaaattgagaagatattagtttcacacgtttctcgtttcggtttacatgcaaagcatcatgtcaatgactacattgagcccggaacaacagtggaagtggccgtggacgagcaaaagagaatggattatatgcaacaacatactggtcaacacttgttaagtgccattctggaacgcaactacaaagtagacactgtatcttggtcgatgggtggtatcatcacaaagaaaaaacctgttctagagcctagcgactatttcaattatatagagttgaacaggaaattgactctcgacgaaataacgaacgtatcagatgagattaatcagttgatcatcaactttcctcaggaaattattgtagaggaaagaatcggtgaagaaacagtagatgaagttagtacatccaaaattccagacgattacgacctctccaaaggtgttctacgtactatccacatcggtgacattgattctaacccatgttgtggtacacatttgaaatgtacctctcaaataggttccattttaattctttccaatcaatcagccgtaagaggttcaaactcaaggctctatttcatgtgtgggaagcgggtttctttgtatgcaaaatctgttaataaaattttactggattctaaaaacttattgagttgttcagaaactcaaatttctgagaagataacaaggcaaaccaaacaaattcaacaattaaataaaagagaacagtattggataaagagattagcacgtaccgcttctgaagaattaatgaacacactgaaagccagtggaaagaaaagggcttattttatggaagaagaatacggaacattggaactgttgctacagatccacaaggaagtatctaattttttgaaagatgatacagaaggttacgaaattatcctatgcggttatgaaagacaaacgaacactggctcactgctaattctttcggaatcgggtgaaaaaattgccaatttggctgctaacttaggttcgatactacaaaacctaaaaggcggtggtggtaagaaaggtggcaagtggcaaggtaaaattacatccatttcgaatgccgagtttgccgccctctctgattatttaagccatgatttcgcatcatgttga

SEQ ID NO: 9578 - DNA, 1371 bp, Artificial Sequence
  Description of Artificial Sequence: Synthetic polynucleotide
atgcccacacctatgacgcctgtcaaggtcggcgctttagcctgccagaggaactcttttctcttcgatgggttcaaaacattagttgtttcttgcgaaccaacgaagaataaaaagggagagattgaaggttatgagattgaattacaagatactattcttttccccgaaggtgggggccaaccaagtgattctggttttttgaaaattgttgaagggaatcgtaattcttctaaaattgagaagatattagtttctcacgtttctcgtttcggtttacatgcaaagcatcatgtcaatgactacattgagcccggaacaacagtggaagtggccgtggacgagcaaaagagaatggattatatgcaacaacatactggtcaacacttgttaagtgccattttggaacgcaactacaaagtagacactgtatcttggtctatgggtggtatcatcacaaagaaaaaacctgttttggagcctagcgactatttcaattatatagagttgaacaggaaattgactctcgacgaaataacgaacgtatctgatgagattaatcagttgatcatcaactttcctcaggaaattattgtagaggaaagaatcggtgaagaaacagtagatgaagttagtacatccaaaattccagacgattacgacctctccaaaggtgttttacgtactatccacatcggtgacattgattctaacccatgttgtggtacacatttgaaatgtacctctcaaataggttccattttaattctttccaatcaatctgccgtaagaggttccaacagcaggctctatttcatgtgtgggaagagagtttctttgtatgcaaaatctgttaataaaattttattagattctaaaaacttattgagttgttctgaaactcaaatttctgagaagataacaaggcaaaccaaacaaattcaacaattaaataaaagagaacagtattggataaagagattagcacgtaccgcttctgaagaattaatgaacacattaaaagccagtggaaagaaaagggcttattttatggaagaagaatacggaacattggaattattgttacagatccacaaggaagtatctaattttttgaaagatgatacagaaggttacgaaattatcctttgcggttatgaaagacaaacgaacactggctctttattgattctttctgaaagtggtgaaaaaattgccaatttggctgctaacttaggttccatattgcaaaacttgaaaggcggtggtggtaagaaaggtggcaagtggcaaggtaaaattacatccatttctaatgccgagtttgccgccctctctgattatttaagccatgatttcgcatcttgttga

SEQ ID NO: 9579 - DNA, 1785 bp, Saccharomyces cerevisiae
atgagtagtattgttaataaaagtggtacacgctttgcccctaaagtaaggcagcgtagagccgccactggaggaacaccaactccaaagccaagaacccctcaacttttcattcccgaaagtaaagaaatagaagaagataatagtgataacgataaaggtgttgatgaaaatgaaacggctattgttgagaaaccttcgctagttggagaacgctctttagaaggctttaccttaaccggcactaatggacatgataatgaaataggtgatgagggccccattgacgcctcgacccagaaccccaaagcagacgttatagaagataatgtgactctaaaaccggcacccttgcaaacccaccgagaccagaaggtaccgagatccagcagattagcttcactgagtaaggacaacgaaagtcgtccaagttttaaaccgtcatttctcgattcttccagtaacagtaatgggactgcgcgacgtttatctacaatctccaataagcttcctaaaaagataaggcttggaagcattacagaaaacgatatgaatctgaaaactttcaaaagacatagggttttgggcaaaccttcttcggctaagaaaccagcaggtgcacacagaatcagtattgtctccaaaatttctccacctacggcaatgaccgattctttggacaggaatgaattttcgtcagaaacttctacatcaagagaagctgatgagaatgaaaattatgtgattagcaaagtcaaagatatcccgaaaaaagtgagagatggggagtctgctaaatattttatcgatgaagagaattttacgatggcagagttgtgtaagccaaactttcctattggtcaaatatctgaaaactttgaaaaatctaaaatggcaaaaaaggcaaaattggaaaagagaaggcatcttagagaactcagaatgcgcgcacgacaagaatttaaaccactacactcattgactaaagaagaacaggaagaagaagaggagaagagaaaggaagaaagagataaactactcaacgctgacattcctgagtcagaccgcaaagcacatacggcgatccaactgaagcttaaccctgatggtactatggcaattgatgaagagactatggttgttgacagacacaaaaatgctagtatcgaaaatgaatataaagaaaaagttgatgaaaacccttttgccaatctttataattacgggtcgtatggtaggggttcatacacagacccgtggactgtggaagaaatgataaagttctacaaggcgctttctatgtgggggacagatttcaatttgatctcacaattatacccttatagatcaagaaaacaagtgaaggccaaattcgttaatgaggagaagaaacgtccaatattgattgaattggcccttcgatctaagctaccgcctaattttgatgagtattgctgcgaaatcaagaagaacattggtacagtagcagacttcaacgagaaactaatcgaattacaaaacgagcacaaacatcatatgaaggaaatcgaagaagcaaagaatacggcaaaggaggaagaccaaactgcacaaaggctaaatgatgctaatttgaataaaaagggatctggtggtattatgacaaatgatttgaaagtttatagaaaaacggaagttgttctgggtacaattgatgacttgaaaaggaagaaactcaaagaaaggaataatgatgacaatgaggataatgaaggaagtgaagaagagcctgagattgatcaataa

SEQ ID NO: 9580 - DNA, 1785 bp, Artificial Sequence
  Description of Artificial Sequence: Synthetic polynucleotide
atgagtagtattgttaataaaagtggtacacgctttgcccctaaagtaaggcagcgtagagccgccactggaggaacaccaactccaaagccaagaacccctcaacttttcattcccgaaagtaaagaaatagaagaagataatagtgataacgataaaggtgttgatgaaaatgaaacggctattgttgagaaaccttctttggttggagaacgctctttagaaggctttaccttaaccggcactaatggacatgataatgaaataggtgatgagggccccattgacgccagcacccagaaccccaaagcagacgttatagaagataatgtgactttgaaaccggcacccttgcaaacccacagagaccagaaggtaccgagatccagcagattagcttctttgagtaaggacaacgaaagtcgtccaagttttaaaccgtcctttctcgattcttccagtaacagtaatgggactgcgagacgtttatctacaatctccaataagcttcctaaaaagataaggcttggaagcattacagaaaacgatatgaatttgaaaactttcaaaagacatagggttttgggcaaaccttcttctgctaagaaaccagcaggtgcacacagaatcagtattgtctccaaaatttctccacctacggcaatgaccgattctttggacaggaatgaattttcttctgaaacttctacatctagagaagctgatgagaatgaaaattatgtgattagcaaagtcaaagatatcccgaaaaaagtgagagatggggagtctgctaaatattttatcgatgaagagaattttacgatggcagagttgtgtaagccaaactttcctattggtcaaatatctgaaaactttgaaaaatctaaaatggcaaaaaaggcaaaattggaaaagagaaggcatcttagagaactcagaatgcgcgcaagacaagaatttaaaccattacactctttgactaaagaagaacaggaagaagaagaggagaagagaaaggaagaaagagataaattactcaacgctgacattcctgagagtgaccgcaaagcacatacggcgatccaattgaagcttaaccctgatggtactatggcaattgatgaagagactatggttgttgacagacacaaaaatgctagtatcgaaaatgaatataaagaaaaagttgatgaaaacccttttgccaatctttataattacgggtcttatggtaggggttcttacacagacccgtggactgtggaagaaatgataaagttctacaaggcgctttctatgtgggggacagatttcaatttgatctctcaattatacccttatagatctagaaaacaagtgaaggccaaattcgttaatgaggagaagaaacgtccaatattgattgaattggcccttagatctaagttaccgcctaattttgatgagtattgctgcgaaatcaagaagaacattggtacagtagcagacttcaacgagaaattaatcgaattacaaaacgagcacaaacatcatatgaaggaaatcgaagaagcaaagaatacggcaaaggaggaagaccaaactgcacaaaggttgaatgatgctaatttgaataaaaagggatctggtggtattatgacaaatgatttgaaagtttatagaaaaacggaagttgttttaggtacaattgatgacttgaaaaggaagaaactcaaagaaaggaataatgatgacaatgaggataatgaaggaagtgaagaagagcctgagattgatcaatga

SEQ ID NO: 9581 - DNA, 690 bp, Saccharomyces cerevisiae
atgattagtaaagagtatgaatttggtaagactagtatactgaatagaaagaagtatacattagttatcgatgaagacaagaatggcaattttataagatttaccgttttacctgtatctaaccgaaagttcaaaaaagtcaagcaaaatgggagggtagagattaacatgggcatacaatatcaccaaattgtacttattttactactgaatattttgttctatgtaatttgcctaagatcaagatttctcgaacatattaatagaacttttgaagtgacaatcgcgcgaagtttccagatcttaattataatgggattgtttgccttaggtacaattatacttgtgaggggacctagtgtggaaactgtaacaattttcaaagaaagtggactacagctgtccagagtgaagggtatggttatatttcctcaacaatggaatcggaagttctttgaacaagtagagtttatatccaatgaaagaattattgatgtagtgatcaatgaaggattctgtcggggatttcgagtgatattctatcttgcagcaattgtacgtaaatcgtctacgcttaagctattatttccatcaaatttgcccagtatcgatgaccaacgtctaatatacaacatatctagaaaatatctcagtaagcaagaaaaacccctgagcagaccaaaagattga

SEQ ID NO: 9582 - DNA, 690 bp, Artificial Sequence
  Description of Artificial Sequence: Synthetic polynucleotide
atgattagtaaagagtatgaatttggtaagactagtatattgaatagaaagaagtatacattagttatcgatgaagacaagaatggcaattttataagatttaccgttttacctgtatctaacagaaagttcaaaaaagtcaagcaaaatgggagggtagagattaacatgggcatacaatatcaccaaattgtacttattttattattgaatattttgttctatgtaatttgcttgagatctagatttctcgaacatattaatagaacttttgaagtgacaatcgcgagaagtttccagatcttaattataatgggattgtttgccttaggtacaattatacttgtgaggggacctagtgtggaaactgtaacaattttcaaagaaagtggattacagttgtccagagtgaagggtatggttatatttcctcaacaatggaatagaaagttctttgaacaagtagagtttatatccaatgaaagaattattgatgtagtgatcaatgaaggattctgtaggggatttagggtgatattctatcttgcagcaattgtacgtaaatcttctacgcttaagcttttatttccatccaatttgcccagtatcgatgaccaacgtttaatatacaacatatctagaaaatatctcagtaagcaagaaaaacccttaagcagaccaaaagattga

SEQ ID NO: 9583 - DNA, 1083 bp, Saccharomyces cerevisiae
atgcttaacagaacaattgctaagagaactttagccactgccgctcaggcggaacgcaccctacccaagaagtatggcggtcgtttcaccgtcactttgatacctggtgacggtgttgggaaagaaatcactgattcagtgagaaccatttttgaggctgaaaatatcccgatcgactgggaaactataaacattaagcaaacagatcataaggaaggcgtctatgaagctgttgagtctctaaagagaaataagattggtcttaaggggctatggcacactcctgctgaccaaacaggtcacggttcactaaacgttgctttgcgtaaacaactagatatctacgccaatgtggcccttttcaaatccttgaagggtgtcaagactagaattccagacatagatttgattgtcattagagaaaacacggagggtgagttctcaggcctggaacatgaatccgtccctggtgtagtggaatctttgaaagttatgactagacctaagacagaaaggatcgccagatttgcctttgacttcgccaagaaatacaacagaaagtctgtcacagctgtgcataaggcaaatatcatgaagttaggtgacggtctgttcagaaatataataactgaaattggccaaaaagaatatcctgatattgacgtatcgtccatcattgtcgacaatgcctccatgcaggcggtggccaaacctcatcaatttgatgtcctagttaccccttcaatgtacggtaccatcttaggcaacattggcgctgctttgatcggtggtccaggattggtggcaggtgccaactttggcagggactatgctgtcttcgaaccaggttccagacatgttggtttagatattaaaggccaaaatgtggctaacccaactgccatgatcctttcctccacgttaatgttgaaccatttgggtttgaatgaatatgctactagaatctcaaaggcagttcatgaaacgatcgcagaaggtaagcataccactagagatattggtggttcctcttctactactgacttcacgaatgaaatcatcaacaaattatctaccatgtaa

SEQ ID NO: 9584 - DNA, 1083 bp, Artificial Sequence
  Description of Artificial Sequence: Synthetic polynucleotide
atgcttaacagaacaattgctaagagaactttagccactgccgctcaggcggaacgcaccttgcccaagaagtatggcggtcgtttcaccgtcactttgatacctggtgacggtgttgggaaagaaatcactgattctgtgagaaccatttttgaggctgaaaatatcccgatcgactgggaaactataaacattaagcaaacagatcataaggaaggcgtctatgaagctgttgagtctttgaagagaaataagattggtcttaaggggttgtggcacactcctgctgaccaaacaggtcacggttctttgaacgttgctttgcgtaaacaattggatatctacgccaatgtggcccttttcaaatccttgaagggtgtcaagactagaattccagacatagatttgattgtcattagagaaaacacggagggtgagttcagtggccttgaacatgaatccgtccctggtgtagtggaatctttgaaagttatgactagacctaagacagaaaggatcgccagatttgcctttgacttcgccaagaaatacaacagaaagtctgtcacagctgtgcataaggcaaatatcatgaagttaggtgacggtcttttcagaaatataataactgaaattggccaaaaagaatatcctgatattgacgtatcttccatcattgtcgacaatgcctccatgcaggcggtggccaaacctcatcaatttgatgtcttggttaccccttctatgtacggtaccatcttaggcaacattggcgctgctttgatcggtggtccaggattggtggcaggtgccaactttggcagggactatgctgtcttcgaaccaggttccagacatgttggtttagatattaaaggccaaaatgtggctaacccaactgccatgatcctttcctccacgttaatgttgaaccatttgggtttgaatgaatatgctactagaatctccaaggcagttcatgaaacgatcgcagaaggtaagcataccactagagatattggtggttcctcttctactactgacttcacgaatgaaatcatcaacaaattatctaccatgtga

SEQ ID NO: 9585 - DNA, 666 bp, Saccharomyces cerevisiae
atgagcgctaccgaatcttcatctatattcacattgagtcacaactcaaacctacaagatatcttggccgccaatgccaaatgggcctcccagatgaacaacatacagccaactttgttcccagatcacaatgcgaagggccagtcccctcacactcttttcatcggctgctccgattcgcgttacaacgaaaactgtttaggtgtcttgcccggcgaagtgttcacttggaaaaatgttgctaacatatgtcactcagaggatttaactttgaaggccactttagagtttgccattatttgtctaaaagttaacaaagttattatttgtggccacactgattgtggtggtataaagacatgtttaactaaccaaagggaagccttaccaaaagttaactgttctcatctgtacaagtacttagacgatattgacaccatgtaccatgaagagtcacaaaatttgatccatttgaaaacgcaacgtgaaaaatctcattacctgtcgcactgtaacgtcaaaaggcagtttaataggattattgaaaaccctactgtgcaaactgctgtacaaaatggagaattacaggtatacggtctgctttacaacgtagaggacggtctactgcaaacagttagcacttacacaaaagttaccccaaaatag

SEQ ID NO: 9586 - DNA, 666 bp, Artificial Sequence
  Description of Artificial Sequence: Synthetic polynucleotide
atgagcgctaccgaatcttcttctatattcacattgagtcacaactccaacttacaagatatcttggccgccaatgccaaatgggcctcccagatgaacaacatacagccaactttgttcccagatcacaatgcgaagggccagtcccctcacactcttttcatcggctgctccgattctcgttacaacgaaaactgtttaggtgtcttgcccggcgaagtgttcacttggaaaaatgttgctaacatatgtcacagcgaggatttaactttgaaggccactttagagtttgccattatttgtttgaaagttaacaaagttattatttgtggccacactgattgtggtggtataaagacatgtttaactaaccaaagggaagccttaccaaaagttaactgttctcatctttacaagtacttagacgatattgacaccatgtaccatgaagagtctcaaaatttgatccatttgaaaacgcaacgtgaaaaatctcattacttatcccactgtaacgtcaaaaggcagtttaataggattattgaaaaccctactgtgcaaactgctgtacaaaatggagaattacaggtatacggtttactttacaacgtagaggacggtttattacaaacagttagcacttacacaaaagttaccccaaaatga

SEQ ID NO: 9587 - DNA, 1170 bp, Saccharomyces cerevisiae
atggctagttattctttagttgaatcgaattctttcgggtcagaaaattggtgtcttaagttacagcctagttataaacatggtcttttaactggattaagtaatggcgaaatacgtttgctagactggagtactggtaaatcagtacaaaagattaaggcgagcgaaactgcaatcaatgatatgaaggtcatcggtagcgacttctctgctggtcatctagttagtagcgcctctatcgacgcggtgaaagttttcgatataaggacgaatgaccgcattgctcaaattcaaaacgaggccaactccccctttatttccttagattctcgtcatggtctattggcctgtggtaccgaattgcagggaattgacgctgctgtatacatatatgatattcgcaaatgggacactccattgagatcattaattgactctcaccatgatgacgttacctgtattaaatttcatccttctgacgtcaatattttgctcagtggttcaactgatggttacacgaacatttatgacttgaaacaagatgaggaggaggacgctttacaccaagttattaattatgcgtcaatacattcctgtggatggttgtccccaaagaggatatttacactatcacatatggaaacatttgcaattcacgaattgaacgacaaatctgacgaattgaaagagccacaacccttggactttggtgatgtaagagaaatatggaactgtgactacgtggtagatatttaccctggactcattgcaaccggtaaaacccaagaaaattgtggagagttgtgcctcctaccatttaaagatgagaaggtggatactgaaaacggtattgttatcccacacgcccatggagacgaggtcgtcagagatatttttataccagcacaacatagcaacatgttatactcctgtggtgaagatggttgcgttaaaatttgggaaaacaaacaggggccgttagatattccagaaaatttttgggattactctaaaaaaatgaacgtcttaggagatgacgacagagaaggttccattaatttagacgaacctcttattattcaaaaagaatcggtttccacgaggccaaggaaggagaaacacaagaaagccaagaaacattccatgaaaagtcgtttcaaaccatactag

SEQ ID NO: 9588 - DNA, 1170 bp, Artificial Sequence
  Description of Artificial Sequence: Synthetic polynucleotide
atggctagttattctttagttgaaagtaattctttcgggagtgaaaattggtgtcttaagttacagcctagttataaacatggtcttttaactggattaagtaatggcgaaatacgtttgttggactggagtactggtaaatctgtacaaaagattaaggcgagcgaaactgcaatcaatgatatgaaggtcatcggtagcgacttctctgctggtcatttggttagtagcgcctctatcgacgcggtgaaagttttcgatataaggacgaatgaccgcattgctcaaattcaaaacgaggccaactccccctttatttccttagattctcgtcatggtttattggcctgtggtaccgaattgcagggaattgacgctgctgtatacatatatgatattcgcaaatgggacactccattgagatctttaattgactctcaccatgatgacgttacctgtattaaatttcatccttctgacgtcaatattttgctcagtggttctactgatggttacacgaacatttatgacttgaaacaagatgaggaggaggacgctttacaccaagttattaattatgcgtctatacattcctgtggatggttgtccccaaagaggatatttacattatctcatatggaaacatttgcaattcacgaattgaacgacaaatctgacgaattgaaagagccacaacccttggactttggtgatgtaagagaaatatggaactgtgactacgtggtagatatttaccctggactcattgcaaccggtaaaacccaagaaaattgtggagagttgtgcctcttaccatttaaagatgagaaggtggatactgaaaacggtattgttatcccacacgcccatggagacgaggtcgtcagagatatttttataccagcacaacatagcaacatgttatactcctgtggtgaagatggttgcgttaaaatttgggaaaacaaacaggggccgttagatattccagaaaatttttgggattactctaaaaaaatgaacgtcttaggagatgacgacagagaaggttccattaatttagacgaacctcttattattcaaaaagaatctgtttccacgaggccaaggaaggagaaacacaagaaagccaagaaacattccatgaaaagtcgtttcaaaccatactga

SEQ ID NO: 9589 - DNA, 1839 bp, Saccharomyces cerevisiae
atgtctacatctttccaggagttcaaggccttttgcaacaaggttgggctagactttcaatggcttaatttgcaatcctccaagtctgttcccgaaagcggttcctctgaaggtttctcagccgtcagtgataccgtacaagaaaacatcagaccagctacggaaccacttaacgtcaaccagtccaaagatcctgtcagcaactttttttatgatgtcaagaatgctccgctctggaacgtgtataagaggaatcattccggtcattcttctactgaggcttgctctggagtaagttcagggcaagcgtcaaaaaacatacccgaggcaatggtaaaagagacagtcctttctaatcacgacaatgtcaccataataaacgaattactgccaacgtcttctgccatgcaccaggaagaaagcaccgctatgacaacctcctacctcttatcccactccgtaaatgatagttgcaacgtaatgctttcttcctcctcccacaaccgtgctatgctcccaccttctcttgtgcaaagaaataacgctaccacatctcccacaacagactctgcgtcagaaaacaacgaatcggtaccctcactaacctcatctgttagcacatcctcatcagtttattcgtcatggaatcctcctcattctccccacatatcgtcatttccagacggcaatttcgcatcgcttaacgcagaagtgacttgctttgatttccgccgcaccaaggactccagaacaaaagagacgaatgaatctatcattccaactgaaatttactgcccaataaattccactgatcaccacaaacattatccaagccaaaaatctaaacaagatgcctgcgctcctgctccccgcaatcaaaatataagctgcagcgtcgggtccgcagcggaattttcccagtctaaccacacgttgactactgtagttccttcatacatgcaacagtaccttgacaggccacagaactggtttgaaagcaaaatgggaaaatactgtccactctttctgagaagtacaaagaacattgactacgattccctcgaatttaaatttgagcgcaagatgatagctgttcaatacctgcttttagacgaacaatctgagcccagaaggtactacaatccctcaaataaaagtattccattctggaagagacccttcaacttcgatacaatgcccagctacgaccaacttatggaggaagcagagtgccgtttttattcataccaatacaaatacgaaggtttccagaggattgagccctactccattttttgtccctggaaaaacacacaaagagaaatagatctggttcttgatcacattcatttttctctcgatgtcggcgagaagaagtctttaaaccgaaaaggaaacatcactctcgatactttagacagtaaggtcgatcctaacattcagatcaagccgtatcagatttttccgtccaacaacctagtatacgaaggcttaccgcatcccgccgaacaatccttaattttgagtcctggcacctccctcattgagagggcgtttcaggcactgatagacatatgcaaggaatctattccaccttctaatgactgtactacccgcaaccataatagcgctcctcagcttaccgtgccagaaccatctaaaccatgccggctactacttgttcgtgagtctcgcacagcaacagaactagaaactaacaaaaagctctggctccactcacagagaaggaatatcgaagtgaccgtaccaatgcatccttctgagcatgggacaaaaagccggttacgaaaatggctctcaacttttgtacatcagtga

SEQ ID NO: 9590 - DNA, 1839 bp, Artificial Sequence
  Description of Artificial Sequence: Synthetic polynucleotide
atgtctacatctttccaggagttcaaggccttttgcaacaaggttgggttggactttcaatggcttaatttgcaatcctccaagtctgttcccgaaagcggttcctctgaaggtttctctgccgtcagtgataccgtacaagaaaacatcagaccagctacggaaccacttaacgtcaaccagtccaaagatcctgtcagcaactttttttatgatgtcaagaatgctccgctctggaacgtgtataagaggaatcattccggtcattcttctactgaggcttgctctggagtaagttccgggcaagcgtccaaaaacatacccgaggcaatggtaaaagagacagtcctttctaatcacgacaatgtcaccataataaacgaattattaccaacgtcttctgccatgcaccaggaagaaagcaccgctatgacaacctcctacctcttatcccactccgtaaatgatagttgcaacgtaatgctttcttcctcctcccacaaccgtgctatgctcccaccttctcttgtgcaaagaaataacgctaccacatctcccacaacagactctgcgtctgaaaacaacgaaagtgtaccctctttaacctcttctgttagcacatcctcttctgtttattcttcttggaatcctcctcattctccccacatatcttcttttccagacggcaatttcgcatctcttaacgcagaagtgacttgctttgatttccgccgcaccaaggactccagaacaaaagagacgaatgaatctatcattccaactgaaatttactgcccaataaattccactgatcaccacaaacattatccaagccaaaaatctaaacaagatgcctgcgctcctgctccccgcaatcaaaatataagctgcagcgtcgggtccgcagcggaattttcccagtctaaccacacgttgactactgtagttccttcttacatgcaacagtaccttgacaggccacagaactggtttgaaagcaaaatgggaaaatactgtccactctttttaagaagtacaaagaacattgactacgattccctcgaatttaaatttgagcgcaagatgatagctgttcaatacttacttttagacgaacaatctgagcccagaaggtactacaatccctccaataaaagtattccattctggaagagacccttcaacttcgatacaatgcccagctacgaccaacttatggaggaagcagagtgccgtttttattcttaccaatacaaatacgaaggtttccagaggattgagccctactccattttttgtccctggaaaaacacacaaagagaaatagatttggttcttgatcacattcatttttctctcgatgtcggcgagaagaagtctttaaacagaaaaggaaacatcactctcgatactttagacagtaaggtcgatcctaacattcagatcaagccgtatcagatttttccgtccaacaacttggtatacgaaggcttaccgcatcccgccgaacaatccttaattttgagtcctggcacctccctcattgagagggcgtttcaggcattaatagacatatgcaaggaatctattccaccttctaatgactgtactacccgcaaccataatagcgctcctcagcttaccgtgccagaaccatctaaaccatgcagattattacttgttcgtgagtctcgcacagcaacagaattggaaactaacaaaaagctctggctccactctcagagaaggaatatcgaagtgaccgtaccaatgcatccttctgagcatgggacaaaaagcagattaagaaaatggctctccacttttgtacatcagtga

SEQ ID NO: 9591 - DNA, 855 bp, Saccharomyces cerevisiae
atgctttactccagagaatcaaggacaaccgtccttttccttgcgttggttacctccctaaccgtactttgtcactcggtcgatgtaacaactgtatttactacgtcaacaatcaccgaaatcacaactgtgactgccgcaccgcaaccacaaaacaaagcggaaaccgctttgaatactgctactaacataattcaaaccatgcagtttcttttcaactgcgcaccatttaagtggaagggtcctttgaaaataacttcttgtgcgctgaactttattgtcctactactcaccgcttggggctatcttctgaagtatctgcaggaaaataagctgaatagcgatgctgatatggaaaaaatggtaggactgggatttggggaaatggtcggcagaatcttcggaaagggtgtcgggaaagcttttactaaaatggatatcactcagaaactagtgtacccgttcgaaggaagcaaccggcagaaatgtctactcatgaccgtcggagaaaactcgatagtgccattccacgatttgtttacagagatatgctttgaccagtacactctggactcgctatcccaccacaaccatgggagtatttcgattttagatgctggatcagtgagcgccttggggttcgcggatatttcatcgaaaatgccctctgtaagcgaactatacacactttttggagattatacgatagaagtactgggcggcatcactaaactggcttcaactcttaacagagaggactggcagggggaaagaaacgggttcgcggttttatcgagagaccggcctaaccagacgttactaagcgtccatatgtactcttcaagcttgctatag

SEQ ID NO: 9592 - DNA, 855 bp, Artificial Sequence
  Description of Artificial Sequence: Synthetic polynucleotide
atgctttactccagagaaagtaggacaaccgtccttttccttgcgttggttacctccttgaccgtactttgtcactctgtcgatgtaacaactgtatttactacgagtacaatcaccgaaatcacaactgtgactgccgcaccgcaaccacaaaacaaagcggaaaccgctttgaatactgctactaacataattcaaaccatgcagtttcttttcaactgcgcaccatttaagtggaagggtcctttgaaaataacttcttgtgcgttgaactttattgtcttgttgctcaccgcttggggctatcttttgaagtatttacaggaaaataagttgaatagcgatgctgatatggaaaaaatggtaggacttggatttggggaaatggtcggcagaatcttcggaaagggtgtcgggaaagcttttactaaaatggatatcactcagaaattagtgtacccgttcgaaggaagcaacagacagaaatgtttactcatgaccgtcggagaaaacagcatagtgccattccacgatttgtttacagagatatgctttgaccagtacactttggactctttatcccaccacaaccatgggagtatttccattttagatgctggatctgtgagcgccttggggttcgcggatatttcttctaaaatgccctctgtaagcgaattatacacactttttggagattatacgatagaagtattaggcggcatcactaaattggcttccactcttaacagagaggactggcagggggaaagaaacgggttcgcggttttatctagagacagacctaaccagacgttattaagcgtccatatgtactcttctagcttgttatga

SEQ ID NO: 9593 - DNA, 846 bp, Saccharomyces cerevisiae
atgggtttatatcaagcaaagaatgatgagggaagtgatccgaaaagcagcagcaagattgacgatttgatagaaaatgaggcagaaatcatacgactaatcaaggaagatggcaagttactgatagacaatggcgatggtagagatatccataacataattcaagaagacaagctcctcagtgtagaatttaacgaagtactaaagcgatttcacggggaagaaaagtcagatattcctcggaaggagtttgatgaagacgaggatgacggatatgattctaatgagcaccatcaaaagactatagaagtaatgaacacactaaatcacgtcattaataaagaggtgattcctcccgaaaactttagccacgtcgttggggagatataccgtagcagtttcccacgacaagagaacttttcgtttttgcatgaaagactaaagttgaaatccatcttggtactaattccggaagaatatccgcaggaaaatctaaattttttgaagttaacgggtataaaattatatcaagttggaatgagcggtaataaggagccatttgttaatataccgtctcatctactgacaaaggcactagaaatcgtgttgaatcctgcgaatcaaccgatactgatacattgtaatagaggcaaacatagaacggggtgtttgattggttgtataagaaaactacaaaattggtcgctaacgatgatttttgatgagtacagacgtttcgcatttccgaaggccagggcgcttgatcagcagttcatcgagatgtatgacgatgacgaaattaagaggattgctagtaaaaacaactggttgcctctacaatggtaa

SEQ ID NO: 9594 - DNA, 846 bp, Artificial Sequence
  Description of Artificial Sequence: Synthetic polynucleotide
atgggtttatatcaagcaaagaatgatgagggaagtgatccgaaaagcagcagcaagattgacgatttgatagaaaatgaggcagaaatcataagattgatcaaggaagatggcaagttattgatagacaatggcgatggtagagatatccataacataattcaagaagacaagctcctcagtgtagaatttaacgaagtattgaagagatttcacggggaagaaaagagtgatattcctagaaaggagtttgatgaagacgaggatgacggatatgattctaatgagcaccatcaaaagactatagaagtaatgaacacattaaatcacgtcattaataaagaggtgattcctcccgaaaactttagccacgtcgttggggagatataccgtagcagtttcccaagacaagagaacttttcttttttgcatgaaagattaaagttgaaatccatcttggtacttattccggaagaatatccgcaggaaaatttgaattttttgaagttaacgggtataaaattatatcaagttggaatgagcggtaataaggagccatttgttaatataccgtctcatttattaacaaaggcattggaaatcgtgttgaatcctgcgaatcaaccgatattaatacattgtaatagaggcaaacatagaacggggtgtttgattggttgtataagaaaattacaaaattggtctttgacgatgatttttgatgagtacagacgtttcgcatttccgaaggccagggcgcttgatcagcagttcatcgagatgtatgacgatgacgaaattaagaggattgctagtaaaaacaactggttgcctttacaatggtga

SEQ ID NO: 9595 - DNA, 411 bp, Saccharomyces cerevisiae
atggccagaactaaacaaacagctagaaaatccactggtggtaaagccccaagaaaacaattagcctccaaggctgccagaaaatccgccccatctaccggtggtgttaagaagcctcacagatataagccaggtactgttgccttgagagaaattagaagattccaaaaatctactgaactgttgatcagaaagttacctttccaaagattggtcagagaaatcgctcaagatttcaagaccgacttgagatttcaatcttctgctatcggtgctttgcaagaatccgtcgaagcatacttagtctctttgtttgaagacactaatctggctgctattcacgctaagcgtgttactatccaaaagaaggatatcaaattggccagaagactaagaggtgaaagatcatga

SEQ ID NO: 9596 - DNA, 411 bp, Artificial Sequence
  Description of Artificial Sequence: Synthetic polynucleotide
atggccagaactaaacaaacagctagaaaatccactggtggtaaagccccaagaaaacaattagcctccaaggctgccagaaaatccgccccatctaccggtggtgttaagaagcctcacagatataagccaggtactgttgccttgagagaaattagaagattccaaaaatctactgaattattgatcagaaagttacctttccaaagattggtcagagaaatcgctcaagatttcaagaccgacttgagatttcaatcttctgctatcggtgctttgcaagaatccgtcgaagcatacttagtctctttgtttgaagacactaatttggctgctattcacgctaagcgtgttactatccaaaagaaggatatcaaattggccagaagattgagaggtgaaagatcttga

SEQ ID NO: 9597 - DNA, 312 bp, Saccharomyces cerevisiae
atgtccggtagaggtaaaggtggtaaaggtctaggaaaaggtggtgccaagcgtcacagaaagattctaagagataacattcaaggtatcactaagccagctatcagaagattagctagaagaggtggtgtcaagcgtatttctggtttgatctacgaagaagtcagagccgtcttgaaatccttcttggaatccgtcatcagggactctgttacttacactgaacacgccaagagaaagactgttacttctttggatgttgtttatgctttgaagagacaaggtagaaccttatatggtttcggtggttaa

SEQ ID NO: 9598 - DNA, 312 bp, Artificial Sequence
  Description of Artificial Sequence: Synthetic polynucleotide
atgtccggtagaggtaaaggtggtaaaggtttgggaaaaggtggtgccaagcgtcacagaaagattttaagagataacattcaaggtatcactaagccagctatcagaagattagctagaagaggtggtgtcaagcgtatttctggtttgatctacgaagaagtcagagccgtcttgaaatccttcttggaatccgtcatcagggactctgttacttacactgaacacgccaagagaaagactgttacttctttggatgttgtttatgctttgaagagacaaggtagaaccttatatggtttcggtggttga

SEQ ID NO: 9599 - DNA, 1569 bp, Saccharomyces cerevisiae
atgttgctaataagaaggacgataaatgcatttctgggatgtatccattgcaatcttacggcgacgtgcatcctgattgccttcgtcataaccatgtatgtggtacttgtatctgagcctgcatccgtagacggaactatgggaaattttcttccgttttccaagatggatcttgcgacgaagagggacagacccttttattcgaattgtgtgaatactcaggactatttgttgaatccatcgtacatcaagcagaatgcctcgtttgtcatgctaacaaggaacggggagctagaagatgttatcaagactatcaacagtatagaagagcatttcaatcagtggttccactatccatatgtgttcttaaatgaccagccgtttgaagaggacttcaaagcaaaagtacgtgatgttacagtgggcgcgctggtggaatttggcactatcgatgagatatcttggaattttcccagtgacgtaaaggatacgttcgagttctacaacgcaattgaggatcaaggtgatagaagcatactttacggaaacttagaatcatatcataagatgtgccggttttattcaggattattttacaagcacccgctagtacagaagtacgaatggtattggagattggaacccgatgttgagtttttctgtgatattacctacgatccctttttggagatgctccgaactaataagaaatatggatttacgatcatcatccccgaattgtattggacagtcccaaatttgtttagacacactaaaagctttatcagtcaaaaaggcgttacgcttgggtcattatggaaactatttacaaaggattacgacatttttgaatccgatgatccggagttacgggactggatcaactatgattttcaggccaaggctaagatatccgaaaagatagccatcgagcagcttttgaaaaagggtgatgatttccaacagataaatgatgacaaagagggaataatgaatttgatacataaggctcgctctaggaagcatatcgtagaagacaaatttttcaatgaagagtacaatctatgccatttctggagtaattttgagattgcgcggctaagcgtgttcgacaatgacatttacaacagtttttttcaatatttggagaaaagtggtggattttggaaggaaagatggggggacgctcctgttcactctattggattgtcgctaactctggatttggacgatgtacactattttagagacatcggatatagacactccacaatacagcattgtccacataatgccatggggaatgaggaattctcctacttagccagtgactcaaaattcaaacgtaaaaacgcggcctacgacgagggaagggaatttgggtgtggctgcaggtgcagatgtcccaagaaaaagcgtgaaattgaggattccatgggtttctgcgtaaatatttgggtaaatctgcttaaccaacagaggggacacgaacgccacgtcgaagcactcaacggcaatgaaatggaggagcacataagggaagactatctaagacagttcggaaactag

SEQ ID NO: 9600 - DNA, 1569 bp, Artificial Sequence
  Description of Artificial Sequence: Synthetic polynucleotide
atgttgttaataagaaggacgataaatgcatttttgggatgtatccattgcaatcttacggcgacgtgcatcttgattgccttcgtcataaccatgtatgtggtacttgtatctgagcctgcatccgtagacggaactatgggaaattttcttccgttttccaagatggatcttgcgacgaagagggacagacccttttattctaattgtgtgaatactcaggactatttgttgaatccatcttacatcaagcagaatgcctcttttgtcatgttaacaaggaacggggagttagaagatgttatcaagactatcaacagtatagaagagcatttcaatcagtggttccactatccatatgtgttcttaaatgaccagccgtttgaagaggacttcaaagcaaaagtacgtgatgttacagtgggcgcgttagtggaatttggcactatcgatgagatatcttggaattttcccagtgacgtaaaggatacgttcgagttctacaacgcaattgaggatcaaggtgatagaagcatactttacggaaacttagaaagttatcataagatgtgcagattttattctggattattttacaagcacccgttagtacagaagtacgaatggtattggagattggaacccgatgttgagtttttctgtgatattacctacgatccctttttggagatgctcagaactaataagaaatatggatttacgatcatcatccccgaattgtattggacagtcccaaatttgtttagacacactaaaagctttatcagtcaaaaaggcgttacgcttgggtctttatggaaattatttacaaaggattacgacatttttgaatccgatgatccggagttaagagactggatcaactatgattttcaggccaaggctaagatatccgaaaagatagccatcgagcagcttttgaaaaagggtgatgatttccaacagataaatgatgacaaagagggaataatgaatttgatacataaggctcgctctaggaagcatatcgtagaagacaaatttttcaatgaagagtacaatttatgccatttctggagtaattttgagattgcgcgtttgagcgtgttcgacaatgacatttacaacagtttttttcaatatttggagaaaagtggtggattttggaaggaaagatggggggacgctcctgttcactctattggattgtccttgactttagatttggacgatgtacactattttagagacatcggatatagacactccacaatacagcattgtccacataatgccatggggaatgaggaattctcctacttagccagtgactctaaattcaaacgtaaaaacgcggcctacgacgagggaagggaatttgggtgtggctgcaggtgcagatgtcccaagaaaaagcgtgaaattgaggattccatgggtttctgcgtaaatatttgggtaaatttacttaaccaacagaggggacacgaacgccacgtcgaagcactcaacggcaatgaaatggaggagcacataagggaagactatttaagacagttcggaaactga

SEQ ID NO: 9601 - DNA, 2037 bp, Saccharomyces cerevisiae
atgtcattcagcaacggaaatatggcttcctacatgactagtagtaatggagaggagcaaagtataaacaacaaaaacgatatagacgataacagcgcttacagacgtaataatttcaggaatagtagcaattcaggatcacatacgttccaattatcggacttggacttagatgtggatatgaggatggattccgccaattcatcggagaaaatatcaaagaacctttcctctggcatcccggactcatttgattctaacgtgaacagcttgctgtctccgtcaagcggttcttattctgcagatttgaattaccaaagtctatacaaaccagatcttccacagcaacagttacaacagcaacagttacaacagcaacagcaacagcaacagcaacaacaacagcaacagcagaagcaaacaccaactttaaaagtcgaacaatctgatacatttcagtgggacgatatcttaacacctgctgataatcaacatcggccatccctcacaaaccagtttttatctccaagatctaattacgatggtaccactaggagctcgggcattgactccaattatagcgatacagaatcaaactatcatacgccttatttgtatccacaggacttagtttcttcacctgcgatgtctcacttaaccgcgaataacgatgattttgacgatcttttgagcgtcgcatctatgaactcaaattatttactgcccgtaaattcacatggttataaacatatttcaaaccttgatgagttggatgacttgctatctttaacatattcagacaataaccttttatcagcatcaaacaacagtgatttcaacaacagtaataacggaattattaataccgctgacactcaaaacagtaccattgccattaataaaagtaaagtcggtactaaccaaaagatgttattgactattccaacttcttccacaccttctccttccactcatgctgccccggtaacacccatcatttctatacaggaattcaatgagggacacttcccagttaaaaacgaagatgacggaacgttacaactaaaagttcgggataacgaaagttatagcgctactaacaataacaatctacttcgtccagatgataatgattacaacaacgaagctctcagtgatattgaccgctccttcgaagatatcattaacggtcgaaaattgaaacttaaaaaatcaagaagaagatcttctcaaacttccaataatagtttcactagcaggagatcctcgagatcaagaagcatatctcccgatgaaaaagctaaatctataagtgcaaatagggaaaagttattggagatggcagatcttttaccatccagtgaaaatgacaataatcgggagcgctatgacaatgatagcaaaactagctataacaccattaacagtagcaattttaatgaggataataataataacaatttgttaacaagtaaaccaaaaattgaatcgggcattgtcaatattaaaaatgaactagatgacactagcaaagatcttggcatacttctagacatagatagcttgggccaatttgagcagaaagttggtttcaaaaatgatgataatcacgaaaataacgataatggcacattttctgttaagaaaaatgacaatctagaaaaactagacagtgtaacaaataataggaaaaatcctgcgaattttgcttgtgatgtatgtggtaagaagtttacaagaccttataacttaaagtcacacttaagaacgcatacaaatgaaaggccatttatttgttctatttgtggtaaggcgtttgcacgtcaacatgatagaaagagacacgaagatttgcatacaggtaagaaaaggtatgtatgcggtggtaagctgaaggacggtaaaccctggggttgtggcaaaaagtttgcaagaagtgatgctcttggtaggcattttaaaactgaaagtggtagaagatgcatcactcccttgtacgaagaagccagacaggagaaatcgggacaagagagttaa

SEQ ID NO: 9602 - DNA, 2037 bp, Artificial Sequence
  Description of Artificial Sequence: Synthetic polynucleotide
atgagtttcagcaacggaaatatggcttcctacatgactagtagtaatggagaggagcaaagtataaacaacaaaaacgatatagacgataacagcgcttacagacgtaataatttcaggaatagtagcaattctggatctcatacgttccaattaagtgacttggacttagatgtggatatgaggatggattccgccaattcttctgagaaaatatccaagaacctttcctctggcatcccggactcttttgattctaacgtgaacagcttgttatctccgtctagcggttcttattctgcagatttgaattaccaaagtttatacaaaccagatcttccacagcaacagttacaacagcaacagttacaacagcaacagcaacagcaacagcaacaacaacagcaacagcagaagcaaacaccaactttaaaagtcgaacaatctgatacatttcagtgggacgatatcttaacacctgctgataatcaacatagaccatccctcacaaaccagtttttatctccaagatctaattacgatggtaccactaggagcagtggcattgactccaattatagcgatacagaatctaactatcatacgccttatttgtatccacaggacttagtttcttctcctgcgatgtctcacttaaccgcgaataacgatgattttgacgatcttttgagcgtcgcatctatgaacagtaattatttattgcccgtaaattctcatggttataaacatatttccaaccttgatgagttggatgacttgttatctttaacatattctgacaataaccttttaagtgcatctaacaacagtgatttcaacaacagtaataacggaattattaataccgctgacactcaaaacagtaccattgccattaataaaagtaaagtcggtactaaccaaaagatgttattgactattccaacttcttccacaccttctccttccactcatgctgccccggtaacacccatcatttctatacaggaattcaatgagggacacttcccagttaaaaacgaagatgacggaacgttacaattgaaagttagagataacgaaagttatagcgctactaacaataacaatttacttcgtccagatgataatgattacaacaacgaagctctcagtgatattgaccgctccttcgaagatatcattaacggtagaaaattgaaacttaaaaaatctagaagaagatcttctcaaacttccaataatagtttcactagcaggagatccagcagatctagaagcatatctcccgatgaaaaagctaaatctataagtgcaaatagggaaaagttattggagatggcagatcttttaccatccagtgaaaatgacaataatagagagcgctatgacaatgatagcaaaactagctataacaccattaacagtagcaattttaatgaggataataataataacaatttgttaacaagtaaaccaaaaattgaaagtggcattgtcaatattaaaaatgaattagatgacactagcaaagatcttggcatacttttggacatagatagcttgggccaatttgagcagaaagttggtttcaaaaatgatgataatcacgaaaataacgataatggcacattttctgttaagaaaaatgacaatttggaaaaattagacagtgtaacaaataataggaaaaatcctgcgaattttgcttgtgatgtatgtggtaagaagtttacaagaccttataacttaaagtctcacttaagaacgcatacaaatgaaaggccatttatttgttctatttgtggtaaggcgtttgcacgtcaacatgatagaaagagacacgaagatttgcatacaggtaagaaaaggtatgtatgcggtggtaagttgaaggacggtaaaccctggggttgtggcaaaaagtttgcaagaagtgatgctcttggtaggcattttaaaactgaaagtggtagaagatgcatcactcccttgtacgaagaagccagacaggagaaaagtggacaagagagttga

SEQ ID NO: 9603 - DNA, 1455 bp, Saccharomyces cerevisiae
atgacctcatcatctggtgttgataatgagatttccttagacagcccgatgccaattttcaatgagagttctactttaaagccaattagggttgcgggtgtagtaacaacagggacagatcatatcgaccctagcgtactacaggcatacttagatgatactattatgaaatccattactttggggcagctagtgaaaaatgcggatgtgttaaataagagattgtgccaacaccacattgccttgaacgccaaacagtcgtttcacttccaaggcaatacatatatctccgatgaaaaagaaacacatgatgtggtgcctttgatggaagttgtttcacaattagatatattacctcctaaaacgtttacagcgaagacagggacaaattttgggaacgataatgatgcagaggcttacttacaatttgaaaaactaatagataaaaaatacttaaagttacctactagagtcaatctcgaaattttgagaggtacaaaaatacactcctcctttctattcaattcttactcttctctttctccccaatcaattctaaacttgaaagtttttagtcaattttataattggaacacaaataaaggattagatattgggcaaagaggagcaagactatctttgaggtacgagccactgttcttacataaactattacacaatccgcattctaatgaaagtcccacgttatttcatgagtggtttttagagacctgctggagatccactaagatatgttcacaaggcactagtgcgccctatatgtattcaggtacaatgttatctcaagcaggcgatcagttaaggacaattttgggtcatacattcgtgctggacaagagagatcatattatgtgccctactaagggttcgatgttgaagtggagtaatgaactttcgcctggaaagcatttaaagacccaattagaattgaacagtgtaaaaagttggatgaatgacgactttattactttttctactaccattaaaacaggatatctaaagaacttatcctcacaacaatccttgcctgtacatatatgtgataagtttcagagtggtgggcccagcgacattcgggggtttcaaacatttgggttaggccccagagatttatatgatgcagtaggtggtgatgcttttgtttcctatggtcttagcgtattttctcgattgccctggaaaaaagttgaaaagtcaaactttaggttacattggttttttaatgggggtaaattggttaatcatgacaatacgtcgttgggtaattgcataggacagctttcaaaggaacactccacatccacaggtattggtcttgtactaaggcacccaatggcaagattcgagctaaactttactttgcctattaccgctcacgaaaatgatttgataagaaaaggattccagtttggtcttggtctggcatttttataa

SEQ ID NO: 9604 - DNA, 1455 bp, Artificial Sequence
  Description of Artificial Sequence: Synthetic polynucleotide
atgacctcttcttctggtgttgataatgagatttccttagacagcccgatgccaattttcaatgagagttctactttaaagccaattagggttgcgggtgtagtaacaacagggacagatcatatcgaccctagcgtattacaggcatacttagatgatactattatgaaatccattactttggggcagttggtgaaaaatgcggatgtgttaaataagagattgtgccaacaccacattgccttgaacgccaaacagtcttttcacttccaaggcaatacatatatctccgatgaaaaagaaacacatgatgtggtgcctttgatggaagttgtttctcaattagatatattacctcctaaaacgtttacagcgaagacagggacaaattttgggaacgataatgatgcagaggcttacttacaatttgaaaaattgatagataaaaaatacttaaagttacctactagagtcaatctcgaaattttgagaggtacaaaaatacactcctcctttcttttcaattcttactcttctctttctccccaatctattttgaacttgaaagtttttagtcaattttataattggaacacaaataaaggattagatattgggcaaagaggagcaagattatctttgaggtacgagccattattcttacataaattattacacaatccgcattctaatgaaagtcccacgttatttcatgagtggtttttagagacctgctggagatccactaagatatgttctcaaggcactagtgcgccctatatgtattctggtacaatgttatctcaagcaggcgatcagttaaggacaattttgggtcatacattcgtgcttgacaagagagatcatattatgtgccctactaagggttctatgttgaagtggagtaatgaactttctcctggaaagcatttaaagacccaattagaattgaacagtgtaaaaagttggatgaatgacgactttattactttttctactaccattaaaacaggatatttgaagaacttatcctctcaacaatccttgcctgtacatatatgtgataagtttcagagtggtgggcccagcgacattagagggtttcaaacatttgggttaggccccagagatttatatgatgcagtaggtggtgatgcttttgtttcctatggtcttagcgtattttctagattgccctggaaaaaagttgaaaagtctaactttaggttacattggttttttaatgggggtaaattggttaatcatgacaatacgtctttgggtaattgcataggacagctttccaaggaacactccacatccacaggtattggtcttgtattgaggcacccaatggcaagattcgagttgaactttactttgcctattaccgctcacgaaaatgatttgataagaaaaggattccagtttggtcttggtttggcatttttatga

SEQ ID NO: 9605 - DNA, 972 bp, Saccharomyces cerevisiae
atgtcggggagcttctggacatctacacaaaggcatcattggcaatataccaaggcatcattggctaaagagaggcagaagttatggctattggagtgccagctgtttcctcaaggtttgaatattgtaatggattcgaagcaaaacggcatcgaacaatccatcacaaagaatataccaataactcaccgagacttacactatgataaagattataatctaaggatctactgctatttcctgataatgaagcttggaaggagactaaatataagacagtatgcactggctacagcacatatttatctatcaaggtttttaataaaggcttcagttagagaaataaacctatatatgctggttactacgtgtgtatatttagcatgcaaagttgaagaatgcccgcaatatatcagaactttggtaagtgaagcccgtaccttatggcccgaatttattcctcctgaccctactaaagttactgagtttgagttctacttactagaagaattggaaagttacttaattgtccaccacccttatcaatccttaaagcaaattgttcaagtcttaaagcaaccgccatttcaaataacactatcgtcagatgatctacaaaactgttggtccttaatcaacgacagttatataaatgatgttcatttgctttaccctcctcatattatcgctgttgcatgtttattcattacgatttccattcatgggaaaccaaccaaaggatcatcgttagcatctgcggcttctgaagccatcagagatcctaaaaattctagttctcctgttcaaatagcttttaatcgttttatggcagaatctcttgtagatcttgaggaggttatggatacgattcaagagcaaattacattatacgatcattgggacaagtaccacgaacaatggataaagtttctgctacatactttgtatcttagaccagcatctgcaatttaa

SEQ ID NO: 9606 - DNA, 972 bp, Artificial Sequence
  Description of Artificial Sequence: Synthetic polynucleotide
atgagtgggagcttctggacatctacacaaaggcatcattggcaatataccaaggcaagtttggctaaagagaggcagaagttatggttattggagtgccagttatttcctcaaggtttgaatattgtaatggattctaagcaaaacggcatcgaacaatccatcacaaagaatataccaataactcacagagacttacactatgataaagattataatttaaggatctactgctatttcttgataatgaagcttggaaggagattgaatataagacagtatgcattggctacagcacatatttatttatctaggtttttaataaaggcttctgttagagaaataaacttatatatgcttgttactacgtgtgtatatttagcatgcaaagttgaagaatgcccgcaatatatcagaactttggtaagtgaagcccgtaccttatggcccgaatttattcctcctgaccctactaaagttactgagtttgagttctacttattggaagaattggaaagttacttaattgtccaccacccttatcaatccttaaagcaaattgttcaagtcttaaagcaaccgccatttcaaataacattatcttctgatgatttgcaaaactgttggtccttaatcaacgacagttatataaatgatgttcatttgctttaccctcctcatattatcgctgttgcatgtttattcattacgatttccattcatgggaaaccaaccaaaggatcttctttagcatctgcggcttctgaagccatcagagatcctaaaaattctagttctcctgttcaaatagcttttaatcgttttatggcagaatctcttgtagatcttgaggaggttatggatacgattcaagagcaaattacattatacgatcattgggacaagtaccacgaacaatggataaagtttttattacatactttgtatcttagaccagcatctgcaatttga

SEQ ID NO: 9607 - DNA, 219 bp, Saccharomyces cerevisiae
atgtctgcattatttaattttcgttctcttctgcaagtgatattgttactgatttgttcatgttcttatgttcatgggcagtggccgtctctcctagatcgttacaaaaatcatgaggttttgggggccttctggaaaatggcacgtgttggtgaaagggccagtccatatgttagtttagcatgtattttgatggccatcagtcaatttaacagctga

SEQ ID NO: 9608 - DNA, 219 bp, Artificial Sequence
  Description of Artificial Sequence: Synthetic polynucleotide
atgtctgcattatttaattttcgttctcttttacaagtgatattgttattgatttgttcttgttcttatgttcatgggcagtggccgtctctcttggatcgttacaaaaatcatgaggttttgggggccttctggaaaatggcacgtgttggtgaaagggccagtccatatgttagtttagcatgtattttgatggccatcagtcaatttaacagctga

SEQ ID NO: 9609 - DNA, 741 bp, Saccharomyces cerevisiae
atggagagtatatttggtgggtttggagatctagttgttcctaggccaaaggagcatctcggtcaaacagacctttccttcggtggaaaattattgcctgcattgaaaatttgtgaagatggcggtgaaagtggttgtggcggtaaagtctggatcgctggcgaactgttgtgcgagtacatactcgagaaatcagttgaccatctgctaagtaagacggtcaatggtacgaaacaatttaaaaaagtcttagaattgggtagtggtacaggtttagttggattgtgcgtggggttgttggaaaaaaacacattccacgatggcactaaagtatatgttacggacattgacaagttgataccactattgaaaagaaatatagaactggacgaagttcagtatgaagttcttgcgagggaactttggtggggtgagccgctgtcggcagatttctcacctcaagaaggtgctatgcaagcaaataacgttgatctagttttggcagctgattgtgtgtatctcgaggaagcttttccattactagaaaaaacactacttgatctcactcactgcataaacccacctgtaatcttgatggcttacaagaagagaagaaaagctgataaacattttttcaacaagattaaaagaaattttgacgttcttgaaattacagattttagtaaatttgaacattatcttaaggaaagaacccacttgtttcagcttatcaggaagtaa

SEQ ID NO: 9610 - DNA, 741 bp, Artificial Sequence
  Description of Artificial Sequence: Synthetic polynucleotide
atggagagtatatttggtgggtttggagatttggttgttcctaggccaaaggagcatctcggtcaaacagacctttccttcggtggaaaattattgcctgcattgaaaatttgtgaagatggcggtgaaagtggttgtggcggtaaagtctggatcgctggcgaattattgtgcgagtacatactcgagaaatctgttgaccatttattaagtaagacggtcaatggtacgaaacaatttaaaaaagtcttagaattgggtagtggtacaggtttagttggattgtgcgtggggttgttggaaaaaaacacattccacgatggcactaaagtatatgttacggacattgacaagttgataccattgttgaaaagaaatatagaattagacgaagttcagtatgaagttcttgcgagggaactttggtggggtgagccgttaagtgcagatttcagtcctcaagaaggtgctatgcaagcaaataacgttgatttggttttggcagctgattgtgtgtatctcgaggaagcttttccattattggaaaaaacattgcttgatctcactcactgcataaacccacctgtaatcttgatggcttacaagaagagaagaaaagctgataaacattttttcaacaagattaaaagaaattttgacgttcttgaaattacagattttagtaaatttgaacattatcttaaggaaagaacccacttgtttcagcttatcaggaagtga

SEQ ID NO: 9611 - DNA, 2898 bp, Saccharomyces cerevisiae
atgaccgaacatgagtctttaggcctggagcaaaatcaagacggcggtgacacttatagacatcacaacctaagcgatgggtgtatttcgagtgttgaagacgccaacgagcagcctagttcgtatgaagaggaaagtgatgatgatatgcaatattacgaacgtgcgatccaggaaatttctagcggtgactcatatgtttgtatgatttgtacagtagagatggattatacgtgccaaatgtttgcttgcaagagatgttatagagtgtttgattacggatgcataagagaatgggcgttaaaatcaacggaaaaaaccgtagatagaatatggaaatgtccaaactgctattatgttagcaaaagagttccggtaaaaaatcggcccacatgttggtgcggtaaagttgttaatcctgatccgaatccgctggatcctaactcatgtggacaaacctgcaatgcttctacttgtatgcatggttgttccaaaatttgtcatctagggccgcatccagagtgtactagaatggtcgagattatgtgccactgtggtaagcattcgaaaagtatcttttgttaccagtctaaagttatgaaaaaaaacttcaactgtcaagaagtatgtggattgcctttatcttgctccatccacacctgtaaaaagaaatgccaccctggcttatgtgggccatgtccagaaatgataattagtaaagatagtccgaaaaagcaaataaaatgctactgtggtaaccacactcgtgctaacataaagtgtagtgaaacaaagtttcccaagtccggtaagtcgtcgaaggatgaaaatgggaacaggtggataggcgtgtttgcctgtgcagataatagagttgtcgactactcatgtcgcaagcattcattcatagaatcttgcataagcccacccacaattaatggagaaaaggcatgcccatttttgcctagctctttgaaaacttgtccctgtggccggacagccctagaggaactgactaagcctcgtaagcattgtgatgatccgataccaacctgcgactcaagatgcggtaaaccactaaaatgtggcaaacattcgtgccccttcacttgtcatgataaagcctgtatggaaccctgcttgcaaattgatagtgtaaaatgtgcttgtgagcaaagtacattttcagttccatgtggatttcaaggaaggcctcgctgcaatattaaatgcgaatccctgatgtcatgccgtagacatagatgcaccgataggtgctgcagtggtaggccatcggcgataagaaggaagaaaaacttgttcagaacgcaagatttgttggatgagtctcttgtggaagcaaaacatatctgcctaaaaccgtgtaacttgaccctatcatgtggaattcataaatgtcagagaaaatgtcacccaggaaagtgtccgccctgtttagagagtgattcgaacgatctggtctgcccatgtggcaatacagttgttcctgcacccgtgcgttgtggcacgaagctacctacatgtaatcatccatgtattaaagttgtgcgtggcgaatctacgtgtggtcataaaccaatgccacatacctgtcattccttggatgtgtcgtgcccgccatgtacggaaaccgtatttaaaccttgtaaatgtgggaagaaaactaaagtgagaacggtttgttttcaaacagacgtatcatgtggaataaaatgtgggataccactctcttactgttatcatacctgccaaaaaacatgtcatttaccaggaaattgccaaaaggtgtgtaaacagacctgtgggcaaaaaaggctcaattgtaatcatgaatgtcctaaaccgtgccatggtaagacagagtgtcccgatttaccttgtgccacgctagtgaaaatttattgtaaatgtggaaggatcaaaaaaagtgttacttgtggcgcaaaaagtgatagagtaagtgtaactgaatcttccgtgctggattgcaatgaagaatgtgaagctttgaaacgactaaaggaattgaaggaggcatttggaattaaggaagaaaccaataattttacaagtaatgaactagatgcgttaaaaaaactggtctctgttgctacaacatttgaagaactgcagttaccgtttacagaggcagcattatcagtatattcaaagcaagaaagatggtgttcacaaattgaagctattcttaataaattaatggacgataaaacacgttcaagcttgcatttcaaacctatgaggcctcctcaacgccacttcatccgtgaactagccaaagcttacggcctatattccgagtctcaggacagagagcccatgagatctgtatttattaagaaagaagataatggcgcaagcaataaaccagtcttatcattagcagaagcttacccactatatgaatcatttaaacaattgcagaaggaaaggaaagcacaagaatttcaagctcgcaccacagctaaactaatcaacttcgaggttcaagatacggaacctaaagtagaggtggctaagaaaaatggttttttggttcaaaatttggttgctggaaatactgccgaagatctaaggagattttttgaaccacatctcaagcatacgttagtagtgaatcctcaatacctaatccttgatgatggcaaaacagcactagtgtatcctgaaaattacgaaacagcatccgtgaataccgaacgtgacatggagcttttggttggacacttcgattttatggccaaagaggcatttttggccgattccatttcgttgtgttcaactgaagaagaacttgaaagaaggttggatacgcccgtaattcaagaggatagtcctgtaatggataataatacatga

SEQ ID NO: 9612 - DNA, 2898 bp, Artificial Sequence
  Description of Artificial Sequence: Synthetic polynucleotide
atgaccgaacatgagtctttaggcttagagcaaaatcaagacggcggtgacacttatagacatcacaacttgagcgatgggtgtatttccagtgttgaagacgccaacgagcagcctagttcttatgaagaggaaagtgatgatgatatgcaatattacgaacgtgcgatccaggaaatttctagcggtgactcttatgtttgtatgatttgtacagtagagatggattatacgtgccaaatgtttgcttgcaagagatgttatagagtgtttgattacggatgcataagagaatgggcgttaaaatctacggaaaaaaccgtagatagaatatggaaatgtccaaactgctattatgttagcaaaagagttccggtaaaaaataggcccacatgttggtgcggtaaagttgttaatcctgatccgaatccgttagatcctaactcttgtggacaaacctgcaatgcttctacttgtatgcatggttgttccaaaatttgtcatttggggccgcatccagagtgtactagaatggtcgagattatgtgccactgtggtaagcattctaaaagtatcttttgttaccagtctaaagttatgaaaaaaaacttcaactgtcaagaagtatgtggattgcctttatcttgctccatccacacctgtaaaaagaaatgccaccctggcttatgtgggccatgtccagaaatgataattagtaaagatagtccgaaaaagcaaataaaatgctactgtggtaaccacactcgtgctaacataaagtgtagtgaaacaaagtttcccaagtccggtaagtcttccaaggatgaaaatgggaacaggtggataggcgtgtttgcctgtgcagataatagagttgtcgactactcttgtcgcaagcattctttcatagaatcttgcataagcccacccacaattaatggagaaaaggcatgcccatttttgcctagctctttgaaaacttgtccctgtggcagaacagccttagaggaattgactaagcctcgtaagcattgtgatgatccgataccaacctgcgacagtagatgcggtaaaccattgaaatgtggcaaacattcttgccccttcacttgtcatgataaagcctgtatggaaccctgcttgcaaattgatagtgtaaaatgtgcttgtgagcaaagtacattttctgttccatgtggatttcaaggaaggcctcgctgcaatattaaatgcgaatccttgatgagttgccgtagacatagatgcaccgataggtgctgcagtggtaggccatctgcgataagaaggaagaaaaacttgttcagaacgcaagatttgttggatgagtctcttgtggaagcaaaacatatctgcttgaaaccgtgtaacttgaccttaagttgtggaattcataaatgtcagagaaaatgtcacccaggaaagtgtccgccctgtttagagagtgattccaacgatttggtctgcccatgtggcaatacagttgttcctgcacccgtgcgttgtggcacgaagttacctacatgtaatcatccatgtattaaagttgtgcgtggcgaatctacgtgtggtcataaaccaatgccacatacctgtcattccttggatgtgtcttgcccgccatgtacggaaaccgtatttaaaccttgtaaatgtgggaagaaaactaaagtgagaacggtttgttttcaaacagacgtatcttgtggaataaaatgtgggataccactctcttactgttatcatacctgccaaaaaacatgtcatttaccaggaaattgccaaaaggtgtgtaaacagacctgtgggcaaaaaaggctcaattgtaatcatgaatgtcctaaaccgtgccatggtaagacagagtgtcccgatttaccttgtgccacgttagtgaaaatttattgtaaatgtggaaggatcaaaaaaagtgttacttgtggcgcaaaaagtgatagagtaagtgtaactgaatcttccgtgttggattgcaatgaagaatgtgaagctttgaaaagattaaaggaattgaaggaggcatttggaattaaggaagaaaccaataattttacaagtaatgaattagatgcgttaaaaaaattggtctctgttgctacaacatttgaagaattacagttaccgtttacagaggcagcattaagtgtatattccaagcaagaaagatggtgttctcaaattgaagctattcttaataaattaatggacgataaaacacgttccagcttgcatttcaaacctatgaggcctcctcaacgccacttcatccgtgaattggccaaagcttacggcttgtattccgagtctcaggacagagagcccatgagatctgtatttattaagaaagaagataatggcgcaagcaataaaccagtcttatctttagcagaagcttacccattgtatgaaagttttaaacaattgcagaaggaaaggaaagcacaagaatttcaagctcgcaccacagctaaattaatcaacttcgaggttcaagatacggaacctaaagtagaggtggctaagaaaaatggttttttggttcaaaatttggttgctggaaatactgccgaagatttaaggagattttttgaaccacatctcaagcatacgttagtagtgaatcctcaatacttgatccttgatgatggcaaaacagcattggtgtatcctgaaaattacgaaacagcatccgtgaataccgaacgtgacatggagcttttggttggacacttcgattttatggccaaagaggcatttttggccgattccatttctttgtgttccactgaagaagaacttgaaagaaggttggatacgcccgtaattcaagaggatagtcctgtaatggataataatacatga

SEQ ID NO: 9613 - DNA, 1473 bp, Saccharomyces cerevisiae
atgaatttctacagggatgcaacatgggtgctagaagatattgagaaggaggctgcaaaagaaaggatttccggctctatgcagacgctggtactgaaaagctgtaaaagatataagctgaaaagtaatccaaaacatatttatgcagttctcgattcgtgttggaaatataaaccatatttggagaaagtgatgaaaaaggcacacatattggaagatatacccaagaaaaagggcaaaccactcttttcaaggctaactttgttattgctttgccatgatttgctgttgtctaagcagaaaagaattcaaatgggcaaacaccccatcaaagattatgttttgaagtttaagagcccattgcatagcgaaatggtcaaattgaaactcaaattgaaagtaagagagctatctgagttggtattaagcgaggatatttccaatgaccttcctcctgttagatggattagaatcaatccattaaaatgccatccaaatggtgagactgagccggtgttagccgaattgaggaagaagtttactttaaaggtagacaaatggtctgaactagttcctgggtctatctattatgatgagtttattccaaacttgtttggaattcatccgtctgacaaaattacagcacatgagctttataagcatgggaagattatcattcaagatcgtgcttcttgttttccagcccacattttgaatccaggaccaagtgatattgtgatagattcctgctctgctccaggtaataagactacccatacggcctcttatatatatcccgaaccaccgaaggacaataatactcgaatatacgctttcgagaaggatcctgaaagagcaaaagttttacaaaaaatgatcaagatagctggctgttctcccaacatcagtgtcaatgtaggtgattttacaaagctcgctactcctgaaaaatataaggacgttacttgttttattgtagatccgagctgctccggtagcggtatatttggtcgtaagttttttgactcatttaatagaaggaaaattgatgataaagatgacgatggtggcattgtgccggatgagcaagaggagtttatagcaaaggaagaactacagacaaggttagcgaagctgagttcatttcagttccagatggtaaagcatgcaatgagtttcccagcggctaaaaaaatagtatacagcacatgttccattcatgcggaagaaaatgaacgagtcgtcatagaccttcttttagataagtcagttagagaatggggttggaaagtagcgccaaaaagagaagttattccttcttggcctagaagaggcaaggtagaagagttcgaagaggtttttagagatggagtcacctatgaccctcaacagcttgccgagggttgtatcagggcactaccaaaaagtgacggtggtattggtttctttgctgtctgttttgaaagagattaa

SEQ ID NO: 9614 - DNA, 1473 bp, Artificial Sequence
  Description of Artificial Sequence: Synthetic polynucleotide
atgaatttctacagggatgcaacatgggtgttggaagatattgagaaggaggctgcaaaagaaaggatttccggctctatgcagacgttggtattgaaaagctgtaaaagatataagttgaaaagtaatccaaaacatatttatgcagttctcgattcttgttggaaatataaaccatatttggagaaagtgatgaaaaaggcacacatattggaagatatacccaagaaaaagggcaaaccactctttagcaggttaactttgttattgctttgccatgatttgttgttgtctaagcagaaaagaattcaaatgggcaaacaccccatcaaagattatgttttgaagtttaagagcccattgcatagcgaaatggtcaaattgaaactcaaattgaaagtaagagagctttctgagttggtattaagcgaggatatttccaatgaccttcctcctgttagatggattagaatcaatccattaaaatgccatccaaatggtgagactgagccggtgttagccgaattgaggaagaagtttactttaaaggtagacaaatggtctgaattggttcctgggtctatctattatgatgagtttattccaaacttgtttggaattcatccgtctgacaaaattacagcacatgagctttataagcatgggaagattatcattcaagatcgtgcttcttgttttccagcccacattttgaatccaggaccaagtgatattgtgatagattcctgctctgctccaggtaataagactacccatacggcctcttatatatatcccgaaccaccgaaggacaataatactagaatatacgctttcgagaaggatcctgaaagagcaaaagttttacaaaaaatgatcaagatagctggctgttctcccaacatcagtgtcaatgtaggtgattttacaaagctcgctactcctgaaaaatataaggacgttacttgttttattgtagatccgagctgctccggtagcggtatatttggtcgtaagttttttgactcttttaatagaaggaaaattgatgataaagatgacgatggtggcattgtgccggatgagcaagaggagtttatagcaaaggaagaattacagacaaggttagcgaagttgagttcttttcagttccagatggtaaagcatgcaatgagtttcccagcggctaaaaaaatagtatacagcacatgttccattcatgcggaagaaaatgaaagagtcgtcatagaccttcttttagataagtctgttagagaatggggttggaaagtagcgccaaaaagagaagttattccttcttggcctagaagaggcaaggtagaagagttcgaagaggtttttagagatggagtcacctatgaccctcaacagcttgccgagggttgtatcagggcattgccaaaaagtgacggtggtattggtttctttgctgtctgttttgaaagagattga

SEQ ID NO: 9615 - DNA, 2121 bp, Saccharomyces cerevisiae
atggattctgtaatggttaagaaagaagtactggaaaatccagaccatgatttaaaaagaaagctagaagagaacaaagaagaagagaatagcctctctactacttctaaaagtaaaaggcaggttattgttcccgtttgcatgccaaaaatccattattcaccgctgaaaactggtctttgctatgacgttagaatgaggtatcatgcaaagattttcacatcgtacttcgagtacattgatccacatccagaggacccaagaagaatatatcgtatttataaaatactagcagagaatggtctgattaacgaccccactttaagcggcgtggatgaccttggtgatttaatgctgaagatacctgtaagagccgcaacctccgaagaaatcttggaagttcatacaaaggaacatttagagtttattgaaagcacagaaaaaatgagccgagaagagttattaaaagagactgaaaaaggtgattccgtatatttcaataatgattcttacgcgagtgctaggctgccttgtggtggcgccattgaagcatgcaaggcggttgtcgaggggcgtgtaaaaaactctctagctgtcgtaagaccacctggccatcatgcagagcctcaagctgcgggtggtttttgtctcttcagtaatgttgctgttgctgccaagaatatcttaaagaactacccagaaagtgtaagaaggataatgattttagattgggatattcatcatggtaatggcacacaaaagtcattctatcaagacgatcaggtgctatatgtgtcattacacagatttgaaatgggtaaatactatcctgggaccatccaaggacaatatgatcaaactggtgagggtaagggtgaaggattcaattgtaatattacttggccggtcggcggtgttggtgatgcagaatatatgtgggcatttgaacaggtagttatgcctatggggagagaattcaagcctgacttggtgattatttcttcagggtttgatgccgcggatggtgatactatcggacaatgtcatgtcaccccaagttgttatggacacatgacacatatgttaaaatctctagctagaggtaatctttgtgtagttttggaaggtggatataacttggatgcgattgcaagaagcgctttgagtgtagcaaaagtactaataggggagcctcctgatgaactacctgatccattaagtgatcccaagcctgaggtcatagaaatgatagacaaagtaattcggttacagtccaagtattggaactgttttagaaggagacatgctaactccggttgtaattttaacgaacctattaacgactcgataatatctaaaaattttcctctgcagaaggctattcgtcaacaacagcaacactatttaagcgacgaatttaatttcgttactttaccgttagtaagcatggatttaccagataatacagtgctatgtactccaaacatttccgaatctaacactataattatagtcgttcatgatacttctgatatctgggcaaagagaaatgttatttcaggtacaattgacttatcctcatcagttatcattgataattctctagactttatcaaatggggacttgacaggaaatacggcatcattgatgtaaatatacctctaactctgtttgaacctgacaattactcaggaatgattacatcccaagaagttctaatatatttatgggataactacatcaagtattttccttctgttgccaaaattgcttttattggaataggagactcatactcaggtatcgtacatctgcttggtcacagggatactagggctgttactaaaacggtaattaatttcttgggagacaagcagttaaagccactagttcctctagtagatgaaacattgagtgaatggtacttcaaaaactcacttatattttcaaacaatagccaccaatgctggaaagaaaatgaaagcagaaaaccaagaaaaaaattcggtagagttttgagatgtgatacggacgggttaaacaatataattgaagaaagatttgaagaggctacagactttatactggattcgtttgaagaatggagtgatgaagaatga

SEQ ID NO: 9616 - DNA, 2121 bp, Artificial Sequence
  Description of Artificial Sequence: Synthetic polynucleotide
atggattctgtaatggttaagaaagaagtattggaaaatccagaccatgatttaaaaagaaagttggaagagaacaaagaagaagagaatagcctctctactacttctaaaagtaaaaggcaggttattgttcccgtttgcatgccaaaaatccattattctccgttaaaaactggtctttgctatgacgttagaatgaggtatcatgcaaagattttcacatcttacttcgagtacattgatccacatccagaggacccaagaagaatatatcgtatttataaaatattggcagagaatggtttgattaacgaccccactttaagcggcgtggatgaccttggtgatttaatgttgaagatacctgtaagagccgcaacctccgaagaaatcttggaagttcatacaaaggaacatttagagtttattgaaagcacagaaaaaatgagcagagaagagttattaaaagagactgaaaaaggtgattccgtatatttcaataatgattcttacgcgagtgctaggttgccttgtggtggcgccattgaagcatgcaaggcggttgtcgaggggcgtgtaaaaaactctttggctgtcgtaagaccacctggccatcatgcagagcctcaagctgcgggtggtttttgtctcttcagtaatgttgctgttgctgccaagaatatcttaaagaactacccagaaagtgtaagaaggataatgattttagattgggatattcatcatggtaatggcacacaaaagagtttctatcaagacgatcaggtgctttatgtgtctttacacagatttgaaatgggtaaatactatcctgggaccatccaaggacaatatgatcaaactggtgagggtaagggtgaaggattcaattgtaatattacttggccggtcggcggtgttggtgatgcagaatatatgtgggcatttgaacaggtagttatgcctatggggagagaattcaagcctgacttggtgattatttcttctgggtttgatgccgcggatggtgatactatcggacaatgtcatgtcaccccaagttgttatggacacatgacacatatgttaaaatctttggctagaggtaatctttgtgtagttttggaaggtggatataacttggatgcgattgcaagaagcgctttgagtgtagcaaaagtattaataggggagcctcctgatgaattacctgatccattaagtgatcccaagcctgaggtcatagaaatgatagacaaagtaattagattacagtccaagtattggaactgttttagaaggagacatgctaactccggttgtaattttaacgaacctattaacgacagtataatatctaaaaattttcctttgcagaaggctattcgtcaacaacagcaacactatttaagcgacgaatttaatttcgttactttaccgttagtaagcatggatttaccagataatacagtgttgtgtactccaaacatttccgaatctaacactataattatagtcgttcatgatacttctgatatctgggcaaagagaaatgttatttctggtacaattgacttatcctcttctgttatcattgataattctttggactttatcaaatggggacttgacaggaaatacggcatcattgatgtaaatatacctttaactttatttgaacctgacaattactccggaatgattacatcccaagaagttttgatatatttatgggataactacatcaagtattttccttctgttgccaaaattgcttttattggaataggagactcttactctggtatcgtacatttgcttggtcacagggatactagggctgttactaaaacggtaattaatttcttgggagacaagcagttaaagccattagttcctttggtagatgaaacattgagtgaatggtacttcaaaaactctcttatattttccaacaatagccaccaatgctggaaagaaaatgaaagcagaaaaccaagaaaaaaattcggtagagttttgagatgtgatacggacgggttaaacaatataattgaagaaagatttgaagaggctacagactttatattggattcttttgaagaatggagtgatgaagaatga

SEQ ID NO: 9617 - DNA, 1917 bp, Saccharomyces cerevisiae
atgaatcaacctcaaattggcacttacaatgtaggtacacagttaacagttgggtcacatcaggttgagatcattaaatatctaacaagcggtgggttcgctcaagtatattccgcgttaatcaacccacctgacccacattctaattcaagcgttgcatgcttaaaaagagtcattgttccagacaaacctagtctaaacactttaagagctgaagtagatgctatgaggttgctgaaaaacaataggtatgttgtatcttacattgattctcatgcagctaaggcaatgttacataatggttcgtatgaagtattcgtcttaatggaatattgtgaaagaggtggtctcattgattttatgaacacaaggctacaaaacaggcttcatgaatttgaaattttgcaaataatgagccaagttactcaaggagttgccgctatgcatgctttgcaacctccgttaattcaccgtgatataaagatagaaaatgttcttatctcagccaataatgagtacaagctttgtgactttggttctgtatgcggtattataaggcctcctaggaattcacaagagctatcatatgttcagcaagacattttgaaaaacacaactgcacagtaccggtcgccagagatgattgatacatttcgcggtctgccgatagatgaaaagtcggatatatgggcgctgggtatttttctatataagctttgctattacacaacaccgtttgaaaagggcggtgatcttgccatattaagcggaaagtttgaatttccattgtatccgaactacagtgaacagttgaaaggcttaatacgtgatatattggttcaagatccgcgccataggcctaacgtttatcaactactgaagaggatatcaattatgcaaaatgttccgtgtccaataaatgacatacaagtggttcaggcgcccagtagccatttgaatttgaccgaacttcatcagctttcggcaacacaaaatattctaagcttgaactctcccacaaccatggaaaatacgatgccgaacgctacatttcaaatcagcatggctgataatactacaacagcacaaatgcatcctaatagaaaaccatcacaaatagcatatgacgctagcttcagtaattccgccaaaggttctcaaccactttttgacaaatcacagaatatgtaccacgcattggatcctccacttgttgaaccgctagcgagtagtgtttcaaataatgacaacgaactcaaggcaaattccgcaaccaagttaaagcaggcaattgtctctgaagcacatacttttaggcagaataattcaatagactttccactacaaaacataataccccagtacgaagattcttcttcctcttcagatgaatcttattctggagacgtagatgaattaaagaaaactcgatctctaggttcttattccacacgcggtaacataaaaaaaaaccaatccgtaaaggaatctcttacttcatcaagcctaccaggcactagcttcaccccaacgtctacaaaggtaaatttgaaacacgaaaattcaccttttaagtcgacattcgttaatacgattgataattccaaagacgatcttaacaaaccatcttatgaagatttggacgtatctaagcagaatttgaagaactccattcaacagcgtatgatcgataaactcaactcttctgaggagtcattcaacgctaggaaaatgtccaaggtcaagctgcatgagaaaggggagatagataagccaacaatgctgaaatcaagtggcccgatttcaaaagacaaaaaaacaaaacctaccccaccacctaagccttcacatttaaagcctaaacctcctccaaaaccactgctcctcgcgggacgaaagttatccttggataagtga

SEQ ID NO: 9618 - DNA, 1917 bp, Artificial Sequence
  Description of Artificial Sequence: Synthetic polynucleotide
atgaatcaacctcaaattggcacttacaatgtaggtacacagttaacagttgggtctcatcaggttgagatcattaaatatttgacaagcggtgggttcgctcaagtatattccgcgttaatcaacccacctgacccacattctaatagtagcgttgcatgcttaaaaagagtcattgttccagacaaacctagtttgaacactttaagagctgaagtagatgctatgaggttgttgaaaaacaataggtatgttgtatcttacattgattctcatgcagctaaggcaatgttacataatggttcttatgaagtattcgtcttaatggaatattgtgaaagaggtggtctcattgattttatgaacacaaggttacaaaacaggcttcatgaatttgaaattttgcaaataatgagccaagttactcaaggagttgccgctatgcatgctttgcaacctccgttaattcaccgtgatataaagatagaaaatgttcttatcagtgccaataatgagtacaagctttgtgactttggttctgtatgcggtattataaggcctcctaggaattctcaagagttatcttatgttcagcaagacattttgaaaaacacaactgcacagtacagatctccagagatgattgatacatttcgcggtttaccgatagatgaaaagagtgatatatgggcgcttggtatttttttatataagctttgctattacacaacaccgtttgaaaagggcggtgatcttgccatattaagcggaaagtttgaatttccattgtatccgaactacagtgaacagttgaaaggcttaatacgtgatatattggttcaagatccgcgccataggcctaacgtttatcaattattgaagaggatatctattatgcaaaatgttccgtgtccaataaatgacatacaagtggttcaggcgcccagtagccatttgaatttgaccgaacttcatcagctttctgcaacacaaaatattttgagcttgaactctcccacaaccatggaaaatacgatgccgaacgctacatttcaaatcagcatggctgataatactacaacagcacaaatgcatcctaatagaaaaccatctcaaatagcatatgacgctagcttcagtaattccgccaaaggttctcaaccactttttgacaaatctcagaatatgtaccacgcattggatcctccacttgttgaaccgttagcgagtagtgtttctaataatgacaacgaactcaaggcaaattccgcaaccaagttaaagcaggcaattgtctctgaagcacatacttttaggcagaataattctatagactttccattgcaaaacataataccccagtacgaagattcttcttcctcttctgatgaatcttattctggagacgtagatgaattaaagaaaactagatctttgggttcttattccacacgcggtaacataaaaaaaaaccaatccgtaaaggaatctcttacttcttctagcttgccaggcactagcttcaccccaacgtctacaaaggtaaatttgaaacacgaaaattctccttttaagagtacattcgttaatacgattgataattccaaagacgatcttaacaaaccatcttatgaagatttggacgtatctaagcagaatttgaagaactccattcaacagcgtatgatcgataaactcaactcttctgaggagagtttcaacgctaggaaaatgtccaaggtcaagttgcatgagaaaggggagatagataagccaacaatgttgaaatctagtggcccgatttccaaagacaaaaaaacaaaacctaccccaccacctaagccttctcatttaaagcctaaacctcctccaaaaccattgctcctcgcgggaagaaagttatccttggataagtga

SEQ ID NO: 9619 - DNA, 855 bp, Saccharomyces cerevisiae
atgctttactccagagaatcaaggacaaccgtccttttccttgcgttggttacctccctaaccgtactttgtcactcggtcgatgtaacaactgtatttactacgtcaacaatcaccgaaatcacaactgtgactgccgcaccgcaaccacaaaacaaagcggaaaccgctttgaatactgctactaacataattcaaaccatgcagtttcttttcaactgcgcaccatttaagtggaagggtcctttgaaaataacttcttgtgcgctgaactttattgtcctactactcaccgcttggggctatcttctgaagtatctgcaggaaaataagctgaatagcgatgctgatatggaaaaaatggtaggactgggatttggggaaatggtcggcagaatcttcggaaagggtgtcgggaaagcttttactaaaatggatatcactcagaaactagtgtacccgttcgaaggaagcaaccggcagaaatgtctactcatgaccgtcggagaaaactcgatagtgccattccacgatttgtctacagagatatgctttgaccagtacactctggactcgctatcccaccacaaccatgggagtatttcgattttagatgctggatcagtgagcgccttggggttcgcggatatttcatcgaaaatgccctctgtaagcgaactatacacactttttggagattatacgatagaagtactgggcggcatcactaaactggcttcaactcttaacagagaggactggcagggggaaagaaacgggttcgcggttttatcgagagaccggcctaaccagacgttactaagcgtccatatgtactcttcaagcttgctatag

SEQ ID NO: 9620 - DNA, 855 bp, Artificial Sequence
  Description of Artificial Sequence: Synthetic polynucleotide
atgctttactccagagaaagtaggacaaccgtccttttccttgcgttggttacctccttgaccgtactttgtcactctgtcgatgtaacaactgtatttactacgagtacaatcaccgaaatcacaactgtgactgccgcaccgcaaccacaaaacaaagcggaaaccgctttgaatactgctactaacataattcaaaccatgcagtttcttttcaactgcgcaccatttaagtggaagggtcctttgaaaataacttcttgtgcgttgaactttattgtcttgttgctcaccgcttggggctatcttttgaagtatttacaggaaaataagttgaatagcgatgctgatatggaaaaaatggtaggacttggatttggggaaatggtcggcagaatcttcggaaagggtgtcgggaaagcttttactaaaatggatatcactcagaaattagtgtacccgttcgaaggaagcaacagacagaaatgtttactcatgaccgtcggagaaaacagcatagtgccattccacgatttgtctacagagatatgctttgaccagtacactttggactctttatcccaccacaaccatgggagtatttccattttagatgctggatctgtgagcgccttggggttcgcggatatttcttctaaaatgccctctgtaagcgaattatacacactttttggagattatacgatagaagtattaggcggcatcactaaattggcttccactcttaacagagaggactggcagggggaaagaaacgggttcgcggttttatctagagacagacctaaccagacgttattaagcgtccatatgtactcttctagcttgttatga

SEQ ID NO: 9621 - DNA, 1839 bp, Saccharomyces cerevisiae
atgtctacatctttccaggagttcaaggccttctgcaacaaggttgggctagactttcaatggcttaatttgcaatcctccaagtctgttcccgaaaacggttcctctgaaggtttctcagccgtcagtgataccgtacaagaaaacatcagaccagctacggaaccacttaacgtcaaccagtccaaagatcctgtcagcaactttttttatgatgtcaagaatgctccactctggaacgtgtataagaggaatcattccggtcattcttctgctgaggcttgttctggagtaagttcaaggcaggcgccaaaaaacatacccgaggcaatggtaaaagagacagtcctttctaatcacgacaatgtcaccataataaacgaattactgccaacttcttctgccatgcatcaggaagaaagcaccgctatgacaacctcctacctcttatcccactccgtaaacgatacttgcaacgtgatgttttcttcctcctcccacaaccgtgctatgctcccatcttctcttgtgcaaagaaataacgctaccacatctcccacaacagactctgcatcagaaaacaacgaatcggtaccctcactaacctcatctgttagcacatcctcatcagtttattcgtcatggaatcctcctcattctccacacatatcgtcatttccagacggcaatttcgcatcgcttaacgcagaagtgacttgctttgatttccgccgcaccaaggactccagaacaaaagagacgaatgaatctatcattccaactgaaatttactgcccaacaaattccactgatcaccacaaacattatccaagccgaaaatctaaacaagatgcctgcgctcctgctccctgcaatcaaaatataagctgcagcgtcgtgtccacagcggaattttcccagtctaaccacacgttgactactgtagttccttcatacatgcaacagtaccttgacaggccacagaactggtttgaaagcaaaatgggaaaatactgtccactctttctgagaagtacaaagaacattgactacgattccctcgaatttaaatttgagcgcaagatgatagctgttcaatacctgcttttagacgaacaatctgagcccagaaggtactacaacccttcaaataaaagtattccattctggaagagacccttcaacttcgatacaatgcccagctacgaccaacttatggaggaagcagagtgccgtttttattcataccaatacaaatacgaaggtttccagaggattgagccctactccatttcttgtccctggaaaaacacacaaagagaaatagatctggttcttgatcacattcatttttctctcgatgtcggcgagaagaagtctttaaaccgaaaaggaaacatcactctcgatactttagacagtaaggtcgatcctaacattcagatcaagccgtatcagatttttccgtccaacaacctagtatacgaaggcttaccgcatcccgccgaacaatccttaattttgagtcctgacacctccctcattgagagggcgtttcaggcactgatagacatatgcaaggaatccattccatcttctaatgactgtagtacccgcaataataatagcgctcctcagcttaccgtgccagaaccatctaaaccatgccggctgctacttgttcgtgagtctcgcacagcaactgaactaaaaactaataaaaagctctggctccactcacaaagaaggaatatcgaagtgaccgtaccaatgcatccttctgagcgtgggacaaaaagctggttacgaaaatggctctcaacttttgtacatcagtga

SEQ ID NO: 9622 - DNA, 1839 bp, Artificial Sequence
  Description of Artificial Sequence: Synthetic polynucleotide
atgtctacatctttccaggagttcaaggccttctgcaacaaggttgggttggactttcaatggcttaatttgcaatcctccaagtctgttcccgaaaacggttcctctgaaggtttctctgccgtcagtgataccgtacaagaaaacatcagaccagctacggaaccacttaacgtcaaccagtccaaagatcctgtcagcaactttttttatgatgtcaagaatgctccactctggaacgtgtataagaggaatcattccggtcattcttctgctgaggcttgttctggagtaagttctaggcaggcgccaaaaaacatacccgaggcaatggtaaaagagacagtcctttctaatcacgacaatgtcaccataataaacgaattattaccaacttcttctgccatgcatcaggaagaaagcaccgctatgacaacctcctacctcttatcccactccgtaaacgatacttgcaacgtgatgttttcttcctcctcccacaaccgtgctatgctcccatcttctcttgtgcaaagaaataacgctaccacatctcccacaacagactctgcatctgaaaacaacgaaagtgtaccctctttaacctcttctgttagcacatcctcttctgtttattcttcttggaatcctcctcattctccacacatatcttcttttccagacggcaatttcgcatctcttaacgcagaagtgacttgctttgatttccgccgcaccaaggactccagaacaaaagagacgaatgaatctatcattccaactgaaatttactgcccaacaaattccactgatcaccacaaacattatccaagcagaaaatctaaacaagatgcctgcgctcctgctccctgcaatcaaaatataagctgcagcgtcgtgtccacagcggaattttcccagtctaaccacacgttgactactgtagttccttcttacatgcaacagtaccttgacaggccacagaactggtttgaaagcaaaatgggaaaatactgtccactctttttaagaagtacaaagaacattgactacgattccctcgaatttaaatttgagcgcaagatgatagctgttcaatacttacttttagacgaacaatctgagcccagaaggtactacaacccttccaataaaagtattccattctggaagagacccttcaacttcgatacaatgcccagctacgaccaacttatggaggaagcagagtgccgtttttattcttaccaatacaaatacgaaggtttccagaggattgagccctactccatttcttgtccctggaaaaacacacaaagagaaatagatttggttcttgatcacattcatttttctctcgatgtcggcgagaagaagtctttaaacagaaaaggaaacatcactctcgatactttagacagtaaggtcgatcctaacattcagatcaagccgtatcagatttttccgtccaacaacttggtatacgaaggcttaccgcatcccgccgaacaatccttaattttgagtcctgacacctccctcattgagagggcgtttcaggcattaatagacatatgcaaggaatccattccatcttctaatgactgtagtacccgcaataataatagcgctcctcagcttaccgtgccagaaccatctaaaccatgcaggcttttacttgttcgtgagtctcgcacagcaactgaattgaaaactaataaaaagctctggctccactctcaaagaaggaatatcgaagtgaccgtaccaatgcatccttctgagcgtgggacaaaaagctggttaagaaaatggctctccacttttgtacatcagtga

SEQ ID NO: 9623 - DNA, 1362 bp, Saccharomyces cerevisiae
atgtctgaaaataacgaagaacaacatcaacaacaacaacaacagcaacctgttgccgtcgaaactccctcggcagttgaagctccagcatcagcagatccttcttctgaacagagcgtcgctgtcgaaggcaattctgaacaagctgaagacaatcagggtgaaaatgatccttccgtagttcctgctaatgctattaccggtggtagggaaacttccgatagagttttatatgttggtaacctagacaaagctatcaccgaagacattttaaagcaatatttccaagttggcggaccaattgctaacatcaaaatcatgatcgataagaataataagaacgtcaattacgcttttgttgaataccatcaatctcacgatgccaatattgccttacaaacattgaacggcaaacaaattgaaaacaacattgtcaaaatcaactgggccttccaatcccaacagagttcctccgatgatacatttaacttgtttgtcggtgatttgaatgttaatgttgatgacgaaactttaaggaatgccttcaaagacttcccatcctacttgagtggtcatgttatgtgggacatgcaaactggtagttcaagaggttacggttttgtttcctttacttctcaagatgatgcacaaaatgccatggacagcatgcaaggtcaagatttgaatggtagaccgctaagaatcaactgggctgctaagcgtgataacaataacaataataattatcaacagcgtcgtaactacggtaacaacaaccgtggtggtttccgtcaatataacagtaacaacaataacaacatgaatatggggatgaatatgaacatgaatatgaatatgaacaacagcaggggcatgccaccaagttcaatgggaatgccaattggcgccatgccattaccatctcaaggccaaccccaacaatcccagaccattggtttacctcctcaagtaaatcctcaagctgttgaccacatcattagaagtgccccaccaagagttactactgcctatatcggtaatattccgcactttgccactgaagctgatttaattccgttgttccagaacttcggttttattttagatttcaagcactatccagaaaagggctgttgcttcataaagtatgacactcatgaacaggccgctgtttgtattgttgccttggcaaacttcccatttcaaggcagaaacttgagaaccggttggggtaaggaaagatcaaattttatgccacagcagcagcaacagggcggtcagccacttataatgaatgaccaacaacaaccggttatgtctgagcaacaacagcaacagcagcaacagcagcaacaacaataa

SEQ ID NO: 9624 - DNA, 1362 bp, Artificial Sequence
  Description of Artificial Sequence: Synthetic polynucleotide
atgtctgaaaataacgaagaacaacatcaacaacaacaacaacagcaacctgttgccgtcgaaactccctctgcagttgaagctccagcatctgcagatccttcttctgaacagagcgtcgctgtcgaaggcaattctgaacaagctgaagacaatcagggtgaaaatgatccttccgtagttcctgctaatgctattaccggtggtagggaaacttccgatagagttttatatgttggtaacttggacaaagctatcaccgaagacattttaaagcaatatttccaagttggcggaccaattgctaacatcaaaatcatgatcgataagaataataagaacgtcaattacgcttttgttgaataccatcaatctcacgatgccaatattgccttacaaacattgaacggcaaacaaattgaaaacaacattgtcaaaatcaactgggccttccaatcccaacagagttcctccgatgatacatttaacttgtttgtcggtgatttgaatgttaatgttgatgacgaaactttaaggaatgccttcaaagacttcccatcctacttgagtggtcatgttatgtgggacatgcaaactggtagtagtagaggttacggttttgtttcctttacttctcaagatgatgcacaaaatgccatggacagcatgcaaggtcaagatttgaatggtagaccgttaagaatcaactgggctgctaagcgtgataacaataacaataataattatcaacagcgtcgtaactacggtaacaacaaccgtggtggtttccgtcaatataacagtaacaacaataacaacatgaatatggggatgaatatgaacatgaatatgaatatgaacaacagcaggggcatgccaccaagttctatgggaatgccaattggcgccatgccattaccatctcaaggccaaccccaacaatcccagaccattggtttacctcctcaagtaaatcctcaagctgttgaccacatcattagaagtgccccaccaagagttactactgcctatatcggtaatattccgcactttgccactgaagctgatttaattccgttgttccagaacttcggttttattttagatttcaagcactatccagaaaagggctgttgcttcataaagtatgacactcatgaacaggccgctgtttgtattgttgccttggcaaacttcccatttcaaggcagaaacttgagaaccggttggggtaaggaaagatctaattttatgccacagcagcagcaacagggcggtcagccacttataatgaatgaccaacaacaaccggttatgtctgagcaacaacagcaacagcagcaacagcagcaacaacaatga

SEQ ID NO: 9625 - DNA, 228 bp, Saccharomyces cerevisiae
atgacaaagaatttcatcgtcactttgaaaaagaacactccagatgtggaagctaagaagttcttggattcagttcatcacgcaggtggctctattgtacacgaattcgacatcattaaagggtacaccatcaaggtaccagatgttctccacttgaacaagttgaaggaaaagcacaatgatgtcatcgagaacgtcgaagaagacaaagaagttcatacaaattga

SEQ ID NO: 9626 - DNA, 228 bp, Artificial Sequence
  Description of Artificial Sequence: Synthetic polynucleotide
atgacaaagaatttcatcgtcactttgaaaaagaacactccagatgtggaagctaagaagttcttggattctgttcatcacgcaggtggctctattgtacacgaattcgacatcattaaagggtacaccatcaaggtaccagatgttctccacttgaacaagttgaaggaaaagcacaatgatgtcatcgagaacgtcgaagaagacaaagaagttcatacaaattga

SEQ ID NO: 9627 - DNA, 3135 bp, Saccharomyces cerevisiae
atgtcagattcacaacaatcaatcaccgttctagaagagcttttccgaaagttggaaactgctacttcagaaacaagagagggtatttcttcggagctttcctcatttttaaacgggaacatcatcgagcatgacgttcccgaagttttttttgatgaatttcaaaaagctatccagagtaaacaaaaggcgctcaacacgctgggtgcggtggcttacatagcaaatgaaactaatctatcaccttctgttgaaccgtacatagttgcgacggtcccttctgtatgcagtaaagctggtagtaaagataatgatgttcaacttgcggcaacaaaggccctcaaagccatcgctagtgctgttaacccggttgccgttaaagcactcttacctcatttgattcattcgctggaaactagcaacaagtggaaagagaaggttgctgttctcgaagtaatctctgtattggtagatgccgctaaagaacagattgccttaagaatgccggaactaattcccgttctttcggaatccatgtgggacactaagaaaggagttaaggaggcggcaacgacaaccatcacaaaggcaactgaaactgttgataataaggatattgagagatttattccaaaattaatcgaatgtattgcaaatccaaatgaggtgcctgaaaccgttcatctcttgggtgcaactacttttgtagccgaagtaactccagcgactttgtctattatggttcctttattgagcagaggtttagccgagagagaaacctctataaaacgtaaagctgcggttattatcgataatatgtgtaaattggttgaagacccgcaagttgttgctccattcttaggtaaactactaccagggctaaagaacaattttgctactattgctgatcctgaagcgcgtgaagttacattaaaagctttaaaaaccctgagacgtgtgggtaatgtcggggaagatgatgtgttaccagaaatatcgcatgctggtgatgtttccacaacactgggcgtcatcaaggaattactggaacctgaaaaagtggccccaaggttcaccattgtggttgagtacatagccgcgattgccgcaaatctaattgatgaaaggatcattgatcagcaaacgtggtttacacatgttacaccttatatgactatatttttacatgagaaaactgcaaaggaaatactagacgatttcaggaaaagggcagtagataatattccagttggaccgaatttccaagacgaagaggatgagggtgaagatttgtgtaattgtgaattttccttggcatatggtgccaaaatattactaaacaagactcaattgaggttgaagcgaggtaggagatatggtctatgtggtcctaatggtgccggaaaatccactctaatgcgatccattgctaatggccaagttgacgggttccccactcaggatgaatgtcgcactgtttatgtggaacacgatatcgataatacacattcggacatgtccgttttagattttgtatattccggcaatgtaggaactaaggatgttattacctcgaaattaaaggagtttgggttcagcgatgaaatgatagaaatgccaattgcatccctatctggaggttggaaaatgaaattagctttggcgagggctgttctgaaggacgctgacattctactattggatgaaccaacaaatcatctagacactgttaatgtggagtggctggtaaattatttgaatacttgcggaattacatcggtgattgtctctcatgattctggttttctggataaggtttgtcaatacatcatacattatgagggtcttaaattaagaaagtacaagggtaatttatcagaatttgttcaaaaatgtcctacggcacaatcatactatgaattaggtgcctctgaccttgaatttcaattcccaactcctggttatctagaaggtgtcaaaacgaagcaaaaggcaattgttaaagtaagtaatatgacttttcaatatccagggacaactaaaccacaagtctcagatgttactttccagtgttctctatcctcaaggattgcagttatcggacctaatggggctggtaagtccactttaattaatgttcttactggtgaactgttaccaaccagcggtgaagtatatacacacgagaattgtcgtatagcgtatattaagcagcacgcttttgcacacattgaatcgcacttagacaaaactccatccgaatacattcaatggaggttccaaactggtgaggatagggaaacaatggatagagcaaataggcaaataaatgaaaatgacgcagaggccatgaataaaatatttaaaattgaagggaccccaagaagggttgcaggaatccattcaagaaggaaatttaaaaacacgtatgagtacgaatgttcgtttttgttaggtgagaacattggtatgaaatctgaaagatgggttccaatgatgtctgtcgacaatgcttggctaccaaggggcgaattgattgaatcccattctaaaatggttgctgaaattgatatgaaggaagctttggcttctggtcaattcagggctttaacaagaaaagagattgaattacattgcgccatgttggggttggattcagaattagtctcacattcaagaattagaggtttatcgggtgggcaaaaggttaaattggtactcgctgcctgcacgtggcaaagaccccatttgattgttttagatgaacctacgaattacttggacagagattcattgggtgctctttcaaaagcattaaaagcttttgaaggtggtgtcattattattacgcattcggcagaatttactaagaatctgactgacgaagtttgggcggttaaggatgggaaaatgacaccctctggccataattgggttgcaggacaaggtgctggcccaagaattgagaaaaaagaagaagagggtgataaatttgatgctatgggtaacaagattaatagtgggaagaaaaaaagcaaactctcttctgcagaattgagaaagaaaaagaaggagagaatgaagaagaaaaaagagatgggtgatgaatacgtttcttctgatgaagatttttaa

SEQ ID NO: 9628 - DNA, 3135 bp, Artificial Sequence
  Description of Artificial Sequence: Synthetic polynucleotide
atgagtgattctcaacaatccatcaccgttttggaagagcttttcagaaagttggaaactgctacttctgaaacaagagagggtatttcttctgagctttcctcttttttaaacgggaacatcatcgagcatgacgttcccgaagttttttttgatgaatttcaaaaagctatccagagtaaacaaaaggcgctcaacacgttaggtgcggtggcttacatagcaaatgaaactaatttatctccttctgttgaaccgtacatagttgcgacggtcccttctgtatgcagtaaagctggtagtaaagataatgatgttcaacttgcggcaacaaaggccctcaaagccatcgctagtgctgttaacccggttgccgttaaagcactcttacctcatttgattcattctttggaaactagcaacaagtggaaagagaaggttgctgttctcgaagtaatctctgtattggtagatgccgctaaagaacagattgccttaagaatgccggaattgattcccgttctttctgaatccatgtgggacactaagaaaggagttaaggaggcggcaacgacaaccatcacaaaggcaactgaaactgttgataataaggatattgagagatttattccaaaattaatcgaatgtattgcaaatccaaatgaggtgcctgaaaccgttcatctcttgggtgcaactacttttgtagccgaagtaactccagcgactttgtctattatggttcctttattgagcagaggtttagccgagagagaaacctctataaaacgtaaagctgcggttattatcgataatatgtgtaaattggttgaagacccgcaagttgttgctccattcttaggtaaattattaccagggttgaagaacaattttgctactattgctgatcctgaagcgcgtgaagttacattaaaagctttaaaaaccttgagacgtgtgggtaatgtcggggaagatgatgtgttaccagaaatatctcatgctggtgatgtttccacaacattaggcgtcatcaaggaattattggaacctgaaaaagtggccccaaggttcaccattgtggttgagtacatagccgcgattgccgcaaatttaattgatgaaaggatcattgatcagcaaacgtggtttacacatgttacaccttatatgactatatttttacatgagaaaactgcaaaggaaatattggacgatttcaggaaaagggcagtagataatattccagttggaccgaatttccaagacgaagaggatgagggtgaagatttgtgtaattgtgaattttccttggcatatggtgccaaaatattattaaacaagactcaattgaggttgaagagaggtaggagatatggtttgtgtggtcctaatggtgccggaaaatccactttaatgagatccattgctaatggccaagttgacgggttccccactcaggatgaatgtcgcactgtttatgtggaacacgatatcgataatacacattctgacatgtccgttttagattttgtatattccggcaatgtaggaactaaggatgttattacctccaaattaaaggagtttgggttcagcgatgaaatgatagaaatgccaattgcatccttatctggaggttggaaaatgaaattagctttggcgagggctgttttgaaggacgctgacattttattattggatgaaccaacaaatcatttggacactgttaatgtggagtggttggtaaattatttgaatacttgcggaattacatctgtgattgtctctcatgattctggttttttggataaggtttgtcaatacatcatacattatgagggtcttaaattaagaaagtacaagggtaatttatctgaatttgttcaaaaatgtcctacggcacaatcttactatgaattaggtgcctctgaccttgaatttcaattcccaactcctggttatttggaaggtgtcaaaacgaagcaaaaggcaattgttaaagtaagtaatatgacttttcaatatccagggacaactaaaccacaagtctctgatgttactttccagtgttctttatccagcaggattgcagttatcggacctaatggggctggtaagtccactttaattaatgttcttactggtgaattattaccaaccagcggtgaagtatatacacacgagaattgtcgtatagcgtatattaagcagcacgcttttgcacacattgaatctcacttagacaaaactccatccgaatacattcaatggaggttccaaactggtgaggatagggaaacaatggatagagcaaataggcaaataaatgaaaatgacgcagaggccatgaataaaatatttaaaattgaagggaccccaagaagggttgcaggaatccattccagaaggaaatttaaaaacacgtatgagtacgaatgttcctttttgttaggtgagaacattggtatgaaatctgaaagatgggttccaatgatgtctgtcgacaatgcttggttaccaaggggcgaattgattgaatcccattctaaaatggttgctgaaattgatatgaaggaagctttggcttctggtcaattcagggctttaacaagaaaagagattgaattacattgcgccatgttggggttggattctgaattagtctctcattccagaattagaggtttatctggtgggcaaaaggttaaattggtactcgctgcctgcacgtggcaaagaccccatttgattgttttagatgaacctacgaattacttggacagagattctttgggtgctctttctaaagcattaaaagcttttgaaggtggtgtcattattattacgcattctgcagaatttactaagaatttaactgacgaagtttgggcggttaaggatgggaaaatgacaccctctggccataattgggttgcaggacaaggtgctggcccaagaattgagaaaaaagaagaagagggtgataaatttgatgctatgggtaacaagattaatagtgggaagaaaaaaagcaaactctcttctgcagaattgagaaagaaaaagaaggagagaatgaagaagaaaaaagagatgggtgatgaatacgtttcttctgatgaagatttttga

SEQ ID NO: 9629 - DNA, 1896 bp, Saccharomyces cerevisiae
atgcaaaaactcctctttgtcttttctgtgttattgacagtagtactagcaacagcaccatttcaggtacaatgtcctagctctccacttattagggaggccaaacatgaactctgtccagaagaaaccttgtatctgaagaaaaaaaaaattaaaacgaagaataaactgattcagtttttaaaatccttgacagaggcaaagtttagttcgaagttttataaacgcgtgttgaaagatcctccaaaaattgggattgctatatctggcggcgggtacagatccatgttagtaggtaccggatttatttcccaaatgaacgattatggcctttttgaatattcggattatattgctggattatcaggcggaagttggatcttgatggatttggtagttcaaaattttgaagtaaaatccctgctacaagagtgggaccttgaagaggatcttttattaggcataccggaattcgatatttccgaagaagaaattgttaccaatgcaaaaaaggagtataatgataatgatttgaagatgaagaagcgtcaggggggttctctgattacaagctcttcaaatttttatgaacaaatagaggagatcatgaattccatagaagaaatcccagaagactatatgataacgaagagaaacttgaatccattagcaagactaaaaaaaatattctttcctaacaacactttcactggaactgatgcgaagattgaaacctttaaaaaagtgctagacttttacaaaagtttgcatttgaaaattaagcctaaaaaaatggagggtttccaaatatcgttcaccgattattggggtaaagcaatcgttcaaagactaaaaaaaaatttcgatgacgatcccaaccattccttttcgttttcgaagcttgtaaactcgtctaaaaaatttaaggaatgcagtgtgccgatcccaatattcgttgcaaattgcaaaaatggacttctttcaaacgttatatttgaatttacgccctttgaatttggatcttgggaaaatatcctcagacttttcgtcaagttgccctatttgggctcaaaaattgtttctggaaaggccgagaagtgtattaataactttgatgatctaggttttattactgcgacgtcttcttcaatattcaacaatgtgctcatcttcatctggaatttggcttctcagtcctccagagaagcaatgaaagctttgaatatggttatgggaatttttggcctaggtaaagaggaaatatttagtatttcgaaagactcctcgagattagagacagactatgccgtatatcaacccaatcccttttatctttatcctgaaaaagacaatgtcctaactaacaaaaatcatttataccttgtagacggcggagaagacggcgagaatattccactcagaacattggtgattcctgaaagggaactagatgtaatttttgttctggattctagttcggatattgacaactatccaaacggctccaagttaaaaaggatattcgaaaaattagatgaagagaacgttcattaccaatttccgaacaatgtaaaaacattcactcaccccattgttataggatgcaatgctaccaaaagaactggacatgattcatttttgccaattataatttatcatgccaatgcgaatcatggaaacgcatctaatacgtcgacattcaaaataacttacaatcagtctgaagttagcagtatgttacccactggaaggggagtgtttagcaatgattatgacctttattataaaaattgcttaggctgtatattaaccaaaagaacaatggacaggctcccaagaaaaaagaaattttcgccattttgcttacaatgctttaaagactactgttactcataa

SEQ ID NO: 9630 - DNA, 1896 bp, Artificial Sequence
  Description of Artificial Sequence: Synthetic polynucleotide
atgcaaaaactcctctttgtcttttctgtgttattgacagtagtattggcaacagcaccatttcaggtacaatgtcctagctctccacttattagggaggccaaacatgaactctgtccagaagaaaccttgtatttgaagaaaaaaaaaattaaaacgaagaataaattgattcagtttttaaaatccttgacagaggcaaagtttagttccaagttttataaacgcgtgttgaaagatcctccaaaaattgggattgctatatctggcggcgggtacagatccatgttagtaggtaccggatttatttcccaaatgaacgattatggcctttttgaatattctgattatattgctggattaagtggcggaagttggatcttgatggatttggtagttcaaaattttgaagtaaaatccttattacaagagtgggaccttgaagaggatcttttattaggcataccggaattcgatatttccgaagaagaaattgttaccaatgcaaaaaaggagtataatgataatgatttgaagatgaagaagcgtcaggggggttctttgattacaagctcttccaatttttatgaacaaatagaggagatcatgaattccatagaagaaatcccagaagactatatgataacgaagagaaacttgaatccattagcaagattgaaaaaaatattctttcctaacaacactttcactggaactgatgcgaagattgaaacctttaaaaaagtgcttgacttttacaaaagtttgcatttgaaaattaagcctaaaaaaatggagggtttccaaatatctttcaccgattattggggtaaagcaatcgttcaaagattgaaaaaaaatttcgatgacgatcccaaccattccttttctttttccaagcttgtaaactcttctaaaaaatttaaggaatgcagtgtgccgatcccaatattcgttgcaaattgcaaaaatggacttctttccaacgttatatttgaatttacgccctttgaatttggatcttgggaaaatatcctcagacttttcgtcaagttgccctatttgggctctaaaattgtttctggaaaggccgagaagtgtattaataactttgatgatttaggttttattactgcgacgtcttcttctatattcaacaatgtgctcatcttcatctggaatttggcttctcagtcctccagagaagcaatgaaagctttgaatatggttatgggaatttttggcttgggtaaagaggaaatatttagtatttccaaagactccagcagattagagacagactatgccgtatatcaacccaatcccttttatctttatcctgaaaaagacaatgtcttgactaacaaaaatcatttataccttgtagacggcggagaagacggcgagaatattccactcagaacattggtgattcctgaaagggaattagatgtaatttttgttttggattctagttctgatattgacaactatccaaacggctccaagttaaaaaggatattcgaaaaattagatgaagagaacgttcattaccaatttccgaacaatgtaaaaacattcactcaccccattgttataggatgcaatgctaccaaaagaactggacatgattcttttttgccaattataatttatcatgccaatgcgaatcatggaaacgcatctaatacgagtacattcaaaataacttacaatcagtctgaagttagcagtatgttacccactggaaggggagtgtttagcaatgattatgacctttattataaaaattgcttaggctgtatattaaccaaaagaacaatggacaggctcccaagaaaaaagaaattttctccattttgcttacaatgctttaaagactactgttactcctga

SEQ ID NO: 9631 - DNA, 1335 bp, Saccharomyces cerevisiae
atgaacgtcgttgtgtgctccggtgggactgccacaaattcattgactccttgcttttctaatatttctatcttaaaaggacatgagctgacgtatatattgccaatatcagataatggcgggtccacaagtgaaattctacgaatagttggtggcccagcaattggtgatatcagatctagaatagtgagactacttcaagatgaacagcttgtcgagttgtttggccataggctacctaatgataagttattagctaagaaagaatggaatgaaatagtggaaggttcgcatcccatatggaaaaatatttcgatagaagttaaggaaatgtgtcgttcttttattatccatatgcaagcagaactcttgaaaaaaatcaaacactcgaatccatttcagtttgagagtgcatccattggaaattttttcttaactggtgctagattgtttttaggttctctagacgcatctattgaactaatgatgaggataggaaggtgcagtcctctagttcatgttattccatgtataaataccaatcacacacatcatatctcggctttgttgacgaatggtgagatgataactggccaatcacaaatatcgcatccctcgaaatctgttcctaaagataatagcatagcacattcagctaaatttattcatttacttggctcttatgacgaccatttgaaaattctcctcgacgatgaggaagaagaagcggaagaggagtatgccaatcctatctatattcttccagaactgaaaaactcccagttgcattttgacaagcttgatgaatcacagaatctacctgctccggtacataggatattgtatataaacccatatggcgaagagataaaaccaatgggaaatccaagagctatttccaaggtgaaaaaagctgacatggtcgtttattctatcggttctttaatgacaagtttactcccaatccttattcttggtaatcttgctgaagtaattttggaatctaataatacgaaaaaagttttgctcataaataataaatatgatagagaggtttttggtttagacggtttacactacgttcaaatgatcatagattctatgagtagggcaatagcaggctataggcaatctaagggtgtccattcagagaatgatgactttgaatggcaagattttattactgatattgtttacctaaaaaatggtgaaattgaaattgatgaaacgatattcgagaagcatagtattagatgccaccagatcgcgtcttcggataagatggaaagtgaagaacttgaaaaggttctgaatcaaattggccttaaaaactga

SEQ ID NO: 9632 - DNA, 1335 bp, Artificial Sequence
  Description of Artificial Sequence: Synthetic polynucleotide
atgaacgtcgttgtgtgctccggtgggactgccacaaattctttgactccttgcttttctaatatttctatcttaaaaggacatgagcttacgtatatattgccaatatctgataatggcgggtccacaagtgaaattttaagaatagttggtggcccagcaattggtgatatcagatctagaatagtgagattacttcaagatgaacagcttgtcgagttgtttggccataggttgcctaatgataagttattagctaagaaagaatggaatgaaatagtggaaggttctcatcccatatggaaaaatatttctatagaagttaaggaaatgtgtcgttcttttattatccatatgcaagcagaactcttgaaaaaaatcaaacactctaatccatttcagtttgagagtgcatccattggaaattttttcttaactggtgctagattgtttttaggttctttggacgcatctattgaattgatgatgaggataggaaggtgcagtcctttggttcatgttattccatgtataaataccaatcacacacatcatatctctgctttgttgacgaatggtgagatgataactggccaatctcaaatatctcatccctctaaatctgttcctaaagataatagcatagcacattctgctaaatttattcatttacttggctcttatgacgaccatttgaaaattctcctcgacgatgaggaagaagaagcggaagaggagtatgccaatcctatctatattcttccagaattgaaaaactcccagttgcattttgacaagcttgatgaatctcagaatttacctgctccggtacataggatattgtatataaacccatatggcgaagagataaaaccaatgggaaatccaagagctatttccaaggtgaaaaaagctgacatggtcgtttattctatcggttctttaatgacaagtttactcccaatccttattcttggtaatcttgctgaagtaattttggaatctaataatacgaaaaaagttttgctcataaataataaatatgatagagaggtttttggtttagacggtttacactacgttcaaatgatcatagattctatgagtagggcaatagcaggctataggcaatctaagggtgtccattctgagaatgatgactttgaatggcaagattttattactgatattgtttacttgaaaaatggtgaaattgaaattgatgaaacgatattcgagaagcatagtattagatgccaccagatcgcgtcttctgataagatggaaagtgaagaacttgaaaaggttttgaatcaaattggccttaaaaactga

SEQ ID NO: 9633 - DNA, 726 bp, Saccharomyces cerevisiae
atggtcaaagctgttatttttaccgatttcgacggtaccgttactttggaagattctaacgattatctgaccgatactttaggtttcggtaaggaaaaaagattaaaggtcttcgaaggcgtgttagatgatactaagtcttttaggcaaggtttcatggaaatgctggaatccatccacacccctttccctgagtgtatcaagatcttagaaaagaaaattcgattggatcctggtttcaaggatacattcgaatgggctcaagaaaatgatgtccctgtcatcgttgtttccagcggaatgaaaccaattatcaaggttttattgaccagattagttggacaagagtctattcacaaaattgacattgtttccaatgaagtggaaatcgatgcacatgatcaatggaaaatcatctataaggatgaaagtcccttcggacatgacaaatccagaagtatcgatgcttataaaaagaaatttgaatctaccttgaaagcaggtgaacaaagacccgtttacttttactgtggtgacggtgtttctgatctaagtgctgcaaaagaatgtgatttgctatttgccaaaagaggtaaagatttggtcacttattgtaaaaaacaaaacgtcccattccatgaattcgataccttcaaagacatcttggctagcatgaaacaagttctggctggtgaaaagacagtcgctgaattgatggaaaattag

SEQ ID NO: 9634 - DNA, 726 bp, Artificial Sequence
  Description of Artificial Sequence: Synthetic polynucleotide
atggtcaaagctgttatttttaccgatttcgacggtaccgttactttggaagattctaacgattatttgaccgatactttaggtttcggtaaggaaaaaagattaaaggtcttcgaaggcgtgttagatgatactaagtcttttaggcaaggtttcatggaaatgttggaatccatccacacccctttccctgagtgtatcaagatcttagaaaagaaaattagattggatcctggtttcaaggatacattcgaatgggctcaagaaaatgatgtccctgtcatcgttgtttccagcggaatgaaaccaattatcaaggttttattgaccagattagttggacaagagtctattcacaaaattgacattgtttccaatgaagtggaaatcgatgcacatgatcaatggaaaatcatctataaggatgaaagtcccttcggacatgacaaatccagaagtatcgatgcttataaaaagaaatttgaatctaccttgaaagcaggtgaacaaagacccgtttacttttactgtggtgacggtgtttctgatttgagtgctgcaaaagaatgtgatttgttatttgccaaaagaggtaaagatttggtcacttattgtaaaaaacaaaacgtcccattccatgaattcgataccttcaaagacatcttggctagcatgaaacaagttttggctggtgaaaagacagtcgctgaattgatggaaaattga

SEQ ID NO: 9635 - DNA, 1263 bp, Saccharomyces cerevisiae
atgagtaaaattaaagttgttcatcccatcgtggaaatggacggtgatgagcagacaagagttatttggaaacttatcaaagaaaaattgatattgccatatttagatgtggatttaaaatactatgacctttcaatccaagagcgtgataggactaatgatcaagtaacaaaggattcttcttatgctaccctaaaatatggggttgctgtcaaatgtgccactataacacccgatgaggcaagaatgaaagaatttaaccttaaagaaatgtggaaatctccaaatggaacaatcagaaacatcctaggtggaactgtatttagagaacccatcattattccaaaaatacctcgtctagtccctcactgggagaaacctataattataggccgtcatgcttttggtgaccaatatagggctactgacatcaagattaaaaaagcaggcaaactaaggttacagtttagctcagatgacggtaaagaaaacatcgatttaaaggtttatgaatttcctaaaagtggtgggatcgcaatggcaatgtttaatacaaatgattccattaaagggttcgcaaaggcatccttcgaattagctctcaaaagaaaactaccgttattctttacaaccaaaaacactattctgaaaaattatgataatcagttcaaacaaattttcgataatttgttcgataaagaatataaggaaaagtttcaggctttaaaaataacgtacgagcatcgtttgattgatgatatggtagcacagatgctaaaatcaaagggcgggtttataatcgccatgaagaattatgatggcgatgtccagtctgacattgtggcacaaggatttgggtctcttggtttaatgacgtccatattgattacacctgatggtaaaacgtttgaaagcgaggctgcccatggtacggtgaccagacattttagaaaacatcaaagaggcgaagaaacatcaacaaattcaatagcctcaatatttgcctggacaagggcaattatacaaagaggaaaattagacaatacagatgatgttataaaatttggaaacttactagaaaaggctactttggacacagttcaagtgggcggaaaaatgaccaaggatttagcattgatgcttggaaagactaatagatcatcatatgtaaccacagaagagtttattgatgaagttgccaagaggcttcaaaacatgatgctcagctccaatgaagacaagaaaggtatgtgcaaactataa

SEQ ID NO: 9636 - DNA, 1263 bp, Artificial Sequence
  Description of Artificial Sequence: Synthetic polynucleotide
atgagtaaaattaaagttgttcatcccatcgtggaaatggacggtgatgagcagacaagagttatttggaaacttatcaaagaaaaattgatattgccatatttagatgtggatttaaaatactatgacctttctatccaagagcgtgataggactaatgatcaagtaacaaaggattcttcttatgctaccttgaaatatggggttgctgtcaaatgtgccactataacacccgatgaggcaagaatgaaagaatttaaccttaaagaaatgtggaaatctccaaatggaacaatcagaaacatcttgggtggaactgtatttagagaacccatcattattccaaaaatacctcgtttagtccctcactgggagaaacctataattataggccgtcatgcttttggtgaccaatatagggctactgacatcaagattaaaaaagcaggcaaattgaggttacagtttagcagtgatgacggtaaagaaaacatcgatttaaaggtttatgaatttcctaaaagtggtgggatcgcaatggcaatgtttaatacaaatgattccattaaagggttcgcaaaggcatccttcgaattagctctcaaaagaaaattaccgttattctttacaaccaaaaacactattttgaaaaattatgataatcagttcaaacaaattttcgataatttgttcgataaagaatataaggaaaagtttcaggctttaaaaataacgtacgagcatcgtttgattgatgatatggtagcacagatgttgaaatccaagggcgggtttataatcgccatgaagaattatgatggcgatgtccagtctgacattgtggcacaaggatttgggtctcttggtttaatgacgtccatattgattacacctgatggtaaaacgtttgaaagcgaggctgcccatggtacggtgaccagacattttagaaaacatcaaagaggcgaagaaacatctacaaattctatagcctctatatttgcctggacaagggcaattatacaaagaggaaaattagacaatacagatgatgttataaaatttggaaacttattggaaaaggctactttggacacagttcaagtgggcggaaaaatgaccaaggatttagcattgatgcttggaaagactaatagaagttcttatgtaaccacagaagagtttattgatgaagttgccaagaggcttcaaaacatgatgctcagctccaatgaagacaagaaaggtatgtgcaaattgtga

SEQ ID NO: 9637 - DNA, 2031 bp, Saccharomyces cerevisiae
atgtctacaaatatattgcaacatgttaagcaattgctccataacagagatgtatttagcttttttcacaacaagactggaaatcttaattacctagataacacaactcagaaaccggaagtttttgtaagtccaaattctacaatagtttcagccccaactttggactcttttcaagcattgatggagaaaggtaacttcaccactttgcaactagctaaggtaggaattagaatgtttttctcctattcggtaagtaagtatgctgttctatgttttagtaccgccattattttgaataggttgactgtaatgtcttcattgagatcaaattctacaaacattcgtttacctctttggtcaaaaactttgctccatttagtagccactctttcactggttaaagcacttttacaaattctgagtcaatttggactcatgcatgaactgcacgtgagtgatacagatttttatgctttaagtgtctatttatttgtagctctgtctgactgcattgaaatttttatttcttcaacgacgaacgttccttcattaatatgctctgatttttccatatggggtttatcattgaatctttatatcatatccaaaatgcccgcggggcagcagcatattggcgataatgttgaactactaggagcggtttttcacagattagtaattcatttggtagaattgtttcatataagagcctatagattatgtggagaagttatattaaacgcgggtttttttaccgcattcgtcactaggacctatttgaacggattagattttattaacatctgtctcattcacaattatttccctggctttttctatatttccaccatattactggcgtctataggcattttcctgaaggctttgttcaccagtaatccgttccgatcattatattcaagatataaaaacttggaaaaatggtggagatcaaataattacaatggagaagaggagtttaacgaaatagctctttcattgtgtctacttttaacgtcgaatgactataaaatatttaagaaatcagacaacgtaaaatccgttgatgaagtcgctgctttcagtaatagttatgtggttagtggacatttaaaccaactccagtcgacaccagaggatctgttatctcgtaaggaaatgactaccgattcccagttaccaggttttgcgaggacatatttaggcctttttgaattagtaagaaccattattttgacgtattctagactcctaaaaaatcttctgtggagtaaaaattttgagagcagtatagataagaaaccgagagtgggaaagcgtaaaaagagggatttaaacaaatatgttacagaaaaaaactataaaaagtttttatataaaccggacgtcaaagagcttaatattgagagtgatctcagaagcctggagttattgcttcctgaagacgattcatcaaaagactactttccccccagaaaaatcgatgaaagtgtttcagatgaagagtttgatagtgatatggaaagtcagttgattattgatgaagaaaaagaattaacacatttatcaagtaatgctgtcgattctgatgatttagaggaaatagcctggaacatctccatgtggtctattttaaattatgaaatggatgtccataataaggttaatggaccgttgactagatcacaatatggtaaaagaaacccacaaggtgtactagtcgatgttgttattgaacgccttctgcatcatacaaactccaggtatatgtacaaacgtttaaatatgaaggacgatgacaaattagagttcaagtttgattttgcctttgatagttgcgacgaagtggaggaaatggatctctcctgcctaatctgcaaagttaataaaagaaatattgtaacttggccctgtagatgccttgcattatgcgatgattgtaggatatctctgggttataaaggatttgctacatgcgtcagctgtgatagtgaggtgaagggttacagtaagttgaatatagtctag

SEQ ID NO: 9638 - DNA, 2031 bp, Artificial Sequence
  Description of Artificial Sequence: Synthetic polynucleotide
atgtctacaaatatattgcaacatgttaagcaattgctccataacagagatgtatttagcttttttcacaacaagactggaaatcttaattacttggataacacaactcagaaaccggaagtttttgtaagtccaaattctacaatagtttctgccccaactttggactcttttcaagcattgatggagaaaggtaacttcaccactttgcaattggctaaggtaggaattagaatgtttttctcctattctgtaagtaagtatgctgttttatgttttagtaccgccattattttgaataggttgactgtaatgtcttctttgagatctaattctacaaacattcgtttacctctttggtccaaaactttgctccatttagtagccactctttctttggttaaagcacttttacaaattttaagtcaatttggactcatgcatgaattgcacgtgagtgatacagatttttatgctttaagtgtctatttatttgtagctttatctgactgcattgaaatttttatttcttctacgacgaacgttccttctttaatatgctctgatttttccatatggggtttatctttgaatctttatatcatatccaaaatgcccgcggggcagcagcatattggcgataatgttgaattattaggagcggtttttcacagattagtaattcatttggtagaattgtttcatataagagcctatagattatgtggagaagttatattaaacgcgggtttttttaccgcattcgtcactaggacctatttgaacggattagattttattaacatctgtctcattcacaattatttccctggctttttctatatttccaccatattattggcgtctataggcattttcttgaaggctttgttcaccagtaatccgttcagatctttatattctagatataaaaacttggaaaaatggtggagatctaataattacaatggagaagaggagtttaacgaaatagctctttctttgtgtttgcttttaacgtccaatgactataaaatatttaagaaaagtgacaacgtaaaatccgttgatgaagtcgctgctttcagtaatagttatgtggttagtggacatttaaaccaactccagagtacaccagaggatttattatctcgtaaggaaatgactaccgattcccagttaccaggttttgcgaggacatatttaggcctttttgaattagtaagaaccattattttgacgtattctagactcttgaaaaatcttttatggagtaaaaattttgagagcagtatagataagaaaccgagagtgggaaagcgtaaaaagagggatttaaacaaatatgttacagaaaaaaactataaaaagtttttatataaaccggacgtcaaagagcttaatattgagagtgatctcagaagcttagagttattgcttcctgaagacgattcttctaaagactactttccccccagaaaaatcgatgaaagtgtttctgatgaagagtttgatagtgatatggaaagtcagttgattattgatgaagaaaaagaattaacacatttatccagtaatgctgtcgattctgatgatttagaggaaatagcctggaacatctccatgtggtctattttaaattatgaaatggatgtccataataaggttaatggaccgttgactagatctcaatatggtaaaagaaacccacaaggtgtattagtcgatgttgttattgaacgccttttacatcatacaaactccaggtatatgtacaaacgtttaaatatgaaggacgatgacaaattagagttcaagtttgattttgcctttgatagttgcgacgaagtggaggaaatggatctctcctgcttgatctgcaaagttaataaaagaaatattgtaacttggccctgtagatgccttgcattatgcgatgattgtaggatatctttgggttataaaggatttgctacatgcgtcagctgtgatagtgaggtgaagggttacagtaagttgaatatagtctga

SEQ ID NO: 9639 - DNA, 1059 bp, Saccharomyces cerevisiae
atggtcaaggagacaaaactttatgatttacttggagtatctccaagtgctaatgagcaagaactgaaaaagggttatagaaaagcagctctaaaatatcatccagataagccaacaggtgacacagaaaagtttaaggagatatcagaggcctttgaaattttaaatgatcctcaaaaaagggaaatatatgatcaatacggtctcgaggctgctagatctggtggtccaagctttggtcctggtggtcctggcggtgctggaggtgctggaggcttccctggcggtgcgggcggattctccggaggacatgcgttcagtaatgaggatgctttcaatattttttcacaattctttggcggcagttccccattcggtggtgctgatgacagtggcttcagtttctctagttatccatctggcggcggtgctggtatgggaggtatgcctggaggaatgggaggaatgcatggcggcatgggaggtatgcctggcggctttagatcagcatcaagctctcccacgtatccagaggaagaaacagttcaagttaatttaccagttagtctagaagatttgtttgttggtaaaaagaagtcatttaaaattggaagaaagggcccacatggggcctctgaaaagacacaaattgacattcaattaaaaccgggttggaaagctggtaccaaaataacatacaagaaccagggtgattacaatcctcaaacgggccgtagaaagactttgcagtttgtcatccaggaaaagagccatccaaactttaaaagagacggtgatgacctaatttacactctgccactatctttcaaggaatcattgttaggtttttcaaaaactatccaaacaattgatggcagaaccttacctttgtcgagagtacagcctgtccaaccctcacaaacttctacttatcctggtcaaggtatgccaactccaaagaacccatctcagagaggtaatttgattgtaaaatataaagtggactatccaatatcactaaacgacgctcaaaaacgtgctatagatgaaaatttttaa

SEQ ID NO: 9640 - DNA, 1059 bp, Artificial Sequence
  Description of Artificial Sequence: Synthetic polynucleotide
atggtcaaggagacaaaactttatgatttacttggagtatctccaagtgctaatgagcaagaattgaaaaagggttatagaaaagcagctttgaaatatcatccagataagccaacaggtgacacagaaaagtttaaggagatatctgaggcctttgaaattttaaatgatcctcaaaaaagggaaatatatgatcaatacggtctcgaggctgctagatctggtggtccaagctttggtcctggtggtcctggcggtgctggaggtgctggaggcttccctggcggtgcgggcggattctccggaggacatgcgttcagtaatgaggatgctttcaatattttttctcaattctttggcggcagttccccattcggtggtgctgatgacagtggcttcagtttctctagttatccatctggcggcggtgctggtatgggaggtatgcctggaggaatgggaggaatgcatggcggcatgggaggtatgcctggcggctttagaagtgcaagtagctctcccacgtatccagaggaagaaacagttcaagttaatttaccagttagtttagaagatttgtttgttggtaaaaagaagagctttaaaattggaagaaagggcccacatggggcctctgaaaagacacaaattgacattcaattaaaaccgggttggaaagctggtaccaaaataacatacaagaaccagggtgattacaatcctcaaacgggccgtagaaagactttgcagtttgtcatccaggaaaagagccatccaaactttaaaagagacggtgatgacttgatttacactttaccattatctttcaaggaatctttgttaggtttttccaaaactatccaaacaattgatggcagaaccttacctttgtccagagtacagcctgtccaaccctctcaaacttctacttatcctggtcaaggtatgccaactccaaagaacccatctcagagaggtaatttgattgtaaaatataaagtggactatccaatatctttgaacgacgctcaaaaacgtgctatagatgaaaatttttga

SEQ ID NO: 9641 - DNA, 912 bp, Saccharomyces cerevisiae
atgtctgttatcttagtatctgctggctatgaccacacaataagattttgggaggctcttactggggtttgttcaagaacaattcagcattccgactcacaggttaatcgcttagaaatcaccaacgataaaaagttgttggcaacagcaggccatcaaaacgtacggctttatgacattcggacgacaaatcccaatccagtagcatcctttgagggtcatcggggaaacgttacctccgtttcttttcaacaggacaacagatggatggtgacctctagcgaagatgggaccattaaagtttgggatgtgcgttctccgtccattcctagaaattacaaacataacgcaccagtaaatgaagtcgtaattcatcctaaccaaggcgagttgatatcttgtgatagagatggtaatataagaatttgggacttaggagaaaatcagtgtacccatcaattgacacctgaggacgatacctctctccagtctttatctatggcaagtgatggttcgatgttagcggcagcaaatactaaaggtaattgttacgtatgggaaatgccaaatcatactgacgcatcccatctaaaaccggtaacaaaattcagagcgcactccacatatataactagaattctactatcatctgatgtaaaacatttggcaacatgttcagcggatcacactgctcgtgtgtggtcgattgatgatgattttaagctagaaacgacattggatggccaccaaaggtgggtttgggattgcgcatttagtgctgacagtgcgtatctagtaacggcatcgtccgatcattacgtgagattatgggatttatcaactagagaaattgtcagacagtacggtggacaccacaagggagctgtatgtgtcgcattaaacgatgtatag

SEQ ID NO: 9642 - DNA, 912 bp, Artificial Sequence
  Description of Artificial Sequence: Synthetic polynucleotide
atgtctgttatcttagtatctgctggctatgaccacacaataagattttgggaggctcttactggggtttgttccagaacaattcagcattccgactctcaggttaatcgcttagaaatcaccaacgataaaaagttgttggcaacagcaggccatcaaaacgtacgtctttatgacattagaacgacaaatcccaatccagtagcatcctttgagggtcatagaggaaacgttacctccgtttcttttcaacaggacaacagatggatggtgacctctagcgaagatgggaccattaaagtttgggatgtgcgttctccgtccattcctagaaattacaaacataacgcaccagtaaatgaagtcgtaattcatcctaaccaaggcgagttgatatcttgtgatagagatggtaatataagaatttgggacttaggagaaaatcagtgtacccatcaattgacacctgaggacgatacctctctccagtctttatctatggcaagtgatggttctatgttagcggcagcaaatactaaaggtaattgttacgtatgggaaatgccaaatcatactgacgcatcccatttgaaaccggtaacaaaattcagagcgcactccacatatataactagaattttattatcttctgatgtaaaacatttggcaacatgttctgcggatcacactgctcgtgtgtggtctattgatgatgattttaagttggaaacgacattggatggccaccaaaggtgggtttgggattgcgcatttagtgctgacagtgcgtatttggtaacggcatcttccgatcattacgtgagattatgggatttatctactagagaaattgtcagacagtacggtggacaccacaagggagctgtatgtgtcgcattaaacgatgtatga

SEQ ID NO: 9643 - DNA, 1116 bp, Saccharomyces cerevisiae
atgtggaatcctattttactagatacttctagtttttcattccaaaaacatgtgtctggtgtgttccttcaagtgcgtaatgccaccaaaagggctgcgggctcgagaacaagtatgaaggattctgcaggaagaaggttaggaccaaaaaaatatgaaggccaggatgtttccacaggtgaaattattatgaggcaaagaggaacaaagttttatcctggagaaaacgttggtatagggaaagatcattccatattcgccttagaacctggtgttgttcgttactatcttgatccttttcatcctaaaagaaaattcattggtgttgccttgaggcgtgatttgaaactgccatctcctcattttgagcctaccgtaaggaggtttggccgttttgagttaacaaataaaagggcagcatataaggaagaaaattctatttctagaaaagactatctcgcaaaacctaatattttgaagcagttagaggtcagggaatctaaaagaaaggagttacaagacaagttgagtaaggttcttcgggatgaacttaagttagatataaaagacatcgaattggcaacgtcatacttaattcgtgtaagggcttccctgaagaatggataccccatagaagatgcaaggttcaatagtagatattatttaaaagaagaagagcgtttgaaggcaaggagagaaagctggacgaatgagaaattgtcggagagtctatccaagattgatgagtgtagtgatcttttgaactcatctacatctttcaataacaagctagagctacaccagtatatttcggaacaagaaaaacaagctttgaaggcaaaactattagaggacctagaaaaatcccaacacttagaaaccaaaaaagacaagaattatattaaggcgcttttcaaggacgcttgtaattttttgactttatctgaagaagtacatttgcgtaggaaatacttaaagtcggtcttccccgaaacagatagtacggttgaaaccaaaagcgggaagaagtcaattgtgtctagacgttttgattacaccaaaaataaagttgaagtcattgctagaagtaggcgggcttttttgagcaagctttga

SEQ ID NO: 9644 - DNA, 1116 bp, Artificial Sequence
  Description of Artificial Sequence: Synthetic polynucleotide
atgtggaatcctattttattagatacttctagtttttctttccaaaaacatgtgtctggtgtgttccttcaagtgcgtaatgccaccaaaagggctgcgggctccagaacaagtatgaaggattctgcaggaagaaggttaggaccaaaaaaatatgaaggccaggatgtttccacaggtgaaattattatgaggcaaagaggaacaaagttttatcctggagaaaacgttggtatagggaaagatcattccatattcgccttagaacctggtgttgttcgttactatcttgatccttttcatcctaaaagaaaattcattggtgttgccttgaggcgtgatttgaaattaccatctcctcattttgagcctaccgtaaggaggtttggccgttttgagttaacaaataaaagggcagcatataaggaagaaaattctatttctagaaaagactatctcgcaaaacctaatattttgaagcagttagaggtcagggaatctaaaagaaaggagttacaagacaagttgagtaaggttcttagagatgaacttaagttagatataaaagacatcgaattggcaacgtcttacttaattcgtgtaagggcttccttgaagaatggataccccatagaagatgcaaggttcaatagtagatattatttaaaagaagaagagcgtttgaaggcaaggagagaaagctggacgaatgagaaattgagtgagagtttatccaagattgatgagtgtagtgatcttttgaactcttctacatctttcaataacaagttggagttgcaccagtatatttctgaacaagaaaaacaagctttgaaggcaaaattattagaggacttggaaaaatcccaacacttagaaaccaaaaaagacaagaattatattaaggcgcttttcaaggacgcttgtaattttttgactttatctgaagaagtacatttgcgtaggaaatacttaaagtctgtcttccccgaaacagatagtacggttgaaaccaaaagcgggaagaagtctattgtgtctagacgttttgattacaccaaaaataaagttgaagtcattgctagaagtaggagagcttttttgagcaagctttga

SEQ ID NO: 9645 - DNA, 1365 bp, Saccharomyces cerevisiae
atgtctgatcaagaacgaggttcagaaaacaataatcgaagtagatcgaggtcgagatcacctgttcgtcgtcggatgagtgatgatcatggttatgaaagagacaaccatttgtcccggaggtcaggtaattataacggtaggcgtaagttcgcagatacgtacagaggaagcagagatagaggagaatatagaggaggtagagaaaggtctgattacagagaaagagaaaggttcaataacagagataatcctagatctagagaccgttacgatgataggcgcagaggaagagatgtgactggtcgttatgggaacagacgtgatgactatcctagaagctttaggagtagacacaatacacgtgatgacagtaggagaggcggttttggtagtagtggagcaagaggtgattacggtcctttgttggcacgtgaattggatagtacatacgaagaaaaggtcaatagaaactattccaatagtatattcgtgggtaatttaacatatgacagcacccccgaagatctcactgagtttttttcacagataggaaaagtagtccgcgcggatataattacatcaagagggcaccacagaggtatgggtacagtagagttcactaattcggatgatgttgacagggccatccgccagtacgatggggccttcttcatggatcgtaaaatcttcgtcaggcaagataatccaccaccgtcaaacaatatcaaggaaaggaaagcactcgatagaggagagcttagacataaccgaaaaacacatgaagttattgtaaaaaatttacctgcttccgttaattggcaggctttgaaagacatattcaaggaatgtgggaatgtcgcacacgctgatgtggaattggatggcgatggagtatccactggatctggtacggtgtccttttatgatattaaagatctgcatagagcgattgagaaatacaacggttatagtatagagggtaacgtcttggatgtcaagtctaaggaaagcgtacataaccacagtgatggagacgatgttgatatcccaatggatgattctcccgttaacgaagaagctcgaaaatttaccgaaaacgttgtcggtggaggtgaaagaaatagactcatatattgcagtaatttgccattttcaactgcaaaaagtgatctttacgaccttttcgagacaatcggaaaggttaacaatgctgaattaaggtatgattccaaaggggcaccaactggaatagctgtcgttgaatacgataacgtcgatgatgcagatgtttgtattgaaagattgaataattataactatgggggttgtgatttggatatatcgtacgctaaacgcctctag

SEQ ID NO: 9646 - DNA, 1365 bp, Artificial Sequence
  Description of Artificial Sequence: Synthetic polynucleotide
atgtctgatcaagaaagaggttctgaaaacaataatagaagtagaagtaggagcagatctcctgttcgtcgtcgtatgagtgatgatcatggttatgaaagagacaaccatttgtccagaaggtctggtaattataacggtaggcgtaagttcgcagatacgtacagaggaagcagagatagaggagaatatagaggaggtagagaaaggtctgattacagagaaagagaaaggttcaataacagagataatcctagatctagagaccgttacgatgataggcgcagaggaagagatgtgactggtcgttatgggaacagacgtgatgactatcctagaagctttaggagtagacacaatacacgtgatgacagtaggagaggcggttttggtagtagtggagcaagaggtgattacggtcctttgttggcacgtgaattggatagtacatacgaagaaaaggtcaatagaaactattccaatagtatattcgtgggtaatttaacatatgacagcacccccgaagatctcactgagtttttttcccagataggaaaagtagtccgcgcggatataattacatctagagggcaccacagaggtatgggtacagtagagttcactaattctgatgatgttgacagggccatccgccagtacgatggggccttcttcatggatcgtaaaatcttcgtcaggcaagataatccaccaccgtctaacaatatcaaggaaaggaaagcactcgatagaggagagcttagacataacagaaaaacacatgaagttattgtaaaaaatttacctgcttccgttaattggcaggctttgaaagacatattcaaggaatgtgggaatgtcgcacacgctgatgtggaattggatggcgatggagtatccactggatctggtacggtgtccttttatgatattaaagatttgcatagagcgattgagaaatacaacggttatagtatagagggtaacgtcttggatgtcaagtctaaggaaagcgtacataaccacagtgatggagacgatgttgatatcccaatggatgattctcccgttaacgaagaagctagaaaatttaccgaaaacgttgtcggtggaggtgaaagaaatagactcatatattgcagtaatttgccattttccactgcaaaaagtgatctttacgaccttttcgagacaatcggaaaggttaacaatgctgaattaaggtatgattccaaaggggcaccaactggaatagctgtcgttgaatacgataacgtcgatgatgcagatgtttgtattgaaagattgaataattataactatgggggttgtgatttggatatatcttacgctaaacgcctctga

SEQ ID NO: 9647 - DNA, 855 bp, Saccharomyces cerevisiae
atgaatactttttttctttccttgctaagtggcgccgctgctggtacctctacggatttggtttttttccctatagacacaattaaaaccaggcttcaagctaagggtggattctttgctaatggaggatacaaaggcatatatcgtggtttgggaagcgctgttgtagcatcggcgccaggtgcttcacttttctttattagttatgattatatgaaagtaaaatcaaggccatatatcagcaaactttactcacagggatctgagcaattgattgatacgacaacgcacatgctttcctcttccattggtgaaatttgtgcttgtcttgttcgagttcccgcagaagtcgttaagcaaaggacgcaagttcactctaccaattcttcctggcagactttacagtcaattctacgaaatgacaataaggaaggtttaaggaaaaatctttatagagggtggtctaccaccattatgagagaaataccgtttacttgtatacagtttcctttatacgagtatctaaaaaagacttgggcaaaagccaatggccaaagtcaagtggagccatggaaaggggctatctgcggttctattgcgggtgggatcgcagcagctacaacgacaccattagatttcttgaaaaccagattaatgctcaacaaaacaaccgcctcacttggaagcgttattattaggatttacagagaggaaggtcctgctgtatttttcagtggagtggggccccggacaatgtggatcagtgcaggtggtgctatcttcctaggcatgtatgaaactgttcattcgttattatcgaaaagtttcccaacggctggagaaatgagagcgtaa

SEQ ID NO: 9648 - DNA, 855 bp, Artificial Sequence
  Description of Artificial Sequence: Synthetic polynucleotide
atgaatactttttttctttccttgttaagtggcgccgctgctggtacctctacggatttggtttttttccctatagacacaattaaaaccaggcttcaagctaagggtggattctttgctaatggaggatacaaaggcatatatcgtggtttgggaagcgctgttgtagcaagtgcgccaggtgcttctcttttctttattagttatgattatatgaaagtaaaatctaggccatatatcagcaaactttactctcagggatctgagcaattgattgatacgacaacgcacatgctttcctcttccattggtgaaatttgtgcttgtcttgttcgtgttcccgcagaagtcgttaagcaaaggacgcaagttcactctaccaattcttcctggcagactttacagagtattttaagaaatgacaataaggaaggtttaaggaaaaatctttatagagggtggtctaccaccattatgagagaaataccgtttacttgtatacagtttcctttatacgagtatttgaaaaagacttgggcaaaagccaatggccaaagtcaagtggagccatggaaaggggctatctgcggttctattgcgggtgggatcgcagcagctacaacgacaccattagatttcttgaaaaccagattaatgctcaacaaaacaaccgcctctcttggaagcgttattattaggatttacagagaggaaggtcctgctgtatttttcagtggagtggggcccagaacaatgtggatcagtgcaggtggtgctatcttcttgggcatgtatgaaactgttcattctttattatccaaaagtttcccaacggctggagaaatgagagcgtga

SEQ ID NO: 9649 - DNA, 969 bp, Saccharomyces cerevisiae
atgtcttcaactcaagacagtaaagcgcaaactcttaattctaatccagaaattcttttgaggaaaagaagaaatgctgatagaactagaatcgaaagacaagaattagctaagaaaaagagggaagaacaaatcaaaaaaaagagaagtaataagaacaaatttgtcagagctgaaagtatagttgcaaagactttggctacctctagggaaaaggaaagaattaaaagagtgtctatattagaagataagaaggcaaagaatgaaacgcagcatattgcatctgggaaagattttattctgaaaataacagaaaaagctaatggcgccgaagagaactctgtcgacttggaggagactgaagaagaagaagacgatggtttaatcagagaaaagactacttacgatggcaaacctgctttacttttcattgtcagagtaagaggtccgcttgctgtaaatattccaaacaaagcatttaagattttgtctttgctaagattagttgaaactaatactggtgttttcgtcaaattgaccaaaaacgtatatccgttgctcaaggttattgcgccatacgtagtgattggcaagccttctttatcttctatccgttccttgattcaaaagagaggtagaataatctataagggtgagaatgaggctgaacctcacgaaatagttcttaatgacaacaatattgtcgaggagcaattaggagatcatggaataatttgtgttgaagatattattcatgagattgccactatgggtgagtctttttctgtttgtaacttcttcttacaaccattcaagttgaatagagaagtatctggatttggttctttgaataggctaaggaaaataaaacagcgggaggctgaatcaagaactcgtcaattttcaaatgcagctacagcaccagttatcgaagttgacattgactctttattagccaagttgaattaa

SEQ ID NO: 9650 - DNA, 969 bp, Artificial Sequence
  Description of Artificial Sequence: Synthetic polynucleotide
atgtcttctactcaagacagtaaagcgcaaactcttaattctaatccagaaattcttttgaggaaaagaagaaatgctgatagaactagaatcgaaagacaagaattagctaagaaaaagagggaagaacaaatcaaaaaaaagagaagtaataagaacaaatttgtcagagctgaaagtatagttgcaaagactttggctacctctagggaaaaggaaagaattaaaagagtgtctatattagaagataagaaggcaaagaatgaaacgcagcatattgcatctgggaaagattttattttgaaaataacagaaaaagctaatggcgccgaagagaactctgtcgacttggaggagactgaagaagaagaagacgatggtttaatcagagaaaagactacttacgatggcaaacctgctttacttttcattgtcagagtaagaggtccgcttgctgtaaatattccaaacaaagcatttaagattttgtctttgttaagattagttgaaactaatactggtgttttcgtcaaattgaccaaaaacgtatatccgttgctcaaggttattgcgccatacgtagtgattggcaagccttctttatcttctatccgttccttgattcaaaagagaggtagaataatctataagggtgagaatgaggctgaacctcacgaaatagttcttaatgacaacaatattgtcgaggagcaattaggagatcatggaataatttgtgttgaagatattattcatgagattgccactatgggtgagtctttttctgtttgtaacttcttcttacaaccattcaagttgaatagagaagtatctggatttggttctttgaataggttgaggaaaataaaacagagagaggctgaatctagaactcgtcaattttctaatgcagctacagcaccagttatcgaagttgacattgactctttattagccaagttgaattga

SEQ ID NO: 9651 - DNA, 1161 bp, Saccharomyces cerevisiae
atgaaggttattagtctgaaaaaggattcttttaacaaaggaggagcagtgattactcttttaccggaggacaaggaagatctgtttactgtttatcaaatagtagacaaagatgacgagttgatattcaagaaaaaattcacctctaaacttgatgaagctggtaagaaaaaaagtacagatttggtcaagttgaagattaaagtaatatccgaggattttgatatgaaggatgaatatttgaaatataaaggtgttactgttacagatgaaagtggagctagtaatgttgacatacctgtcggcaaatatttgagctttacccttgactacgtgtatccctttactatcataaaacaaaactttaataaattcatgcaaaagctcttaaatgaagcctgtaatatcgagtataaatcagacaccgcggcggtcgttttacaggaagggatcgcccatgtttgtttagtgacatcctcctctactattttaaaacaaaaaattgaatatagtatgccaaaaaagaaaaggactactgatgtactgaagtttgatgaaaaaactgagaaattttataaagcaatttacagtgcaatgaagaaagatttgaattttgataaattaaagactattattctttgctctccaggtttctacgctaagatattaatggacaaaattttccagtatgccgaagaggaacacaataagaaaatactcgataacaaaggaatgttctttatagcccactgctccacgggctacttacagggcattaatgaagttttgaaaaatccactatatgcttcaaagctgcaagatactaaatactccaaagaaatcatggtgatggatgaatttttgttgcatttaaacaaggatgatgataaagcttggtatggtgaaaaagaggtagttaaagcggctgagtatggcgcaattagttatttactgttaacagataaagttttgcattcagacaatattgcacaaagagaggaatatttgaaactgatggactccgtagagagcaatggaggaaaagcattggtattaagtactttgcattctcttggagaagaacttgatcaattgacgggtatagcctgtattctaaaatacccgctccccgatcttgatgaagacgatggtgaggagtag

SEQ ID NO: 9652 - DNA, 1161 bp, Artificial Sequence
  Description of Artificial Sequence: Synthetic polynucleotide
atgaaggttattagtttgaaaaaggattcttttaacaaaggaggagcagtgattactcttttaccggaggacaaggaagatttatttactgtttatcaaatagtagacaaagatgacgagttgatattcaagaaaaaattcacctctaaacttgatgaagctggtaagaaaaaaagtacagatttggtcaagttgaagattaaagtaatatccgaggattttgatatgaaggatgaatatttgaaatataaaggtgttactgttacagatgaaagtggagctagtaatgttgacatacctgtcggcaaatatttgagctttacccttgactacgtgtatccctttactatcataaaacaaaactttaataaattcatgcaaaagctcttaaatgaagcctgtaatatcgagtataaaagtgacaccgcggcggtcgttttacaggaagggatcgcccatgtttgtttagtgacatcctcctctactattttaaaacaaaaaattgaatatagtatgccaaaaaagaaaaggactactgatgtattgaagtttgatgaaaaaactgagaaattttataaagcaatttacagtgcaatgaagaaagatttgaattttgataaattaaagactattattctttgctctccaggtttctacgctaagatattaatggacaaaattttccagtatgccgaagaggaacacaataagaaaatactcgataacaaaggaatgttctttatagcccactgctccacgggctacttacagggcattaatgaagttttgaaaaatccattgtatgcttccaagttacaagatactaaatactccaaagaaatcatggtgatggatgaatttttgttgcatttaaacaaggatgatgataaagcttggtatggtgaaaaagaggtagttaaagcggctgagtatggcgcaattagttatttattattaacagataaagttttgcattctgacaatattgcacaaagagaggaatatttgaaattaatggactccgtagagagcaatggaggaaaagcattggtattaagtactttgcattctcttggagaagaacttgatcaattgacgggtatagcctgtattttgaaatacccgctccccgatcttgatgaagacgatggtgaggagtga

SEQ ID NO: 9653 - DNA, 1440 bp, Saccharomyces cerevisiae
atgtcagcgatattatcaacaactagcaaaagtttcttatcaaggggctccacaagacaatgtcaaaatatgcaaaaggctctttttgcactattgaatgctcgccactatagtagcgcctccgaacaaacgttgaaggagagatttgctgaaattatcccagcaaaggcagaagaaattaaaaaattcaagaaagaacacggtaaaaccgttattggtgaagttcttttggagcaagcttatggtggtatgagaggtattaaaggccttgtttgggaaggttccgtgttagaccccgaagaaggtattagatttaggggtcgtactattccagaaattcaaagggaactaccaaaggctgagggtagtacagaacctttgccagaagctttattttggttgcttttgactggtgaaatacctactgacgctcaagttaaagccctttctgctgatttagctgccagatcagaaattccagagcacgttatccaacttttagatagcctcccaaaagatctacatccaatggcgcaattttctattgccgtgactgctttagaaagcgagtctaagtttgccaaagcatatgctcaaggtgtatccaagaaagaatattggagctatacatttgaagattcgttagatctgctgggtaaattacctgttattgcttccaaaatttatcgtaatgtgttcaaggatggtaaaattacttcaaccgatcctaatgctgactatggtaaaaatttggcccaacttttgggctacgaaaacaaggattttattgacttaatgagactatatttaactattcattctgatcatgaaggtggtaacgtttctgcccatactacacatttagtgggttctgccttatcttcgccatacttatctttggccgctggtttgaatggtttagctggcccattacatggtcgtgccaatcaagaagttttagaatggctatttaaattgagagaagaagtgaaaggtgactattcaaaagaaacaattgaaaagtacttgtgggatactttgaacgcagggagagttgttcctggttatggccatgcggttttgagaaaaactgatcctcgttatacggctcaacgtgaattcgcattgaaacatttcccagattacgagttatttaagttggtctccaccatttatgaagttgccccaggggttttaactaagcatggtaaaactaagaacccatggccaaatgttgattcacattccggtgttttattgcaatactatggtctaactgaggcttcgttctacactgtattgtttggtgttgccagagctattggtgtgttaccccaattaatcatcgatagggctgttggtgctccaatcgaaaggccaaaatcattctccaccgaaaaatacaaggagttggtaaagaaaatcgaaagtaagaactaa

SEQ ID NO: 9654 - DNA, 1440 bp, Artificial Sequence
  Description of Artificial Sequence: Synthetic polynucleotide
atgagtgcgatattatctacaactagcaaaagtttcttatctaggggctccacaagacaatgtcaaaatatgcaaaaggctctttttgcattattgaatgctcgccactatagtagcgcctccgaacaaacgttgaaggagagatttgctgaaattatcccagcaaaggcagaagaaattaaaaaattcaagaaagaacacggtaaaaccgttattggtgaagttcttttggagcaagcttatggtggtatgagaggtattaaaggccttgtttgggaaggttccgtgttagaccccgaagaaggtattagatttaggggtcgtactattccagaaattcaaagggaattaccaaaggctgagggtagtacagaacctttgccagaagctttattttggttgcttttgactggtgaaatacctactgacgctcaagttaaagccctttctgctgatttagctgccagaagtgaaattccagagcacgttatccaacttttagatagcctcccaaaagatttgcatccaatggcgcaattttctattgccgtgactgctttagaaagcgagtctaagtttgccaaagcatatgctcaaggtgtatccaagaaagaatattggagctatacatttgaagattctttagatttattgggtaaattacctgttattgcttccaaaatttatcgtaatgtgttcaaggatggtaaaattacttctaccgatcctaatgctgactatggtaaaaatttggcccaacttttgggctacgaaaacaaggattttattgacttaatgagattatatttaactattcattctgatcatgaaggtggtaacgtttctgcccatactacacatttagtgggttctgccttatcttctccatacttatctttggccgctggtttgaatggtttagctggcccattacatggtcgtgccaatcaagaagttttagaatggttatttaaattgagagaagaagtgaaaggtgactattctaaagaaacaattgaaaagtacttgtgggatactttgaacgcagggagagttgttcctggttatggccatgcggttttgagaaaaactgatcctcgttatacggctcaacgtgaattcgcattgaaacatttcccagattacgagttatttaagttggtctccaccatttatgaagttgccccaggggttttaactaagcatggtaaaactaagaacccatggccaaatgttgattctcattccggtgttttattgcaatactatggtttgactgaggcttctttctacactgtattgtttggtgttgccagagctattggtgtgttaccccaattaatcatcgatagggctgttggtgctccaatcgaaaggccaaaatctttctccaccgaaaaatacaaggagttggtaaagaaaatcgaaagtaagaactga

SEQ ID NO: 9655 - DNA, 849 bp, Saccharomyces cerevisiae
atgtctgacagagaacaaagcagcggcaacaccgcttttgagaaccctaaggcactcgattcttccgagggtgagttcatctctgaaaacaacgatcagagccgccactcgcaagagtccatatgcaaaatatatactgcgggcaaaaacaacgagtatatttacatcggccgtcaaaaatttttaagggatgatttgttcgaggcattcggtggtactctgaatcccggtttagcccccgcgccagtccataaattcgcaaatcctgctccactaggactttccggttttgccctcactacgtttgtcctatccatgttcaatgcaagagcccaaggcatcactatccctaatgttgttgttgggtgtgccatgttttacggtggcctcgttcaactcattgctggtatttgggaaatcgctttagagaacactttcggtggtacagccctgtgttccttcggcggtttttggttaagcttcggtgctatatacatcccttggtttggaattctagatgcctataaggacaaggaatccgaccttggaaatgcgctagggttttacctcctaggatgggcactcttcaccttcggtctttccgtctgcaccatgaaatcaactataatgttttttgccttattcttcctcttagcagtgaccttcttacttctatccattgcaaacttcacaggcgaagttggcgtcactagagctggtggggtccttggtgtgatagtagccttcattgcctggtacaacgcttacgcaggtattgccacaagacaaaactcgtacattatggtccatccattcgcattacctagcaatgataaggtgttcttctaa

SEQ ID NO: 9656 - DNA, 849 bp, Artificial Sequence
  Description of Artificial Sequence: Synthetic polynucleotide
atgtctgacagagaacaaagcagcggcaacaccgcttttgagaaccctaaggcactcgattcttccgagggtgagttcatctctgaaaacaacgatcagagccgccactctcaagagtccatatgcaaaatatatactgcgggcaaaaacaacgagtatatttacatcggccgtcaaaaatttttaagggatgatttgttcgaggcattcggtggtactttgaatcccggtttagcccccgcgccagtccataaattcgcaaatcctgctccattaggactttccggttttgccctcactacgtttgtcttgtccatgttcaatgcaagagcccaaggcatcactatccctaatgttgttgttgggtgtgccatgttttacggtggcctcgttcaactcattgctggtatttgggaaatcgctttagagaacactttcggtggtacagccctttgttccttcggcggtttttggttaagcttcggtgctatatacatcccttggtttggaattttagatgcctataaggacaaggaatccgaccttggaaatgcgttggggttttacctcttgggatgggcactcttcaccttcggtctttccgtctgcaccatgaaatctactataatgttttttgccttattcttcctcttagcagtgaccttcttacttctttccattgcaaacttcacaggcgaagttggcgtcactagagctggtggggtccttggtgtgatagtagccttcattgcctggtacaacgcttacgcaggtattgccacaagacaaaactcttacattatggtccatccattcgcattacctagcaatgataaggtgttcttctga

SEQ ID NO: 9657 - DNA, 954 bp, Saccharomyces cerevisiae
atgagtggaatgatagaaaatgggttacagctatcggacaatgctaaaaccttacatagccagatgatgtcgaaaggaataggcgcattatttacacagcaagaactccaaaaacaaatgggaatcgggtcgttaacagacttgatgtccattgtacaggaattgctagacaagaacttgatcaaattagtaaaacaaaacgacgaattaaaatttcaaggtgtcttagaatctgaggcgcaaaagaaagccaccatgtcggctgaagaggcactggtatattcttatatcgaggctagcggtagagaagggatatggtccaagactatcaaggcaagaaccaatctccatcagcatgtagttcttaaatgcttgaagagtttagaatcccaaagatacgtgaagagtgttaagagtgtaaagtttcccacaaggaaaatctacatgttgtacagcttacaaccctctgtggacatcacaggaggtccatggttcacagatggagagctggatatagaatttatcaatagtttattgactattgtttggaggttcatatcagagaacaccttccctaatggcttcaagaatttcgaaaatggacccaaaaaaaacgtcttttatgctccaaacgtaaaaaattactctaccacacaagaaattttggaatttattacagcggcacaagtggccaatgtcgagttaaccccttcaaatatcagatctttgtgtgaagtcttagtgtacgacgacaagctggaaaaagtcacgcatgactgctatagagtgaccttagagagcattctacaaatgaaccaaggtgagggcgagccggaggcaggtaataaggctttggaggatgaagaagaattttccatctttaactacttcaagatgtttccggcttcaaaacacgacaaggaagtggtctatttcgatgaatggacaatttga

SEQ ID NO: 9658 - DNA, 954 bp, Artificial Sequence
  Description of Artificial Sequence: Synthetic polynucleotide
atgagtggaatgatagaaaatgggttacagttaagtgacaatgctaaaaccttacatagccagatgatgtccaaaggaataggcgcattatttacacagcaagaactccaaaaacaaatgggaatcgggtctttaacagacttgatgtccattgtacaggaattgttggacaagaacttgatcaaattagtaaaacaaaacgacgaattaaaatttcaaggtgtcttagaatctgaggcgcaaaagaaagccaccatgtctgctgaagaggcattggtatattcttatatcgaggctagcggtagagaagggatatggtccaagactatcaaggcaagaaccaatctccatcagcatgtagttcttaaatgcttgaagagtttagaatcccaaagatacgtgaagagtgttaagagtgtaaagtttcccacaaggaaaatctacatgttgtacagcttacaaccctctgtggacatcacaggaggtccatggttcacagatggagagttagatatagaatttatcaatagtttattgactattgtttggaggttcatatctgagaacaccttccctaatggcttcaagaatttcgaaaatggacccaaaaaaaacgtcttttatgctccaaacgtaaaaaattactctaccacacaagaaattttggaatttattacagcggcacaagtggccaatgtcgagttaaccccttccaatatcagatctttgtgtgaagtcttagtgtacgacgacaagttggaaaaagtcacgcatgactgctatagagtgaccttagagagcattttacaaatgaaccaaggtgagggcgagccggaggcaggtaataaggctttggaggatgaagaagaattttccatctttaactacttcaagatgtttccggcttccaaacacgacaaggaagtggtctatttcgatgaatggacaatttga

SEQ ID NO: 9659 - DNA, 441 bp, Saccharomyces cerevisiae
atgatagatttatacaattactctaacttagaaggtttactagacggattaacggacttgaatcgaattccgaaggaatactccgcagtattggagccatattttcagaatatagcaagaaatgcacatttaaagtctagagctctaaaaatttgtcgttctaatttccataaatggaacgaagaaggtgcgaagacagtcaatccggaaattataagaagatgccttaacctgtggtatgttttgaagggcaaggaatataaaaagttgaaggatcctccgcctgctgataatatcattaaggatgagattgatgtctcatatgttaagaatttgaatgtagtcaggttggaatttgacgaatttggtaaactcataagtaatccattagagaatttgatcttggaagaggtcgaagtgaatgatttcatacaagaataa

SEQ ID NO: 9660 - DNA, 441 bp, Artificial Sequence
  Description of Artificial Sequence: Synthetic polynucleotide
atgatagatttatacaattactctaacttagaaggtttattagacggattaacggacttgaatagaattccgaaggaatactccgcagtattggagccatattttcagaatatagcaagaaatgcacatttaaagtctagagctttgaaaatttgtcgttctaatttccataaatggaacgaagaaggtgcgaagacagtcaatccggaaattataagaagatgccttaacctttggtatgttttgaagggcaaggaatataaaaagttgaaggatcctccgcctgctgataatatcattaaggatgagattgatgtctcttatgttaagaatttgaatgtagtcaggttggaatttgacgaatttggtaaactcataagtaatccattagagaatttgatcttggaagaggtcgaagtgaatgatttcatacaagaatga

SEQ ID NO: 9661 - DNA, 1869 bp, Saccharomyces cerevisiae
atgtccgttagcacgccaagtgagttagacgcattaatagaacaagccactagtgagagcattcccaacggtgaccttgatctccccatagcgttggaaatttcagatgtgttaagatctagaagggtaaatcccaaagattctatgcgttgtataaagaaaaggattctcaatacggccgataatccaaatacccaattgtcttcctggaagcttaccaatatatgtgtaaaaaatggtggaacgccttttattaaggaaatttgttccagagagttcatggataccatggaacatgtcattttaagagaagatagcaacgaagaactttctgagctggtaaagaccatattatatgaactatacgtagccttcaaaaatgattcgcaacttaactatgtggcaaaagtttatgataaattaatctctcgtggcattaaattccctgaaaagctaacactttccaattctccgactgcaatgtttgactcgaagacgcccgcagattggattgattctgatgcttgtatgatttgctccaaaaagttttctctactaaataggaaacatcactgtcgttcctgtggtggagttttctgccaagaacactcatcaaatagtatacccttacctgatttgggtatatatgagccagtcagagtatgtgatagctgctttgaagattacgatttgaagagacatgacgacagtaaaaaatctaaaaaacatcgccataaaagaaagaaggacagggactactcaactcctgaggatgaagaagagctgataaggaaagcaatagaactctccttgaaagaatctagaaatagcgctagtagcgagcctattgtccccgttgtagaatcaaagaatgaggtgaagagacaagaaatagaagaagaagaagatcctgatttaaaagctgctattcaggaaagcttgagagaagctgaagaagcgaagctacgcagtgagcgtcaaaaagcctctagacagatgcaaccccaacagccatcacctcaacctcaacctatccattccgttgatttatctgatgaggagaaagacagcatatacatgtttgcttcacttgtcgaaaaaatgaaatcgaggcccttgaacgaaattttggaagactctaaattacaaaacttggctcaaagagtatttgcttccaaagcaaggttgaattatgctttaaatgataaagctcagaaatacaatactttgatagaaatgaacggcaagatttcggaaattatgaacatatacgatagattattggagcaacagctacaaagcatcaatttgtctcagcaatacacacttccacaagtcccttctgatccgtacaattacctaacagaaaatgtgcaaaatccagcagaaagctatcaaacacctcccctccagcaactatcatctcatcaatacaaaccacaacaggatgtctcacgccaacaatcggtaaaagcaaattcatcacctaccactaatattgatcacttgaaaaccatcgatgtgacaccacacgcacagcaaaagcctcaatcgcacgttgaacttgcaccttcggacccaccttatccaaaagaagaggccgaagatgaaggaacacaggcagtgcaagatgaggaatcctccacacaagaatcccgcgaaaggccgtatccagtagaaacagagaatggtgaaacttcaataaataaacggcctcaaggcattacacgttacgattttccaactgttcctgcacgcaaattcgtccaaccggagtcaactgtaccacttcctgcaagttcctctgaaattccgatcaaagaggaaaggccgcctagtcctcaagaggaactgctaatagagctttaa

SEQ ID NO: 9662 - DNA, 1869 bp, Artificial Sequence
  Description of Artificial Sequence: Synthetic polynucleotide
atgtccgttagcacgccaagtgagttagacgcattaatagaacaagccactagtgagagcattcccaacggtgaccttgatctccccatagcgttggaaatttctgatgtgttaagatctagaagggtaaatcccaaagattctatgcgttgtataaagaaaaggattctcaatacggccgataatccaaatacccaattgtcttcctggaagcttaccaatatatgtgtaaaaaatggtggaacgccttttattaaggaaatttgttccagagagttcatggataccatggaacatgtcattttaagagaagatagcaacgaagaactttctgagttggtaaagaccatattatatgaattatacgtagccttcaaaaatgattctcaacttaactatgtggcaaaagtttatgataaattaatctctcgtggcattaaattccctgaaaagttaacactttccaattctccgactgcaatgtttgactccaagacgcccgcagattggattgattctgatgcttgtatgatttgctccaaaaagttttctttattgaataggaaacatcactgtcgttcctgtggtggagttttctgccaagaacactcttccaatagtatacccttacctgatttgggtatatatgagccagtcagagtatgtgatagctgctttgaagattacgatttgaagagacatgacgacagtaaaaaatctaaaaaacatcgccataaaagaaagaaggacagggactactccactcctgaggatgaagaagagttgataaggaaagcaatagaactctccttgaaagaatctagaaatagcgctagtagcgagcctattgtccccgttgtagaatccaagaatgaggtgaagagacaagaaatagaagaagaagaagatcctgatttaaaagctgctattcaggaaagcttgagagaagctgaagaagcgaagttgcgcagtgagcgtcaaaaagcctctagacagatgcaaccccaacagccatctcctcaacctcaacctatccattccgttgatttatctgatgaggagaaagacagcatatacatgtttgcttctcttgtcgaaaaaatgaaatctaggcccttgaacgaaattttggaagactctaaattacaaaacttggctcaaagagtatttgcttccaaagcaaggttgaattatgctttaaatgataaagctcagaaatacaatactttgatagaaatgaacggcaagatttctgaaattatgaacatatacgatagattattggagcaacagttacaaagcatcaatttgtctcagcaatacacacttccacaagtcccttctgatccgtacaattacttgacagaaaatgtgcaaaatccagcagaaagctatcaaacacctcccctccagcaattatcttctcatcaatacaaaccacaacaggatgtctctcgccaacaaagtgtaaaagcaaattcttctcctaccactaatattgatcacttgaaaaccatcgatgtgacaccacacgcacagcaaaagcctcaatctcacgttgaacttgcaccttctgacccaccttatccaaaagaagaggccgaagatgaaggaacacaggcagtgcaagatgaggaatcctccacacaagaatcccgcgaaaggccgtatccagtagaaacagagaatggtgaaacttccataaataaaagacctcaaggcattacacgttacgattttccaactgttcctgcacgcaaattcgtccaaccggagtctactgtaccacttcctgcaagttcctctgaaattccgatcaaagaggaaaggccgcctagtcctcaagaggaattattgatagagctttga

SEQ ID NO: 9663 - DNA, 933 bp, Saccharomyces cerevisiae
atgattagatctacactaagtagttggagagaatatcttacccccataacgcacaaatctacctttttaaccacaggtcaaataactcctgaggagtttgtacaagcaggtgattatttatgtcatatgtttcccacctggaagtggaacgaagagtcgtcagatattagttacagagattttttaccgaagaataagcagtttctgataattagaaaagttccctgtgataaacgtgccgagcaatgtgtcgaagttgaagggccagatgtaatcatgaaaggttttgcagaagatggagatgaagatgatgttctggaatacataggatctgaaactgaacatgtgcaaagtacgcctgcgggggggaccaaggactcatctatcgatgatattgatgagctaatacaagacatggaaataaaagaggaggatgaaaatgacgatacagaagaatttaatgctaaaggtggcctagccaaagatatggcgcaagaaaggtattacgacctttatattgcgtactcgacatcttatagggtccctaaaatgtatatagtggggtttaattctaatggttcaccactaagccctgagcagatgttcgaagatatatcagcagattatagaacaaagacagccaccattgaaaagctacctttttacaagaattcagtgttatctgtttccattcatccatgtaagcatgctaatgtaatgaaaatattgctagataaggttcgtgtggttagacaacgaagaaggaaagagctgcaggaagaacaagagctggacggtgtcggagactgggaggatttacaagacgatattgatgattcgttacgggtagaccaatacttgattgttttcttaaagtttattactagtgttacaccgagtatacaacatgactataccatggaaggttggtaa

SEQ ID NO: 9664 - DNA, 933 bp, Artificial Sequence
  Description of Artificial Sequence: Synthetic polynucleotide
atgattagatctacattgagtagttggagagaatatcttacccccataacgcacaaatctacctttttaaccacaggtcaaataactcctgaggagtttgtacaagcaggtgattatttatgtcatatgtttcccacctggaagtggaacgaagagtcttctgatattagttacagagattttttaccgaagaataagcagtttttaataattagaaaagttccctgtgataaacgtgccgagcaatgtgtcgaagttgaagggccagatgtaatcatgaaaggttttgcagaagatggagatgaagatgatgttttggaatacataggatctgaaactgaacatgtgcaaagtacgcctgcgggggggaccaaggactcttctatcgatgatattgatgagttgatacaagacatggaaataaaagaggaggatgaaaatgacgatacagaagaatttaatgctaaaggtggcttggccaaagatatggcgcaagaaaggtattacgacctttatattgcgtactccacatcttatagggtccctaaaatgtatatagtggggtttaattctaatggttctccattaagccctgagcagatgttcgaagatatatctgcagattatagaacaaagacagccaccattgaaaagttacctttttacaagaattctgtgttatctgtttccattcatccatgtaagcatgctaatgtaatgaaaatattgttggataaggttcgtgtggttagacaaagaagaaggaaagagttacaggaagaacaagagttggacggtgtcggagactgggaggatttacaagacgatattgatgattctttaagagtagaccaatacttgattgttttcttaaagtttattactagtgttacaccgagtatacaacatgactataccatggaaggttggtga

SEQ ID NO: 9665 - DNA, 1986 bp, Saccharomyces cerevisiae
atgggcacactgtttcgaagaaatgtccagaaccaaaagagtgattctgatgaaaacaataaagggggttctgttcataacaagcgagagagcagaaaccacattcatcatcaacagggattaggccataagagaagaaggggtattagtggcagtgcaaaaagaaatgagcgtggcaaagatttcgacaggaaaagagacgggaacggtagaaaacgttggagagattccagaagactgattttcattcttggtgcattcttaggtgtacttttgccgtttagctttggcgcttatcatgttcataatagcgatagcgacttgtttgacaactttgtaaattttgattcacttaaagtgtatttggatgattggaaagatgttctcccacaaggtataagttcgtttattgatgatattcaggctggtaactactccacatcttctttagatgatctcagtgaaaattttgccgttggtaaacaactcttacgtgattataatatcgaggccaaacatcctgttgtaatggttcctggtgtcatttctacgggaattgaaagctggggagttattggagacgatgagtgcgatagttctgcgcattttcgtaaacggctgtggggaagtttttacatgctgagaacaatggttatggataaagtttgttggttgaaacatgtaatgttagatcctgaaacaggtctggacccaccgaactttacgctacgtgcagcacagggcttcgaatcaactgattatttcatcgcagggtattggatttggaacaaagttttccaaaatctgggagtaattggctatgaacccaataaaatgacgagtgctgcgtatgattggaggcttgcatatttagatctagaaagacgcgataggtactttacgaagctaaaggaacaaatcgaactgtttcatcaattgagtggtgaaaaagtttgtttaattggacattctatgggttctcagattatcttttactttatgaaatgggtcgaggctgaaggccctctttacggtaatggtggtcgtggctgggttaacgaacacatagattcattcattaatgcagcagggacgcttctgggcgctccaaaggcagttccagctctaattagtggtgaaatgaaagataccattcaattaaatacgttagccatgtatggtttggaaaagttcttctcaagaattgagagagtaaaaatgttacaaacgtggggtggtataccatcaatgctaccaaagggagaagaggtcatttggggggatatgaagtcatcttcagaggatgcattgaataacaacactgacacatacggcaatttcattcgatttgaaaggaatacgagcgatgctttcaacaaaaatttgacaatgaaagacgccattaacatgacattatcgatatcacctgaatggctccaaagaagagtacatgagcagtactcgttcggctattccaagaatgaagaagagttaagaaaaaatgagctacaccacaagcactggtcgaatccaatggaagtaccacttccagaagctccccacatgaaaatctattgtatatacggggtgaacaacccaactgaaagggcatatgtatataaggaagaggatgactcctctgctctgaatttgaccatcgactacgaaagcaagcaacctgtattcctcaccgagggggacggaaccgttccgctcgtggcgcattcaatgtgtcacaaatgggcccagggtgcttcaccgtacaaccctgccggaattaacgttactattgtggaaatgaaacaccagccagatcgatttgatatacgtggtggagcaaaaagcgccgaacacgtagacatcctcggcagcgcggagttgaacgattacatcttgaaaattgcaagcggtaatggcgatctcgtcgagccacgccaattgtctaatttgagccagtgggtttctcagatgcccttcccaatgtaa

SEQ ID NO: 9666 - DNA, 1986 bp, Artificial Sequence
  Description of Artificial Sequence: Synthetic polynucleotide
atgggcacattatttagaagaaatgtccagaaccaaaagagtgattctgatgaaaacaataaagggggttctgttcataacaagagagagagcagaaaccacattcatcatcaacagggattaggccataagagaagaaggggtattagtggcagtgcaaaaagaaatgagcgtggcaaagatttcgacaggaaaagagacgggaacggtagaaaacgttggagagattccagaagattgattttcattcttggtgcattcttaggtgtacttttgccgtttagctttggcgcttatcatgttcataatagcgatagcgacttgtttgacaactttgtaaattttgattctcttaaagtgtatttggatgattggaaagatgttctcccacaaggtataagttcttttattgatgatattcaggctggtaactactccacatcttctttagatgatctcagtgaaaattttgccgttggtaaacaactcttacgtgattataatatcgaggccaaacatcctgttgtaatggttcctggtgtcatttctacgggaattgaaagctggggagttattggagacgatgagtgcgatagttctgcgcattttcgtaaaagattatggggaagtttttacatgttgagaacaatggttatggataaagtttgttggttgaaacatgtaatgttagatcctgaaacaggtttggacccaccgaactttacgttgcgtgcagcacagggcttcgaatctactgattatttcatcgcagggtattggatttggaacaaagttttccaaaatttaggagtaattggctatgaacccaataaaatgacgagtgctgcgtatgattggaggcttgcatatttagatttggaaagacgcgataggtactttacgaagttgaaggaacaaatcgaattatttcatcaattgagtggtgaaaaagtttgtttaattggacattctatgggttctcagattatcttttactttatgaaatgggtcgaggctgaaggccctctttacggtaatggtggtcgtggctgggttaacgaacacatagattctttcattaatgcagcagggacgcttttgggcgctccaaaggcagttccagctttgattagtggtgaaatgaaagataccattcaattaaatacgttagccatgtatggtttggaaaagttcttcagtagaattgagagagtaaaaatgttacaaacgtggggtggtataccaagcatgcttccaaagggagaagaggtcatttggggggatatgaagtcttcttctgaggatgcattgaataacaacactgacacatacggcaatttcattagatttgaaaggaatacgagcgatgctttcaacaaaaatttgacaatgaaagacgccattaacatgacattatctatatctcctgaatggctccaaagaagagtacatgagcagtactctttcggctattccaagaatgaagaagagttaagaaaaaatgagttgcaccacaagcactggtctaatccaatggaagtaccacttccagaagctccccacatgaaaatctattgtatatacggggtgaacaacccaactgaaagggcatatgtatataaggaagaggatgactcctctgctttgaatttgaccatcgactacgaaagcaagcaacctgtattcctcaccgagggggacggaaccgttccgctcgtggcgcattctatgtgtcacaaatgggcccagggtgcttctccgtacaaccctgccggaattaacgttactattgtggaaatgaaacaccagccagatagatttgatatacgtggtggagcaaaaagcgccgaacacgtagacatcctcggcagcgcggagttgaacgattacatcttgaaaattgcaagcggtaatggcgatctcgtcgagccacgccaattgtctaatttgagccagtgggtttctcagatgcccttcccaatgtga

SEQ ID NO: 9667 - DNA, 750 bp, Saccharomyces cerevisiae
atgtccattatgaagcagaggctaccactgggggagttttccagctcgaagatcaacaaactggcaattgccaatattgcagacgctagcgagcctagaaaccatggagaaaacaacgtcgggactgtgtgtcttccctctatcaagagtttgatggttagtcctgaagtatacgaaaacacgaagagtcttcctgttcccctaatgaggagcagtggcggaggtatggcttgtgccagtaagtcctcatgccaggatggtattagtacgaaaacaacgtctagagattactctgagctttccaagaagttgcaaattcgtttacagttcgcctattataaatacaagactaagcaaacagacaaaaatttcacagacttgaaatcaaagcatagcattacgaggccttccaaagtcgcgactcacagtaaatcagaacctttaactaggagaagaaaattagtactatctcagggtcattataaaacccctgctaggtctaagatcaaaactccatcttcgatttgctctcacgataatacatcttcctttacatctttccgcggtgtcagcgaaagctcgagcactaccgcagatatgaacgtcgcagataccaccacaccaatacgcaacaacataaacacaaagcattcaaacagtcataatcgcacattgtatcagagacaagaaacacctacaagcatcaaagccgctaagtctttaattcatctctttacaagtaaccaataa

SEQ ID NO: 9668 - DNA, 750 bp, Artificial Sequence
  Description of Artificial Sequence: Synthetic polynucleotide
atgtccattatgaagcagaggttaccattaggggagttttccagctctaagatcaacaaattggcaattgccaatattgcagacgctagcgagcctagaaaccatggagaaaacaacgtcgggactgtgtgtcttccctctatcaagagtttgatggttagtcctgaagtatacgaaaacacgaagagtcttcctgttcccttgatgaggagcagtggcggaggtatggcttgtgccagtaagtccagttgccaggatggtattagtacgaaaacaacgtctagagattactctgagctttccaagaagttgcaaattcgtttacagttcgcctattataaatacaagactaagcaaacagacaaaaatttcacagacttgaaatccaagcatagcattacgaggccttccaaagtcgcgactcacagtaaaagtgaacctttaactaggagaagaaaattagtattatctcagggtcattataaaacccctgctaggtctaagatcaaaactccatcttccatttgctctcacgataatacatcttcctttacatctttccgcggtgtcagcgaaagcagcagcactaccgcagatatgaacgtcgcagataccaccacaccaatacgcaacaacataaacacaaagcattccaacagtcataatcgcacattgtatcagagacaagaaacacctacaagcatcaaagccgctaagtctttaattcatctctttacaagtaaccaatga

SEQ ID NO: 9669 - DNA, 450 bp, Saccharomyces cerevisiae
atgaatctacagaacaacgttttaaatcagatacaccagattctgctgcctacgaatcctactctcgataaacctaatgctgaggctacaaaggaagaattttcgtctgcagaaaatagagatgaaaaagactatcttaccaaccagcagccgaaaaatctgagtactccctccaccagttccaacggtgaatttataccgcatattttttattcgctgcaccaaataaggaaggatccaaacaatctctcaaatcaattggaaaccttaacaggttcgattagacatcgtttgaaactttgtaaatctttgatatcggaaaacgaagataccaaggatttattaagtaaaagtccatcagaatggcaggatatcatccatcaacgtgaacaagaactgcaaattaagagagacgtcttggatgatctttatcgcaagttacaacgataa

SEQ ID NO: 9670 - DNA, 450 bp, Artificial Sequence
  Description of Artificial Sequence: Synthetic polynucleotide
atgaatttacagaacaacgttttaaatcagatacaccagattttattgcctacgaatcctactctcgataaacctaatgctgaggctacaaaggaagaattttcttctgcagaaaatagagatgaaaaagactatcttaccaaccagcagccgaaaaatttgagtactccctccaccagttccaacggtgaatttataccgcatattttttattctttacaccaaataaggaaggatccaaacaatctctctaatcaattggaaaccttaacaggttccattagacatcgtttgaaactttgtaaatctttgatatctgaaaacgaagataccaaggatttattaagtaaaagtccatctgaatggcaggatatcatccatcaacgtgaacaagaattacaaattaagagagacgtcttggatgatctttatcgcaagttacaaaggtga

SEQ ID NO: 9671 - DNA, 2631 bp, Saccharomyces cerevisiae
atgtcaagtattacatctgaaaccggtaagcgaagagtgaaacgaacgtatgaagttacaagacagaatgacaatgcagtaagaatagagccttcttccttgggtgaggaagaagacaaagaggccaaggataagaactctgccttgcagctaaaacgatcacgctatgaccccaataaagttttttctaatacgaaccaaggtccagaaaagaacaatttaaaaggagaacaacttggatcacaaaaaaagtcatcaaagtatgatgaaaaaataacgtcaaataatgaacttactacaaagaagggtctactaggtgactccgagaatgaaactaagtacgcctcttctaattctaaatttaacgtagaagttactcataaaataaagaatgcaaaagaaattgacaaaataaacagacaacgcatgtgggaagaacaacaattgcgaaatgctatggcggggcaaagcgatcaccctgatgatataacattggaaggctctgacaagtacgattatgtgttcgacacagatgcaatgattgattatactaatgaggaggacgatttactacctgaagagaaacttcaatatgaggcacgtctagcacaagctttagaaactgaggaaaagcgtatactgactatacaagaggcaagaaaacttttgcctgtacatcaatacaaggatgagctactacaagagatcaaaaaaaatcaagttttgattataatgggtgaaaccggttctggtaaaaccacacagttaccccaatatttggtagaagatggattcactgatcagggaaagttacagattgccataacacaaccacgtcgtgtggcggccacttctgttgctgcaagagtagcagatgaaatgaatgttgtgcttgggaaggaagtgggttatcagatccgttttgaagacaaaacaaccccaaataaaacggttctaaagtatatgacggatggtatgttactaagagaatttcttacagattccaaattaagcaaatattcttgtattatgattgatgaagctcatgaacgtactctagccacagatatcctgataggtttgctgaaagatattttgccgcagaggcccactttaaaattgcttatatcatcagcaacaatgaacgcaaaaaaattttcagagttttttgataattgtcccattttcaacgttcctgggagaagatatcctgtagatatccactacacattacagccggaggcaaactatatacatgccgctataacaactatttttcaaattcatactacgcaaagtttaccgggggatatattggtgtttttaacggggcaagaagaaattgaaagaacaaaaaccaaactggaggagatcatgtctaaattaggttctagaacaaaacaaatgattataactcctatatacgcaaatttaccccaagagcagcaattgaaaattttccagccgactccggaaaattgtaggaaagttgttttggcaactaatattgcggaaacttcattgaccattgatggtattagatatgtcattgatcctggatttgttaaggaaaattcgtacgtaccctccactggaatgacccaacttttaacagttccatgctcaagagcttcagttgatcagcgtgccggtagggctggtcgtgttgggccgggaaaatgttttagaatttttaccaaatggtcatatttgcacgagttggaacttatgcctaagcctgagatcacaagaacaaatctttctaatacggtgttattattattatcgcttggcgttactgacctaataaagtttcccctgatggataagcccagtatccccacattacggaagtctttggaaaatttatacattttaggtgccttaaatagcaaagggacaatcactcggttaggtaaaatgatgtgcgagtttccttgtgaacctgaatttgcaaaagtgctttatacagctgctacgcacgaacaatgtcaaggtgtactagaagagtgtttgaccatagtttcgatgctacatgaaacaccttcattatttattggtcaaaaaagagatgctgcggcaagtgtgttaagcgaagtggaaagtgatcacatattgtatttggaaatcttcaaccaatggagaaactctaaattttccagaagttggtgtcaagaccacaaaattcaattcaaaacgatgttgagggtaagaaatattagaaaccaattattcaggtgcagtgaaaaggttggattagttgaaaagaacgaccaagccaggatgaagataggcaatatagcgggctacataaatgctagaataactcgatgcttcatcagcgggtttccgatgaatattgtacaattaggccccaccggctatcaaaccatgggtaggtcatcaggtgggctgaacgttagtgttcatcctaccagtatacttttcgttaatcataaggaaaaggcgcagagaccaagcaaatatgtgctttatcaacaattgatgctaacgtcgaaggaatttatcagggactgtctagttatccctaaggaagaatggttgatagacatggttccacaaatctttaaagatttaattgacgataaaacaaatagggggaggcggtga

SEQ ID NO: 9672 - DNA, 2631 bp, Artificial Sequence
  Description of Artificial Sequence: Synthetic polynucleotide
atgagcagtattacatctgaaaccggtaagagaagagtgaaaagaacgtatgaagttacaagacagaatgacaatgcagtaagaatagagccttcttccttgggtgaggaagaagacaaagaggccaaggataagaactctgccttgcagttgaaaagatctcgctatgaccccaataaagttttttctaatacgaaccaaggtccagaaaagaacaatttaaaaggagaacaacttggatctcaaaaaaagagttccaagtatgatgaaaaaataacgtccaataatgaacttactacaaagaagggtttattgggtgactccgagaatgaaactaagtacgcctcttctaattctaaatttaacgtagaagttactcataaaataaagaatgcaaaagaaattgacaaaataaacagacaacgcatgtgggaagaacaacaattgagaaatgctatggcggggcaaagcgatcaccctgatgatataacattggaaggctctgacaagtacgattatgtgttcgacacagatgcaatgattgattatactaatgaggaggacgatttattgcctgaagagaaacttcaatatgaggcacgtttagcacaagctttagaaactgaggaaaagcgtatattgactatacaagaggcaagaaaacttttgcctgtacatcaatacaaggatgagttattacaagagatcaaaaaaaatcaagttttgattataatgggtgaaaccggttctggtaaaaccacacagttaccccaatatttggtagaagatggattcactgatcagggaaagttacagattgccataacacaaccacgtcgtgtggcggccacttctgttgctgcaagagtagcagatgaaatgaatgttgtgcttgggaaggaagtgggttatcagatccgttttgaagacaaaacaaccccaaataaaacggttttgaagtatatgacggatggtatgttattaagagaatttcttacagattccaaattaagcaaatattcttgtattatgattgatgaagctcatgaacgtactttggccacagatatcttaataggtttgttgaaagatattttgccgcagaggcccactttaaaattgcttatatcttctgcaacaatgaacgcaaaaaaattttctgagttttttgataattgtcccattttcaacgttcctgggagaagatatcctgtagatatccactacacattacagccggaggcaaactatatacatgccgctataacaactatttttcaaattcatactacgcaaagtttaccgggggatatattggtgtttttaacggggcaagaagaaattgaaagaacaaaaaccaaattagaggagatcatgtctaaattaggttctagaacaaaacaaatgattataactcctatatacgcaaatttaccccaagagcagcaattgaaaattttccagccgactccggaaaattgtaggaaagttgttttggcaactaatattgcggaaacttctttgaccattgatggtattagatatgtcattgatcctggatttgttaaggaaaattcttacgtaccctccactggaatgacccaacttttaacagttccatgctctagagcttctgttgatcagcgtgccggtagggctggtcgtgttgggccgggaaaatgttttagaatttttaccaaatggagttatttgcacgagttggaacttatgcctaagcctgagatcacaagaacaaatctttctaatacggtgttattattattatctcttggcgttactgacttgataaagtttcccttgatggataagcccagtatccccacattaagaaagtctttggaaaatttatacattttaggtgccttaaatagcaaagggacaatcactagattaggtaaaatgatgtgcgagtttccttgtgaacctgaatttgcaaaagtgctttatacagctgctacgcacgaacaatgtcaaggtgtattggaagagtgtttgaccatagtttctatgttgcatgaaacaccttctttatttattggtcaaaaaagagatgctgcggcaagtgtgttaagcgaagtggaaagtgatcacatattgtatttggaaatcttcaaccaatggagaaactctaaattttccagaagttggtgtcaagaccacaaaattcaattcaaaacgatgttgagggtaagaaatattagaaaccaattattcaggtgcagtgaaaaggttggattagttgaaaagaacgaccaagccaggatgaagataggcaatatagcgggctacataaatgctagaataactagatgcttcatcagcgggtttccgatgaatattgtacaattaggccccaccggctatcaaaccatgggtaggagttctggtgggttgaacgttagtgttcatcctaccagtatacttttcgttaatcataaggaaaaggcgcagagaccaagcaaatatgtgctttatcaacaattgatgcttacgtccaaggaatttatcagggactgtttggttatccctaaggaagaatggttgatagacatggttccacaaatctttaaagatttaattgacgataaaacaaatagggggaggagatga

SEQ ID NO: 9673 - DNA, 1506 bp, Saccharomyces cerevisiae
atgtcccatcgtatagcaccttccaaagaacgatcttcatcatttatttcaattttagacgatgaaacaagagacacattgaaagctaatgcagtcatggatggtgaagtagatgtcaaaaaaacaaaaggaaaaagctctcggtatatcccaccatggacaactccatatataataggtataggtggtgcttcaggttcaggcaagacaagcgttgctgctaagattgtgtcgtcaattaatgttccctggacagtattaatatctttggataacttttacaatccattaggcccagaggacagagccagagcctttaaaaatgaatacgatttcgacgagccaaatgccatcaacttagatttggcatataagtgcattttgaacttaaaggagggcaaaaggacaaatatcccagtttatagcttcgtccaccacaatagagttcctgataaaaatatagtcatatacggggccagtgtggtagttatcgaagggatctacgccctttacgatcgccgattgctggatttgatggacttgaaaatttatgttgacgctgatttggatgtctgcttagcaagaagattgtcgagagatatagtttccagagggagagatttggatggttgtattcaacaatgggagaaatttgtgaaaccaaatgcggtaaagtttgtgaaaccaacaatgaagaatgcagatgctatcattccatcgatgagtgataatgctacagcggtaaatttaatcattaaccacatcaagtcaaaactggaactaaaatcaaatgaacacttaagagagctaatcaaattgggctcttctccttcacaagatgtgcttaatcgtaacataattcatgaattgccgcccaccaaccaagttctttcgctgcatactatgcttctaaataaaaatctaaattgcgcggactttgttttctactttgacaggttagcaacaattttgttatcatgggcacttgatgacattcctgtagcacatacgaacataattacacctggtgagcataccatggaaaacgttattgcctgtcaattcgatcaagttacagctgttaatattattcgatctggcgattgttttatgaagtctttgagaaagacgatccccaatatcacaattggtaaattgttgattcagtccgattcacaaactggggaacctcaactgcattgcgaatttttacccccaaatatagaaaagtttggcaaggttttcttaatggaaggtcaaatcataagtggtgcggccatgatcatggccatccaggtgcttttagatcatggtattgatttggaaaagattagcgtggtggtttatttggccactgaagttggtatccgacgtatattaaatgcatttgataacaaagtcaacatttttgctggtatgatcatctccagagaaaagttacaaaatcatcaatacaaatgggcattgaccagattttttgattcaaagtattttggttgtgattga

SEQ ID NO: 9674 - DNA, 1506 bp, Artificial Sequence
  Description of Artificial Sequence: Synthetic polynucleotide
atgtcccatcgtatagcaccttccaaagaaagatcttcttcttttatttccattttagacgatgaaacaagagacacattgaaagctaatgcagtcatggatggtgaagtagatgtcaaaaaaacaaaaggaaaaagctctagatatatcccaccatggacaactccatatataataggtataggtggtgcttctggttctggcaagacaagcgttgctgctaagattgtgtcttccattaatgttccctggacagtattaatatctttggataacttttacaatccattaggcccagaggacagagccagagcctttaaaaatgaatacgatttcgacgagccaaatgccatcaacttagatttggcatataagtgcattttgaacttaaaggagggcaaaaggacaaatatcccagtttatagcttcgtccaccacaatagagttcctgataaaaatatagtcatatacggggccagtgtggtagttatcgaagggatctacgccctttacgatcgcagattgttggatttgatggacttgaaaatttatgttgacgctgatttggatgtctgcttagcaagaagattgtccagagatatagtttccagagggagagatttggatggttgtattcaacaatgggagaaatttgtgaaaccaaatgcggtaaagtttgtgaaaccaacaatgaagaatgcagatgctatcattccaagcatgagtgataatgctacagcggtaaatttaatcattaaccacatcaagagtaaattagaattgaaatctaatgaacacttaagagagttgatcaaattgggctcttctccttctcaagatgtgcttaatcgtaacataattcatgaattgccgcccaccaaccaagttctttctttgcatactatgcttttgaataaaaatttgaattgcgcggactttgttttctactttgacaggttagcaacaattttgttatcttgggcacttgatgacattcctgtagcacatacgaacataattacacctggtgagcataccatggaaaacgttattgcctgtcaattcgatcaagttacagctgttaatattattagatctggcgattgttttatgaagtctttgagaaagacgatccccaatatcacaattggtaaattgttgattcagtccgattctcaaactggggaacctcaattgcattgcgaatttttacccccaaatatagaaaagtttggcaaggttttcttaatggaaggtcaaatcataagtggtgcggccatgatcatggccatccaggtgcttttagatcatggtattgatttggaaaagattagcgtggtggtttatttggccactgaagttggtatcagacgtatattaaatgcatttgataacaaagtcaacatttttgctggtatgatcatctccagagaaaagttacaaaatcatcaatacaaatgggcattgaccagattttttgattctaagtattttggttgtgattga

SEQ ID NO: 9675 - DNA, 2685 bp, Saccharomyces cerevisiae
atgaagttctcgcattccttacaattcaattctgtaccagaatggtctaccaagtatctggcctattcgcagctgaaaaaattgatctattctttgcaaaaagataagctgtacagtaacaataagcaccatgttgtggagccacatgacgccaacgatgaaaatctgccgctattggcagatgcttctccagatgatcaattctacatctctaaatttgttgctgccttaaaccaagaattgaaaaaaattgataaattctacatatctcaagaaacaggtcttatcgccaactacaacgaattgaaggacgatgtcatggaactggaaaacacgaacaaggccacccaattgtttaatcagcagcaacagcatcaactgcaaagtgttgcaagaaacaggaagtctaagtcacaacaacgccaaagaaggtttagtagtgtctcctccacggactccaacccctctctgacagacatgtcgattgactctgcacccgtcatccacacgcaggtctcgaacacgactaataatggtaactcaatgcaaaacctggcctccgcttcagtgtcgctttctaactctaaccctgtgtatctttctccttttacccaacataggctctctttaaagaaaagattgatatcgatctacacccagttgtccgagttgaaggactttattgagttgaaccagaccgggttctccaagatctgcaagaaatttgacaagtccttaaatacgaacttgaagcagaactacttgaactatatcaaattccattcgcatgttttcaatcctgctacaataaataggattcagcatcacattaccgagaccatcctcacttacgctagcttgaacaagggcacgcgtcgaccatctaatacgtttaacttggacgctgaccgaatcaacaatgacgaaaacagcagcggtaatgaagaagacgaagatggcaacagacaagaagtcctcgatttccaggatgctgagcgtgaattatcctctcatttgagagatcacgtagtttgggaaagaaacaccgtttggaaagatatgatgaatttggagagaaagtaccaatctgccaagactgacaacaagaagttttcaaagttgagttccagtcaattgcgccccaatgccaacattactgaatccatggcaatgtcgagtggtggcgccggtatcatcgctccatcaacggattccctaactttccgtgaactcatgcatttaccacccaagcaatggttgcaatttatcatgggccaaacttccctgctgaagtttctgttaatcacctcatgtttcattgcattattaacttttaatttgactccttttacgcaggattccttacagaaaaactgtttcgccatcttaatatatgcatctttattatgggccactgagaccatcccccttttcgtgacttctctaatgattcctctgcttattgtagtgttccctgttatcaaggaccctatcacctcccaaccaatgtctccccgtgattcctctcagttcatcttatcaacgatgtggtcgagtgtcatcatgcttttgctgggtgggtttactttagcagccgccctttccaagtacaacattgccaaagtcctttctacgcatattttggcatccgccggtacaaacccacattttattcttttaacaaatatgtttgtggcgctctttgtttccatgtgggtttctaatgttgctgcccccgttctttgctattcaattgttcaacctttgctcagaacactgccaagaaattgttcctatgccaaagctctaattcttggtatcgctcttgcctccaatatcggtggtatgtcttctcccatcgcttctcctcaaaacattttttctattggtataatggacccttcaccatcttgggctgaatggtttatgattgcgctacctgtgtgctttatttgtgtcatggcaatttgggtgctattgatcataaccttccctcctgagccaaatgtgaaaattttgcaattgcatccatcccgtgatccattcactctgaagcaatggtttgtcactttagtttgcattataacaattgttctttggtgtctttcaaaccaaatctccggtatctttggtgaaatgggaatcatatctattatacctatagtagtcttcttcggtacaggtcttctaacttcggatgatttcaataatttcatgtggacaatcgttgttttggccatgggaggtaccaccctaggtaaggcggtaagctcatccggtttattgtctacaatggcacagttaattaaggcgcaggttgagcatgaaccaatcttcattattgtgttgatcttcggtctagtgattcttgtaatggccacttttgtctcccataccgtcgcggcaatgatcatcgtaccattaatgagtgagatcggttccaatctaccttcaggtgatcattctagactattgatcgttatagccgccctattatgctctagtgctatgggtcttccaacctctggtttccccaacgtgactgccatttcaatgattgatgaagttggtgatagatatttgaccgtgggtacatttattacgagaggtgtaccagccagtttgttaagttatgccgctattgttacagtaggttatggcatattgaaagtaatgggattttaa

SEQ ID NO: 9676 - DNA, 2685 bp, Artificial Sequence
  Description of Artificial Sequence: Synthetic polynucleotide
atgaagttctctcattccttacaattcaattctgtaccagaatggtctaccaagtatttggcctattctcagttgaaaaaattgatctattctttgcaaaaagataagttgtacagtaacaataagcaccatgttgtggagccacatgacgccaacgatgaaaatttaccgttattggcagatgcttctccagatgatcaattctacatctctaaatttgttgctgccttaaaccaagaattgaaaaaaattgataaattctacatatctcaagaaacaggtcttatcgccaactacaacgaattgaaggacgatgtcatggaattggaaaacacgaacaaggccacccaattgtttaatcagcagcaacagcatcaattacaaagtgttgcaagaaacaggaagtctaagtctcaacaacgccaaagaaggtttagtagtgtctcctccacggactccaacccctctttaacagacatgtctattgactctgcacccgtcatccacacgcaggtctccaacacgactaataatggtaactccatgcaaaacttggcctccgcttctgtgtctctttctaactctaaccctgtgtatctttctccttttacccaacataggctctctttaaagaaaagattgatatccatctacacccagttgtccgagttgaaggactttattgagttgaaccagaccgggttctccaagatctgcaagaaatttgacaagtccttaaatacgaacttgaagcagaactacttgaactatatcaaattccattctcatgttttcaatcctgctacaataaataggattcagcatcacattaccgagaccatcctcacttacgctagcttgaacaagggcacgcgtagaccatctaatacgtttaacttggacgctgacagaatcaacaatgacgaaaacagcagcggtaatgaagaagacgaagatggcaacagacaagaagtcctcgatttccaggatgctgagcgtgaattatcctctcatttgagagatcacgtagtttgggaaagaaacaccgtttggaaagatatgatgaatttggagagaaagtaccaatctgccaagactgacaacaagaagttttccaagttgagttccagtcaattgcgccccaatgccaacattactgaatccatggcaatgagcagtggtggcgccggtatcatcgctccatctacggattccttgactttccgtgaactcatgcatttaccacccaagcaatggttgcaatttatcatgggccaaacttccttattgaagtttttattaatcacctcttgtttcattgcattattaacttttaatttgactccttttacgcaggattccttacagaaaaactgtttcgccatcttaatatatgcatctttattatgggccactgagaccatcccccttttcgtgacttctttgatgattcctttacttattgtagtgttccctgttatcaaggaccctatcacctcccaaccaatgtctccccgtgattcctctcagttcatcttatctacgatgtggtctagtgtcatcatgcttttgttgggtgggtttactttagcagccgccctttccaagtacaacattgccaaagtcctttctacgcatattttggcatccgccggtacaaacccacattttattcttttaacaaatatgtttgtggcgctctttgtttccatgtgggtttctaatgttgctgcccccgttctttgctattctattgttcaacctttgctcagaacattaccaagaaattgttcctatgccaaagctttgattcttggtatcgctcttgcctccaatatcggtggtatgtcttctcccatcgcttctcctcaaaacattttttctattggtataatggacccttctccatcttgggctgaatggtttatgattgcgttacctgtgtgctttatttgtgtcatggcaatttgggtgttattgatcataaccttccctcctgagccaaatgtgaaaattttgcaattgcatccatcccgtgatccattcactttgaagcaatggtttgtcactttagtttgcattataacaattgttctttggtgtctttccaaccaaatctccggtatctttggtgaaatgggaatcatatctattatacctatagtagtcttcttcggtacaggtcttttgacttctgatgatttcaataatttcatgtggacaatcgttgttttggccatgggaggtaccaccttgggtaaggcggtaagctcttccggtttattgtctacaatggcacagttaattaaggcgcaggttgagcatgaaccaatcttcattattgtgttgatcttcggtttagtgattcttgtaatggccacttttgtctcccataccgtcgcggcaatgatcatcgtaccattaatgagtgagatcggttccaatttaccttctggtgatcattctagattattgatcgttatagccgccttattatgctctagtgctatgggtcttccaacctctggtttccccaacgtgactgccatttccatgattgatgaagttggtgatagatatttgaccgtgggtacatttattacgagaggtgtaccagccagtttgttaagttatgccgctattgttacagtaggttatggcatattgaaagtaatgggattttga

SEQ ID NO: 9677 - DNA, 639 bp, Saccharomyces cerevisiae
atgtcgtccacggatatcaagccttgtgccgtgaacatccctgtttccgctcacatcaccttccactacaagtcgatcgcggacagaagcagcagcaggagcagcagcagcagctcctgctcctctgctacatctaaagcctgctcccccagaggcagctccgtcggcttaccgcctgctttatcaactgacaatgaaatcgtcgagactgtacttaatgtttccgctcccgttgtagcagaccctacgcggccctcattgttcaagagtaactacaccgcagcctcgtgcttgacttctgacccaacctcgccgtcactactgccctcttctaggcgcaactctgtattgccggcaagcgacttccaccaatgcgcgcatcacaaaaactttcaaagaagggccagtgagccacaactgccctccttcgataatcgctcgtcgtccgagatgaaaaggtccgtctcgtacgcccagcatagcatgatgttccccatcagtgaccaacaggagccgcaaacatccgcgtctcctaacgaccactcagacccgtcttgtccttgcaacagacatcaccacagaagaaactcggtcgccgtcaagtttgacaaaccattgtatgagagactagagacgtag

SEQ ID NO: 9678 - DNA, 639 bp, Artificial Sequence
  Description of Artificial Sequence: Synthetic polynucleotide
atgtcttccacggatatcaagccttgtgccgtgaacatccctgtttccgctcacatcaccttccactacaagtctatcgcggacagaagcagcagcaggagcagcagcagcagctcctgctcctctgctacatctaaagcctgctcccccagaggcagctccgtcggcttaccgcctgctttatctactgacaatgaaatcgtcgagactgtacttaatgtttccgctcccgttgtagcagaccctacgaggccctctttgttcaagagtaactacaccgcagccagttgcttgacttctgacccaacctctccgtctttattgccctcttctaggcgcaactctgtattgccggcaagcgacttccaccaatgcgcgcatcacaaaaactttcaaagaagggccagtgagccacaattgccctccttcgataatcgcagctcttccgagatgaaaaggtccgtctcttacgcccagcatagcatgatgttccccatcagtgaccaacaggagccgcaaacatccgcgtctcctaacgaccactctgacccgtcttgtccttgcaacagacatcaccacagaagaaactctgtcgccgtcaagtttgacaaaccattgtatgagagattggagacgtga

SEQ ID NO: 9679 - DNA, 1155 bp, Saccharomyces cerevisiae
atggttacatatgctggaaaactggttctagctccaatggtaagagccggcgaactgcccacgagactgatggcgctggcccacggtgcagatctcgtctggtccccagaaatcatcgacaaaaagctaattcagtgcgtcaggaaggaaaacactgcactccaaactgtcgactacgtcgtgccgtccaaggttcaaacgaggccggagacgctcgttttcagaacatatccaaaactagaatcctctaaattgattttccagatcgggtctgcatccccggctctggccacccaggctgctttgaaagtgatcaacgacgtcagcgggatagatatcaatgcaggctgccccaaacacttctctatacactccggcatgggctctgccctcttgcgcaccccagacacactgtgtctcatcttgaaagaactggttaagaacgtgggtaaccctcacagcaaacccatcagtgtgaaaataagactcttggacaccaagcaagacactctacagctcgtcaaacgtctgtgtgccacgggcatcacaaatcttacagttcactgcaggaagactgaaatgagaaacagagagcagcccatcacagattacattgcggagatctacgagatatgccaggcaaataacgtgtcgttgattgtgaacggcgctatccgcgaccgctctcattttcatgatttacaagcgaatcattggaaaaacactaacattggtggtatgattgcagagtgtgctgaacgggaccctacagtttttgatcacacttctaagccttcagaagacggtccatcttgggtcgttgcttgtcgcgagtttattcagtgggcaacgaagtttgacaaccacatcggcaatacaaaatacatgttaagcagaattgtccccggaaaatcagtcttttttcagtactttgcccgttgcaagagcccggaagaagttagtttcgtactaaagcaattgaacgatgatggaagcgctcaaacagatccttcagagtacttggaaaactgcagagctcaagaaaaagctttgaaaaacgccaacgccatcgccaagcaaaagaggaaacagaccgatcacataggcagtgacactaaaaagcaaaaggttgtaccccttcccacagatatataa

SEQ ID NO: 9680 - DNA, 1155 bp, Artificial Sequence
  Description of Artificial Sequence: Synthetic polynucleotide
atggttacatatgctggaaaattggttttggctccaatggtaagagccggcgaattgcccacgagattaatggcgttggcccacggtgcagatctcgtctggtccccagaaatcatcgacaaaaagttgattcagtgcgtcaggaaggaaaacactgcactccaaactgtcgactacgtcgtgccgtccaaggttcaaacgaggccggagacgctcgttttcagaacatatccaaaattagaatcctctaaattgattttccagatcgggtctgcatccccggctttggccacccaggctgctttgaaagtgatcaacgacgtcagcgggatagatatcaatgcaggctgccccaaacacttctctatacactccggcatgggctctgccctcttgcgcaccccagacacattatgtctcatcttgaaagaattggttaagaacgtgggtaaccctcacagcaaacccatcagtgtgaaaataagactcttggacaccaagcaagacactttacagctcgtcaaacgtctttgtgccacgggcatcacaaatcttacagttcactgcaggaagactgaaatgagaaacagagagcagcccatcacagattacattgcggagatctacgagatatgccaggcaaataacgtgtctttgattgtgaacggcgctatccgcgaccgctctcattttcatgatttacaagcgaatcattggaaaaacactaacattggtggtatgattgcagagtgtgctgaaagagaccctacagtttttgatcacacttctaagccttctgaagacggtccatcttgggtcgttgcttgtcgcgagtttattcagtgggcaacgaagtttgacaaccacatcggcaatacaaaatacatgttaagcagaattgtccccggaaaatctgtcttttttcagtactttgcccgttgcaagagcccggaagaagttagtttcgtattgaagcaattgaacgatgatggaagcgctcaaacagatccttctgagtacttggaaaactgcagagctcaagaaaaagctttgaaaaacgccaacgccatcgccaagcaaaagaggaaacagaccgatcacataggcagtgacactaaaaagcaaaaggttgtaccccttcccacagatatatga

SEQ ID NO: 9681 - DNA, 6702 bp, Saccharomyces cerevisiae
atgagcgaagaaagcttattcgagtcttctccacagaagatggagtacgaaattacaaactactcagaaagacatacagaacttccaggtcatttcattggcctcaatacagtagataaactagaggagtccccgttaagggactttgttaagagtcacggtggtcacacggtcatatccaagatcctgatagcaaataatggtattgccgccgtgaaagaaattagatccgtcagaaaatgggcatacgagacgttcggcgatgacagaaccgtccaattcgtcgccatggccaccccagaagatctggaggccaacgcagaatatatccgtatggccgatcaatacattgaagtgccaggtggtactaataataacaactacgctaacgtagacttgatcgtagacatcgccgaaagagcagacgtagacgccgtatgggctggctggggtcacgcctccgagaatccactattgcctgaaaaattgtcccagtctaagaggaaagtcatctttattgggcctccaggtaacgccatgaggtctttaggtgataaaatctcctctaccattgtcgctcaaagtgctaaagtcccatgtattccatggtctggtaccggtgttgacaccgttcacgtggacgagaaaaccggtctggtctctgtcgacgatgacatctatcaaaagggttgttgtacctctcctgaagatggtttacaaaaggccaagcgtattggttttcctgtcatgattaaggcatccgaaggtggtggtggtaaaggtatcagacaagttgaacgtgaagaagatttcatcgctttataccaccaggcagccaacgaaattccaggctcccccattttcatcatgaagttggccggtagagcgcgtcacttggaagttcaactgctagcagatcagtacggtacaaatatttccttgttcggtagagactgttccgttcagagacgtcatcaaaaaattatcgaagaagcaccagttacaattgccaaggctgaaacatttcacgagatggaaaaggctgccgtcagactggggaaactagtcggttatgtctctgccggtaccgtggagtatctatattctcatgatgatggaaaattctactttttagaattgaacccaagattacaagtcgagcatccaacaacggaaatggtctccggtgttaacttacctgcagctcaattacaaatcgctatgggtatccctatgcatagaataagtgacattagaactttatatggtatgaatcctcattctgcctcagaaatcgatttcgaattcaaaactcaagatgccaccaagaaacaaagaagacctattccaaagggtcattgtaccgcttgtcgtatcacatcagaagatccaaacgatggattcaagccatcgggtggtactttgcatgaactaaacttccgttcttcctctaatgtttggggttacttctccgtgggtaacaatggtaatattcactccttttcggactctcagttcggccatatttttgcttttggtgaaaatagacaagcttccaggaaacacatggttgttgccctgaaggaattgtccattaggggtgatttcagaactactgtggaatacttgatcaaacttttggaaactgaagatttcgaggataacactattaccaccggttggttggacgatttgattactcataaaatgaccgctgaaaagcctgatccaactcttgccgtcatttgcggtgccgctacaaaggctttcttagcatctgaagaagcccgccacaagtatatcgaatccttacaaaagggacaagttctatctaaagacctactgcaaactatgttccctgtagattttatccatgagggtaaaagatacaagttcaccgtagctaaatccggtaatgaccgttacacattatttatcaatggttctaaatgtgatatcatactgcgtcaactatctgatggtggtcttttgattgccataggcggtaaatcgcataccatctattggaaagaagaagttgctgctacaagattatccgttgactctatgactactttgttggaagttgaaaacgatccaacccagttgcgtactccatcccctggtaaattggttaaattcttggtggaaaatggtgaacacattatcaagggccaaccatatgcagaaattgaagttatgaaaatgcaaatgcctttggtttctcaagaaaatggtatcgtccagttattaaagcaacctggttctaccattgttgcaggtgatatcatggctattatgactcttgacgatccatccaaggtcaagcacgctctaccatttgaaggtatgctgccagattttggttctccagttatcgaaggaaccaaacctgcctataaattcaagtcattagtgtctactttggaaaacattttgaagggttatgacaaccaagttattatgaacgcttccttgcaacaattgatagaggttttgagaaatccaaaactgccttactcagaatggaaactacacatctctgctttacattcaagattgcctgctaagctagatgaacaaatggaagagttagttgcacgttctttgagacgtggtgctgttttcccagctagacaattaagtaaattgattgatatggccgtgaagaatcctgaatacaaccccgacaaattgctgggcgccgtcgtggaaccattggcggatattgctcataagtactctaacgggttagaagcccatgaacattctatatttgtccatttcttggaagaatattacgaagttgaaaagttattcaatggtccaaatgttcgtgaggaaaatatcattctgaaattgcgtgatgaaaaccctaaagatctagataaagttgcgctaactgttttgtctcattcgaaagtttcagcgaagaataacctgatcctagctatcttgaaacattatcaaccattgtgcaagttatcttctaaagtttctgccattttctctactcctctacaacatattgttgaactagaatctaaggctaccgctaaggtcgctctacaagcaagagaaattttgattcaaggcgctttaccttcggtcaaggaaagaactgaacaaattgaacatatcttaaaatcctctgttgtgaaggttgcctatggctcatccaatccaaagcgctctgaaccagatttgaatatcttgaaggacttgatcgattctaattacgttgtgttcgatgttttacttcaattcctaacccatcaagacccagttgtgactgctgcagctgctcaagtctatattcgtcgtgcttatcgtgcttacaccataggagatattagagttcacgaaggtgtcacagttccaattgttgaatggaaattccaactaccttcagctgcgttctccacctttccaactgttaaatctaaaatgggtatgaacagggctgtttctgtttcagatttgtcatatgttgcaaacagtcagtcatctccgttaagagaaggtattttgatggctgtggatcatttagatgatgttgatgaaattttgtcacaaagtttggaagttattcctcgtcaccaatcttcttctaacggacctgctcctgatcgttctggtagctccgcatcgttgagtaatgttgctaatgtttgtgttgcttctacagaaggtttcgaatctgaagaggaaattttggtaaggttgagagaaattttggatttgaataagcaggaattaatcaatgcttctatccgtcgtatcacatttatgttcggttttaaagatgggtcttatccaaagtattatacttttaacggtccaaattataacgaaaatgaaacaattcgtcacattgagccggctttggccttccaactggaattaggaagattgtccaacttcaacattaaaccaattttcactgataatagaaacatccatgtctacgaagctgttagtaagacttctccattggataagagattctttacaagaggtattattagaacgggtcatatccgtgatgacatttctattcaagaatatctgacttctgaagctaacagattgatgagtgatatattggataatttagaagtcaccgacacttcaaattctgatttgaatcatatcttcatcaacttcattgcggtgtttgatatctctccagaagatgtcgaagccgccttcggtggtttcttagaaagatttggtaagagattgttgagattgcgtgtttcttctgccgaaattagaatcatcatcaaagatcctcaaacaggtgccccagtaccattgcgtgccttgatcaataacgtttctggttatgttatcaaaacagaaatgtacaccgaagtcaagaacgcaaaaggtgaatgggtatttaagtctttgggtaaacctggatccatgcatttaagacctattgctactccttaccctgttaaggaatggttgcaaccaaaacgttataaggcacacttgatgggtaccacatatgtctatgacttcccagaattattccgccaagcatcgtcatcccaatggaaaaatttctctgcagatgttaagttaacagatgatttctttatttccaacgagttgattgaagatgaaaacggcgaattaactgaggtggaaagagaacctggtgccaacgctattggtatggttgcctttaagattactgtaaagactcctgaatatccaagaggccgtcaatttgttgttgttgctaacgatatcacattcaagatcggttcctttggtccacaagaagacgaattcttcaataaggttactgaatatgctagaaagcgtggtatcccaagaatttacttggctgcaaactcaggtgccagaattggtatggctgaagagattgttccactatttcaagttgcatggaatgatgctgccaatccggacaagggcttccaatacttatacttaacaagtgaaggtatggaaactttaaagaaatttgacaaagaaaattctgttctcactgaacgtactgttataaacggtgaagaaagatttgtcatcaagacaattattggttctgaagatgggttaggtgtcgaatgtctacgtggatctggtttaattgctggtgcaacgtcaagggcttaccacgatatcttcactatcaccttagtcacttgtagatccgtcggtatcggtgcttatttggttcgtttgggtcaaagagctattcaggtcgaaggccagccaattattttaactggtgctcctgcaatcaacaaaatgctgggtagagaagtttatacttctaacttacaattgggtggtactcaaatcatgtataacaacggtgtttcacatttgactgctgttgacgatttagctggtgtagagaagattgttgaatggatgtcttatgttccagccaagcgtaatatgccagttcctatcttggaaactaaagacacatgggatagaccagttgatttcactccaactaatgatgaaacttacgatgtaagatggatgattgaaggtcgtgagactgaaagtggatttgaatatggtttgtttgataaagggtctttctttgaaactttgtcaggatgggccaaaggtgttgtcgttggtagagcccgtcttggtggtattccactgggtgttattggtgttgaaacaagaactgtcgagaacttgattcctgctgatccagctaatccaaatagtgctgaaacattaattcaagaacctggtcaagtttggcatccaaactccgccttcaagactgctcaagctatcaatgactttaacaacggtgaacaattgccaatgatgattttggccaactggagaggtttctctggtggtcaacgtgatatgttcaacgaagtcttgaagtatggttcgtttattgttgacgcattggtggattacaaacaaccaattattatctatatcccacctaccggtgaactaagaggtggttcatgggttgttgtcgatccaactatcaacgctgaccaaatggaaatgtatgccgacgtcaacgctagagctggtgttttggaaccacaaggtatggttggtatcaagttccgtagagaaaaattgctggacaccatgaacagattggatgacaagtacagagaattgagatctcaattatccaacaagagtttggctccagaagtacatcagcaaatatccaagcaattagctgatcgtgagagagaactattgccaatttacggacaaatcagtcttcaatttgctgatttgcacgataggtcttcacgtatggtggccaagggtgttatttctaaggaactggaatggaccgaggcacgtcgtttcttcttctggagattgagaagaagattgaacgaagaatatttgattaaaaggttgagccatcaggtaggcgaagcatcaagattagaaaagatcgcaagaattagatcgtggtaccctgcttcagtggaccatgaagatgataggcaagtcgcaacatggattgaagaaaactacaaaactttggacgataaactaaagggtttgaaattagagtcattcgctcaagacttagctaaaaagatcagaagcgaccatgacaatgctattgatggattatctgaagttatcaagatgttatctaccgatgataaagaaaaattgttgaagactttgaaataa

SEQ ID NO: 9682 - DNA, 6702 bp, Artificial Sequence
  Description of Artificial Sequence: Synthetic polynucleotide
atgagcgaagaaagcttattcgagtcttctccacagaagatggagtacgaaattacaaactactctgaaagacatacagaacttccaggtcatttcattggcctcaatacagtagataaattagaggagtccccgttaagggactttgttaagagtcacggtggtcacacggtcatatccaagatcttaatagcaaataatggtattgccgccgtgaaagaaattagatccgtcagaaaatgggcatacgagacgttcggcgatgacagaaccgtccaattcgtcgccatggccaccccagaagatttagaggccaacgcagaatatatccgtatggccgatcaatacattgaagtgccaggtggtactaataataacaactacgctaacgtagacttgatcgtagacatcgccgaaagagcagacgtagacgccgtatgggctggctggggtcacgcctccgagaatccattgttgcctgaaaaattgtcccagtctaagaggaaagtcatctttattgggcctccaggtaacgccatgaggtctttaggtgataaaatctcctctaccattgtcgctcaaagtgctaaagtcccatgtattccatggtctggtaccggtgttgacaccgttcacgtggacgagaaaaccggtttggtctctgtcgacgatgacatctatcaaaagggttgttgtacctctcctgaagatggtttacaaaaggccaagcgtattggttttcctgtcatgattaaggcatccgaaggtggtggtggtaaaggtatcagacaagttgaacgtgaagaagatttcatcgctttataccaccaggcagccaacgaaattccaggctcccccattttcatcatgaagttggccggtagagcgcgtcacttggaagttcaattattggcagatcagtacggtacaaatatttccttgttcggtagagactgttccgttcagagacgtcatcaaaaaattatcgaagaagcaccagttacaattgccaaggctgaaacatttcacgagatggaaaaggctgccgtcagattagggaaattggtcggttatgtctctgccggtaccgtggagtatttgtattctcatgatgatggaaaattctactttttagaattgaacccaagattacaagtcgagcatccaacaacggaaatggtctccggtgttaacttacctgcagctcaattacaaatcgctatgggtatccctatgcatagaataagtgacattagaactttatatggtatgaatcctcattctgccagtgaaatcgatttcgaattcaaaactcaagatgccaccaagaaacaaagaagacctattccaaagggtcattgtaccgcttgtcgtatcacaagtgaagatccaaacgatggattcaagccatctggtggtactttgcatgaattgaacttccgttcttcctctaatgtttggggttacttctccgtgggtaacaatggtaatattcactccttttctgactctcagttcggccatatttttgcttttggtgaaaatagacaagcttccaggaaacacatggttgttgccttgaaggaattgtccattaggggtgatttcagaactactgtggaatacttgatcaaacttttggaaactgaagatttcgaggataacactattaccaccggttggttggacgatttgattactcataaaatgaccgctgaaaagcctgatccaactcttgccgtcatttgcggtgccgctacaaaggctttcttagcatctgaagaagcccgccacaagtatatcgaatccttacaaaagggacaagttttatctaaagacttattacaaactatgttccctgtagattttatccatgagggtaaaagatacaagttcaccgtagctaaatccggtaatgaccgttacacattatttatcaatggttctaaatgtgatatcatattacgtcaattatctgatggtggtcttttgattgccataggcggtaaatctcataccatctattggaaagaagaagttgctgctacaagattatccgttgactctatgactactttgttggaagttgaaaacgatccaacccagttgcgtactccatcccctggtaaattggttaaattcttggtggaaaatggtgaacacattatcaagggccaaccatatgcagaaattgaagttatgaaaatgcaaatgcctttggtttctcaagaaaatggtatcgtccagttattaaagcaacctggttctaccattgttgcaggtgatatcatggctattatgactcttgacgatccatccaaggtcaagcacgctttgccatttgaaggtatgcttccagattttggttctccagttatcgaaggaaccaaacctgcctataaattcaagtctttagtgtctactttggaaaacattttgaagggttatgacaaccaagttattatgaacgcttccttgcaacaattgatagaggttttgagaaatccaaaattaccttactctgaatggaaattacacatctctgctttacattccagattgcctgctaagttggatgaacaaatggaagagttagttgcacgttctttgagacgtggtgctgttttcccagctagacaattaagtaaattgattgatatggccgtgaagaatcctgaatacaaccccgacaaattgttgggcgccgtcgtggaaccattggcggatattgctcataagtactctaacgggttagaagcccatgaacattctatatttgtccatttcttggaagaatattacgaagttgaaaagttattcaatggtccaaatgttcgtgaggaaaatatcattttgaaattgcgtgatgaaaaccctaaagatttggataaagttgcgttgactgttttgtctcattctaaagtttctgcgaagaataacttgatcttggctatcttgaaacattatcaaccattgtgcaagttatcttctaaagtttctgccattttctctactcctttacaacatattgttgaattggaatctaaggctaccgctaaggtcgctttacaagcaagagaaattttgattcaaggcgctttaccttctgtcaaggaaagaactgaacaaattgaacatatcttaaaatcctctgttgtgaaggttgcctatggcagctccaatccaaagcgctctgaaccagatttgaatatcttgaaggacttgatcgattctaattacgttgtgttcgatgttttacttcaattcttgacccatcaagacccagttgtgactgctgcagctgctcaagtctatattcgtcgtgcttatcgtgcttacaccataggagatattagagttcacgaaggtgtcacagttccaattgttgaatggaaattccaattaccttctgctgcgttctccacctttccaactgttaaatctaaaatgggtatgaacagggctgtttctgtttctgatttgagttatgttgcaaacagtcagtcttctccgttaagagaaggtattttgatggctgtggatcatttagatgatgttgatgaaattttgtctcaaagtttggaagttattcctcgtcaccaatcttcttctaacggacctgctcctgatcgttctggtagctccgcaagtttgagtaatgttgctaatgtttgtgttgcttctacagaaggtttcgaatctgaagaggaaattttggtaaggttgagagaaattttggatttgaataagcaggaattaatcaatgcttctatccgtcgtatcacatttatgttcggttttaaagatgggtcttatccaaagtattatacttttaacggtccaaattataacgaaaatgaaacaattcgtcacattgagccggctttggccttccaattggaattaggaagattgtccaacttcaacattaaaccaattttcactgataatagaaacatccatgtctacgaagctgttagtaagacttctccattggataagagattctttacaagaggtattattagaacgggtcatatccgtgatgacatttctattcaagaatatttgacttctgaagctaacagattgatgagtgatatattggataatttagaagtcaccgacacttccaattctgatttgaatcatatcttcatcaacttcattgcggtgtttgatatctctccagaagatgtcgaagccgccttcggtggtttcttagaaagatttggtaagagattgttgagattgcgtgtttcttctgccgaaattagaatcatcatcaaagatcctcaaacaggtgccccagtaccattgcgtgccttgatcaataacgtttctggttatgttatcaaaacagaaatgtacaccgaagtcaagaacgcaaaaggtgaatgggtatttaagtctttgggtaaacctggatccatgcatttaagacctattgctactccttaccctgttaaggaatggttgcaaccaaaacgttataaggcacacttgatgggtaccacatatgtctatgacttcccagaattattccgccaagcatcttcttcccaatggaaaaatttctctgcagatgttaagttaacagatgatttctttatttccaacgagttgattgaagatgaaaacggcgaattaactgaggtggaaagagaacctggtgccaacgctattggtatggttgcctttaagattactgtaaagactcctgaatatccaagaggccgtcaatttgttgttgttgctaacgatatcacattcaagatcggttcctttggtccacaagaagacgaattcttcaataaggttactgaatatgctagaaagcgtggtatcccaagaatttacttggctgcaaacagtggtgccagaattggtatggctgaagagattgttccattatttcaagttgcatggaatgatgctgccaatccggacaagggcttccaatacttatacttaacaagtgaaggtatggaaactttaaagaaatttgacaaagaaaattctgttctcactgaacgtactgttataaacggtgaagaaagatttgtcatcaagacaattattggttctgaagatgggttaggtgtcgaatgtttgcgtggatctggtttaattgctggtgcaacgtctagggcttaccacgatatcttcactatcaccttagtcacttgtagatccgtcggtatcggtgcttatttggttcgtttgggtcaaagagctattcaggtcgaaggccagccaattattttaactggtgctcctgcaatcaacaaaatgttgggtagagaagtttatacttctaacttacaattgggtggtactcaaatcatgtataacaacggtgtttctcatttgactgctgttgacgatttagctggtgtagagaagattgttgaatggatgtcttatgttccagccaagcgtaatatgccagttcctatcttggaaactaaagacacatgggatagaccagttgatttcactccaactaatgatgaaacttacgatgtaagatggatgattgaaggtcgtgagactgaaagtggatttgaatatggtttgtttgataaagggtctttctttgaaactttgagtggatgggccaaaggtgttgtcgttggtagagcccgtcttggtggtattccattgggtgttattggtgttgaaacaagaactgtcgagaacttgattcctgctgatccagctaatccaaatagtgctgaaacattaattcaagaacctggtcaagtttggcatccaaactccgccttcaagactgctcaagctatcaatgactttaacaacggtgaacaattgccaatgatgattttggccaactggagaggtttctctggtggtcaacgtgatatgttcaacgaagtcttgaagtatggttcttttattgttgacgcattggtggattacaaacaaccaattattatctatatcccacctaccggtgaattgagaggtggttcttgggttgttgtcgatccaactatcaacgctgaccaaatggaaatgtatgccgacgtcaacgctagagctggtgttttggaaccacaaggtatggttggtatcaagttccgtagagaaaaattgttggacaccatgaacagattggatgacaagtacagagaattgagatctcaattatccaacaagagtttggctccagaagtacatcagcaaatatccaagcaattagctgatcgtgagagagaattattgccaatttacggacaaatcagtcttcaatttgctgatttgcacgataggtcttctcgtatggtggccaagggtgttatttctaaggaattggaatggaccgaggcacgtcgtttcttcttctggagattgagaagaagattgaacgaagaatatttgattaaaaggttgagccatcaggtaggcgaagcatctagattagaaaagatcgcaagaattagaagttggtaccctgcttctgtggaccatgaagatgataggcaagtcgcaacatggattgaagaaaactacaaaactttggacgataaattgaagggtttgaaattagagagtttcgctcaagacttagctaaaaagatcagaagcgaccatgacaatgctattgatggattatctgaagttatcaagatgttatctaccgatgataaagaaaaattgttgaagactttgaaatga

SEQ ID NO: 9683 - DNA, 669 bp, Saccharomyces cerevisiae
atgtcgtggctttttggagataagacacctaccgatgatgcgaatgctgccgtgggcggccaagatacaaccaagcctaaggaactatcgttgaagcagagtttaggtttcgagccaaacatcaataacataatatcaggtcctggtggaatgcatgtcgacaccgctaggctgcatcctttggctggtctagacaagggtgtggagtatttagatctggaagaagaacaactatcctcgttagaaggctcacagggtctgatcccttcccgtgggtggaccgatgacctatgttacggtaccggtgccgtctacctgctgggacttggtatcggagggttttctggtatgatgcagggtctgcagaatattccgcccaatagtcccggaaaattgcaattgaacaccgtcctgaatcacattactaagagaggtcccttcttaggtaataatgcggggattctcgcgttgagctacaatatcatcaattctacaatagatgcactaagaggcaaacatgacaccgcgggctccattggcgctggggccctcacgggcgctttgttcaagtcttcaaaaggtttgaaacccatgggttattcctcggcaatggtggccgctgcgtgcgccgtctggtgtagtgtcaagaaaagactacttgaaaaatga

SEQ ID NO: 9684 - DNA, 669 bp, Artificial Sequence
  Description of Artificial Sequence: Synthetic polynucleotide
atgtcttggctttttggagataagacacctaccgatgatgcgaatgctgccgtgggcggccaagatacaaccaagcctaaggaattatctttgaagcagagtttaggtttcgagccaaacatcaataacataatatctggtcctggtggaatgcatgtcgacaccgctaggttacatcctttggctggtttggacaagggtgtggagtatttagatttggaagaagaacaattatcctctttagaaggctctcagggtttgatcccttcccgtgggtggaccgatgacttatgttacggtaccggtgccgtctacttgttgggacttggtatcggagggttttctggtatgatgcagggtttacagaatattccgcccaatagtcccggaaaattgcaattgaacaccgtcttgaatcacattactaagagaggtcccttcttaggtaataatgcggggattctcgcgttgagctacaatatcatcaattctacaatagatgcattgagaggcaaacatgacaccgcgggctccattggcgctggggccctcacgggcgctttgttcaagtcttctaaaggtttgaaacccatgggttattcctctgcaatggtggccgctgcgtgcgccgtctggtgtagtgtcaagaaaagattacttgaaaaatga

SEQ ID NO: 9685 - DNA, 675 bp, Saccharomyces cerevisiae
atgaagattttaacccaagacgaaattgaagctcatcgctcacatacgctaaaaggtggtattgaaggtgcccttgccggatttgcaatctctgctataattttcaaagtcctaccaagaaggtacccaaaattcaagccttcgactctaacatggtccataaaaaccgccctttggatcacccctcccacggtcttgactgctatatgtgcggaggaggcctcgaacaatttcgacgctacaatgtacggatccggttcctcctcggaagacgcactagatgagcacagaagatggaagagtttgagtacaaaggacaagtttgtcgaaggtctatctaataacaagtataagatcatcaccggtgcctgggccgcttcgctgtatgggtcgtgggtaatcgtgaacaaagaccccatcatgaccaaagctcagaagatcgtgcaggcaagaatgtacgctcaattcattaccgtcgggctgctgctggcctccgttggtttgagcatgtacgagaataagttacatcctaacaaacaaaaggtcaacgaaatgcgccgctgggaaaacgcactgagggtcgccgaagaggaagagagactcgagaaagagggaagaaggaccggctacgtttctaacgaagaaagaataaactccaagatcttcaagtcgtaa

SEQ ID NO: 9686 - DNA, 675 bp, Artificial Sequence
  Description of Artificial Sequence: Synthetic polynucleotide
atgaagattttaacccaagacgaaattgaagctcatcgctctcatacgttgaaaggtggtattgaaggtgcccttgccggatttgcaatctctgctataattttcaaagtcttgccaagaaggtacccaaaattcaagccttccactttgacatggtccataaaaaccgccctttggatcacccctcccacggtcttgactgctatatgtgcggaggaggcctccaacaatttcgacgctacaatgtacggatccggttcctccagtgaagacgcattggatgagcacagaagatggaagagtttgagtacaaaggacaagtttgtcgaaggtctttctaataacaagtataagatcatcaccggtgcctgggccgcttctttgtatgggtcctgggtaatcgtgaacaaagaccccatcatgaccaaagctcagaagatcgtgcaggcaagaatgtacgctcaattcattaccgtcgggttgttgttagcctccgttggtttgagcatgtacgagaataagttacatcctaacaaacaaaaggtcaacgaaatgcgccgctgggaaaacgcattaagggtcgccgaagaggaagagagactcgagaaagagggaagaaggaccggctacgtttctaacgaagaaagaataaactccaagatcttcaagagttga

SEQ ID NO: 9687 - DNA, 1929 bp, Saccharomyces cerevisiae
atggacaagaagaaggatctactggagaacgaacaatttctccgcatccaaaagctcaacgctgccgatgcgggcaaaagacaatctataacagtggacgacgagggcgaactatatgggttagacacctccggcaactcaccagccaatgaacacacagctaccacaattacacagaatcacagcgtggtggcctcaaacggagacgtcgcattcatcccaggaactgctaccgaaggcaatacagagattgtaactgaagaagtgattgagaccgatgataacatgttcaagacccatgtgaagactttaagctccaaagagaaggcacggtataggcaagggtcctctaactttatatcgtatttcgatgatatgtcatttgaacacaggcccagtatattagatgggtcagttaacgagcccttcaagaccaaattcgtgggacctactttagaaaaggagatcagaagaagggagaaagagctaatggccatgcgcaaaaatttacaccaccgcaagtcctccccagatgctgtcgactcagtagggaaaaatgatggcgccgccccaactactgttccaactgccgccacctcagaaacggtggtcaccgttgaaaccaccataatttcatccaatttctccgggttgtacgtggcgttttggatggctattgcatttggtgctgtcaaggctttaatagactattattaccagcataatggtagcttcaaggattcggagatcttgaaatttatgactacgaatttgttcactgtggcatccgtagatcttttgatgtatttgagcacttattttgtcgttggaatacaatacttatgcaagtggggggtcttgaaatggggcactaccggctggatcttcacctcaatttacgagtttttgtttgttatcttctacatgtatttaacagaaaacatcctaaaactacactggctgtccaagatcttcctttttttgcattctttagttttattgatgaaaatgcattctttcgccttctacaatggctatctatggggtataaaggaagaactacaattttccaaaagcgctcttgccaaatacaaggattctataaatgatccaaaagttattggtgctcttgagaaaagctgtgagttttgtagttttgaattgagctctcagtctttaagcgaccaaactcaaaaattccccaacaatatcagtgcaaaaagctttttttggttcaccatgtttccaaccctaatttaccaaattgaatatccaagaactaaggaaatcagatggagctacgtattagaaaagatctgcgccatcttcggtaccattttcttaatgatgatagatgctcaaatcttgatgtatcctgtagcaatgagagcattggctgtgcgcaattctgaatggactggtatattggatagattattgaaatgggttggattgctcgttgatatcgtcccagggtttatcgtgatgtacatcttggacttctatttgatttgggatgccattttgaactgtgtggctgaattgacaagatttggcgacagatatttctacggtgactggtggaattgtgttagttgggcagacttcagtagaatttggaacatcccagtgcataagtttttgttaagacatgtttaccatagttcaatgagttcattcaaattgaacaagagtcaagcaactttgatgacctttttcttaagttccgtcgttcatgaattagcaatgtacgttatcttcaagaaattgaggttttacttgttcttcttccaaatgctgcaaatgccattagtagctttaacaaatactaaattcatgaggaacagaaccataatcggaaatgttattttctggctcggtatctgcatgggaccaagtgtcatgtgtacgttgtacttgacattctaa

SEQ ID NO: 9688 - DNA, 1929 bp, Artificial Sequence
  Description of Artificial Sequence: Synthetic polynucleotide
atggacaagaagaaggatttattggagaacgaacaatttctccgcatccaaaagctcaacgctgccgatgcgggcaaaagacaatctataacagtggacgacgagggcgaattgtatgggttagacacctccggcaactctccagccaatgaacacacagctaccacaattacacagaatcacagcgtggtggcctccaacggagacgtcgcattcatcccaggaactgctaccgaaggcaatacagagattgtaactgaagaagtgattgagaccgatgataacatgttcaagacccatgtgaagactttaagctccaaagagaaggcaagatataggcaagggtcctctaactttatatcttatttcgatgatatgagttttgaacacaggcccagtatattagatgggtctgttaacgagcccttcaagaccaaattcgtgggacctactttagaaaaggagatcagaagaagggagaaagagttgatggccatgcgcaaaaatttacaccaccgcaagtcctccccagatgctgtcgactctgtagggaaaaatgatggcgccgccccaactactgttccaactgccgccaccagtgaaacggtggtcaccgttgaaaccaccataatttcttccaatttctccgggttgtacgtggcgttttggatggctattgcatttggtgctgtcaaggctttaatagactattattaccagcataatggtagcttcaaggattctgagatcttgaaatttatgactacgaatttgttcactgtggcatccgtagatcttttgatgtatttgagcacttattttgtcgttggaatacaatacttatgcaagtggggggtcttgaaatggggcactaccggctggatcttcacctctatttacgagtttttgtttgttatcttctacatgtatttaacagaaaacatcttgaaattacactggttatccaagatcttcctttttttgcattctttagttttattgatgaaaatgcattctttcgccttctacaatggctatttatggggtataaaggaagaattacaattttccaaaagcgctcttgccaaatacaaggattctataaatgatccaaaagttattggtgctcttgagaaaagctgtgagttttgtagttttgaattgagctctcagtctttaagcgaccaaactcaaaaattccccaacaatatcagtgcaaaaagctttttttggttcaccatgtttccaaccttgatttaccaaattgaatatccaagaactaaggaaatcagatggagctacgtattagaaaagatctgcgccatcttcggtaccattttcttaatgatgatagatgctcaaatcttgatgtatcctgtagcaatgagagcattggctgtgcgcaattctgaatggactggtatattggatagattattgaaatgggttggattgctcgttgatatcgtcccagggtttatcgtgatgtacatcttggacttctatttgatttgggatgccattttgaactgtgtggctgaattgacaagatttggcgacagatatttctacggtgactggtggaattgtgttagttgggcagacttcagtagaatttggaacatcccagtgcataagtttttgttaagacatgtttaccatagttctatgagttctttcaaattgaacaagagtcaagcaactttgatgacctttttcttaagttccgtcgttcatgaattagcaatgtacgttatcttcaagaaattgaggttttacttgttcttcttccaaatgttacaaatgccattagtagctttaacaaatactaaattcatgaggaacagaaccataatcggaaatgttattttctggctcggtatctgcatgggaccaagtgtcatgtgtacgttgtacttgacattctga

SEQ ID NO: 9689 - DNA, 813 bp, Saccharomyces cerevisiae
atgacgatgcgaacaaataagaaaaataagagttctaatatcaaaatgatcagaagagtaaggcataatttgtacaaccaaaaccaaggaaagctgatagtaccgaattttttttttttttggcacgatatgaatagcagtggggataatgctgggtttgagtggtggagacggaccatgcagtacaagactggtataggcttgacaccggaggagaaaactcgatacgaagacgactctaaagctcgagaactaaaaaaggaatgtctgaaatgttatgagtatcgagattggatgcttaaatactctcccacagttcgctttatggtacaagctattacgaaacttaataagggtagcgacagtaaattcgacgattcgaagatcatctgcgattactgtcccgactggaagggcggtggctttcatcctgaattgggaatcctattgtgccagaacaggttacgtgataagtggcatttagaggatacgctttcgcatgaattaattcattatttcgatgatctaaaatggcaaatagattggttaaatctgaagcatcatgcatgttctgaaatcagagcctcttcgttaagtggggaatgcaggttttgggaagagttcaagagaagagggtttaggacaggattccatgtggcaaggggacaccaagattgtgttagaaggagggcaataattagtgtttcggggaaccccaactgccaaagcaaagaacatgcagcaaaaattgtagatgaagtttgggacagttgcttcgccgatacgagaccgtttgatgagatttacagatga

SEQ ID NO: 9690 - DNA, 813 bp, Artificial Sequence
  Description of Artificial Sequence: Synthetic polynucleotide
atgacgatgagaacaaataagaaaaataagagttctaatatcaaaatgatcagaagagtaaggcataatttgtacaaccaaaaccaaggaaagttaatagtaccgaattttttttttttttggcacgatatgaatagcagtggggataatgctgggtttgagtggtggagaagaaccatgcagtacaagactggtataggcttgacaccggaggagaaaactcgttacgaagacgactctaaagctagagaattgaaaaaggaatgtttgaaatgttatgagtatagagattggatgcttaaatactctcccacagttcgctttatggtacaagctattacgaaacttaataagggtagcgacagtaaattcgacgattctaagatcatctgcgattactgtcccgactggaagggcggtggctttcatcctgaattgggaatcttgttgtgccagaacaggttacgtgataagtggcatttagaggatacgctttctcatgaattaattcattatttcgatgatttgaaatggcaaatagattggttaaatttgaagcatcatgcatgttctgaaatcagagcctcttctttaagtggggaatgcaggttttgggaagagttcaagagaagagggtttaggacaggattccatgtggcaaggggacaccaagattgtgttagaaggagggcaataattagtgtttctgggaaccccaactgccaaagcaaagaacatgcagcaaaaattgtagatgaagtttgggacagttgcttcgccgatacgagaccgtttgatgagatttacagatga

SEQ ID NO: 9691 - DNA, 1215 bp, Saccharomyces cerevisiae
atgtctagttcaatatttggcccacttacgggttttttggagcgtgtcaattcactcaatgcgccctaccaagcattatcatatgacgaacaaaaggccatgactatttggcaaagagtcaaattctacaactggacttttgaattgtgtgctctaggtgtgttgttcttggtttatgctttctacaaatttggtaactccgttaatttgaagcgcggaaatcagattttccaatctttgcattcatttttggccaacgacttaaagttctcccgtgtagggttcaatatcaatgattccaaaatctttacagtggaacaccaaaatacatggttctcttcttttgctaccggtagatccgccatcaagagcatcaacctaaaccttcatctggtagcccgtagcaaccctttctctatgtgtctagagtacctgcttggatttttttttgcaagtttgaaaagtaagcaattggaagaatttatggagatcgtgatcaggccaaatggtattttagttactagtgaatctgctcatcctaacaagaatgcgcatgaaattttgaccaaatttagatttgtcacttctattgttaacaaagaattcatgaatcaagctagaactgaaaactatttcctgtctattgcacacactagtgaaaacgataaactaccaaataacttcgtctacatgtccgatgttaatcaattatcagggttcatgtttcattactccaagccctatgaggttttgtcccaagctggtaatcttttgaaatatataagtttcaccgatttgcctgtcaacccgccacgcgatgataaagaatgggaatcttcaattgaaccaaaggctatcattcgttgcgctgttccccaaaatgagaatgaattgaagttgttaaaccaaattatttccttagtcgtagaaatctacgatgggttcactcaagatttagtccaacagtctccaaacttattcattaccaacgacatcttgaaaagaactaccaacttgcgtcagcaagaactgaacaagatcaaaaagtttatgaaagaaactgaattggaattggcaaaggagaagaaattagaattggaaaaagccaaaagacgtcaattgaaggcctctggtcaacaagaaaaggtagatcaaaaaatgaaagagaaaagagaaagacgtctcaaaaacaagcaaagaacaagatttcagtaa

SEQ ID NO: 9692 - DNA, 1215 bp, Artificial Sequence
  Description of Artificial Sequence: Synthetic polynucleotide
atgtctagtagtatatttggcccacttacgggttttttggagcgtgtcaatagtctcaatgcgccctaccaagcattatcttatgacgaacaaaaggccatgactatttggcaaagagtcaaattctacaactggacttttgaattgtgtgctttgggtgtgttgttcttggtttatgctttctacaaatttggtaactccgttaatttgaagcgcggaaatcagattttccaatctttgcattcttttttggccaacgacttaaagttctcccgtgtagggttcaatatcaatgattccaaaatctttacagtggaacaccaaaatacatggttctcttcttttgctaccggtagatccgccatcaagagcatcaacttgaaccttcatttggtagcccgtagcaaccctttctctatgtgtttagagtacttacttggatttttttttgcaagtttgaaaagtaagcaattggaagaatttatggagatcgtgatcaggccaaatggtattttagttactagtgaatctgctcatcctaacaagaatgcgcatgaaattttgaccaaatttagatttgtcacttctattgttaacaaagaattcatgaatcaagctagaactgaaaactatttcttatctattgcacacactagtgaaaacgataaattaccaaataacttcgtctacatgtccgatgttaatcaattaagtgggttcatgtttcattactccaagccctatgaggttttgtcccaagctggtaatcttttgaaatatataagtttcaccgatttgcctgtcaacccgccacgcgatgataaagaatgggaatcttccattgaaccaaaggctatcattcgttgcgctgttccccaaaatgagaatgaattgaagttgttaaaccaaattatttccttagtcgtagaaatctacgatgggttcactcaagatttagtccaacagtctccaaacttattcattaccaacgacatcttgaaaagaactaccaacttgcgtcagcaagaattgaacaagatcaaaaagtttatgaaagaaactgaattggaattggcaaaggagaagaaattagaattggaaaaagccaaaagacgtcaattgaaggcctctggtcaacaagaaaaggtagatcaaaaaatgaaagagaaaagagaaagacgtctcaaaaacaagcaaagaacaagatttcagtga

SEQ ID NO: 9693 - DNA, 420 bp, Saccharomyces cerevisiae
atgctacattgcacccaggtgtgtctgagcgctctgacaaagagaacccacagggtcaaggttcaagtcctgaaggatttcccgcgatttcaattatataaaggacaagttgcaaatgtcaaaccatctttaatgagaaactatttacataacttcaatggtgcaaaatacatactcagcgaagaacacgacataaatacggaactgttaaaacaataccaaacacttgaggcaaagctagaggaagaccatcaacagctctctaaacgccatgaaacggaagttcaaaagaacatggagttacgtaaagaatctgtttttggccacaagaaagaagagaagccaaaagaggaaaagaagggattattggattctgggattactatcgaagaggttaagatccccggtcttgacatttga

SEQ ID NO: 9694 - DNA, 420 bp, Artificial Sequence
  Description of Artificial Sequence: Synthetic polynucleotide
atgttgcattgcacccaggtgtgtttgagcgctttaacaaagagaacccacagggtcaaggttcaagtcttgaaggatttcccgagatttcaattatataaaggacaagttgcaaatgtcaaaccatctttaatgagaaactatttacataacttcaatggtgcaaaatacatactcagcgaagaacacgacataaatacggaattattaaaacaataccaaacacttgaggcaaagttggaggaagaccatcaacagctctctaaacgccatgaaacggaagttcaaaagaacatggagttacgtaaagaatctgtttttggccacaagaaagaagagaagccaaaagaggaaaagaagggattattggattctgggattactatcgaagaggttaagatccccggtcttgacatttga

SEQ ID NO: 9695 - DNA, 1701 bp, Saccharomyces cerevisiae
atgtccaaagtaatgaaacccagcaacggaaaaggttctagaaagagttcaaaagcagccacacctgatactaaaaatttctttcatgcaaagaaaaaggatccggtgaaccaagataaagcaaataatgcttctcaaattacgccaacagtgccacattctcatccatcagatatggttatccctgaccatttagccgaattgattcctgagctgtattctttccaacaactggtggattccgagaaaagattagatcattttattcatctgcgaaacttacatatgaagcgaatggttgcgcagtgggagaggtcaaagctatcccaagagtttctttatcctcatttaaattttccaaatgtaaaatttctccgaatcttcatttcaaatgttagtgaaaaccaaccctggcaaatggacacaaacaatgaggctgaccttatggcactggagaatgccacttggacgatgagaatcgaaggtcgattattggacaatgtgcaagctaatgatccagcaagagaaaaatttagctcattcatagaatcgatagtggtagacttcaaaaataaggaaaacgataatgtgccatcgactaaatttaatgcggcccctgaagaaaatgccaccgaaggacccagtgataagaaattgaacttaaacttaccgttacaattttcactgccgaatggtgacaactctactacgactaataccgaccaaaataatgccacgatgggggaggagactgccaaaaaggatatgagttctacaactccaaaactagaatcagtgaaatggcagtatgacccgaataatcctgtagacttcgatggtctcgatattaagagggtagggtctgaaaatgtagaatgcactataagcatcctgcgaaaatcatccccagaagagccatttatgagctactctccacaactaaccgcaataataggattgaagagcggtacatcacatgatgcaatattttccatatataaatacatccatttaaatgaattgcttaccaatgatgagtctgcattcgaaaatttgatgggcaacaggaacaatcacaatagcaacaccagtactagtaagatgcttgatgcagcctccagtcaagtttctattgtaaaattagacactcagcttattaccttattacccagcagtcttaaagaatcttctccagatacaatgaaattaacggatttactgtcccttattaatagtactcacctgctcccattacagccaattgaaattgattacacagtacgcgttgataaagcttccacttatggtgagttggttcttgatattgaagtacctgatgtcaacgctctaaaattcaataatacacaaagagaaagtcaaattggggctgctgaattgaatgaaaatgccagggaattggaacaaatcaaacccaagatagctttacaggacaaagaaataacgtccgttctctcgaatctacacgagagcaacaaacgataccgtttcttcaagaaaattagtgaggacccagttaaagcattaaatgaatgcattgcttctacctcgaatgctttgaaagttttatcgggagatgagggctataatgaagatatggtaaggcgggctaacttttacaaggaaaatgaagctatgttgcgcgagaatatagaagtcatattatcaaatggacgaatgtag

SEQ ID NO: 9696 - DNA, 1701 bp, Artificial Sequence
  Description of Artificial Sequence: Synthetic polynucleotide
atgtccaaagtaatgaaacccagcaacggaaaaggttctagaaagagttctaaagcagccacacctgatactaaaaatttctttcatgcaaagaaaaaggatccggtgaaccaagataaagcaaataatgcttctcaaattacgccaacagtgccacattctcatccaagtgatatggttatccctgaccatttagccgaattgattcctgagttgtattctttccaacaattagtggattccgagaaaagattagatcattttattcatttgagaaacttacatatgaagagaatggttgcgcagtgggagaggtctaagttatcccaagagtttctttatcctcatttaaattttccaaatgtaaaatttctcagaatcttcatttctaatgttagtgaaaaccaaccctggcaaatggacacaaacaatgaggctgaccttatggcattagagaatgccacttggacgatgagaatcgaaggtagattattggacaatgtgcaagctaatgatccagcaagagaaaaatttagctctttcatagaaagtatagtggtagacttcaaaaataaggaaaacgataatgtgccatctactaaatttaatgcggcccctgaagaaaatgccaccgaaggacccagtgataagaaattgaacttaaacttaccgttacaattttctttaccgaatggtgacaactctactacgactaataccgaccaaaataatgccacgatgggggaggagactgccaaaaaggatatgagttctacaactccaaaattagaatctgtgaaatggcagtatgacccgaataatcctgtagacttcgatggtctcgatattaagagggtagggtctgaaaatgtagaatgcactataagcatcttgagaaaatcttccccagaagagccatttatgagctactctccacaattgaccgcaataataggattgaagagcggtacatctcatgatgcaatattttccatatataaatacatccatttaaatgaattgcttaccaatgatgagtctgcattcgaaaatttgatgggcaacaggaacaatcacaatagcaacaccagtactagtaagatgcttgatgcagcctccagtcaagtttctattgtaaaattagacactcagcttattaccttattacccagcagtcttaaagaatcttctccagatacaatgaaattaacggatttattatcccttattaatagtactcacctcctcccattacagccaattgaaattgattacacagtacgcgttgataaagcttccacttatggtgagttggttcttgatattgaagtacctgatgtcaacgctttgaaattcaataatacacaaagagaaagtcaaattggggctgctgaattgaatgaaaatgccagggaattggaacaaatcaaacccaagatagctttacaggacaaagaaataacgtccgttctctctaatttacacgagagcaacaaaagataccgtttcttcaagaaaattagtgaggacccagttaaagcattaaatgaatgcattgcttctacctctaatgctttgaaagttttatctggagatgagggctataatgaagatatggtaaggagagctaacttttacaaggaaaatgaagctatgttgcgcgagaatatagaagtcatattatccaatggaagaatgtga

SEQ ID NO: 9697 - DNA, 561 bp, Saccharomyces cerevisiae
atgagtgctaacaatggtgtcactggcaaactctctagtagagtcatgaatatgaagtttatgaaatttggtaagacggatgacgaagagagttccaactccaatacgccgtctaatatcaactcagatgtggaacctatagagcagaaaggtaaactctttggtctggatgactcagcgtgggacctcaatagctacaaagatgatttaaaaaaaatttcaggtaaggagaagaaaaaggtgaaaagagtagtatataagaagcgacccaatctcataatctccaacgttggttacagtgaactgcgaaaacctgagggtgtgataagtgggagaaaaacctttggcgataattctgatgatagtggttccaggaagagaaagtttgatgaaggcgaacaaaatgaagacgagaaaagggatgctaaggataaggaatttacagggagccaagacgatggagaggatgaatatgacctagataaattatttaaggatagcatcaaaaagaaaaagaccaaccataatggtaaaaataaaaatagaaattcaaaaaagtag

SEQ ID NO: 9698 - DNA, 561 bp, Artificial Sequence
  Description of Artificial Sequence: Synthetic polynucleotide
atgagtgctaacaatggtgtcactggcaaactctctagtagagtcatgaatatgaagtttatgaaatttggtaagacggatgacgaagagagttccaactccaatacgccgtctaatatcaacagtgatgtggaacctatagagcagaaaggtaaactctttggtttggatgactctgcgtgggacctcaatagctacaaagatgatttaaaaaaaatttctggtaaggagaagaaaaaggtgaaaagagtagtatataagaagagacccaatctcataatctccaacgttggttacagtgaattaagaaaacctgagggtgtgataagtgggagaaaaacctttggcgataattctgatgatagtggttccaggaagagaaagtttgatgaaggcgaacaaaatgaagacgagaaaagggatgctaaggataaggaatttacagggagccaagacgatggagaggatgaatatgacttggataaattatttaaggatagcatcaaaaagaaaaagaccaaccataatggtaaaaataaaaatagaaattctaaaaagtga

SEQ ID NO: 9699 - DNA, 1416 bp, Saccharomyces cerevisiae
atgaagttcgtgacagctagttataacgtcgggtatcctgcgtacggtgcaaaatttttgaataacgacacattacttgtggcaggcggtggaggagaaggaaacaatggcataccaaacaagctgacggtcttgcgcgtggatcctaccaaagatactgagaaggaacagtttcatatattgagcgagtttgcattggaagacaacgacgactctcctactgcaattgacgcttccaagggtatcattttggttggctgcaatgaaaatagcactaagattacccaaggtaaaggtaataagcacttgagaaaatttaaatacgataaagtgaatgatcaattggagttcctcactagtgtagactttgacgcatctacaaatgcggatgactacacgaagctggtttatatttcacgagaaggtaccgttgcagctatcgcatcatctaaagtacctgctataatgagaatcattgacccgagcgacttgacagagaagtttgagatcgagactaggggtgaagtaaaggatttacacttttccactgatggtaaggttgttgcttatatcaccggttctagcttggaagtgatttcaacagtgactggaagttgcattgctaggaaaacagattttgataagaattggagtttatctaaaataaacttcatagccgatgacacagtattgatagcagcctctttaaaaaaagggaaaggtattgtgctgaccaaaataagcatcaaatcaggaaacacttccgtattaagatccaaacaagtgacaaacagattcaaagggattacttctatggatgtcgacatgaagggtgaattggcggtactggcaagtaatgacaattccatagctcttgtgaaactaaaagacctgtcaatgtctaaaatattcaaacaagctcatagttttgccattacagaggtcactatctctccggactctacatatgtggcgagtgtttcggcagccaacactatccacataataaaattaccgcttaactacgccaactacacctcaatgaaacaaaaaatctctaaatttttcaccaacttcatccttattgtgctgctttcttacattttacagttctcctataagcacaatttgcattccatgcttttcaattacgcgaaggacaattttctaacgaaaagagacaccatctcttcgccctacgtagttgatgaagacttacatcaaacaactttgtttggcaaccacggtacaaaaacatctgtacctagcgtagattccataaaagtgcatggcgtgcatgagacgagttctgtgaatggaactgaagtcttatgtactgaaagtaacattattaatactggaggggcagagtttgagatcaccaacgcaacttttcgagaaatagatgatgcttga

SEQ ID NO: 9700 - DNA, 1416 bp, Artificial Sequence
  Description of Artificial Sequence: Synthetic polynucleotide
atgaagttcgtgacagctagttataacgtcgggtatcctgcgtacggtgcaaaatttttgaataacgacacattacttgtggcaggcggtggaggagaaggaaacaatggcataccaaacaagttgacggtcttgcgcgtggatcctaccaaagatactgagaaggaacagtttcatatattgagcgagtttgcattggaagacaacgacgactctcctactgcaattgacgcttccaagggtatcattttggttggctgcaatgaaaatagcactaagattacccaaggtaaaggtaataagcacttgagaaaatttaaatacgataaagtgaatgatcaattggagttcctcactagtgtagactttgacgcatctacaaatgcggatgactacacgaagttggtttatatttctagagaaggtaccgttgcagctatcgcatcttctaaagtacctgctataatgagaatcattgacccgagcgacttgacagagaagtttgagatcgagactaggggtgaagtaaaggatttacacttttccactgatggtaaggttgttgcttatatcaccggttctagcttggaagtgatttctacagtgactggaagttgcattgctaggaaaacagattttgataagaattggagtttatctaaaataaacttcatagccgatgacacagtattgatagcagcctctttaaaaaaagggaaaggtattgtgttgaccaaaataagcatcaaaagtggaaacacttccgtattaagatccaaacaagtgacaaacagattcaaagggattacttctatggatgtcgacatgaagggtgaattggcggtattggcaagtaatgacaattccatagctcttgtgaaattgaaagacttatctatgtctaaaatattcaaacaagctcatagttttgccattacagaggtcactatctctccggactctacatatgtggcgagtgtttctgcagccaacactatccacataataaaattaccgcttaactacgccaactacacctccatgaaacaaaaaatctctaaatttttcaccaacttcatccttattgtgttgctttcttacattttacagttctcctataagcacaatttgcattccatgcttttcaattacgcgaaggacaattttttaacgaaaagagacaccatctcttctccctacgtagttgatgaagacttacatcaaacaactttgtttggcaaccacggtacaaaaacatctgtacctagcgtagattccataaaagtgcatggcgtgcatgagacgagttctgtgaatggaactgaagtcttatgtactgaaagtaacattattaatactggaggggcagagtttgagatcaccaacgcaacttttagagaaatagatgatgcttga

SEQ ID NO: 9701 - DNA, 954 bp, Saccharomyces cerevisiae
atgaccagtacattacatacgacaaaaaaagtgctctccattcaatcacacgtcatacatggctacgtgggaaacaaggccgctacgttcccacttcaatacagaggttgggatgtggacgtattgaacacagttcagttttctaaccactcggggtacgcccacttcacaggcttcaaatgcagcactgaggagttggtagacattgtagagaagggcttgattgggtctcttagaatcaagtatgatgccgtacttagtggctatttacccaatgttcaagccctgcaaaaggtagcaggaatagtgggtcaattatgtgaggggagtgaaaacgtcaagtggatattagatcctgtactgggcgataatggaaggctgtacgtggatcgagaatgtgttgcggtataccaagacattttacaaaacttcaaaatttttttggccacaccaaatcagtttgaaatggaactgttggtggggatgtcaattcgtaccttagacgacgctaagcaggcatttaaactatttcataaaaagtaccctcgagtaagccgaatagttgtcactagtctggaattatctgaattcctgagcaacgacacttacgtagtagcagggtttgattgctcggccagtgaagagatattcttctatgaaatccccaagatcaacgcaaaatttagtggaagtggtgatttaatcagcgccatgctcactgactcgttactaggcgaccgccgctgcacacagctgtcattaagcgcatccttgggccaagtgctgtggctcgtcaccagtatcctacaaaaaacgtatgatttaaacatagctgagcggggcccacaagattccacgatagatatcaaggatttaaagctgattcagtgtagagacatcctaaagcaagatctcataccctccattggcaagccaaaaaccattaaaatatga

SEQ ID NO: 9702 - DNA, 954 bp, Artificial Sequence
  Description of Artificial Sequence: Synthetic polynucleotide
atgaccagtacattacatacgacaaaaaaagtgctctccattcaatctcacgtcatacatggctacgtgggaaacaaggccgctacgttcccacttcaatacagaggttgggatgtggacgtattgaacacagttcagttttctaaccactctgggtacgcccacttcacaggcttcaaatgcagcactgaggagttggtagacattgtagagaagggcttgattgggtctcttagaatcaagtatgatgccgtacttagtggctatttacccaatgttcaagccttgcaaaaggtagcaggaatagtgggtcaattatgtgaggggagtgaaaacgtcaagtggatattagatcctgtattaggcgataatggaaggttgtacgtggatagagaatgtgttgcggtataccaagacattttacaaaacttcaaaatttttttggccacaccaaatcagtttgaaatggaattattggtggggatgtctattcgtaccttagacgacgctaagcaggcatttaaattatttcataaaaagtaccctagagtaagcagaatagttgtcactagtttagaattatctgaattcttgagcaacgacacttacgtagtagcagggtttgattgctctgccagtgaagagatattcttctatgaaatccccaagatcaacgcaaaatttagtggaagtggtgatttaatcagcgccatgctcactgactctttattaggcgaccgccgctgcacacagttatctttaagcgcatccttgggccaagtgttgtggctcgtcaccagtatcttgcaaaaaacgtatgatttaaacatagctgagagaggcccacaagattccacgatagatatcaaggatttaaagttgattcagtgtagagacatcttgaagcaagatctcataccctccattggcaagccaaaaaccattaaaatatga

SEQ ID NO: 9703 - DNA, 927 bp, Saccharomyces cerevisiae
atgaagagcttttttctttatctttatgtggcattcatgtttagttgcataacggctctgccattacctgtggataacaaaagggcttcttcagactccttagacctaaagaaaaaatacgcaccagaccctcctattacacataatgtaaacatcggaattgttttcacagatcctgaaagttcggaagaagccggccgtctcataacaatagacttatacgggactatggtgcccaagacagtaatgactttttgccagtatgttgatagtgtaaaagatcgccttgcttcccgtcacagttactcgccagaacgcgattttgataaaattctaccgaatggagctatagaaggtagctccgtttcttcctcctctattgaagaaacggaaatgttggctccaaaactcccggaagaaaatcatagtttaattcatgataggccaggcagagtttccatgattaaggacgataagggtcttaagtttataattgagaccagtgagacgccacttgaaggtgaaagtgttgtgtttggccaagttaccgccgggttaaaagatctgatggataaactagctaatgtgaaaactgacgaaaatggcaaaccagagcaaccaataacaataggttacatttcatcccaggaacacaggattcagcatgcaaaggaagctcacgaaaagtatttacaaaggcttcaagattaccaaaacggcgatttggagaaaggtattacattgaagaattatttataccagggtagtcaaagaaagttagaagacgcaaaatataatcagcttcaccatcctttaccaaagattatgcttggtatttcggtattgttacttttctacgttttggccaagtacaggaaaagaatattcaacagatcgtctaaaatagtttctattagagaggattaa

SEQ ID NO: 9704 - DNA, 927 bp, Artificial Sequence
  Description of Artificial Sequence: Synthetic polynucleotide
atgaagagcttttttctttatctttatgtggcattcatgtttagttgcataacggctttgccattacctgtggataacaaaagggcttcttctgactccttagacttgaagaaaaaatacgcaccagaccctcctattacacataatgtaaacatcggaattgttttcacagatcctgaaagttctgaagaagccggccgtctcataacaatagacttatacgggactatggtgcccaagacagtaatgactttttgccagtatgttgatagtgtaaaagatcgccttgcttcccgtcacagttactctccagaacgcgattttgataaaattttaccgaatggagctatagaaggtagctccgtttcttcctcctctattgaagaaacggaaatgttggctccaaaactcccggaagaaaatcatagtttaattcatgataggccaggcagagtttccatgattaaggacgataagggtcttaagtttataattgagaccagtgagacgccacttgaaggtgaaagtgttgtgtttggccaagttaccgccgggttaaaagatttgatggataaattggctaatgtgaaaactgacgaaaatggcaaaccagagcaaccaataacaataggttacatttcttcccaggaacacaggattcagcatgcaaaggaagctcacgaaaagtatttacaaaggcttcaagattaccaaaacggcgatttggagaaaggtattacattgaagaattatttataccagggtagtcaaagaaagttagaagacgcaaaatataatcagcttcaccatcctttaccaaagattatgcttggtattagtgtattgttacttttctacgttttggccaagtacaggaaaagaatattcaacagatcttctaaaatagtttctattagagaggattga

SEQ ID NO: 9705 - DNA, 1290 bp, Saccharomyces cerevisiae
atgtctgcattgagaaacatcaagttcaatgaagaagaagatggtgaactaccctgcctcgtaacaggtgaagaaaataatctacaagaaattttggaaaatgtctcgtatgatggtggaaatattgttagcgatgcaaaagttgaaagggtaaacaagcaagtggagaacacttctgcaggcgcaacagatgtgcacgagaaaaagcgtattcctgtgagcattattaccggctatctaggatcaggtaaatcgacgttgctggaaaaaattgcattaaaaggtgcagataaaaaaattgccgtaattttaaatgaatttggagattctagtgaaatcgaaaaggctatgaccattaaaaatggatcgaacagctaccaagaatggttggatttgggtaacgggtgtctgtgttgttcgttgaaaaatataggtgttaaagccatcgaagatatggtggagcgttcacctggtaaaatcgattatatccttttagagacctccggtattgcagatcccgcccccattgcgaaaatgttctggcaggacgaaggattgaatagcagcgtttacattgacgggatcatcacggttttggattgtgagcatatactaaaatgcttagatgatatttccatcgatgcccattggcatggtgacaaagttggtttggaggggaatctgactattgcacacttccaactagccatggctgatcgaattataatgaacaaatacgatactatcgaacattcaccagaaatggtcaaacaattaaaagaaagagtacgggaaataaattctatcgcaccgatgttcttcaccaagtatagtgatacgccgattcaaaatttactagatattcatgcatacgacagtgtacggatatctgacatcttagatagtggtagcggaaacggtaccattcatgatgatcgaatgggcacaataatgcttactttcagaccattaaaaaacgaggaagaatataataataagtttattaagcaatttttgcaacctttattgtggaagaattttggagccatgacagtgctgggagggcgtcgccgagatgacggccgtgattgggaagtacaaagaactaaaggtctgatacttattgaaggagagaaccccattgctcgtgtaatccaaggcgtccgcgacacctacgatgtctttccaggcaaatatgacggatccaataaagagtgtaaaattgtgctgattgggaagtacctagaaaaggaatccatagaggaactgttacgtaaaaccctggaatga

SEQ ID NO: 9706 - DNA, 1290 bp, Artificial Sequence
  Description of Artificial Sequence: Synthetic polynucleotide
atgtctgcattgagaaacatcaagttcaatgaagaagaagatggtgaattgccctgcctcgtaacaggtgaagaaaataatttacaagaaattttggaaaatgtctcttatgatggtggaaatattgttagcgatgcaaaagttgaaagggtaaacaagcaagtggagaacacttctgcaggcgcaacagatgtgcacgagaaaaagcgtattcctgtgagcattattaccggctatttgggatctggtaaatctacgttgttggaaaaaattgcattaaaaggtgcagataaaaaaattgccgtaattttaaatgaatttggagattctagtgaaatcgaaaaggctatgaccattaaaaatggaagtaacagctaccaagaatggttggatttgggtaacgggtgtttatgttgttctttgaaaaatataggtgttaaagccatcgaagatatggtggagcgtagtcctggtaaaatcgattatatccttttagagacctccggtattgcagatcccgcccccattgcgaaaatgttctggcaggacgaaggattgaatagcagcgtttacattgacgggatcatcacggttttggattgtgagcatatattgaaatgcttagatgatatttccatcgatgcccattggcatggtgacaaagttggtttggaggggaatttaactattgcacacttccaattggccatggctgatagaattataatgaacaaatacgatactatcgaacattctccagaaatggtcaaacaattaaaagaaagagtaagagaaataaattctatcgcaccgatgttcttcaccaagtatagtgatacgccgattcaaaatttattagatattcatgcatacgacagtgtaagaatatctgacatcttagatagtggtagcggaaacggtaccattcatgatgatagaatgggcacaataatgcttactttcagaccattaaaaaacgaggaagaatataataataagtttattaagcaatttttgcaacctttattgtggaagaattttggagccatgacagtgttgggagggcgtcgcagagatgacggccgtgattgggaagtacaaagaactaaaggtttgatacttattgaaggagagaaccccattgctcgtgtaatccaaggcgtccgcgacacctacgatgtctttccaggcaaatatgacggatccaataaagagtgtaaaattgtgttgattgggaagtacttggaaaaggaatccatagaggaattattacgtaaaaccttagaatga

SEQ ID NO: 9707 - DNA, 1656 bp, Saccharomyces cerevisiae
atgcgttggtctgtccttgatacagtgctattgaccgtgatttcctttcatctaatccaagctccattcaccaaggtggaagagagttttaatattcaagccattcatgatattttaacctacagcgtatttgatatctcccaatatgaccacttgaaatttcctggagtagtccctagaacattcgttggtgctgtgattattgcaatgctttcgagaccttatctttacttgagttctttgatccaaacttccaggcctacgtctatagatgttcaattggtcgttagggggattgttggcctcaccaatgggctttcttttatctatttaaagaattgtttgcaagatatgtttgatgaaatcactgaaaagaaaaaggaagaaaatgaagacaaggatatatacatttacgatagcgctggtacatggtttcttttatttttaattggcagtttccacctcatgttctacagcactaggactctgcctaattttgtcatgactctgcctctaaccaacgtcgcattggggtgggttttattgggtcgttataatgcagctatattcctatctgcgctcgtggcaattgtatttagactggaagtgtcagctctcagtgctggtattgctctatttagcgtcatcttcaagaagatttctttattcgatgctatcaaattcggtatctttggcttgggacttggttccgccatcagtatcaccgttgattcatatttctggcaagaatggtgtctacctgaggtagatggtttcttgttcaacgtggttgcgggttacgcttccaagtggggtgtggagccagttactgcttatttcacgcattacttgagaatgatgtttatgccaccaactgttttactattgaattacttcggctataaattagcacctgcaaaattaaaaattgtctcactagcatctcttttccacattatcgtcttatcctttcaacctcacaaagaatggagattcatcatctacgctgttccatctatcatgttgctaggtgccacaggagcagcacatctatgggagaatatgaaagtaaaaaagattaccaatgttttatgtttggctatattgcccttatctataatgacctcctttttcatttcaatggcgttcttgtatatatcaagaatgaattatccaggcggcgaggctttaacttcttttaatgacatgattgtggaaaaaaatattacaaacgctacagttcatatcagcatacctccttgcatgacaggtgtcactttatttggtgaattgaactacggtgtgtacggcatcaattacgataagactgaaaatacgactttactgcaggaaatgtggccctcctttgatttcttgatcacccacgagccaaccgcctctcaattgccattcgagaataagactaccaaccattgggagctagttaacacaacaaagatgtttactggatttgacccaacctacattaagaactttgttttccaagagagagtgaatgttttgtctctactcaaacagatcattttcgacaagacccctaccgtttttttgaaagaattgacggccaattcgattgttaaaagcgatgtcttcttcacctataagagaatcaaacaagatgaaaaaactgattga

SEQ ID NO: 9708 - DNA, 1656 bp, Artificial Sequence
  Description of Artificial Sequence: Synthetic polynucleotide
atgcgttggtctgtccttgatacagtgttattgaccgtgatttcctttcatttgatccaagctccattcaccaaggtggaagagagttttaatattcaagccattcatgatattttaacctacagcgtatttgatatctcccaatatgaccacttgaaatttcctggagtagtccctagaacattcgttggtgctgtgattattgcaatgctttctagaccttatctttacttgagttctttgatccaaacttccaggcctacgtctatagatgttcaattggtcgttagggggattgttggcctcaccaatgggctttcttttatctatttaaagaattgtttgcaagatatgtttgatgaaatcactgaaaagaaaaaggaagaaaatgaagacaaggatatatacatttacgatagcgctggtacatggtttcttttatttttaattggcagtttccacctcatgttctacagcactaggactttacctaattttgtcatgactttacctttgaccaacgtcgcattggggtgggttttattgggtcgttataatgcagctatattcttatctgcgctcgtggcaattgtatttagattagaagtgtctgctctcagtgctggtattgctttgtttagcgtcatcttcaagaagatttctttattcgatgctatcaaattcggtatctttggcttgggacttggttccgccatcagtatcaccgttgattcttatttctggcaagaatggtgtttacctgaggtagatggtttcttgttcaacgtggttgcgggttacgcttccaagtggggtgtggagccagttactgcttatttcacgcattacttgagaatgatgtttatgccaccaactgttttattattgaattacttcggctataaattagcacctgcaaaattaaaaattgtctctttggcatctcttttccacattatcgtcttatcctttcaacctcacaaagaatggagattcatcatctacgctgttccatctatcatgttgttgggtgccacaggagcagcacatctttgggagaatatgaaagtaaaaaagattaccaatgttttatgtttggctatattgcccttatctataatgacctcctttttcatttccatggcgttcttgtatatatctagaatgaattatccaggcggcgaggctttaacttcttttaatgacatgattgtggaaaaaaatattacaaacgctacagttcatatcagcatacctccttgcatgacaggtgtcactttatttggtgaattgaactacggtgtgtacggcatcaattacgataagactgaaaatacgactttattgcaggaaatgtggccctcctttgatttcttgatcacccacgagccaaccgcctctcaattgccattcgagaataagactaccaaccattgggagttagttaacacaacaaagatgtttactggatttgacccaacctacattaagaactttgttttccaagagagagtgaatgttttgtctttactcaaacagatcattttcgacaagacccctaccgtttttttgaaagaattgacggccaattctattgttaaaagcgatgtcttcttcacctataagagaatcaaacaagatgaaaaaactgattga

SEQ ID NO: 9709 - DNA, 4740 bp, Saccharomyces cerevisiae
atgtcgcattcagactacttcaattataagccttacggcgattccacggaaaagcccagcagctccaagatgaggcagtcatcttcatcatcttcatctagactaaggtcggaaagtttagggcgaaattccaatactacgcaggctcgagtagcgtcatcgcccatcagcccagggctgcattctacccagtactttagatcaccaaacgctgtttacagccctggagagtctccattaaatacagtacagctattcaatcgtcttccgggtatacctcaaggtcagttttttcatcaaaatgccatttctgggtcctccagctcctcggcaagatctagtagacggccctcgaatattggtcttcctctaccaaaaaatcctcagcagtctctaccgaagttgtctactcaacctgttcctgtacataagaaagttgaggctagtaaaacagagagcgagattattaagaagcccgctcccgtgaatagtaatcaagatccattattgacgaccccaacgttagtgatatcaccagaactggcttcactaaatacaacgaatacatcgattatgtcaacgccacaaaatattacaaaccaaacttcgaacaaacacattcccaccagatcgcaaccaaatgggtcaacaagttcctccactttgcaggatattgtcacgacaaatagctcgcaacggtctgtaggccaccatggtggaagcacaacgagcctccgaacatacaaaaaacaatatgtattaaatgaacagttatatttaagaaaaatgagaaaccgtgctaatgatgattattacactagaggtatagtcgcatcatccaactttgaagatgacgaagaaaattttagtaacaaaggtgaagatgacttagaactagaaatggatgatcttttaaaggtagaaggtgaggataaagataacgacttcaattttggttataattttattacgtcgagcacaaaaaataatgaaaatgttgtttcgatgagcctaaattatctaaagggcaaattggattggttgagggatgtgaacaatgatcaaccgtgtgaaatagaagatgaggagtggcattccatactggggagcgaggatttgctgtcaaaattgttacaaaatcctatggtgaacaaccgatttgaatggcaaacaatgttatctaaggtactgaagggagatattgtgaggaatgaaaaaacgaagattgcaaatcaagggaaaggccctggcttcaatactcagttttcagatgacatttggattgagttgaaggcatggatgaatgggaggaccgtggaagatcagaacaaatctctgaggatttttagggattctactgactccgtatttcaagaaatcatggcctttaaactagaagataatatgagcgctgacgaggctgcagagactatcaaatcactagtagacaaatattatagagtcttaaatctatggcctaacattaaaagaatgcatgctgaaaaacccattactaaaacagaagcattcaggaatcgaatagatactttgaatagttggcttaatttcaaatttaactttgatactaatattgcgtacctgaaaaaatggatagttggcaataaagagctagaaagcactaccgaagtggataacaccaccgtgaatttggatgatccagccgttttcgccactaattgtaaacgctttgcggagcaaattatgaaggaaaaggatattgaactgatatttcaaaaaaaaatattctttccattagcaccatggattttgaaggccaaatttttcttcttgaaataccaaaaaacttggaatgaattgaatctatcttatttggatcaagatctggaatttttattgatgtttccaatgcgtttggtaaaagatataatactaattcgcctatcttacgcgaagaaaatacagaatccaaccttgatgatgatcgatcaaatgatggacgattttagtacatatattaagttggcagtccaaatgaaattcactgttgcttcttactgtaatgactggttttttaaagtgaaaatcgatcccgaatttgatcataccgttgttgaaggattggaatattttttctccattttggaactgagaatattatatagtggcaaaaactcattcaagacttctaaagaacctgatctgttattaaaatattgggaaatgtttagaaacgtcggctattatattgatgatgcaggcgaactgatcgcagcagaatttacgaagttgacacttagattggttcacagattgcacgcttaccttttaaggcagcaaaacactccgccaaaattagagaatgaagctgctgctgaaaaatggctggtgcaaatattcgaaatacttggatccatgaaaagaaaactcaatagattcaccaatattttgacaaaagcatttcaaaattttgtccgctacaagatagaagatcacaactatctgctaaagcaactaaaagaaacaggccactttcttatatacacaggaggttacctagagcaaaatggtacttatttaattggtagcccagagctattaggctgtaaagatgatgatattttaagaatcattaagaattcagacatcggttgtgatttagtgcctaagctagaaattaataacagtctgacaatttataatgctttggatgataattggaactccaactcatcactgggttcagatatctcgaatgatggtaccccattttattatatcaaaaacgatttgaccacccagcctagatcttataacggtaatagagtcaatcgtgaaccggattttgaaaacagcaggagcacggaggaagagttttatgaactggagacaagattgaactctcttggttatgtattggtattgactccgcaagagccattactttgggagggtgagatgtataatctatccgataacaaaacaattaaaccagagggattgaacttgaaagtaattcctaattcaatagatttgatgtgccaaggatccagttatgccttagaataccaatgtgacaggttccaacagatatctggtagctcagtttctttcttggaaaaaaaatcttcctcagaaacggttaaaaacaacttacaaaggataaataaagcatatttcagatgcacgtacagtgttctgaagaactatacaaagattgtgaccacgttcaagaaggtaagtcctgtcaatgatttattgaataatattttcctttttgggagggattttggtctgaactttttgagaattaatgttgccaacaatgaaaaaagatccattataatacttttaatgatgcggttaagtatcggatggctgaagttcttagctgaagactgtgatccgactgatcaaagggtatttaggtggtgtgtcacgtcaatggagttcgcgatgcatatggtaagcggttggaacatactagctcttgatgaatgccaattttcttctttaaaacaaaaaatttcagaatgcatgtcattacttatttctcattttgatataataggcgcacgctccatagaagttgagaaaatcaatcaacaagctagatcaaatcttgatttggaagatgtgtttgacgatgatatgatgctacaagtgaattccgagttccgagtacaaagtataatggaattggaagaaaggataaagcggaatcctcatcaaactggtaaagtaattgatgatagtgacaaaggtaacaagtaccttgtttctttggcatcttccatatcgaacgtttctatgagatggcaaaagaggaactttattggtggcggtacttttggaagggtatattctgctgttgatttggataatggtgagattttagcagtcaaggaaatcaatattcaagatagcaaatcaatgcaaaaaatattccccttaatcaaggaggaaatgagtgtcttagagatattgaaccatccaaatatagtttcatattacggtgttgaagttcatcgtgataaagttaacatctttatggaatattgtgaaggcggttccctagcagctcttttggagcatggtcgtattgaagatgaaatggtcactcaagtctacactttacaattgctagaaggacttgcatatttgcatgaatccggcattgttcaccgtgatgttaaacccgaaaacatcctactagattttaatggtgttattaagtatgttgattttggtgctgctaaaaaaattgctaataatggaactagattggcaagtatgaacaaaatcgaaaacgcagatggtgaacacgaagatgttacccatgtttctgattcaaaggcagtgaaaaataacgaaaatgctctattagacatgatgggaactcctatgtacatggctccagaatccatcactggatctaccaccaaaggcaaacttggggcagacgatgtttggtcgttaggctgcgtggtattagaaatgatcactggtagacggccatgggctaacttagataatgaatgggctatcatgtaccatgttgctgcaggacataccccacaattccctactaaggatgaagtgtcgtctgctggtatgaaatttctggaaagatgtcttattcaaaacccctccaagagagccagtgcggttgagctgttgatggatccttggattgtacaaattagagaaatagcctttggcgacgattcttcctctacagatactgaggaaagagagtag

SEQ ID NO: 9710 - DNA, 4740 bp, Artificial Sequence
  Description of Artificial Sequence: Synthetic polynucleotide
atgtcccattctgactacttcaattataagccttacggcgattccacggaaaagcccagcagctccaagatgaggcagtcttcttcttcttcttcttctagattaaggtctgaaagtttagggagaaattccaatactacgcaggctcgtgtagcgtcttctcccatcagcccagggttgcattctacccagtactttagatctccaaacgctgtttacagccctggagagtctccattaaatacagtacagttattcaatcgtcttccgggtatacctcaaggtcagttttttcatcaaaatgccatttctgggtcctccagctcctctgcaagatctagtagaagaccctccaatattggtcttcctttaccaaaaaatcctcagcagtctttaccgaagttgtctactcaacctgttcctgtacataagaaagttgaggctagtaaaacagagagcgagattattaagaagcccgctcccgtgaatagtaatcaagatccattattgacgaccccaacgttagtgatatctccagaattggcttctttgaatacaacgaatacatccattatgtctacgccacaaaatattacaaaccaaacttctaacaaacacattcccaccagatctcaaccaaatgggtctacaagttcctccactttgcaggatattgtcacgacaaatagctctcaaagatctgtaggccaccatggtggaagcacaacgagcctcaggacatacaaaaaacaatatgtattaaatgaacagttatatttaagaaaaatgagaaaccgtgctaatgatgattattacactagaggtatagtcgcatcttccaactttgaagatgacgaagaaaattttagtaacaaaggtgaagatgacttagaattggaaatggatgatcttttaaaggtagaaggtgaggataaagataacgacttcaattttggttataattttattacgtctagcacaaaaaataatgaaaatgttgtttctatgagcttgaattatttgaagggcaaattggattggttgagggatgtgaacaatgatcaaccgtgtgaaatagaagatgaggagtggcattccatattagggagcgaggatttgttatccaaattgttacaaaatcctatggtgaacaacagatttgaatggcaaacaatgttatctaaggtattgaagggagatattgtgaggaatgaaaaaacgaagattgcaaatcaagggaaaggccctggcttcaatactcagttttctgatgacatttggattgagttgaaggcatggatgaatgggaggaccgtggaagatcagaacaaatctttgaggatttttagggattctactgactccgtatttcaagaaatcatggcctttaaattagaagataatatgagcgctgacgaggctgcagagactatcaaatctttagtagacaaatattatagagtcttaaatttatggcctaacattaaaagaatgcatgctgaaaaacccattactaaaacagaagcattcaggaatagaatagatactttgaatagttggcttaatttcaaatttaactttgatactaatattgcgtacttgaaaaaatggatagttggcaataaagagttagaaagcactaccgaagtggataacaccaccgtgaatttggatgatccagccgttttcgccactaattgtaaacgctttgcggagcaaattatgaaggaaaaggatattgaattgatatttcaaaaaaaaatattctttccattagcaccatggattttgaaggccaaatttttcttcttgaaataccaaaaaacttggaatgaattgaatttatcttatttggatcaagatttggaatttttattgatgtttccaatgcgtttggtaaaagatataatattgattcgcttatcttacgcgaagaaaatacagaatccaaccttgatgatgatcgatcaaatgatggacgattttagtacatatattaagttggcagtccaaatgaaattcactgttgcttcttactgtaatgactggttttttaaagtgaaaatcgatcccgaatttgatcataccgttgttgaaggattggaatattttttctccattttggaattgagaatattatatagtggcaaaaactctttcaagacttctaaagaacctgatttattattaaaatattgggaaatgtttagaaacgtcggctattatattgatgatgcaggcgaattgatcgcagcagaatttacgaagttgacacttagattggttcacagattgcacgcttaccttttaaggcagcaaaacactccgccaaaattagagaatgaagctgctgctgaaaaatggttggtgcaaatattcgaaatacttggatccatgaaaagaaaactcaatagattcaccaatattttgacaaaagcatttcaaaattttgtccgctacaagatagaagatcacaactatttattgaagcaattgaaagaaacaggccactttcttatatacacaggaggttacttggagcaaaatggtacttatttaattggtagcccagagttattaggctgtaaagatgatgatattttaagaatcattaagaatagtgacatcggttgtgatttagtgcctaagttggaaattaataacagtttgacaatttataatgctttggatgataattggaactccaactcttctttgggttctgatatctctaatgatggtaccccattttattatatcaaaaacgatttgaccacccagcctagatcttataacggtaatagagtcaatcgtgaaccggattttgaaaacagcaggagcacggaggaagagttttatgaattagagacaagattgaactctcttggttatgtattggtattgactccgcaagagccattactttgggagggtgagatgtataatttatccgataacaaaacaattaaaccagagggattgaacttgaaagtaattcctaattctatagatttgatgtgccaaggatccagttatgccttagaataccaatgtgacaggttccaacagatatctggtagctctgtttctttcttggaaaaaaaatcttccagtgaaacggttaaaaacaacttacaaaggataaataaagcatatttcagatgcacgtacagtgttttgaagaactatacaaagattgtgaccacgttcaagaaggtaagtcctgtcaatgatttattgaataatattttcctttttgggagggattttggtttgaactttttgagaattaatgttgccaacaatgaaaaaagatccattataatacttttaatgatgagattaagtatcggatggttaaagttcttagctgaagactgtgatccgactgatcaaagggtatttaggtggtgtgtcacgtctatggagttcgcgatgcatatggtaagcggttggaacatattggctcttgatgaatgccaattttcttctttaaaacaaaaaatttctgaatgcatgtctttacttatttctcattttgatataataggcgcacgctccatagaagttgagaaaatcaatcaacaagctagatctaatcttgatttggaagatgtgtttgacgatgatatgatgttacaagtgaattccgagttcagagtacaaagtataatggaattggaagaaaggataaagagaaatcctcatcaaactggtaaagtaattgatgatagtgacaaaggtaacaagtaccttgtttctttggcatcttccataagcaacgtttctatgagatggcaaaagaggaactttattggtggcggtacttttggaagggtatattctgctgttgatttggataatggtgagattttagcagtcaaggaaatcaatattcaagatagcaaatctatgcaaaaaatattccccttaatcaaggaggaaatgagtgtcttagagatattgaaccatccaaatatagtttcttattacggtgttgaagttcatcgtgataaagttaacatctttatggaatattgtgaaggcggttccttggcagctcttttggagcatggtcgtattgaagatgaaatggtcactcaagtctacactttacaattgttggaaggacttgcatatttgcatgaatccggcattgttcaccgtgatgttaaacccgaaaacatcttattagattttaatggtgttattaagtatgttgattttggtgctgctaaaaaaattgctaataatggaactagattggcaagtatgaacaaaatcgaaaacgcagatggtgaacacgaagatgttacccatgtttctgattctaaggcagtgaaaaataacgaaaatgctttattagacatgatgggaactcctatgtacatggctccagaatccatcactggatctaccaccaaaggcaaacttggggcagacgatgtttggtctttaggctgcgtggtattagaaatgatcactggtagaagaccatgggctaacttagataatgaatgggctatcatgtaccatgttgctgcaggacataccccacaattccctactaaggatgaagtgtcttctgctggtatgaaatttttggaaagatgtcttattcaaaacccctccaagagagccagtgcggttgagttattgatggatccttggattgtacaaattagagaaatagcctttggcgacgattcttcctctacagatactgaggaaagagagtga

SEQ ID NO: 9711 - DNA, 1107 bp, Saccharomyces cerevisiae
atggaattggacgaatgtttagaaaggctatacaaggcccagttactacctgaagtgactgtaagggcactctgctttaagctgaaggaaatgctagtgaaggagtcaaacgtgattcacattcagacccctgtcacagtcgtgggggatatgcatggacagtttcacgatatgctggagatcttccaaataggcggccctgttcctgatacgaattatctgttcttgggcgactatgtagacagggggttgtacagtgtggaaacaattatgctattgattgtgcttaagcttcgatatcctagtagaattcatcttttgaggggaaaccacgagtcacgtcaaatcacgcagagctatggtttctacacggagtgcttgaacaagtacggtggcaattcaagagtttggcaatatttgacagatatatttgactatctagtgttatgctgtattatcgacgacgaaattttttgtgttcatggtgggctctcgcccaatgttcaaaccatagatcagatcaagattattgatagatttcgagaaattccacacgatggcgccatggcagacttggtttggtctgatccggaagaaaacaataaccccacgttagatcatccagataactctggacaacatttccaggtgtcacctcgtggagcaggttatactttcggaagaagcgtggtggagaaattcttacgtatgaacgatatgaacagaatatacagagcccatcagttatgtaacgaaggttaccagatatattttgatggattggttactactgtatggtcggcgccaaactattgttatcggtgcggcaataaagcatctattctggagctgtatagtaaagatcaattctacttcaacgttttcgaagaggcacctgaaaataaactgttgaaagagaacagtatgaacgacaatgccttagaagatagcatatctaatccggtagccaacaggaaattgattgcagattatttcgaagacgactctgcctccgcagatggctccacggaccctgaaatgtacatattttcagatgtataccaagccagatctgcttctaacagacatgttgattacttcttgtag

SEQ ID NO: 9712 - DNA, 1107 bp, Artificial Sequence
  Description of Artificial Sequence: Synthetic polynucleotide
atggaattggacgaatgtttagaaaggttgtacaaggcccagttattgcctgaagtgactgtaagggcactctgctttaagttgaaggaaatgttggtgaaggagagcaacgtgattcacattcagacccctgtcacagtcgtgggggatatgcatggacagtttcacgatatgttagagatcttccaaataggcggccctgttcctgatacgaattatcttttcttgggcgactatgtagacagggggttgtacagtgtggaaacaattatgcttttgattgtgcttaagcttcgttatcctagtagaattcatcttttgaggggaaaccacgagtctcgtcaaatcacgcagagctatggtttctacacggagtgcttgaacaagtacggtggcaattctagagtttggcaatatttgacagatatatttgactatttggtgttatgctgtattatcgacgacgaaattttttgtgttcatggtgggctctctcccaatgttcaaaccatagatcagatcaagattattgatagatttagagaaattccacacgatggcgccatggcagacttggtttggtctgatccggaagaaaacaataaccccacgttagatcatccagataactctggacaacatttccaggtgtctcctcgtggagcaggttatactttcggaagaagcgtggtggagaaattcttacgtatgaacgatatgaacagaatatacagagcccatcagttatgtaacgaaggttaccagatatattttgatggattggttactactgtatggtccgcgccaaactattgttatagatgcggcaataaagcatctattttagagttgtatagtaaagatcaattctacttcaacgttttcgaagaggcacctgaaaataaacttttgaaagagaacagtatgaacgacaatgccttagaagatagcatatctaatccggtagccaacaggaaattgattgcagattatttcgaagacgactctgcctccgcagatggctccacggaccctgaaatgtacatattttctgatgtataccaagccagatctgcttctaacagacatgttgattacttcttgtga

SEQ ID NO: 9713 - DNA, 222 bp, Saccharomyces cerevisiae
atgattgaggtagttgtgaatgaccgattaggcaaaaaagtcagagtgaagtgccttgctgaagatagtgtaggtgatttcaaaaaagtattgtccttgcaaattggcacccaaccaaacaaaattgtgttgcagaagggtggaagtgttttaaaagaccatatctctctggaagattatgaggtacatgatcagacaaatttggagctgtattacctgtag

SEQ ID NO: 9714 - DNA, 222 bp, Artificial Sequence
  Description of Artificial Sequence: Synthetic polynucleotide
atgattgaggtagttgtgaatgacagattaggcaaaaaagtcagagtgaagtgccttgctgaagatagtgtaggtgatttcaaaaaagtattgtccttgcaaattggcacccaaccaaacaaaattgtgttgcagaagggtggaagtgttttaaaagaccatatctctttggaagattatgaggtacatgatcagacaaatttggagttgtattacttgtga

SEQ ID NO: 9715 - DNA, 2364 bp, Saccharomyces cerevisiae
atgctgtccgatacaattgacacaaagcaacaacagcaacagcttcatgtcctgttcatagactcttatgattcattcacctacaatgtagtgagactaattgaacaacaaactgatatctcaccgggagtcaacgccgtgcacgtgacgacggtacatagtgatacgttccaatctatggatcagctattgccacttttgccgctttttgatgctatcgttgttggcccaggacctgggaatcccaacaatggtgcacaagatatgggtataatatctgagcttttcgagaatgccaatggaaagttagatgaagttccaatattgggtatatgtcttgggttccaagcaatgtgcttggctcaaggtgctgatgtcagtgagctaaatactatcaagcatgggcaagtgtatgaaatgcatttaaacgatgcagccagagcttgtggccttttttctggttatcccgatacgttcaaatctacgaggtaccattcattgcatgtcaatgccgaaggcattgacacccttttgcccttatgcacaaccgaagatgagaacggtattcttttgatgagtgctcaaacgaaaaataagccatggtttggcgtacagtaccacccggagtcatgttgttcagaattgggggggctgttagtcagtaactttctcaagttgagtttcataaataacgtgaagacaggaaggtgggaaaagaagaaacttaatggagagttttccgatatcctatctcgattggataggactattgatagagaccccatatacaaggtaaaagagaaatatccgaagggcgaggacacaacttacgttaagcagttcgaggtctctgaagacccgaaattgacatttgaaatttgcaacatcatacgagaagaaaaatttgtcatgtcatcttctgtgattagtgaaaatacgggtgaatggtctatcattgctttaccaaactccgcatcccaggtattcactcattatggagctatgaaaaagactacagttcattattggcaagatagtgaaattagttacaccttgttgaaaaagtgtctagatggtcaagattcggatttgcctggctcccttgaggtaatacatgaagataaatcccaattttggatcactttgggtaaatttatggagaataaaataatcgataaccacagagaaataccttttattggaggtcttgttggcattttaggttatgaaataggtcagtacattgcatgcggccgttgcaatgatgatgagaattcccttgttcccgacgccaaactagtttttatcaacaatagtatagtcattaatcacaagcaagggaagctttattgtatttctctggataatacatttccagtggcattagaacaatcattaagggacagttttgttagaaagaagaatattaagcaatccctgtcctggcccaagtatcttccagaggagatagacttcattataactatgcccgataaacttgactacgctaaggcgtttaagaaatgtcaggattatatgcataagggtgattcttatgaaatgtgtctcacaacgcaaaccaaagttgtaccatctgcggtgatagaaccctggaggattttccagaccttggtacaaagaaacccggctccattttcaagtttttttgagtttaaagacattattccccgccaagatgaaacgcctccagttttgtgcttcttaagtacttctccagaaaggtttttgaagtgggatgcagacacatgcgagctacgtcccatcaagggaactgtgaaaaaaggaccgcaaatgaacttggcaaaagccacacgaatcctgaagacaccaaaagaatttggtgagaacttaatgattttggacttaatcagaaatgacctttacgagttggttcctgacgttcgggtggaggagttcatgtccgtgcaagaatatgccaccgtttaccaactcgttagcgtcgtaaaggcacatggattgacctctgccagtaagaagacgagatattcaggcattgatgtccttaaacactcgcttcctccgggatctatgacgggagcccccaagaagattactgtgcaattattgcaggacaagatagaaagcaagctaaacaaacatgtcaatggtggagcacgtggtgtttacagcggtgtcacgggatattggtctgtgaattccaacggagattggtctgttaacattagatgtatgtattcctacaacggcggaaccagctggcaactcggtgcagggggggccataacagtcttaagcacactagatggcgaactagaggaaatgtacaacaagttggagagcaacttacaaattttcatgtag

SEQ ID NO: 9716 - DNA, 2364 bp, Artificial Sequence
  Description of Artificial Sequence: Synthetic polynucleotide
atgctttccgatacaattgacacaaagcaacaacagcaacagcttcatgtccttttcatagactcttatgattctttcacctacaatgtagtgagattgattgaacaacaaactgatatctctccgggagtcaacgccgtgcacgtgacgacggtacatagtgatacgttccaatctatggatcagttattgccacttttgccgctttttgatgctatcgttgttggcccaggacctgggaatcccaacaatggtgcacaagatatgggtataatatctgagcttttcgagaatgccaatggaaagttagatgaagttccaatattgggtatatgtcttgggttccaagcaatgtgcttggctcaaggtgctgatgtcagtgagttgaatactatcaagcatgggcaagtgtatgaaatgcatttaaacgatgcagccagagcttgtggccttttttctggttatcccgatacgttcaaatctacgaggtaccattctttgcatgtcaatgccgaaggcattgacacccttttgcccttatgcacaaccgaagatgagaacggtattcttttgatgagtgctcaaacgaaaaataagccatggtttggcgtacagtaccacccggagagttgttgttctgaattgggggggttattagtcagtaactttctcaagttgagtttcataaataacgtgaagacaggaaggtgggaaaagaagaaacttaatggagagttttccgatatcctttctagattggataggactattgatagagaccccatatacaaggtaaaagagaaatatccgaagggcgaggacacaacttacgttaagcagttcgaggtctctgaagacccgaaattgacatttgaaatttgcaacatcataagagaagaaaaatttgtcatgtcttcttctgtgattagtgaaaatacgggtgaatggtctatcattgctttaccaaactccgcatcccaggtattcactcattatggagctatgaaaaagactacagttcattattggcaagatagtgaaattagttacaccttgttgaaaaagtgtttggatggtcaagattctgatttgcctggctcccttgaggtaatacatgaagataaatcccaattttggatcactttgggtaaatttatggagaataaaataatcgataaccacagagaaataccttttattggaggtcttgttggcattttaggttatgaaataggtcagtacattgcatgcggccgttgcaatgatgatgagaattcccttgttcccgacgccaaattggtttttatcaacaatagtatagtcattaatcacaagcaagggaagctttattgtatttctttagataatacatttccagtggcattagaacaatctttaagggacagttttgttagaaagaagaatattaagcaatccttgtcctggcccaagtatcttccagaggagatagacttcattataactatgcccgataaacttgactacgctaaggcgtttaagaaatgtcaggattatatgcataagggtgattcttatgaaatgtgtctcacaacgcaaaccaaagttgtaccatctgcggtgatagaaccctggaggattttccagaccttggtacaaagaaacccggctccattttctagtttttttgagtttaaagacattattccccgccaagatgaaacgcctccagttttgtgcttcttaagtacttctccagaaaggtttttgaagtgggatgcagacacatgcgagttgcgtcccatcaagggaactgtgaaaaaaggaccgcaaatgaacttggcaaaagccacaagaatcttgaagacaccaaaagaatttggtgagaacttaatgattttggacttaatcagaaatgacctttacgagttggttcctgacgttagagtggaggagttcatgtccgtgcaagaatatgccaccgtttaccaactcgttagcgtcgtaaaggcacatggattgacctctgccagtaagaagacgagatattctggcattgatgtccttaaacactcccttcctccgggatctatgacgggagcccccaagaagattactgtgcaattattgcaggacaagatagaaagcaagttgaacaaacatgtcaatggtggagcacgtggtgtttacagcggtgtcacgggatattggtctgtgaattccaacggagattggtctgttaacattagatgtatgtattcctacaacggcggaaccagctggcaactcggtgcagggggggccataacagtcttaagcacattagatggcgaattagaggaaatgtacaacaagttggagagcaacttacaaattttcatgtga

SEQ ID NO: 9717 - DNA, 966 bp, Saccharomyces cerevisiae
atgacaacaaccgtacctaaagtgtttgcattccatgaatttgcaggagtagctgaggcagttgccgatcatgttattcacgcacaaaactctgcccttaagaagggcaaagtctcaaggtccacacagatgtccggaacgagccttaacggaaatggtaacacagaatccaaaacgatggagagagtaaattctgtaaggagtaatgcctccagccgtggtggtagtgaagacggcgccactaagaaattgaaaaaggagaaagaaaggcgcttcaagattgcgttgtccggtggttcgttaatccaagtgttgcacgaaggattgttgaaaagagacgacgttcaatggggtaaatgggacatttactttgctgatgaaagactagtgccctttagctccagtgaaagcaattacggtcttgctaagagaaaaatattcgatttaatagatacggagaagtacggaactccgaaaatttatcacattgatgagtcattgattaacgaccctcaagagtgtgcagataactatgagaaaattctaattaaaggatttgccggtagagattctgtgaaactaccgatgtttgatctgtttctgcttggctgcgctcctgacggtcacatagcctcgttattccccaattttcaagagaatctacgtgaaaatctggcatgggtcatacctgtagaaaatgcacccagcggaccttcgaataggatttcactgaccatcccagtgatttgtcactctcatagagtcacctttgttgtagagggcgccacaaaggcgcctgtaatcaagacaataatggaaaggcctgaaaagggattgcctagtagtattgtcaatgagggcgccgccggtcgtgtttcatggtttgtagacgacgatgctttgaaagatgtctttgtaattaagaagaagtacaagttttatgatgatgagaatttgactgagtag

SEQ ID NO: 9718 - DNA, 966 bp, Artificial Sequence
  Description of Artificial Sequence: Synthetic polynucleotide
atgacaacaaccgtacctaaagtgtttgcattccatgaatttgcaggagtagctgaggcagttgccgatcatgttattcacgcacaaaactctgcccttaagaagggcaaagtctccaggtccacacagatgtccggaacgagccttaacggaaatggtaacacagaatccaaaacgatggagagagtaaattctgtaaggagtaatgcctccagccgtggtggtagtgaagacggcgccactaagaaattgaaaaaggagaaagaaaggcgcttcaagattgcgttgtccggtggttctttaatccaagtgttgcacgaaggattgttgaaaagagacgacgttcaatggggtaaatgggacatttactttgctgatgaaagattagtgccctttagctccagtgaaagcaattacggtcttgctaagagaaaaatattcgatttaatagatacggagaagtacggaactccgaaaatttatcacattgatgagtctttgattaacgaccctcaagagtgtgcagataactatgagaaaattttaattaaaggatttgccggtagagattctgtgaaattaccgatgtttgatttatttttacttggctgcgctcctgacggtcacatagcctctttattccccaattttcaagagaatttacgtgaaaatttggcatgggtcatacctgtagaaaatgcacccagcggaccttccaataggatttctttaaccatcccagtgatttgtcactctcatagagtcacctttgttgtagagggcgccacaaaggcgcctgtaatcaagacaataatggaaaggcctgaaaagggattgcctagtagtattgtcaatgagggcgccgccggtcgtgtttcctggtttgtagacgacgatgctttgaaagatgtctttgtaattaagaagaagtacaagttttatgatgatgagaatttgactgagtga

SEQ ID NO: 9719 - DNA, 297 bp, Saccharomyces cerevisiae
atgaagtcaagtattccaatcaccgaagtattgccaagagcagtgggttcgctaacattcgatgaaaattacaatttactggatacatcaggtgtcgcaaaagtcatcgaaaagtcaccaatcgcagaaataatcaggaaatcaaatgccgagttaggtaggctgggctactccgtctacgaagatgctcaatatataggtcatgccttcaagaaagctggccattttattgtgtacttcactccaaagaacaagaacagagagggcgttgttcctcctgtaggaataaccaattag

SEQ ID NO: 9720 - DNA, 297 bp, Artificial Sequence
  Description of Artificial Sequence: Synthetic polynucleotide
atgaagagtagtattccaatcaccgaagtattgccaagagcagtgggttctttaacattcgatgaaaattacaatttattagatacatctggtgtcgcaaaagtcatcgaaaagtctccaatcgcagaaataatcaggaaatctaatgccgagttaggtaggttgggctactccgtctacgaagatgctcaatatataggtcatgccttcaagaaagctggccattttattgtgtacttcactccaaagaacaagaacagagagggcgttgttcctcctgtaggaataaccaattga

SEQ ID NO: 9721 - DNA, 1029 bp, Saccharomyces cerevisiae
atgctacacttacaaccacaaaaccttctcatccaaaagacactgaatgaagcgatagaggcacttcgcaagggttcgccgttgaccatggacagaattgtttccgatttcgactataccacctaccacatttcaaacacagcagaagataagtccattctgttgttgagtgttaagaccaaagcttgggtaagtgtctctgagtgccaattggacggttctttgacgttactgaagtttctggccgaccactactcctctttgggtggggtgactatcccaagtgaagtggagcccggctatgactacactcttcagattacgttggccgaattggttcaagaatcgattttacaactgtctgttttgaagaccattatattgagttttcccttcgaattggccatttcgaagtttattgaactaagccagcagcaaccggcacctgtcgaagcagaaattactggcggtgaggttgctgccaatggagacaacactttgttcacaatcaagtatcgtgacgaggagaacatcttcatcaaaccttccaatgacagagttaccataatcttcgagactatttttcaagacgaaacagataaaatttttggcaaggtctttttacaagaattcgtggatgcacgtaagagaaaccgtcaaatccaatccgctccacaagttttatactcacatgaaccaccattggagttgaagagactatatcaaccacctaaagttgcagagcaaagtagaagatttatcacgtttgttcttttcccacgtcatttccagacaaaagagttgcaattccattcaatttgccagttaacattgtttagaaactacttccattatcacataaagtgctctaaagcctacatgcactccagaatgagattcagagtggactcgttcatcaaagtcttaaatagagccaaggtggacgaagatgatgaaaatgatgaattgagtgcagaaggcagacaacaggcaagaagaaccttcaccggtagaaagattgtctactag

SEQ ID NO: 9722 - DNA, 1029 bp, Artificial Sequence
  Description of Artificial Sequence: Synthetic polynucleotide
atgttgcacttacaaccacaaaaccttctcatccaaaagacattaaatgaagcgatagaggcacttcgcaagggttctccgttgaccatggacagaattgtttccgatttcgactataccacctaccacatttccaacacagcagaagataagtccattttattgttgagtgttaagaccaaagcttgggtaagtgtctctgagtgccaattggacggttctttgacgttattgaagtttttggccgaccactactcctctttgggtggggtgactatcccaagtgaagtggagcccggctatgactacactcttcagattacgttggccgaattggttcaagaaagtattttacaattatctgttttgaagaccattatattgagttttcccttcgaattggccatttccaagtttattgaattgagccagcagcaaccggcacctgtcgaagcagaaattactggcggtgaggttgctgccaatggagacaacactttgttcacaatcaagtatcgtgacgaggagaacatcttcatcaaaccttccaatgacagagttaccataatcttcgagactatttttcaagacgaaacagataaaatttttggcaaggtctttttacaagaattcgtggatgcacgtaagagaaaccgtcaaatccaatccgctccacaagttttatactctcatgaaccaccattggagttgaagagattatatcaaccacctaaagttgcagagcaaagtagaagatttatcacgtttgttcttttcccacgtcatttccagacaaaagagttgcaattccattctatttgccagttaacattgtttagaaactacttccattatcacataaagtgctctaaagcctacatgcactccagaatgagattcagagtggactctttcatcaaagtcttaaatagagccaaggtggacgaagatgatgaaaatgatgaattgagtgcagaaggcagacaacaggcaagaagaaccttcaccggtagaaagattgtctactga

SEQ ID NO: 9723 - DNA, 462 bp, Saccharomyces cerevisiae
atgttgtcgaggtttatgtccaacacatggtgtacgcccttgagacaggcgcagagattgttttcctccactacgacaatgcaagcgacattgaatcagattaaaagaggctccgggcctccaagacgcaagaagataagtacagctccacaactggatcagtgtccccagcggaagggtgtcgtattacgtgtaatggttttaaagcccaagaagccgaattctgcgcagagaaaggcgtgcagggtccgtttgactaacgggaacgtggtatctgcatatataccgggtgagggccacgatgctcaagagcattcgattgtatatgtcagaggtgggcgttgtcaggacttgcctggtgtgaagtaccatgttatcagaggtgctggtgacctgagtggtgtggtaaacaggatttcttcgaggtcgaaatatggagccaagaagccaagtaaatcgtga

SEQ ID NO: 9724 - DNA, 462 bp, Artificial Sequence
  Description of Artificial Sequence: Synthetic polynucleotide
atgttgagtaggtttatgtccaacacatggtgtacgcccttgagacaggcgcagagattgttttcctccactacgacaatgcaagcgacattgaatcagattaaaagaggctccgggcctccaagacgcaagaagataagtacagctccacaattggatcagtgtccccagagaaagggtgtcgtattacgtgtaatggttttaaagcccaagaagccgaattctgcgcagagaaaggcgtgcagggtccgtttgactaacgggaacgtggtatctgcatatataccgggtgagggccacgatgctcaagagcattctattgtatatgtcagaggtgggcgttgtcaggacttgcctggtgtgaagtaccatgttatcagaggtgctggtgacttgagtggtgtggtaaacaggatttcttccaggtccaaatatggagccaagaagccaagtaaaagttga

SEQ ID NO: 9725 - DNA, 276 bp, Saccharomyces cerevisiae
atgcaaccggcagctagacttttatcgcggtccgtatggaagggccccaacatcgtgccattacccataagggaggccatgactaagggcactccaataagaacaaacgcaagggccgccaccatccttcctcagttcgtgggactgaaatttcaaatacacaatggtaaggagtacgtacctattgaaatatcagaagatatggtgggccacaaactgggcgagttcgcacctaccaggaagcgtttcagctatactcaaaccaagaacaaatga

SEQ ID NO: 9726 - DNA, 276 bp, Artificial Sequence
  Description of Artificial Sequence: Synthetic polynucleotide
atgcaaccggcagctagacttttatccagatccgtatggaagggccccaacatcgtgccattacccataagggaggccatgactaagggcactccaataagaacaaacgcaagggccgccaccatccttcctcagttcgtgggattgaaatttcaaatacacaatggtaaggagtacgtacctattgaaatatctgaagatatggtgggccacaaattgggcgagttcgcacctaccaggaagcgtttcagctatactcaaaccaagaacaaatga

SEQ ID NO: 9727 - DNA, 1890 bp, Saccharomyces cerevisiae
atgtttgcatcgagatttgaccctagccaattgactgctcctgcagctagcgcaccagaaggaatcgtcggaactactcccccggccattgtgcctttaaagaggcaggctactgaatctgataatgaagaatatggctctcaccaagattctgatgagagttccaactctagttcagaggaagacgaagaccgtatgcaagtagattatggggctagtgaagaggattcgagtgaagtggaagaggaagagagtaagccaagtactcacagcacagtgctatcgagattcaagcaaacagtatcattgcaagaaaggctaggtgcatctgatattgctgagagtaaggaagacgaaggtattgaagacgaggcggcctcaactcaccaactaaaacagattcctcaacctgaattcgtcaaaaacccaatgaatttgaatacaaattcattacagttcaaatctacgggttggttaaatactgagaagatatattatgataattccttgatcaaaccgttctcggattacgcaaatgaattagaagcaaaactactgcagaatatttgcaagaatttctctacaaacacttttcccatccaatcgatcatcctagactccatattaccggtattgaacttcacgttgaacgtatctaagagaaacttcaccagaagaatcggtgatattcttgtaaatgctgctaccggttcaggtaaaactttggcttactccattcctattgttcaaaccctcttcaagagacaaattaacagactgcgttgtataatcatcgtccccacaaaactattgataaaccaagtttatactacgttgacaaagctaactcaagggacgtcgcttattgtgagcattgccaaattagaaaattctttgaaggacgaacacaaaaaattatcaaatttggaaccagatatcttaatcactacacctggtagattagtagatcatctaaatatgaaatcgataaatttgaaaaacctaaagtttttgattatcgatgaggctgatcgtcttttgaaccagtccttccagggctggtgtccaaaactaatgtcccatttgaaaacggataaattagatacacttccagggaacgtgatcaaaatgatcttcagtgcgacattgactaccaacacagaaaagttaaacggcttgaacctttacaaaccaaagttgttcctgaagcaaaccgataaattgtaccagctacctaacaaattgaatgaatttaacatcaacattcccacggcgaaaagtgtttacaagccattgatattgttgtattcaatatgccaatttatggcacattcccccattgctgcaaagattttgattttcgttaaatcaaatgaatcgtctatcagattaagcaagttactacaacttatctgtgaatctcgctcacaatccagcgtattgaaaaaccttcaaaatttggcggtgagtattaattctgtcaattcaaacaactccaaagcagaaaataaaaaaattgttgcgaacttctcgcatcactcggaaagcgcaggcattaccatcttaattactaccgatatcatgtcccgtggtattgatattaacgatatcactcaagtaataaactatgacccaccaatgtcttctcaacaatatgtccatcgtgttggtagaacagcaagagctaacgaacttggttccgcttataacttactagtaggtagaggtgaaagaacgtttttcgatgacttaaacaaagatctagatagagacggtaaatctgtccagccattagaactcgattttaccctattggaatctgattctgaactatatacttcgtctctagaaagtttgaaaaactatcacaataacaccgcacaagcttaa

SEQ ID NO: 9728 - DNA, 1890 bp, Artificial Sequence
  Description of Artificial Sequence: Synthetic polynucleotide
atgtttgcatctagatttgaccctagccaattgactgctcctgcagctagcgcaccagaaggaatcgtcggaactactcccccggccattgtgcctttaaagaggcaggctactgaatctgataatgaagaatatggctctcaccaagattctgatgagagttccaactctagtagtgaggaagacgaagaccgtatgcaagtagattatggggctagtgaagaggattctagtgaagtggaagaggaagagagtaagccaagtactcacagcacagtgttatctagattcaagcaaacagtatctttgcaagaaaggcttggtgcatctgatattgctgagagtaaggaagacgaaggtattgaagacgaggcggcctctactcaccaattgaaacagattcctcaacctgaattcgtcaaaaacccaatgaatttgaatacaaattctttacagttcaaatctacgggttggttaaatactgagaagatatattatgataattccttgatcaaaccgttcagtgattacgcaaatgaattagaagcaaaattattgcagaatatttgcaagaatttctctacaaacacttttcccatccaatccatcatcttggactccatattaccggtattgaacttcacgttgaacgtatctaagagaaacttcaccagaagaatcggtgatattcttgtaaatgctgctaccggttctggtaaaactttggcttactccattcctattgttcaaaccctcttcaagagacaaattaacagattacgttgtataatcatcgtccccacaaaacttttgataaaccaagtttatactacgttgacaaagttgactcaagggacgtcccttattgtgagcattgccaaattagaaaattctttgaaggacgaacacaaaaaattatccaatttggaaccagatatcttaatcactacacctggtagattagtagatcatttgaatatgaaatctataaatttgaaaaacttgaagtttttgattatcgatgaggctgatcgtcttttgaaccagtccttccagggctggtgtccaaaattaatgtcccatttgaaaacggataaattagatacacttccagggaacgtgatcaaaatgatcttcagtgcgacattgactaccaacacagaaaagttaaacggcttgaacctttacaaaccaaagttgttcttgaagcaaaccgataaattgtaccagttgcctaacaaattgaatgaatttaacatcaacattcccacggcgaaaagtgtttacaagccattgatattgttgtattctatatgccaatttatggcacattcccccattgctgcaaagattttgattttcgttaaatctaatgaaagctctatcagattaagcaagttattacaacttatctgtgaatctcgctctcaatccagcgtattgaaaaaccttcaaaatttggcggtgagtattaattctgtcaatagcaacaactccaaagcagaaaataaaaaaattgttgcgaacttctctcatcacagtgaaagcgcaggcattaccatcttaattactaccgatatcatgtcccgtggtattgatattaacgatatcactcaagtaataaactatgacccaccaatgtcttctcaacaatatgtccatcgtgttggtagaacagcaagagctaacgaacttggttccgcttataacttattggtaggtagaggtgaaagaacgtttttcgatgacttaaacaaagatttggatagagacggtaaatctgtccagccattagaactcgattttacccttttggaatctgattctgaattgtatacttcttctttggaaagtttgaaaaactatcacaataacaccgcacaagcttga

SEQ ID NO: 9729 - DNA, 1818 bp, Saccharomyces cerevisiae
atggagacgccgcaaatgaacgctatacaagaggaggacaatttgtctccggaagttgctttccagactcctaaattgaatgattccgatgcttcatcgttttctttgtccaatatgaacgctgtcgggaatgtagacggtataccatcccaaaacaggacattttttgcatcacctaggcccagttccctattttattctgccaaggaaggtaacaattccagttctagtatcatctacaatccttcgttcacttttggtgaaaacgcttctagtaatgctaatatcaatgaagctgctttgatgaagggaaaaggcaacgaaggacgaaggcaatcactcaaatatataccagcaccaaagctggtgccgcctcctcccagaacaagatcaccggtaagaggcatttcccccgatgctggcagcagtaagaggtcttctatgaccttggattctccctttaattttacgacatcaacgctgcaaccgcatcaacagacaccaccctcttcagctgcatcaaggacctcatttcgtaaggggcatcgttataagcattcctctgtatccatgaatttttttcaagagcctgaggtgaaaattcctttgaacattgccaaatctcttcccattccagatttcaatgatttgctgtcaaatttgccatggccaaaggcttatattcagttatctattgccgctctacaaatctttgcatgtctgattactttccaagtcggacacctgtactcatggagtaattttattacactatcgcattttattacttacgatatcatcggttcgctggtaatcatatttgtggaaaatttgtctcagttccaggtatggtttacaggcactatcacatttccattcgggttaaatagaatagacgttctactaagttttgcgcttgccgtttcgttatgctttgttgggctggaccttttattccatataattgaagaattcatagtcctctttgtagaatctggtagttctttgacgaataaccatgatcacgatgaaattaatgagcaaattcctcattcccacattgccaatgccaatgattcacaaaacgagaatattaccttatggtatagcatactaatgatcaatttagtgttatcgacgttatcactttataagacgttttatgctaacaaatacagtaatttaaagacgaagaacccgattattaccatcacttatacagcatacctattcatttatcccctactattggatctgttatcgagtatatccgattaccttgctactttggttatttcgagtttaattctatggcatgggctgactatagcacggtggacctcgacagtgttactaatgggattttccaccacatctttatccaattcagcgttattcaataataatgacagcactgatacgaccgcccatactcaacaagtcgagtctaaagctgctaaagaaaaaccatctgtacgaccaagatcaatgagctcactacctatagcaacaaagaatacaaagatacggaaaactgggtttttgaattctgcaggtttcactgaaaatccaacaaccattaagaacatgatcaaggaccaaatcgagagattaagtgagtttaaatccagatacatcctaaattacgatgatatagtaataagcaaagtgaattttacgctttatgtggtactgatcaagataacaatgaaaggaggctccgacgatgacgaattgatgttaaggttagccattgacaagtgcattcaaacgagcattccaacgtgtgaaactacaatagacatagaccgaatataa

SEQ ID NO: 9730 - DNA, 1818 bp, Artificial Sequence
  Description of Artificial Sequence: Synthetic polynucleotide
atggagacgccgcaaatgaacgctatacaagaggaggacaatttgtctccggaagttgctttccagactcctaaattgaatgattccgatgcttcttctttttctttgtccaatatgaacgctgtcgggaatgtagacggtataccatcccaaaacaggacattttttgcatctcctaggcccagttccttattttattctgccaaggaaggtaacaattccagttctagtatcatctacaatccttctttcacttttggtgaaaacgcttctagtaatgctaatatcaatgaagctgctttgatgaagggaaaaggcaacgaaggaagaaggcaatctctcaaatatataccagcaccaaagttagtgccgcctcctcccagaacaagatctccggtaagaggcatttcccccgatgctggcagcagtaagaggtcttctatgaccttggattctccctttaattttacgacaagtacgttacaaccgcatcaacagacaccaccctcttctgctgcaagcaggacctcttttcgtaaggggcatcgttataagcattcctctgtatccatgaatttttttcaagagcctgaggtgaaaattcctttgaacattgccaaatctcttcccattccagatttcaatgatttgttatccaatttgccatggccaaaggcttatattcagttatctattgccgctttacaaatctttgcatgtttaattactttccaagtcggacacttgtactcttggagtaattttattacattatctcattttattacttacgatatcatcggttctttagtaatcatatttgtggaaaatttgtctcagttccaggtatggtttacaggcactatcacatttccattcgggttaaatagaatagacgttttgttaagttttgcgcttgccgtttctttatgctttgttgggttggaccttttattccatataattgaagaattcatagtcctctttgtagaatctggtagttctttgacgaataaccatgatcacgatgaaattaatgagcaaattcctcattcccacattgccaatgccaatgattctcaaaacgagaatattaccttatggtatagcatattaatgatcaatttagtgttatctacgttatctctttataagacgttttatgctaacaaatacagtaatttaaagacgaagaacccgattattaccatcacttatacagcataccttttcatttatcccttattattggatttattatccagtatatccgattaccttgctactttggttatttccagtttaattttatggcatgggttgactatagcaagatggacctctacagtgttattgatgggattttccaccacatctttatccaattctgcgttattcaataataatgacagcactgatacgaccgcccatactcaacaagtcgagtctaaagctgctaaagaaaaaccatctgtaagaccaagaagtatgagctctttgcctatagcaacaaagaatacaaagataagaaaaactgggtttttgaattctgcaggtttcactgaaaatccaacaaccattaagaacatgatcaaggaccaaatcgagagattaagtgagtttaaatccagatacatcttgaattacgatgatatagtaataagcaaagtgaattttacgctttatgtggtattgatcaagataacaatgaaaggaggctccgacgatgacgaattgatgttaaggttagccattgacaagtgcattcaaacgagcattccaacgtgtgaaactacaatagacatagacaggatatga

SEQ ID NO: 9731 - DNA, 771 bp, Saccharomyces cerevisiae
atgacaaacatggctgccaagaatcagttcaaaggaagcagcttcacactagcgcagctaatcgaagaagtcggacgtaacggaggaaaaaagcctgtgttccagtataaggtaccacggtcgatacgatgggcttcaactgctctagctgtagtgtttctcacatatggcgctgcatacactgatatgtcgtggagaactgctcgagaagtgtacggaaacgctactgaggaagaaaaacacagcccgtggttcaagtgcaaaacttttgggcctgtggctttaggggttttgcctgtgatcctcgctgctgccacgaaacacgtaacgtcaagactagtcacagaaatgaaatatctgccaccgctcaagaatagtacggtgccacggtgtcaattgactcgacgcacttacttgttaggaagaccagtttctatcacgagggagatcaatgaactgtctaaaaataaggccaccaagatcttcacaggagtaggttctcaaggtatggaggataaggccacctttgttttcttcacagtggatgaaaaagcaccctcatttttcaataaattttacattttctcgagatctggtagcgttgtgaagaatgacgccaggatcttggactgctttttcaacagtgtggcagaaaataagctattgaacaggtcaatattaactcagatcctttcacatacgtctgccaagaccctatttcactcggggaattctagatcatccatcaagaatatcgtgaagcccaaatag

SEQ ID NO: 9732 - DNA, 771 bp, Artificial Sequence
  Description of Artificial Sequence: Synthetic polynucleotide
atgacaaacatggctgccaagaatcagttcaaaggaagcagcttcacattagcgcagttaatcgaagaagtcggacgtaacggaggaaaaaagcctgtgttccagtataaggtaccaagaagtataagatgggcttccactgctttggctgtagtgtttctcacatatggcgctgcatacactgatatgtcttggagaactgctagagaagtgtacggaaacgctactgaggaagaaaaacacagcccgtggttcaagtgcaaaacttttgggcctgtggctttaggggttttgcctgtgatcctcgctgctgccacgaaacacgtaacgtccagattggtcacagaaatgaaatatttaccaccgctcaagaatagtacggtgccaagatgtcaattgactcgtcgcacttacttgttaggaagaccagtttctatcacgagggagatcaatgaattatctaaaaataaggccaccaagatcttcacaggagtaggttctcaaggtatggaggataaggccacctttgttttcttcacagtggatgaaaaagcacccagttttttcaataaattttacattttcagtagatctggtagcgttgtgaagaatgacgccaggatcttggactgctttttcaacagtgtggcagaaaataagttgttgaacaggtctatattaactcagatcctttctcatacgtctgccaagaccttatttcactctgggaattctagaagttccatcaagaatatcgtgaagcccaaatga

SEQ ID NO: 9733 - DNA, 1119 bp, Saccharomyces cerevisiae
atgtttatttggcagagaaagagtattttactagggaggtccattctgggcagcggccgagttaccgttgctggaatcattggaagcagcagaaagagatatacgtcttcttcctcctcctcctcctccccttcctcgaaagaatcagcacctgtgtttacgtcgaaagagttggaagttgcaagaaaggaaagattggatggactgggaccgttcgtgtctcggctgcctaagaaatggataccgtatgcggagctgatgaggctagagaaacccgtgggcacgtggctgttatatttgccctgcagttggtctatacttatgggagccatgatgcaaggtgctacattgagcgcaacagctggtatgttgggtattttcggtgtaggtgcattggtaatgagaggtgctggctgcaccatcaacgattttttggatagaaagttggatcaaagagttatcaggtccgtcgagaggcctatcgcctctggtagagtgagcccccgtcgggcgttagtattcttgggggctcaaactcttgttggaatgggcgttctatctttgcttcctgcgcagtgttggtggctaggccttgcatcgttacctattgtgttcacataccctttgtttaagcggtttacgtactatcctcaagctgcattaagtgcatgtttcaattggggagcgttacttgggtttcctgccatgggtgtaatgagctggcctacaatgatacctttgtacctgagcagttacttgtggtgtatgacttacgatactatatacgcacaccaggataaaaagtttgacatcaaggctggaatcaagtctaccgctttggcttggggtccacgcacaaagtctatcatgaaggccatgtccgcgtctcaaatcgcactgttagctgtcgccggcttgaacagtgggttgttatgggggcctgggttcattggtggactaggagtcttcgcttatagactcttcagcatgataaagaaagtggatcttgacaatcctaaaaactgctggaagtattttaatgcaaatatcaacaccggactttactttacgtacgccttggcagtcgactacatcttgagactgtttggattcttgtag

SEQ ID NO: 9734 - DNA, 1119 bp, Artificial Sequence
  Description of Artificial Sequence: Synthetic polynucleotide
atgtttatttggcagagaaagagtattttattagggaggtccattttgggcagcggcagagttaccgttgctggaatcattggaagcagcagaaagagatatacgtcttcttcctcctcctcctcctccccttcctctaaagaaagtgcacctgtgtttacgtccaaagagttggaagttgcaagaaaggaaagattggatggacttggaccgttcgtgtctaggttgcctaagaaatggataccgtatgcggagttgatgaggttagagaaacccgtgggcacgtggttgttatatttgccctgcagttggtctatacttatgggagccatgatgcaaggtgctacattgagcgcaacagctggtatgttgggtattttcggtgtaggtgcattggtaatgagaggtgctggctgcaccatcaacgattttttggatagaaagttggatcaaagagttatcaggtccgtcgagaggcctatcgcctctggtagagtgagcccccgtcgtgcgttagtattcttgggggctcaaactcttgttggaatgggcgttttatctttgcttcctgcgcagtgttggtggttaggccttgcatctttacctattgtgttcacataccctttgtttaagagatttacgtactatcctcaagctgcattaagtgcatgtttcaattggggagcgttacttgggtttcctgccatgggtgtaatgagctggcctacaatgatacctttgtacttgagcagttacttgtggtgtatgacttacgatactatatacgcacaccaggataaaaagtttgacatcaaggctggaatcaagtctaccgctttggcttggggtccacgcacaaagtctatcatgaaggccatgtccgcgtctcaaatcgcattattagctgtcgccggcttgaacagtgggttgttatgggggcctgggttcattggtggacttggagtcttcgcttatagactcttcagcatgataaagaaagtggatcttgacaatcctaaaaactgctggaagtattttaatgcaaatatcaacaccggactttactttacgtacgccttggcagtcgactacatcttgagattatttggattcttgtga

SEQ ID NO: 9735 - DNA, 1191 bp, Saccharomyces cerevisiae
atgaccgtttacacagcatccgttaccgcacccgtcaacatcgcaacccttaagtattgggggaaaagggacacgaagttgaatctgcccaccaattcgtccatatcagtgactttatcgcaagatgacctcagaacgttgacctctgcggctactgcacctgagtttgaacgcgacactttgtggttaaatggagaaccacacagcatcgacaatgaaagaactcaaaattgtctgcgcgacctacgccaattaagaaaggaaatggaatcgaaggacgcctcattgcccacattatctcaatggaaactccacattgtctccgaaaataactttcctacagcagctggtttagcttcctccgctgctggctttgctgcattggtctctgcaattgctaagttataccaattaccacagtcaacttcagaaatatctagaatagcaagaaaggggtctggttcagcttgtagatcgttgtttggcggatacgtggcctgggaaatgggaaaagctgaagatggtcatgattccatggcagtacaaatcgcagacagctctgactggcctcagatgaaagcttgtgtcctagttgtcagcgatattaaaaaggatgtgagttccactcagggtatgcaattgaccgtggcaacctccgaactatttaaagaaagaattgaacatgtcgtaccaaagagatttgaagtcatgcgtaaagccattgttgaaaaagatttcgccacctttgcaaaggaaacaatgatggattccaactctttccatgccacatgtttggactctttccctccaatattctacatgaatgacacttccaagcgtatcatcagttggtgccacaccattaatcagttttacggagaaacaatcgttgcatacacgtttgatgcaggtccaaatgctgtgttgtactacttagctgaaaatgagtcgaaactctttgcatttatctataaattgtttggctctgttcctggatgggacaagaaatttactactgagcagcttgaggctttcaaccatcaatttgaatcatctaactttactgcacgtgaattggatcttgagttgcaaaaggatgttgccagagtgattttaactcaagtcggttcaggcccacaagaaacaaacgaatctttgattgacgcaaagactggtctaccaaaggaataa

SEQ ID NO: 9736 - DNA, 1191 bp, Artificial Sequence
  Description of Artificial Sequence: Synthetic polynucleotide
atgaccgtttacacagcatccgttaccgcacccgtcaacatcgcaacccttaagtattgggggaaaagggacacgaagttgaatttgcccaccaattcttccatatctgtgactttatctcaagatgacctcagaacgttgacctctgcggctactgcacctgagtttgaacgcgacactttgtggttaaatggagaaccacacagcatcgacaatgaaagaactcaaaattgtttacgcgaccttcgccaattaagaaaggaaatggaatccaaggacgcctctttgcccacattatctcaatggaaactccacattgtctccgaaaataactttcctacagcagctggtttagcttcctccgctgctggctttgctgcattggtctctgcaattgctaagttataccaattaccacagtctacttctgaaatatctagaatagcaagaaaggggtctggttctgcttgtagaagtttgtttggcggatacgtggcctgggaaatgggaaaagctgaagatggtcatgattccatggcagtacaaatcgcagacagctctgactggcctcagatgaaagcttgtgtcttggttgtcagcgatattaaaaaggatgtgagttccactcagggtatgcaattgaccgtggcaacctccgaattatttaaagaaagaattgaacatgtcgtaccaaagagatttgaagtcatgcgtaaagccattgttgaaaaagatttcgccacctttgcaaaggaaacaatgatggattccaactctttccatgccacatgtttggactctttccctccaatattctacatgaatgacacttccaagcgtatcatcagttggtgccacaccattaatcagttttacggagaaacaatcgttgcatacacgtttgatgcaggtccaaatgctgtgttgtactacttagctgaaaatgagagtaaactctttgcatttatctataaattgtttggctctgttcctggatgggacaagaaatttactactgagcagcttgaggctttcaaccatcaatttgaaagctctaactttactgcacgtgaattggatcttgagttgcaaaaggatgttgccagagtgattttaactcaagtcggttctggcccacaagaaacaaacgaatctttgattgacgcaaagactggtttgccaaaggaatga

SEQ ID NO: 9737 - DNA, 2178 bp, Saccharomyces cerevisiae
atgacattatctttcgctcattttacctacctgttcacaatattgttgggattaactaatattgccttggcatctgatccagaaacgattctagtgacgataaccaagacaaacgatgcaaatggggttgttacaactacagtttcacccgcgctagtctccacatccactatcgttcaagctggcactacgacattgtatacgacttggtgtccattgacggtatccacttcatctgctgccgaaataagtccttcaatatcgtacgctactaccctatccagatttagtactttgacattatctacagaagtctgctcccatgaggcatgtccttcgtcatcgacgttgccaaccaccaccttatctgtgacttccaagttcacttcatatatttgccctacttgtcacacaaccgctatcagctcattatccgaagtaggaactacaaccgtggtatcatccagcgccattgaaccatcaagtgcctctataatctcacctgtcacctctacactttcgagtacaacatcgtccaatccaactactacctccctaagttcgacatctacatctccaagctctacatctacatctccaagctctacatctacctcatcaagttcgacatctacctcatcaagttcgacatctacctcatcaagttcgacatctacatctccaagttcgacatccacatcttcaagtttgacatccacatcttcaagttctacatctacatcccaaagttctacatctacctcatcaagttcgacatctacatctccaagctctacatctacctcatcaagttcaacatctacatctccaagttctaaatctacttctgcaagctccacttccacttcttcatattcaacatctacatccccaagtttgacttcttcatctccaactttggcttccacttctccaagttcaacatctattagctctacttttactgattcaacttcatcccttggctcctctatagcatcttcatcaacgtctgtgtcattatacagcccatccacacctgtttactccgtcccttcgacttcgtcaaatgttgcaactccttctatgacttcttcaactgttgaaacaactgttagttcacaaagttcgtctgaatatatcaccaaatcctcaatttctactactatcccatcattttccatgtctacatatttcaccactgttagtggagtcactacaatgtatacgacatggtgtccttatagctctgaatctgagactagcacattaaccagtatgcatgaaacggttacaacagacgctacagtctgcactcacgagtcttgcatgccctcgcagacaacaagtttgattacatcttctataaaaatgtccactaaaaacgtcgcaacttctgtaagcacctcaacggttgaatcctcatatgcatgctccacatgtgctgaaacgtcacactcgtattcttccgtgcaaacagcttcatcaagttctgtaacacagcagaccacatccacaaagagttgggtaagttcaatgacaacttcggatgaagatttcaataagcacgctaccggtaagtatcatgtaacatcttcaggtacctcaaccatttcgactagtgtaagtgaagccacgagtacatcaagcattgactcagaatctcaagaacaatcatcacacttattatcgacatcggtcctttcatcctcctccttgtctgctacattatcctctgacagtactattttgctattcagttctgtatcatcactaagtgtcgaacagtcaccagttaccacacttcaaatttcttcaacatcagagattttacaacccacttcttccacagctattgctacaatatctgcctctacatcatcactttccgcaacatctatctctacaccatctacctctgtggaatcgactattgaatcttcatcattgactccgacggtatcttctattttcctctcatcatcatctgctccctcttctctacaaacatctgttaccactacagaagtttccactacttcaatctccatacaataccaaacttcatcaatggtaacaattagccaatatatgggcagtggatcgcaaacgcgtttgccattaggaaagttggtcttcgccatcatggcagttgcttgcaatgtaattttcagttaa

SEQ ID NO: 9738 - DNA, 2178 bp, Artificial Sequence
  Description of Artificial Sequence: Synthetic polynucleotide
atgacattatctttcgctcattttacctaccttttcacaatattgttgggattaactaatattgccttggcatctgatccagaaacgattttggtgacgataaccaagacaaacgatgcaaatggggttgttacaactacagtttctcccgcgttggtctccacatccactatcgttcaagctggcactacgacattgtatacgacttggtgtccattgacggtatccacttcttctgctgccgaaataagtccttccatatcttacgctactaccttatccagatttagtactttgacattatctacagaagtctgctcccatgaggcatgtccttcttcttctacgttgccaaccaccaccttatctgtgacttccaagttcacttcttatatttgccctacttgtcacacaaccgctatcagctctttatccgaagtaggaactacaaccgtggtatcttccagcgccattgaaccatctagtgcctctataatctctcctgtcacctctacactttccagtacaacatcttccaatccaactactacctccttgagttctacatctacatctccaagctctacatctacatctccaagctctacatctacctcttccagttctacatctacctcttccagttctacatctacctcttccagttctacatctacatctccaagttctacatccacatcttccagtttgacatccacatcttccagttctacatctacatcccaaagttctacatctacctcttccagttctacatctacatctccaagctctacatctacctcttccagttctacatctacatctccaagttctaaatctacttctgcaagctccacttccacttcttcttattctacatctacatccccaagtttgacttcttcttctccaactttggcttccacttctccaagttctacatctattagctctacttttactgattctacttcttcccttggctcctctatagcatcttcttctacgtctgtgtctttatacagcccatccacacctgtttactccgtcccttccacttcttccaatgttgcaactccttctatgacttcttctactgttgaaacaactgttagttctcaaagttcttctgaatatatcaccaaatccagtatttctactactatcccatctttttccatgtctacatatttcaccactgttagtggagtcactacaatgtatacgacatggtgtccttatagctctgaatctgagactagcacattaaccagtatgcatgaaacggttacaacagacgctacagtctgcactcacgagtcttgcatgccctctcagacaacaagtttgattacatcttctataaaaatgtccactaaaaacgtcgcaacttctgtaagcacctctacggttgaatccagctatgcatgctccacatgtgctgaaacgagccactcctattcttccgtgcaaacagcttcttccagttctgtaacacagcagaccacatccacaaagagttgggtaagttctatgacaacttctgatgaagatttcaataagcacgctaccggtaagtatcatgtaacatcttctggtacctccaccatttctactagtgtaagtgaagccacgagtacatctagcattgactctgaatctcaagaacaatcttctcacttattatctacatctgtcctttcctcctcctccttgtctgctacattatcctctgacagtactattttgttattcagttctgtatcttctttgagtgtcgaacagtctccagttaccacacttcaaatttcttctacaagtgagattttacaacccacttcttccacagctattgctacaatatctgcctctacatcttctctttccgcaacatctatctctacaccatctacctctgtggaatctactattgaatcttcttctttgactccgacggtatcttctattttcctctcttcttcttctgctccctcttctttacaaacatctgttaccactacagaagtttccactacttctatctccatacaataccaaacttcttctatggtaacaattagccaatatatgggcagtggatctcaaacgcgtttgccattaggaaagttggtcttcgccatcatggcagttgcttgcaatgtaattttcagttga

SEQ ID NO: 9739 - DNA, 1470 bp, Saccharomyces cerevisiae
atgcatttgaaaaaggggaagaggagtattagcacagtatggcgacttttatggaagcgtttttattccgtaaactctaagacgaatatgcatttttctcgaagtaggaagaaaccagtgacaaacttcacaaggacaaacggacttctcctgagctgtaatggtgatacattcccatatctgcgtacactgtggagatacttcaatgcgcctggtaatttgatgtttgtcacaactaatattgtcgcatttatgggcattgttacgtataatacgctggttactatcagcagtgaaagagcattcgaagagcagatgatggcggcacaggtgagcctggcgaaacagagagaagagctcgagactacggccctcagcttgccacgagatattgaattgaggggtgaagaagatgatattaaatgggagcaacctgatgtagcacatgtccgggaagatcccttagtcgaggagcagaacgcaaagttagacacccctataaaacagtatactttaggagatttgattttgaataagagggaaaatgtcactgattatgactcgcagcgtgcgaaggcatctatattccacatgctatatgcttatatgctgtatcgagatgttattcaacccacgaccatgactcaaaataacaacagcgaggaatggcggcgtgaagtcgagcttttgactaagggaaaagaggtacaaggtactcatcgaaggatagacgtgttctacgacctgtggaataaaaatttcgataagatagtgacatcacctgagaaagtgcagaattttcaactgccgaactggtctaaatacccaacgatattgaaattcatctgcacagaacttcacgacaacagtttgaagaccttgggtgagtttaagcaattctatggaaaggtgcgatctaacgaggtaaaaaaactgttgggtctttggctgtacgaccattccttccttttcccccataatatctacgacaacagaaccgaagaagatttttacgatatattaattaatgactccatgcaggataacaggatattccagaaatactcttcaattgtaatgaatccctacaacgaacgtactcaactttttttccctaatgtaaattctccatctgtcaacaagccagtaccgagcatatctctggaaacatacacacgactactcaagggatatatcaacttgcaagaaacaggctgcaaatacgactataatgacaatatattcaaactaatcagcatcctcaaactaaattgtttcctacaacgcaacaagaagaaacacgcagggccaaccgtcagaatcctactgccgagagatgaagaccgctctcaaatacttggtaccatttcgcaggcagagaagagaacctgttatcaaattctaagcaaaaatagggacgtggttgcgctgctgaaacgcatttctgatatccaggcggactcttcttaa

SEQ ID NO: 9740 - DNA, 1470 bp, Artificial Sequence
  Description of Artificial Sequence: Synthetic polynucleotide
atgcatttgaaaaaggggaagaggagtattagcacagtatggagacttttatggaagcgtttttattccgtaaactctaagacgaatatgcatttttctagaagtaggaagaaaccagtgacaaacttcacaaggacaaacggacttctcttgagctgtaatggtgatacattcccatatttacgtacattatggagatacttcaatgcgcctggtaatttgatgtttgtcacaactaatattgtcgcatttatgggcattgttacgtataatacgttagttactatcagcagtgaaagagcattcgaagagcagatgatggcggcacaggtgagcttggcgaaacagagagaagagctcgagactacggccctcagcttgccaagagatattgaattgaggggtgaagaagatgatattaaatgggagcaacctgatgtagcacatgtcagagaagatcccttagtcgaggagcagaacgcaaagttagacacccctataaaacagtatactttaggagatttgattttgaataagagggaaaatgtcactgattatgactctcagcgtgcgaaggcatctatattccacatgctttatgcttatatgctttatagagatgttattcaacccacgaccatgactcaaaataacaacagcgaggaatggagacgtgaagtcgagcttttgactaagggaaaagaggtacaaggtactcatagaaggatagacgtgttctacgacttatggaataaaaatttcgataagatagtgacatctcctgagaaagtgcagaattttcaattgccgaactggtctaaatacccaacgatattgaaattcatctgcacagaacttcacgacaacagtttgaagaccttgggtgagtttaagcaattctatggaaaggtgagatctaacgaggtaaaaaaacttttgggtctttggttatacgaccattccttccttttcccccataatatctacgacaacagaaccgaagaagatttttacgatatattaattaatgactccatgcaggataacaggatattccagaaatactcttccattgtaatgaatccctacaacgaacgtactcaactttttttccctaatgtaaattctccatctgtcaacaagccagtaccgagcatatctttggaaacatacacaaggttactcaagggatatatcaacttgcaagaaacaggctgcaaatacgactataatgacaatatattcaaattaatcagcatcctcaaattgaattgtttcttacaacgcaacaagaagaaacacgcagggccaaccgtcagaatcttattaccgagagatgaagaccgctctcaaatacttggtaccatttctcaggcagagaagagaacctgttatcaaattttgagcaaaaatagggacgtggttgcgttattgaaacgcatttctgatatccaggcggactcttcttga

SEQ ID NO: 9741 - DNA, 408 bp, Saccharomyces cerevisiae
atgaagttcttaaccaccaacttcctaaagtgctccgttaaagcctgtgacaccagcaacgacaacttccccctacagtacgacggcagcaaatgccaattggtacaggatgaatctatcgagttcaatccagaattccttctgaacatagtcgaccgcgtagactggcctgcagtgctcacggttgctgccgaattgggaaacaacgccttacctcctaccaaaccatccttcccatcttcgatccaggagctcaccgatgacgacatggccatccttaatgacttgcatactttactgctacagacgtccattgccgaaggtgaaatgaagtgtaggaactgcggacatatctattacatcaagaacggcattccaaacttgctgttacctccacacctggtataa

SEQ ID NO: 9742 - DNA, 408 bp, Artificial Sequence
  Description of Artificial Sequence: Synthetic polynucleotide
atgaagttcttaaccaccaacttcttgaagtgctccgttaaagcctgtgacaccagcaacgacaacttccccttgcagtacgacggcagcaaatgccaattggtacaggatgaatctatcgagttcaatccagaattccttttgaacatagtcgaccgcgtagactggcctgcagtgctcacggttgctgccgaattgggaaacaacgccttacctcctaccaaaccatccttcccatcttctatccaggagctcaccgatgacgacatggccatccttaatgacttgcatactttattattgcagacgtccattgccgaaggtgaaatgaagtgtaggaactgcggacatatctattacatcaagaacggcattccaaacttgttattacctccacacttggtatga

SEQ ID NO: 9743 - DNA, 2682 bp, Saccharomyces cerevisiae
atggctggacaccatcacgaacatgaacaagagcgcgaccacgagcaagaacacgaacacgattcccttcaacggcctactactggatcagaaaggactagaagtatatccttttcgaagttgcttacgcggtcatggaaaaggaatgcgagttcatcgaacaacatgagtgtgtctagcgtgaatctgtattcggatccagagaactcgagagaatcagatcacaataatagtggctcagagggccagtcttcacgattttctaaattgaaaagtatgttccaatccggcaatagcagcaaaaatgccagtgcccataacagcagccaaagcagtcttgaaggtgactcggcgtcatcttcatctaagttaagatacgttaaaccaatgacttctgttgccaatgcttctccggcatctccaccactttctcccacgatcccggaaacggatgttcttcaaacaccaaagatggtacatatagatcaacatgaacatgagcgtgaacactcgaattgcgggtctccaataatgctttcatcatcctctttcagtcctactgttgccaggactgggacgggtaggagaagatcaccgtctactccgataatgcccagtcagaactcgaataactctagtagcacctctgctatcagaccaaataattatcgtcaccattcaggatctcaggggttttcttccaacaatccattcagagaaagggcaggtacggtacgcagtagtaacccatattttgcataccaaggtctaccaactcatgccatgtcttctcacgacctcgatgaaggattccaaccatatgcaaatggcagcggcattcactttttgtccacccccacctcgaagacaaattctttgacaaacaccaaaaatttaagtaatttatcactaaacgagattaaggaaaatgaagaagtgcaagaattcaataacgaggatttcttctttcacgatattccgaaagatttatcgctcaaagatacgctgaatggctcacccagtagaggtagttccaagagccccacgattactcaaacgttcccttcaatcattgtcggatttgacaatgagtacgaggaagataacaacaatgataaacatgatgaaaaggaagaacaacaaacgacaaccgacaataaaacgagaaatctttcacctaccaaacaaaatggtaaagctacccatccaaggataaaaatacctttaagaagagcagcttcagaaccaaacgggttgcaactcgcatctgccacatcgccgacatcttcttcagcaaggaaaacatcagggtccagtaatataaacgacaaaatcccaggccaatcagtgcctcctccaaactcatttttccctcaagaaccctctccaaagatttctgattttccagaacctaggaggtcccgacgtttgagaactaaatctttcagcaataaatttcaagatatcatggtgggaccacagtcttttgagaaaataagattgctgggccaaggtgatgtaggtaaagttttcttagtaagagagaaaaagacgaatagagtgtatgctttgaaagtcttgagtaaagacgaaatgataaaaagaaataaaatcaaacgtgttctgacagaacaagagattcttgccaccagcaatcatcccttcatcgtcacactataccattcgttccaatctgaagactatttgtatctctgtatggaatactgtatgggcggggagtttttcagagctttacaaacaaggaaaaccaaatgtatatgtgaagacgatgccaggttttatgccagtgaagtgacagcagcactagaatatttacatctgttgggttttatctatagagatttaaaaccagagaatattttgctgcatcaatcaggccatatcatgctttctgacttcgacttgtctattcaggctaaagattccaaggttcctgttgtcaagggttccgctcaatcaacccttgttgataccaaaatatgctcagatgggtttagaaccaattcctttgtcggaactgaagaatatattgcccctgaagtcataagaggtaatggccacaccgctgcggtcgattggtggacgctagggattttgatctatgaaatgttatttggtttcactccattcaaaggcgataacacaaatgaaacttttacgaatattttgaaaaatgaggtcagttttcccaataacaatgaaatctccagaacttgtaaggatttgatcaaaaaattactgacaaaaaatgaatctaaaagactgggttgcaaaatgggcgctgccgacgtgaagaaacacccctttttcaagaaagtccaatggtctttgctgagaaatcaagaaccgcctctgataccagtgttatctgaggatggatatgattttgctaaattatcatctaataagaagagacagactagtcaagacagccataaacatctcgatgagcaagagaaaaatatgtttgaagaacgagttgaatacgacgatgaagtctctgaagatgatccattccatgacttcaattcaatgagtttgatggaacaggataacaattcaatgatttatggtaataccaattcttatgggaaaattgcatacactccaaactccaacagatcgaggagtaatagtcatcgaaccttttttaagagataa

SEQ ID NO: 9744 - DNA, 2682 bp, Artificial Sequence
  Description of Artificial Sequence: Synthetic polynucleotide
atggctggacaccatcacgaacatgaacaagagcgcgaccacgagcaagaacacgaacacgattcccttcaaagacctactactggatctgaaaggactagaagtatatccttttccaagttgcttacgagaagttggaaaaggaatgcgagttcttccaacaacatgagtgtgtctagcgtgaatttatattctgatccagagaactctagagaaagtgatcacaataatagtggcagtgagggccagtcttctagattttctaaattgaaaagtatgttccaatccggcaatagcagcaaaaatgccagtgcccataacagcagccaaagcagtcttgaaggtgactctgcgtcttcttcttctaagttaagatacgttaaaccaatgacttctgttgccaatgcttctccggcatctccaccactttctcccacgatcccggaaacggatgttcttcaaacaccaaagatggtacatatagatcaacatgaacatgagcgtgaacactctaattgcgggtctccaataatgctttcttcttcctctttcagtcctactgttgccaggactgggacgggtaggagaagatctccgtctactccgataatgcccagtcagaacagtaataactctagtagcacctctgctatcagaccaaataattatcgtcaccattctggatctcaggggttttcttccaacaatccattcagagaaagggcaggtacggtacgcagtagtaacccatattttgcataccaaggtttgccaactcatgccatgtcttctcacgacctcgatgaaggattccaaccatatgcaaatggcagcggcattcactttttgtccacccccacctccaagacaaattctttgacaaacaccaaaaatttaagtaatttaagtttgaacgagattaaggaaaatgaagaagtgcaagaattcaataacgaggatttcttctttcacgatattccgaaagatttatctctcaaagatacgttgaatggctcccccagtagaggtagttccaagagccccacgattactcaaacgttcccttccatcattgtcggatttgacaatgagtacgaggaagataacaacaatgataaacatgatgaaaaggaagaacaacaaacgacaaccgacaataaaacgagaaatctttctcctaccaaacaaaatggtaaagctacccatccaaggataaaaatacctttaagaagagcagcttctgaaccaaacgggttgcaactcgcatctgccacatctccgacatcttcttctgcaaggaaaacatctgggtccagtaatataaacgacaaaatcccaggccaatctgtgcctcctccaaactcttttttccctcaagaaccctctccaaagatttctgattttccagaacctaggaggtcccgtcgtttgagaactaaatctttcagcaataaatttcaagatatcatggtgggaccacagtcttttgagaaaataagattgttgggccaaggtgatgtaggtaaagttttcttagtaagagagaaaaagacgaatagagtgtatgctttgaaagtcttgagtaaagacgaaatgataaaaagaaataaaatcaaacgtgttttgacagaacaagagattcttgccaccagcaatcatcccttcatcgtcacattgtaccattctttccaatctgaagactatttgtatctctgtatggaatactgtatgggcggggagtttttcagagctttacaaacaaggaaaaccaaatgtatatgtgaagacgatgccaggttttatgccagtgaagtgacagcagcattggaatatttacatcttttgggttttatctatagagatttaaaaccagagaatattttgttgcatcaaagtggccatatcatgctttctgacttcgacttgtctattcaggctaaagattccaaggttcctgttgtcaagggttccgctcaatccacccttgttgataccaaaatatgctctgatgggtttagaaccaattcctttgtcggaactgaagaatatattgcccctgaagtcataagaggtaatggccacaccgctgcggtcgattggtggacgttggggattttgatctatgaaatgttatttggtttcactccattcaaaggcgataacacaaatgaaacttttacgaatattttgaaaaatgaggtcagttttcccaataacaatgaaatctccagaacttgtaaggatttgatcaaaaaattattaacaaaaaatgaatctaaaagattaggttgcaaaatgggcgctgccgacgtgaagaaacacccctttttcaagaaagtccaatggtctttgttaagaaatcaagaaccgcctttgataccagtgttatctgaggatggatatgattttgctaaattatcttctaataagaagagacagactagtcaagacagccataaacatctcgatgagcaagagaaaaatatgtttgaagaaagagttgaatacgacgatgaagtctctgaagatgatccattccatgacttcaattctatgagtttgatggaacaggataacaattctatgatttatggtaataccaattcttatgggaaaattgcatacactccaaactccaacagaagtaggagtaatagtcatagaaccttttttaagagatga

SEQ ID NO: 9745 - DNA, 1182 bp, Saccharomyces cerevisiae
atgggactgatattaaggtggaaagagaaaaaacagttgtctagtaagcaaaatgctcaaaaatccaggaaaccggcaaacacatcgtttagacaacagcgcctcaaagcctggcagcccatcttgtcgccacagagcgtactgccgttgcttattttgatggcatgcgtcttcgcacccattggtatagggctggtggtcagcacgataagtgtccaaagactagtggtaaactacacagaatgtgatgcattggcaccggcgaagcattttgaaacgattccctccgagtacgtggactaccacttcagtaagaaagtcgcagtccaacctcaatggatggtacttacggatcctgaattaggcaatcaaacttgtcgaatacagttcgaagttccaaatcatatcaagaaatctacttatgtttattaccgcctaacaaatttcaatcaaaactatagagaatatgtgcaatctcttgacctagaccaattaaaaggaaaagcattgatcggaaatgatctggatccaaactgtgaccctttaaggacggtagaaaataagaccatattcccctgtggattgatagcaaattcgatgttcaatgatacattcggcacaacacttactggtgtaaacgatactgcagattatttgcttaccacaaaaggtattgcgtgggacaccgacagccacagatatggaaagaccgaatacaatgcatccgatatcgtaccgcccccaaattgggccaagttatttcccaatggctacactgacgataacattccagacctacaaaactgggaacagttcaaaatatggatgagaactgctgcattgcccaacttctataagctagcaatgaaaaatgagaccaatgggttaggtaagggtatttacattgctgatatagaactcaactacccagtaagatctttctatggaacaaaatcttttgtattaaccacaaacagtattatcggtgctggaaacgaggcattagggattgtttatttgattgttgccgggattgcaactcttttcgccatactattcctgataaaagtcatcttcaaaccaagacctatgcatgatcatagctacctaaattttgagaacagcgataccccattcgatgagagtagtgtcgttagtattccattgagagaaattttatga

SEQ ID NO: 9746 - DNA, 1182 bp, Artificial Sequence
  Description of Artificial Sequence: Synthetic polynucleotide
atgggattgatattaaggtggaaagagaaaaaacagttgtctagtaagcaaaatgctcaaaaatccaggaaaccggcaaacacatcttttagacaacagcgcctcaaagcctggcagcccatcttgtctccacagagcgtattaccgttgcttattttgatggcatgcgtcttcgcacccattggtatagggttagtggtcagcacgataagtgtccaaagattagtggtaaactacacagaatgtgatgcattggcaccggcgaagcattttgaaacgattccctccgagtacgtggactaccacttcagtaagaaagtcgcagtccaacctcaatggatggtacttacggatcctgaattaggcaatcaaacttgtaggatacagttcgaagttccaaatcatatcaagaaatctacttatgtttattaccgcctcacaaatttcaatcaaaactatagagaatatgtgcaatctcttgacttggaccaattaaaaggaaaagcattgatcggaaatgatttggatccaaactgtgaccctttaaggacggtagaaaataagaccatattcccctgtggattgatagcaaattctatgttcaatgatacattcggcacaacacttactggtgtaaacgatactgcagattatttgcttaccacaaaaggtattgcgtgggacaccgacagccacagatatggaaagaccgaatacaatgcatccgatatcgtaccgcccccaaattgggccaagttatttcccaatggctacactgacgataacattccagacttgcaaaactgggaacagttcaaaatatggatgagaactgctgcattgcccaacttctataagttagcaatgaaaaatgagaccaatgggttaggtaagggtatttacattgctgatatagaactcaactacccagtaagatctttctatggaacaaaatcttttgtattaaccacaaacagtattatcggtgctggaaacgaggcattagggattgtttatttgattgttgccgggattgcaactcttttcgccatattattcttgataaaagtcatcttcaaaccaagacctatgcatgatcatagctacttgaattttgagaacagcgataccccattcgatgagagtagtgtcgttagtattccattgagagaaattttatga

SEQ ID NO: 9747 - DNA, 633 bp, Saccharomyces cerevisiae
atgatgagtcaagtatcgcattcccaagaaggatccgggcgattttggaacaagtttaagtcgtcaaccaaatcgttatctacatcgttggcacatttatccattaaagcagaaaaagatggtgatactgtaaatactacattggtccataaagggcttgtgaaattctatgaaaatcagcatcctttccaggggttcccaggatggttgggggagaaggaagatttaccgaacgaacgtaaaatattagatactcaagtgaagcatgatatgaagaagcaaaactcgcgtcatttctcgccatccttttctaacagaaggaaggcttcttcagaagatcctatgggtacaccttcttcaaacgggaacacaccggagtacacgcctgcgagtaaatcgtttcaagatatatacaataatcatacaagctcctctagcgcgacaccgagaagagcttcatcacggccgactagaccttcagcaggccaagaattcagggcaagtctcggtcgaagtaaaacgtcgaacagtttcaacacctccagcacgccaacgccgccaccagacgcaagtagtggagtaatggcaatgaaggacagactaaagagacgcaataacgattatggattttaa

SEQ ID NO: 9748 - DNA, 633 bp, Artificial Sequence
  Description of Artificial Sequence: Synthetic polynucleotide
atgatgagtcaagtatctcattcccaagaaggatccgggagattttggaacaagtttaagagttctaccaaatctttatctacatctttggcacatttatccattaaagcagaaaaagatggtgatactgtaaatactacattggtccataaagggcttgtgaaattctatgaaaatcagcatcctttccaggggttcccaggatggttgggggagaaggaagatttaccgaacgaacgtaaaatattagatactcaagtgaagcatgatatgaagaagcaaaactctcgtcatttctctccatccttttctaacagaaggaaggcttcttctgaagatcctatgggtacaccttcttccaacgggaacacaccggagtacacgcctgcgagtaaaagttttcaagatatatacaataatcatacaagctcctctagcgcgacaccgagaagagcttcttccagaccgactagaccttctgcaggccaagaattcagggcaagtctcggtagaagtaaaacgtccaacagtttcaacacctccagcacgccaacgccgccaccagacgcaagtagtggagtaatggcaatgaaggacagattaaagagacgcaataacgattatggattttga

SEQ ID NO: 9749 - DNA, 1341 bp, Saccharomyces cerevisiae
atgggaaagaacgttttgttgctaggatctggttttgttgcacaacctgttatcgacacattggctgctaatgatgacatcaatgtcactgtcgcatgtagaacattagccaatgcgcaagcattggccaagccctctggatccaaggctatttcattggatgttaccgatgacagtgccttagacaaagttctggctgataacgatgttgtcatctctttgattccatacaccttccatccaaatgtggtaaagagcgccatcagaacaaagaccgatgtcgtcacttcctcttacatctcacctgccttaagagaattggaaccagaaatcgtaaaggcaggtattacagttatgaacgaaattgggttggatccaggtatcgaccacttgtatgcggtcaagactattgatgaagttcacagagctggtggtaagctaaagtcattcttgtcatactgtggtggtttaccagctcctgaagactctgataatccattaggatacaaattttcatggtcctccagaggtgtgctactggctttaagaaactctgctaaatactggaaagacggaaagattgaaactgtttcttccgaagacttaatggccactgctaagccttacttcatctacccaggttatgcattcgtttgctacccaaatagagactctacccttttcaaggatctttatcatattccagaagccgaaacggtcattagaggtactttgagatatcaaggtttcccagaatttgttaaggctttagttgacatgggtatgttgaaggatgatgctaacgaaatcttcagcaagccaattgcctggaacgaagcactaaaacaatatttaggtgccaagtctacttctaaagaagatttgattgcttccattgactcaaaggctacttggaaagatgatgaagatagagaaagaatcctttccgggtttgcttggttaggcttgttctctgacgcaaagatcacaccaagaggtaatgctttagacactctatgtgcacgtttagaagaactaatgcaatatgaagacaatgaaagagatatggttgtactacaacacaaattcggtattgaatgggctgatggaactaccgaaacaagaacatccactttagttgactatggtaaggttggtggttacagttctatggccgctactgttggttatccagttgccattgcaacgaaattcgtcttagatggtacaatcaagggaccaggcttactagcgccatactcaccagagattaatgatccaatcatgaaagaactaaaggacaagtacggcatctatctaaaggaaaagacagtggcttaa

SEQ ID NO: 9750 - DNA, 1341 bp, Artificial Sequence
  Description of Artificial Sequence: Synthetic polynucleotide
atgggaaagaacgttttgttgttgggatctggttttgttgcacaacctgttatcgacacattggctgctaatgatgacatcaatgtcactgtcgcatgtagaacattagccaatgcgcaagcattggccaagccctctggatccaaggctatttctttggatgttaccgatgacagtgccttagacaaagttttggctgataacgatgttgtcatctctttgattccatacaccttccatccaaatgtggtaaagagcgccatcagaacaaagaccgatgtcgtcacttcctcttacatctctcctgccttaagagaattggaaccagaaatcgtaaaggcaggtattacagttatgaacgaaattgggttggatccaggtatcgaccacttgtatgcggtcaagactattgatgaagttcacagagctggtggtaagttgaagagtttcttgagttactgtggtggtttaccagctcctgaagactctgataatccattaggatacaaattttcttggtcctccagaggtgtgttgttggctttaagaaactctgctaaatactggaaagacggaaagattgaaactgtttcttccgaagacttaatggccactgctaagccttacttcatctacccaggttatgcattcgtttgctacccaaatagagactctacccttttcaaggatctttatcatattccagaagccgaaacggtcattagaggtactttgagatatcaaggtttcccagaatttgttaaggctttagttgacatgggtatgttgaaggatgatgctaacgaaatcttcagcaagccaattgcctggaacgaagcattgaaacaatatttaggtgccaagtctacttctaaagaagatttgattgcttccattgactccaaggctacttggaaagatgatgaagatagagaaagaatcctttccgggtttgcttggttaggcttgttctctgacgcaaagatcacaccaagaggtaatgctttagacactttgtgtgcacgtttagaagaattgatgcaatatgaagacaatgaaagagatatggttgtattacaacacaaattcggtattgaatgggctgatggaactaccgaaacaagaacatccactttagttgactatggtaaggttggtggttacagttctatggccgctactgttggttatccagttgccattgcaacgaaattcgtcttagatggtacaatcaagggaccaggcttattggcgccatactctccagagattaatgatccaatcatgaaagaattgaaggacaagtacggcatctatttgaaggaaaagacagtggcttga

SEQ ID NO: 9751 - DNA, 1548 bp, Saccharomyces cerevisiae
atgggtgttaccgttcaagacatatgttttgcctttttgcaaaactactacgaaagaatgaggaccgacccttccaaattggcatatttttatgcaagtacagccgagttgacgcatactaattatcagtccaagtcaacaaacgaaaaagatgacgttcttccaacggtgaaagttactggacgtgaaaacattaataagtttttttctagaaatgatgccaaagttaggagcttgaaactaaaattagatactatagatttccagtacactgggcacttgcacaaaagcattctgatcatggccacgggtgaaatgttttggacaggaactccggtctataagttttgtcaaacatttatcctgctaccatccagcaatgggtctacgtttgacattaccaatgatataatcagatttatttccaattcattcaagccttatgtcttaacagatgcttctttgtcacaatctaacgaggagaactctgtcagtgcagttgaagaagataaaataaggcatgagtccggagttgaaaaagaaaaagaaaaagaaaaatcaccagaaatatcgaaaccaaaggccaaaaaggaaacggtcaaagacacaactgcgccaactgaatcgtcaactcaggaaaaaccaattgtcgatcatagtcaacctcgggctatacccgtcactaaagagtccaagattcacaccgaaacggtaccatctagtactaagggcaaccacaaacaagatgaggtctctacagaagagttaggaaacgttactaaactaaatgaaaaatctcacaaagccgaaaagaaagctgcaccaatcaagacaaaggaaggctctgttgaggccataaatgctgttaataactcttctttgcccaacggtaaagaagttagtgatgaaaaaccggtacctgggggcgtaaaggaagctgaaactgaaattaaaccaatagagccacaggtttccgacgccaaagaatccggcaataacgcttcaacaccttcatcttctccagagcccgttgcgaatccaccaaagatgacatgggcctcaaagttgatgaatgaaaactccgacagaattagcaaaaataataccacggttgaatacatcagacctgaaacactacccaagaaaccgactgaaagaaaatttgaaatggggaatcggagggacaacgctagtgctaacagcaaaaataagaaaaaaccagtattcagcaccgttaacaaggacggcttttatccaatctacattagaggtacaaatggcttaagagaagaaaaattgagaagtgccttagaaaaagaattcggtaaagttatgaggataacagctgcagacaattttgccgtcgtcgactttgaaactcaaaagagccaaatcgatgctttagagaagaagaaaaagtcaattgatggtattgaagtatgcttagaaagaaaaacagtaaagaagcccacgagcaataatcctcctggcatatttactaatggaacacgttctcatagaaagcaacccctaaaaagaaaggactag

SEQ ID NO: 9752 - DNA, 1548 bp, Artificial Sequence
  Description of Artificial Sequence: Synthetic polynucleotide
atgggtgttaccgttcaagacatatgttttgcctttttgcaaaactactacgaaagaatgaggaccgacccttccaaattggcatatttttatgcaagtacagccgagttgacgcatactaattatcagtccaagagtacaaacgaaaaagatgacgttcttccaacggtgaaagttactggacgtgaaaacattaataagtttttttctagaaatgatgccaaagttaggagcttgaaattgaaattagatactatagatttccagtacactgggcacttgcacaaaagcattttgatcatggccacgggtgaaatgttttggacaggaactccggtctataagttttgtcaaacatttatcttattaccatccagcaatgggtctacgtttgacattaccaatgatataatcagatttatttccaattctttcaagccttatgtcttaacagatgcttctttgtctcaatctaacgaggagaactctgtcagtgcagttgaagaagataaaataaggcatgagtccggagttgaaaaagaaaaagaaaaagaaaaatctccagaaatatccaaaccaaaggccaaaaaggaaacggtcaaagacacaactgcgccaactgaatcttctactcaggaaaaaccaattgtcgatcatagtcaacctagggctatacccgtcactaaagagtccaagattcacaccgaaacggtaccatctagtactaagggcaaccacaaacaagatgaggtctctacagaagagttaggaaacgttactaaattgaatgaaaaatctcacaaagccgaaaagaaagctgcaccaatcaagacaaaggaaggctctgttgaggccataaatgctgttaataactcttctttgcccaacggtaaagaagttagtgatgaaaaaccggtacctgggggcgtaaaggaagctgaaactgaaattaaaccaatagagccacaggtttccgacgccaaagaatccggcaataacgcttctacaccttcttcttctccagagcccgttgcgaatccaccaaagatgacatgggcctccaagttgatgaatgaaaactccgacagaattagcaaaaataataccacggttgaatacatcagacctgaaacattacccaagaaaccgactgaaagaaaatttgaaatggggaatagaagggacaacgctagtgctaacagcaaaaataagaaaaaaccagtattcagcaccgttaacaaggacggcttttatccaatctacattagaggtacaaatggcttaagagaagaaaaattgagaagtgccttagaaaaagaattcggtaaagttatgaggataacagctgcagacaattttgccgtcgtcgactttgaaactcaaaagagccaaatcgatgctttagagaagaagaaaaagtctattgatggtattgaagtatgcttagaaagaaaaacagtaaagaagcccacgagcaataatcctcctggcatatttactaatggaacacgttctcatagaaagcaacccttgaaaagaaaggactga

SEQ ID NO: 9753 - DNA, 1302 bp, Saccharomyces cerevisiae
atgcaatctatgaatgtacaaccgagggtattagctgtaggaggtgagcagtttttctctcagaggcaggcttctgaacaacaccagcagcaaaacatgggacctcaggtgtattcgccaaaggttaatagagcaagaatgtttcctcaagggatgcctgtaaatacaattaatggctctgttaatcaggagatgaacaatgcctatcttttgaagcagaagaacgagccactgttaactcagcaacaacagcaacagcaacaacaacagcagccatttaatataggaacgcctgtttcggtggctagtttgccgcccggactgaacgttctgcagcaacaacaacagcagcaacaacaacagcagcaacagcagcagggagtgggactcaatcgtcccttggcttcccagctacccaagcatttaaccaaccaaagtatgccaccgatctttttaccacccccaaattatcttttcgttcgcgatgtctggaagtccaacctttacagtgaattcgccgttataagacaactggtctcgcagtataatcatgtgtcaatcagtactgagtttgtggggactttggctaggccgatcggcactttcaggtcgaaggtcgattaccactatcagacaatgagggccaacgtagacttcttaaacccaatacaacttggtctttccttgagtgacgccaacggcaataagcctgacaacggtccctcaacgtggcagttcaattttgaatttgacccaaagaaggaaatcatgtccacagaatcgttagaattactcagaaaatcaggtatcaacttcgaaaaacacgaaaatttaggcatcgatgtatttgaattttcgcagcttctaatggactctggtttaatgatggatgattctgttacttggatcacataccatgcggcatatgatctaggtttcctgatcaacattctaatgaatgactccatgcccaacaacaaggaggatttcgagtggtgggtccatcaatacatgcccaatttctacgacttaaacctggtgtataaaataatccaggagttcaagaaccctcaattgcaacaatcttcacaacagcaacagcagcagcaatattcactaaccacacttgccgatgagttagggctaccaagattctctatatttactactacaggcggccagagtctattgatgcttctatccttctgccaattgagcaagctgtctatgcataagttcccaaacggtacggatttcgccaagtaccaaggtgtcatatacggtattgatggggaccaatga

SEQ ID NO: 9754 - DNA, 1302 bp, Artificial Sequence
  Description of Artificial Sequence: Synthetic polynucleotide
atgcaatctatgaatgtacaaccgagggtattagctgtaggaggtgagcagtttttctctcagaggcaggcttctgaacaacaccagcagcaaaacatgggacctcaggtgtattctccaaaggttaatagagcaagaatgtttcctcaagggatgcctgtaaatacaattaatggctctgttaatcaggagatgaacaatgcctatcttttgaagcagaagaacgagccattattaactcagcaacaacagcaacagcaacaacaacagcagccatttaatataggaacgcctgtttctgtggctagtttgccgcccggattgaacgttttacagcaacaacaacagcagcaacaacaacagcagcaacagcagcagggagtgggactcaatcgtcccttggcttcccagttgcccaagcatttaaccaaccaaagtatgccaccgatctttttaccacccccaaattatcttttcgttcgcgatgtctggaagtccaacctttacagtgaattcgccgttataagacaattggtctcccagtataatcatgtgtccatcagtactgagtttgtggggactttggctaggccgatcggcactttcaggtctaaggtcgattaccactatcagacaatgagggccaacgtagacttcttaaacccaatacaacttggtctttccttgagtgacgccaacggcaataagcctgacaacggtcccagtacgtggcagttcaattttgaatttgacccaaagaaggaaatcatgtccacagaatctttagaattactcagaaaatctggtatcaacttcgaaaaacacgaaaatttaggcatcgatgtatttgaattttcccagcttttgatggactctggtttaatgatggatgattctgttacttggatcacataccatgcggcatatgatttaggtttcttgatcaacattttgatgaatgactccatgcccaacaacaaggaggatttcgagtggtgggtccatcaatacatgcccaatttctacgacttaaacttggtgtataaaataatccaggagttcaagaaccctcaattgcaacaatcttctcaacagcaacagcagcagcaatattctttaaccacacttgccgatgagttagggttaccaagattctctatatttactactacaggcggccagagtttattgatgcttctttccttctgccaattgagcaagttatctatgcataagttcccaaacggtacggatttcgccaagtaccaaggtgtcatatacggtattgatggggaccaatga

SEQ ID NO: 9755 - DNA, 1461 bp, Saccharomyces cerevisiae
atgggtactggtaagaaagagaaatctagacgtattcgtgaaggtgacaccaaagatggtaatcttcgtgtgaagggtgaaaatttctacagagactccaagagagtcaaattcctgaatatgtacactagtgggaaggagatcaggaataagaaaggtaatttaattagggccgcttctttccaggactccacaataccggatgcgagggtccaaccagatcgtcgttggttcggtaacacaagagtgatatctcaggacgcactgcagcatttcagaagtgcattgggtgaaacccaaaaagatacatatcaagttcttctgagaagaaataagcttcccatgtcattgttggaagaaaaggacgcagatgaatccccaaaagccagaattttggataccgaaagttatgctgatgcgtttgggcccaaagcccaaagaaagagaccacgtcttgctgcatccaatctagaggacttggtcaaggctacaaatgaagacattaccaagtatgaggaaaagcaagtcttagatgccacattaggactaatggggaaccaggaagacaaagaaaatgggtggacctccgcagcaaaagaagctattttcagtaagggtcaatccaaacgtatttggaacgaattatataaagtcatcgattcgtctgacgtggtaatacatgttctagatgcaagggatccattgggtacccgttgtaagtccgtggaagagtatatgaagaaggaaacaccacacaagcatttaatttatgttcttaataagtgtgatttggtacctacctgggttgcagcagcttgggtcaaacatttgtcaaaggaacgtccaactttggcgtttcacgcatctattaccaactctttcggtaaaggttcgttaattcagttgctacgtcagttctcacagttgcatactgatagaaagcaaatatctgtagggtttatcggctatccaaacactggtaaatcgtccatcattaacacattgagaaagaaaaaggtgtgtcaagttgcaccaatccctggtgaaactaaggtctggcaatatattactcttatgaaaagaatttttttgattgattgtccaggtattgtgccgccttctagtaaagactccgaagaagacattttattcagaggtgttgtcagagtcgaacacgtcacacacccagaacaatatattccaggtgttttaaaacgttgtcaggtaaagcacttggaaagaacttacgagatctcaggatggaaggatgccacggagtttattgaaattctggcaaggaaacaaggtagattactgaagggtggtgagcctgatgagtctggtgtttctaagcaaatattgaatgattttaatagaggtaaaatcccttggttcgtccttccacctgaaaaggaaggggaagaaaaaccaaagaagaaagaagttgagaagacggcatag

SEQ ID NO: 9756 - DNA, 1461 bp, Artificial Sequence
  Description of Artificial Sequence: Synthetic polynucleotide
atgggtactggtaagaaagagaaatctagacgtattcgtgaaggtgacaccaaagatggtaatcttcgtgtgaagggtgaaaatttctacagagactccaagagagtcaaattcttgaatatgtacactagtgggaaggagatcaggaataagaaaggtaatttaattagggccgcttctttccaggactccacaataccggatgcgagggtccaaccagatcgtcgttggttcggtaacacaagagtgatatctcaggacgcattacagcatttcagaagtgcattgggtgaaacccaaaaagatacatatcaagttcttttgagaagaaataagcttcccatgtctttgttggaagaaaaggacgcagatgaatccccaaaagccagaattttggataccgaaagttatgctgatgcgtttgggcccaaagcccaaagaaagagaccacgtcttgctgcatccaatttggaggacttggtcaaggctacaaatgaagacattaccaagtatgaggaaaagcaagtcttagatgccacattaggattaatggggaaccaggaagacaaagaaaatgggtggacctccgcagcaaaagaagctattttcagtaagggtcaatccaaacgtatttggaacgaattatataaagtcatcgattcttctgacgtggtaatacatgttttggatgcaagggatccattgggtacccgttgtaagtccgtggaagagtatatgaagaaggaaacaccacacaagcatttaatttatgttcttaataagtgtgatttggtacctacctgggttgcagcagcttgggtcaaacatttgtccaaggaacgtccaactttggcgtttcacgcatctattaccaactctttcggtaaaggttctttaattcagttgttacgtcagttctctcagttgcatactgatagaaagcaaatatctgtagggtttatcggctatccaaacactggtaaatcttccatcattaacacattgagaaagaaaaaggtgtgtcaagttgcaccaatccctggtgaaactaaggtctggcaatatattactcttatgaaaagaatttttttgattgattgtccaggtattgtgccgccttctagtaaagactccgaagaagacattttattcagaggtgttgtcagagtcgaacacgtcacacacccagaacaatatattccaggtgttttaaaacgttgtcaggtaaagcacttggaaagaacttacgagatcagtggatggaaggatgccacggagtttattgaaattttggcaaggaaacaaggtagattattgaagggtggtgagcctgatgagtctggtgtttctaagcaaatattgaatgattttaatagaggtaaaatcccttggttcgtccttccacctgaaaaggaaggggaagaaaaaccaaagaagaaagaagttgagaagacggcatga

SEQ ID NO: 9757 - DNA, 951 bp, Saccharomyces cerevisiae
atgagtgaaaaagtaaatagtgactttgaagacttttcctcagatgaggaaaccgatcaacataacgtcttaattcagaccaagaaaaaaatttctagtaaggatgatatcttcagtaagaaggtagaagacatcgaaagtgaaaacgagtcagacatagaagaagagcaaaaacaagaagaaaaagaggatgtagaacaaccagataaagagaatggagaaaagctcgatcgagaagtagaagaacaagcttcgtccaccacttcactggatttaaaaacagaaaaactaaggcaactggtaaaatcaaaggccgccaagaagtctaaacacaagactggggtggtatacttctccagtattccaccttacatgaaacctgcaaaaatgagacaaatattaactcgttttggtgaggtagatagactatttctaaagaaagaggacgatcaaaagtacaagcaaagagttaaaggtggaggaaacaagaaaaacaagtatgaagaaggttgggccgagtttattaggaaaagagacgccaaattgtgtgcggagacgttgaacgggaacattattggtggcaagaaaggtactttctaccatgatgatatcctgaacgtgaagtacctcccaggtttcaaatgggcagatttgactgaacagattgcccgcgagaacgatatcagacaggccaagttggagatggaaatctcgcaggccaacaaactgaacgcggaattcattagaaacgtggagcaaagtaagatgatacaaaacattaagaactctaggaagcgcgccggaaaagaaggagagtctgcagattctcaccctcacagggaatttaaacaacgtcgtgtggaaacaagccgtgccaatgctccctctgatatcaagcagcaatcctctgggtccaaagacttgggtaatgttctcaccaatttactataa

SEQ ID NO: 9758 - DNA, 951 bp, Artificial Sequence
  Description of Artificial Sequence: Synthetic polynucleotide
atgagtgaaaaagtaaatagtgactttgaagacttttccagtgatgaggaaaccgatcaacataacgtcttaattcagaccaagaaaaaaatttctagtaaggatgatatcttcagtaagaaggtagaagacatcgaaagtgaaaacgagagtgacatagaagaagagcaaaaacaagaagaaaaagaggatgtagaacaaccagataaagagaatggagaaaagctcgatagagaagtagaagaacaagcttcttccaccacttctttagatttaaaaacagaaaaattgaggcaattggtaaaatccaaggccgccaagaagtctaaacacaagactggggtggtatacttctccagtattccaccttacatgaaacctgcaaaaatgagacaaatattaactcgttttggtgaggtagatagattatttttgaagaaagaggacgatcaaaagtacaagcaaagagttaaaggtggaggaaacaagaaaaacaagtatgaagaaggttgggccgagtttattaggaaaagagacgccaaattgtgtgcggagacgttgaacgggaacattattggtggcaagaaaggtactttctaccatgatgatatcttgaacgtgaagtacctcccaggtttcaaatgggcagatttgactgaacagattgcccgcgagaacgatatcagacaggccaagttggagatggaaatctctcaggccaacaaattgaacgcggaattcattagaaacgtggagcaaagtaagatgatacaaaacattaagaactctaggaagcgcgccggaaaagaaggagagtctgcagattctcaccctcacagggaatttaaacaacgtcgtgtggaaacaagccgtgccaatgctccctctgatatcaagcagcaatcctctgggtccaaagacttgggtaatgttctcaccaatttattatga

SEQ ID NO: 9759 - DNA, 1761 bp, Saccharomyces cerevisiae
atggacaaatataccaacagggatcatccggactatattcctggcacatttaacatctattcttcccaaaatttggaaaatggtattatatacgaatcaaaattgaagaaaacctcctcaggagtcgtcctaatccctcaaccatcatactcgccaaatgatccactgaactggtctagctggaggaaattggctcattttggtctaatggcctttataactgcgtttaccgccgctactagtaacgacgctggtgctgctcaagactcattgaatgagatttatgggatatcctacgattccatgaacacaggggctggtgttcttttcctaggtattggttggtccactttattcttggctccatttgctaacttgtatggcaggaagattacgtacatagtttgcaccacattaggtctctttggtgcgctttggtttgctttggccaaaagaacgagcgacacaatatggtctcagttgtttgtaggtattagtgagtcctgtgctgaagcccaggtgcaactgtccctgagcgacatttttttccagcaccaattgggctccgtattgaccgtgtatatcatgtgcactagtatcggtacgttcttgggcccattgatcgctgggtacatatctgcatttaccaacttccgttgggtcggttgggtcgcagtgatcatatctggtggccttttaataactattatatttggctgcgaagaaacgtacttcgacagaggccagtatatgacccctttgaccagctgtcaatcgggatacgaagacggtaccactttacaaaactctgacaatacggccgtgtcgcgcaggaaacgtcatcttgacgctaaattatcaactcctggagccatgggtgagaaaggtgtagacctttcagagacggctgaattcgaagttaacaatgaagaggaagttaccatacctgagactcgcgaattgattgatggttcaaaagagcatttgaaaccatacccaaaaagagtagcaatattaaccaaagctactaatttgaaaggctacggttttaaacagtatttcaaatatctaaagatcaaccttagaatgttcttattcccgccagtgtggttgtctggtatgttttggggtattcaagacgttttcctgacgttttatttgaccactcaagaaagcgcctactacgaacctccatggaactatagtgattttggtgtcgcaattatgaatgttcccacacttattggagcagtcatcggttgtatctgtgctggcattgttagtgactactttgttctttggatggctcgtcacaatagaggaattttagaggcagaatttagactatacttctctatcgcaactgcaattattgggccagcgggtttgctgatgtttggtatcggtaccgctagacaatggccttggcaagctatatacgtcgggttgggttttgttgggtttgcatggggttgttctggtgatattgcgatggcgtatttaatggattgttaccccgatatggttttggaaggtatggtttgtactgctattattaacaacacgatatcttgcattttcacctttacctgttctgattggctagctgcatctggtactgaaaatacttacattgctttagctgtcatcaactttgggattactgcatttgctttaccaatgtactactatggtaagaggataagactttggactaagagatggtatttgcaatctgtcaatttgagagacggtgtgtaa

SEQ ID NO: 9760 - DNA, 1761 bp, Artificial Sequence
  Description of Artificial Sequence: Synthetic polynucleotide
atggacaaatataccaacagggatcatccggactatattcctggcacatttaacatctattcttcccaaaatttggaaaatggtattatatacgaaagtaaattgaagaaaacctccagtggagtcgtcttgatccctcaaccatcttactctccaaatgatccattgaactggtctagctggaggaaattggctcattttggtttgatggcctttataactgcgtttaccgccgctactagtaacgacgctggtgctgctcaagactctttgaatgagatttatgggatatcctacgattccatgaacacaggggctggtgttcttttcttgggtattggttggtccactttattcttggctccatttgctaacttgtatggcaggaagattacgtacatagtttgcaccacattaggtctctttggtgcgctttggtttgctttggccaaaagaacgagcgacacaatatggtctcagttgtttgtaggtattagtgagtcctgtgctgaagcccaggtgcaattatccttaagcgacatttttttccagcaccaattgggctccgtattgaccgtgtatatcatgtgcactagtatcggtacgttcttgggcccattgatcgctgggtacatatctgcatttaccaacttccgttgggtcggttgggtcgcagtgatcatatctggtggccttttaataactattatatttggctgcgaagaaacgtacttcgacagaggccagtatatgacccctttgaccagctgtcaaagtggatacgaagacggtaccactttacaaaactctgacaatacggccgtgtctcgcaggaaacgtcatcttgacgctaaattatctactcctggagccatgggtgagaaaggtgtagacctttctgagacggctgaattcgaagttaacaatgaagaggaagttaccatacctgagactcgcgaattgattgatggttccaaagagcatttgaaaccatacccaaaaagagtagcaatattaaccaaagctactaatttgaaaggctacggttttaaacagtatttcaaatatttgaagatcaaccttagaatgttcttattcccgccagtgtggttgtctggtatgttttggggtattcaagacgttttcttgacgttttatttgaccactcaagaaagcgcctactacgaacctccatggaactatagtgattttggtgtcgcaattatgaatgttcccacacttattggagcagtcatcggttgtatctgtgctggcattgttagtgactactttgttctttggatggctcgtcacaatagaggaattttagaggcagaatttagattatacttctctatcgcaactgcaattattgggccagcgggtttgttgatgtttggtatcggtaccgctagacaatggccttggcaagctatatacgtcgggttgggttttgttgggtttgcatggggttgttctggtgatattgcgatggcgtatttaatggattgttaccccgatatggttttggaaggtatggtttgtactgctattattaacaacacgatatcttgcattttcacctttacctgttctgattggttggctgcatctggtactgaaaatacttacattgctttagctgtcatcaactttgggattactgcatttgctttaccaatgtactactatggtaagaggataagactttggactaagagatggtatttgcaatctgtcaatttgagagacggtgtgtga

SEQ ID NO: 9761 - DNA, 1686 bp, Saccharomyces cerevisiae
atgaacagagtaggggcagtgttcctatttgtatatgaaagaaatttttttttgtctattgttccagatcgtcacaggacggaaataagaatgtctagttcagaaaggtcagaagtcaagtttgacaagcactttaattggtggtccctattaggtatcgcgttctcattaagttgctcatgggtcggtatctcagcgtcgatggccgttggtattgccagtggagggccactgcttatcatctatgggttgataattgctgcttttttcagtctcatgtgtggtatatctctgggagattttgctgctatcctgccaaacagcagcggtggttcattttgggttcttaaaatgttggaacaagaatcagtcactttgaaaacccctgagtacgaggacccttctgacgatgatgaagaagtgttcctcgagaattattgtcaaactttcaacgtggaagtttcttctaaatttcaaaaggtttcttccatggttgtagggttgctgaactatttcggtgccatttttactaccgcaagtatctgctcatctttgtcaatgagctgtatcggtattcataagttgttgcatccggactacgagttaaagcactggcatgtttttgtgggttacgagtgtatcaatgccgttttgacacttttcaacatttattcaactccgttgccctatatctctcagtttgggctctatacgtctctattgtctttcgccatgactttcattatttgtattgtttcaagatctgacaacaccgtagacccatggcccaaagcttctaatatatttgggagctttgataatcaaacaggctggaattcgtctggaatggcgtttgttgtcggtttggtcaatccgatctgggcatttgttggcattgactctgctacgcacatgattgatgaagtgggttatagtaagtcacgtttcttagttcccaaagttattatcactaccatcattgtgggctttgtaactagttttatttattgcgttggtttgtttttctgcatcactgaccaaacggcagtcgttgagtctattttacctatcgtagaaatattttaccaggccactggtaataggaatctcagtgtcttcctgcaatgtatgtgtatcacaacaggttttgtttcaggcattgcaagtggaacctggcaaagtcgaatcctccaatcattcgggaaaagttacgcaccattttataaagagggttccttgggaaacaaatccttgaagaagctagcagtgttgacacctgggtttaagtctccattatatgcccattttttgtcacaaatatgtgtaacgataattggctgtatatttatgggatctagtaccgctttcaacgcaattatcactgcatgcatcaccctgttactaatgtcgtacgcagttccttcttttatattcctgttcgttattaaaaaggaaaaattcattcatagaatcgagagtgacgtaaattgtgtcagcaggcctaaccgtcgtcgtatgtctatgattcctcatattatatgtattctatggaccttgttctgcctggtatttttatctttcccatatacactaccggttactgcaggaaacatgaattacacctcagtagtgtatgcagtagttttctgcattatcagcatcgttgttttccctacatgcatctaa

SEQ ID NO: 9762 - DNA, 1686 bp, Artificial Sequence
  Description of Artificial Sequence: Synthetic polynucleotide
atgaacagagtaggggcagtgttcttatttgtatatgaaagaaatttttttttgtctattgttccagatcgtcacaggacggaaataagaatgtctagttctgaaaggtctgaagtcaagtttgacaagcactttaattggtggtccttattaggtatcgcgttctctttaagttgctcttgggtcggtatcagtgcgtccatggccgttggtattgccagtggagggccattacttatcatctatgggttgataattgctgcttttttcagtctcatgtgtggtatatctttgggagattttgctgctatcttgccaaacagcagcggtggttctttttgggttcttaaaatgttggaacaagaatctgtcactttgaaaacccctgagtacgaggacccttctgacgatgatgaagaagtgttcctcgagaattattgtcaaactttcaacgtggaagtttcttctaaatttcaaaaggtttcttccatggttgtagggttgttgaactatttcggtgccatttttactaccgcaagtatctgctcttctttgtccatgagctgtatcggtattcataagttgttgcatccggactacgagttaaagcactggcatgtttttgtgggttacgagtgtatcaatgccgttttgacacttttcaacatttattctactccgttgccctatatctctcagtttgggctctatacgtctttgttgtctttcgccatgactttcattatttgtattgtttctagatctgacaacaccgtagacccatggcccaaagcttctaatatatttgggagctttgataatcaaacaggctggaattcttctggaatggcgtttgttgtcggtttggtcaatccgatctgggcatttgttggcattgactctgctacgcacatgattgatgaagtgggttatagtaagtctcgtttcttagttcccaaagttattatcactaccatcattgtgggctttgtaactagttttatttattgcgttggtttgtttttctgcatcactgaccaaacggcagtcgttgagtctattttacctatcgtagaaatattttaccaggccactggtaataggaatctcagtgtcttcttacaatgtatgtgtatcacaacaggttttgtttctggcattgcaagtggaacctggcaaagtagaatcctccaaagtttcgggaaaagttacgcaccattttataaagagggttccttgggaaacaaatccttgaagaagttagcagtgttgacacctgggtttaagtctccattatatgcccattttttgtctcaaatatgtgtaacgataattggctgtatatttatgggatctagtaccgctttcaacgcaattatcactgcatgcatcaccttattattgatgagttacgcagttccttcttttatattccttttcgttattaaaaaggaaaaattcattcatagaatcgagagtgacgtaaattgtgtcagcaggcctaaccgtcgtcgtatgtctatgattcctcatattatatgtattttatggaccttgttctgcttagtatttttatctttcccatatacattgccggttactgcaggaaacatgaattacacctctgtagtgtatgcagtagttttctgcattatcagcatcgttgttttccctacatgcatctga

SEQ ID NO: 9763 - DNA, 714 bp, Saccharomyces cerevisiae
atgaacagcaaatctcaacaacaagaacaacaaccaattgtattcgtcaccggtacagacactgatgttggtaaaacctttgtatcaacattattggtacacaaatggaaagctgcatactggaaacccgtacaaactggaattgagtcagatcaaggtgactccgagacattgaaaaatttcaaaatagccgcatcaacttggcaaccacctatattcacgcccacttatgcgctgcagaagcctctatctccgctccaggccatggagtacgaacctaatgtcgacatcaggttgttggatttcgtagttcctgaagagtggagcgcagagaatccattggtcgtagaaggagccggcggggtttgcgttcctatcactcgtaaattggaaattacgacggatctaattaaacatctgattgagactagcggccatccagtgtacgtagttgtcgtggcacgcagcgggctagggactctgaatcatacattgctgacttggaatcatctttgcgataatggcttgagaagccacctttttggggtcattctcaatggggaaccgaatgaaggcaacgtgcaggccctgaagaagttcggtgtcaatattatggcacaggttgcacaatgtactacggcacatgatcaggatatggagttgcatgaactgccatcggtggagtcattaatgacccaacaagacgtagaatag

SEQ ID NO: 9764 - DNA, 714 bp, Artificial Sequence
  Description of Artificial Sequence: Synthetic polynucleotide
atgaacagcaaatctcaacaacaagaacaacaaccaattgtattcgtcaccggtacagacactgatgttggtaaaacctttgtatctacattattggtacacaaatggaaagctgcatactggaaacccgtacaaactggaattgagtctgatcaaggtgactccgagacattgaaaaatttcaaaatagccgcatctacttggcaaccacctatattcacgcccacttatgcgttgcagaagcctttatctccgctccaggccatggagtacgaacctaatgtcgacatcaggttgttggatttcgtagttcctgaagagtggagcgcagagaatccattggtcgtagaaggagccggcggggtttgcgttcctatcactcgtaaattggaaattacgacggatttgattaaacatttgattgagactagcggccatccagtgtacgtagttgtcgtggcacgcagcgggttagggactttgaatcatacattgttgacttggaatcatctttgcgataatggcttgagaagccacctttttggggtcattctcaatggggaaccgaatgaaggcaacgtgcaggccttgaagaagttcggtgtcaatattatggcacaggttgcacaatgtactacggcacatgatcaggatatggagttgcatgaattaccatctgtggagtctttaatgacccaacaagacgtagaatga

SEQ ID NO: 9765 - DNA, 1443 bp, Saccharomyces cerevisiae
atgtcccaagaaatttcatatacaccagatgtcgcggaactgctagactttgataaaaaacatatttggcatccttatacgtcattgagttcaccattgaacgtttatccggtaaagagtgctcacggatgcaagctggtgttggataccgactcaccagtggacgtcgaggtgatcgacgccatgtcgtcgtggtggtgtgttattcacgggtacaataatccagaactaaatgaggcccttaccaagcagatgttaaagttttctcacgtccttcttggtggattcacccataaaggagctgtgaatctagtccaaaaacttttaaaagtgattgatgaaccctctttgcagtactgtttcctcgcagattctggctcagtagcagtggaagtagctttgaagatggctttacaatcaaacatgtcaggggaagctactaaaaatagaacaaagtttttgacaatcaagaacgggtatcatggtgatacatttggcgctatgagtgtttgtgatcctgagaattctatgcatcatatctacaacgatcgactcagtgagaacatcttcgcccaagctccctctattgtcgatggccttccaaccagccagaacggtttcgaggaccattggaatgcagaagaagttaccgatctcaagaagcaatttgaattgcatagtgataagatctgtgctgtgattttggagcctatcttacagggtgcaggaggtttgcgaccataccatccacagttcttaatcgaagttcagaaactatgtaaccaatacgacgttttattcatcatggacgagattgctacaggatttggtagaacaggtgagattttcgcattcaagcactgtcaaaaataccaggaccaacatggcatcagtccttccgatcagatcaaagttgttcctgacatattgtgcgttgggaagggcttaaccagtggatatatgactatgagtgcagtggtagtcaacgacaaagttgcttccagaatctcttctccaaatagccctactggtggctgcttcatgcatggccccaccttcatgggcaatgccctggcatgcagtgtggcagaaaagtctatggatatactactgcgtggcgagtggagaaaacaagtgtctgcaattgaaaaccaaatttatagagaactataccagtacatcaagaacccagataatgggctcattggaactgttgttaagcgtgtgtcagttattggagctgtaggtatcgtagagctatacaagaagacagatcccgagtggttccagaaaaagtttatatccaagggagtacatatccgacctttcaactgcctgtgttacattatgccaccatatgtgatcacgacagaggaattgacgaaggttaatcaagtcttgattgaagtattacatgagtggaaatcccacataaaccaatga

SEQ ID NO: 9766 - DNA, 1443 bp, Artificial Sequence
  Description of Artificial Sequence: Synthetic polynucleotide
atgtcccaagaaatttcttatacaccagatgtcgcggaattattagactttgataaaaaacatatttggcatccttatacgtctttgagttctccattgaacgtttatccggtaaagagtgctcacggatgcaagttagtgttggataccgactctccagtggacgtcgaggtgatcgacgccatgtcttcttggtggtgtgttattcacgggtacaataatccagaattgaatgaggcccttaccaagcagatgttaaagttttctcacgtccttcttggtggattcacccataaaggagctgtgaatttggtccaaaaacttttaaaagtgattgatgaaccctctttgcagtactgtttcctcgcagattctggctctgtagcagtggaagtagctttgaagatggctttacaaagtaacatgagtggggaagctactaaaaatagaacaaagtttttgacaatcaagaacgggtatcatggtgatacatttggcgctatgagtgtttgtgatcctgagaattctatgcatcatatctacaacgataggctcagtgagaacatcttcgcccaagctccctctattgtcgatggccttccaaccagccagaacggtttcgaggaccattggaatgcagaagaagttaccgatctcaagaagcaatttgaattgcatagtgataagatctgtgctgtgattttggagcctatcttacagggtgcaggaggtttgagaccataccatccacagttcttaatcgaagttcagaaattatgtaaccaatacgacgttttattcatcatggacgagattgctacaggatttggtagaacaggtgagattttcgcattcaagcactgtcaaaaataccaggaccaacatggcatcagtccttccgatcagatcaaagttgttcctgacatattgtgcgttgggaagggcttaaccagtggatatatgactatgagtgcagtggtagtcaacgacaaagttgcttccagaatctcttctccaaatagccctactggtggctgcttcatgcatggccccaccttcatgggcaatgccttggcatgcagtgtggcagaaaagtctatggatatattattacgtggcgagtggagaaaacaagtgtctgcaattgaaaaccaaatttatagagaattataccagtacatcaagaacccagataatgggctcattggaactgttgttaagcgtgtgtctgttattggagctgtaggtatcgtagagttatacaagaagacagatcccgagtggttccagaaaaagtttatatccaagggagtacatatcagacctttcaactgcttgtgttacattatgccaccatatgtgatcacgacagaggaattgacgaaggttaatcaagtcttgattgaagtattacatgagtggaaatcccacataaaccaatga

SEQ ID NO: 9767 - DNA, 1743 bp, Saccharomyces cerevisiae
atggtattgcgcatacgaagaattaagaaactggcaccattgatcttcacatcattgttgtctctcattgttctttttagggtctaccgacagtatccattctccgaccatttcgaaacacgcagagaagatgatcgctctggcaacgtgcactgcttttctagactgcgtcaaatagaggaatatgaaaagccggaattgacaagtaaattctatgaaccgaatagatggaaatcttttatatcttacgtgaccaggagtcgcaaggatgtgaaaactgtgtcccgatcgctatccaatttggatttgtatcaaaaatgctcaaaagaaatccgtgctgatcaggatatttcccttcttcatagcatagaaaccaagttgttcccatatataaacttcacagccctaaatagtgaacaatctcataatttttggcctgttcatacccgatttgatggaacaaagtaccgtggacaggtattacaattttcttctgagaacaattcgttcattggaacttcacccattgaattcaaggctagcgaacctttttgggagaactggttgaattcagctcttcaaaggaattcaaaaggtgtggtaatgagcgtatcggaatatctggtggctgatacaattcgactaataagagttttgcggctgttaaataattcccttccaattgaaatcgttcacaaatcggatttacatgagagttctcaacagctcttgatagcagcagcaagagaatctggatccttaaattatccccctcaggaattgtggtttctggatgtgaaagacatgttaaatgacgaatatttagcgagattcaagagattttcgaataagtggctggcaattaccttttgttcatttcaaataccaatctttttggactctgatactgtaccttttgtcccgttggatacactctatgaaattgacggatttaaaagaacaggtacactgtttttcaaagacaggagttttccaacctccaagttaagtccactccaagttaaagttttgaagcagataatcaataatagtctggatgtatcctcggattcggagcaaggttttgaaatcttaaaacataacctaaacgatgagatggcaattgatgcaatagaggccttgattttcaagaaacaaaaacattacatggacagcggcttagtgatattcgataaacaaaaacactttttctgtctaccaatcgcaataatgctgcaattttcgcctatccaagagtttttccatggtgataaggaatggttttggcttagtttgtttatttccaaaaaagagtttactttttatccaatagaggcttcgaatgtaggaagattagagaagccggagactctagaaagcagtacaatctgttctacccagctatctcacacggacgtgtacggtaatcttttgtggttgaatggcggattatccgtttgcaaaaaaaattgttggaattatgattttacaaagcgtaaagagattgcggccaaatacaaaagcgttgatgaattacggaattactatcaatcacctgtgaaactcgaagctgtcataatacccgatgtcagcaagtccccctggtcgcaacagagcgaatgcgttatgtacagctattgcacacattataggaagggacagtacggaaaattgatagagtttacagattctcaaaagaaatattacgagaaagttgtagaattatggaacaaggttgtatag

SEQ ID NO: 9768 - DNA, 1743 bp, Artificial Sequence
  Description of Artificial Sequence: Synthetic polynucleotide
atggtattgcgcataagaagaattaagaaattggcaccattgatcttcacatctttgttgtctctcattgttctttttagggtctacagacagtatccattctccgaccatttcgaaacacgcagagaagatgatcgctctggcaacgtgcactgcttttctagattacgtcaaatagaggaatatgaaaagccggaattgacaagtaaattctatgaaccgaatagatggaaatcttttatatcttacgtgaccaggagtcgcaaggatgtgaaaactgtgtccagatccttgtccaatttggatttgtatcaaaaatgctccaaagaaatccgtgctgatcaggatatttcccttcttcatagcatagaaaccaagttgttcccatatataaacttcacagccttgaatagtgaacaatctcataatttttggcctgttcataccagatttgatggaacaaagtaccgtggacaggtattacaattttcttctgagaacaattctttcattggaacttctcccattgaattcaaggctagcgaacctttttgggagaactggttgaattctgctcttcaaaggaattctaaaggtgtggtaatgagcgtatctgaatatttggtggctgatacaattagattaataagagttttgagattattaaataattcccttccaattgaaatcgttcacaaatctgatttacatgagagttctcaacagctcttgatagcagcagcaagagaatctggatccttaaattatccccctcaggaattgtggtttttggatgtgaaagacatgttaaatgacgaatatttagcgagattcaagagattttctaataagtggttggcaattaccttttgttcctttcaaataccaatctttttggactctgatactgtaccttttgtcccgttggatacactctatgaaattgacggatttaaaagaacaggtacattatttttcaaagacaggagttttccaacctccaagttaagtccactccaagttaaagttttgaagcagataatcaataatagtttggatgtatccagtgattctgagcaaggttttgaaatcttaaaacataacttgaacgatgagatggcaattgatgcaatagaggccttgattttcaagaaacaaaaacattacatggacagcggcttagtgatattcgataaacaaaaacactttttctgtttgccaatcgcaataatgttacaattttctcctatccaagagtttttccatggtgataaggaatggttttggcttagtttgtttatttccaaaaaagagtttactttttatccaatagaggcttctaatgtaggaagattagagaagccggagactttggaaagcagtacaatctgttctacccagctttctcacacggacgtgtacggtaatcttttgtggttgaatggcggattatccgtttgcaaaaaaaattgttggaattatgattttacaaagcgtaaagagattgcggccaaatacaaaagcgttgatgaattaagaaattactatcaaagtcctgtgaaactcgaagctgtcataatacccgatgtcagcaagtccccctggtctcaacagagcgaatgcgttatgtacagctattgcacacattataggaagggacagtacggaaaattgatagagtttacagattctcaaaagaaatattacgagaaagttgtagaattatggaacaaggttgtatga

SEQ ID NO: 9769 - DNA, 2160 bp, Saccharomyces cerevisiae
atgttgttggtacatattatatctttccttctgttcttccagctttcggccgcaaaggccccacccagtaaaacgtctctaataaatactcatgagagaaggtcgatatattcatgctacgttggtttacgtaaagaaacatgggggttcaatgggtccgctatatgtcggtatgaaccagcaatccaatcgatgctttactgtctttacgaagacacgcatgagaaagggtattcaaataaaactttggagaaaggttttgaagaaatgagacaattttgctatacaccaaagtttttgaacatgactgatgccgagttttacacctcattggataatggaacatactatatacaagatcaacctaaagctggcatcaatatcacttatcctatcagactgaacactacactaagaaaagcatactatgatgcatactatggttactactataaccatgacattccgtattatttcgggggcattatctgtgcatactttgtgggtgtcatgttgcttgcaggtttaattcgttttttgaattataccccaataaaaaagattatgtttcagcaaaagctagtcaattacgtgagaggttatactactctacccactctttatgaaaagcatgcagagcccttctcgtacttaaaagtgataacaggctatcttcctactaggtttgaaacgttggttattttaggctacctcatacttcataccattttcatggcctacaaatatcaatatgatccataccacatcatatttgccgctcatagagcagaagtggcacattttgttgcgtacagaagcggtatactttcttttgcacacctgccactcattgttttatttgcgggaagaaataactttctccaacttatttctggcttgaagcatacctcattcattgtgttccataagtggctgggaagaatgatgtttcttgatgcaataattcatgctgccggctttacgaactattatttgtattataaaaaatggaatacggttagattaagagtctactggaaattcggtattgctaccacctgtttagcgggaatgttaattttcttttccatcgcagcatttagaagacactactatgaaacgtttatggccctccatatagtattcgcagcactatttctctatacttgttgggagcatgttactaacttcagcggtatcgaatggatttacgcggcaatagcaatttggggagttgatagaattgtacgtatcaccagaattgcactcttaggatttcctaaagcagatctacaactggttggatctgatttggtccgtgtaacggttaaaaaaccaaagaagttttggaaggcaaaaccaggccaatacgttttcgtttccttcttgcgtccattgtgcttctggcagtcgcatccatttacagtgatggattcttgcgtaaacgatagagaattggtcatcgttctgaaagcaaagaaaggtgtgacaaaactggtaagaaactttgttgaacgtaaaggcggcaaggcatccatgagattagctatcgaaggcccttatggctccaagtccaccgcccatcgctttgataatgtattattgttggcaggtggctcagggcttcccggtccaatttctcatgcccttgaattaggaaagacaacagctgcaagcggtaaaaactttgtacagttagtcatagcagtaagaggactagacatgctcaacgcgtgtaagaaagaactaatggcattaaagggcttgaatgttcaagttcacatttataattctaagcaagagctagcttcggctgaaaaaatttcctcaaatgaagtcaaaaacggtgaaacgacagcagagaaggccccatctagtctaagcaattcagaaaaagctccttctgaaagtgaaaatacagaactacctctttccctgaatgacacgtctatctccgatttagaatttgccactttccatgttggaaggccaaatgttgaagaaatactaaatgaatctgttaaccattctggttcacttgccgtcgtatgttgcggaccacctattttcgtcgacaccgctagaaatcaaactgccaaagctgttatcagaaacccatcaagaatgattgaatacttggaggaataccaagcctggtga

SEQ ID NO: 9770 - DNA, 2160 bp, Artificial Sequence
  Description of Artificial Sequence: Synthetic polynucleotide
atgttgttggtacatattatatctttccttttattcttccagctttctgccgcaaaggccccacccagtaaaacgtctttgataaatactcatgagagaaggtctatatattcttgctacgttggtttacgtaaagaaacatgggggttcaatgggtccgctatatgtagatatgaaccagcaatccaatctatgctttactgtctttacgaagacacgcatgagaaagggtattctaataaaactttggagaaaggttttgaagaaatgagacaattttgctatacaccaaagtttttgaacatgactgatgccgagttttacacctctttggataatggaacatactatatacaagatcaacctaaagctggcatcaatatcacttatcctatcagattgaacactacattaagaaaagcatactatgatgcatactatggttactactataaccatgacattccgtattatttcgggggcattatctgtgcatactttgtgggtgtcatgttgcttgcaggtttaattcgttttttgaattataccccaataaaaaagattatgtttcagcaaaagttggtcaattacgtgagaggttatactactttacccactctttatgaaaagcatgcagagcccttctcttacttaaaagtgataacaggctatcttcctactaggtttgaaacgttggttattttaggctacctcatacttcataccattttcatggcctacaaatatcaatatgatccataccacatcatatttgccgctcatagagcagaagtggcacattttgttgcgtacagaagcggtatactttcttttgcacacttgccactcattgttttatttgcgggaagaaataactttctccaacttatttctggcttgaagcataccagtttcattgtgttccataagtggttaggaagaatgatgtttcttgatgcaataattcatgctgccggctttacgaactattatttgtattataaaaaatggaatacggttagattaagagtctactggaaattcggtattgctaccacctgtttagcgggaatgttaattttcttttccatcgcagcatttagaagacactactatgaaacgtttatggccctccatatagtattcgcagcattatttctctatacttgttgggagcatgttactaacttcagcggtatcgaatggatttacgcggcaatagcaatttggggagttgatagaattgtacgtatcaccagaattgcactcttaggatttcctaaagcagatttgcaattggttggatctgatttggtccgtgtaacggttaaaaaaccaaagaagttttggaaggcaaaaccaggccaatacgttttcgtttccttcttgcgtccattgtgcttctggcagtctcatccatttacagtgatggattcttgcgtaaacgatagagaattggtcatcgttttgaaagcaaagaaaggtgtgacaaaattagtaagaaactttgttgaacgtaaaggcggcaaggcatccatgagattagctatcgaaggcccttatggctccaagtccaccgcccatcgctttgataatgtattattgttggcaggtggctctgggcttcccggtccaatttctcatgcccttgaattaggaaagacaacagctgcaagcggtaaaaactttgtacagttagtcatagcagtaagaggattggacatgctcaacgcgtgtaagaaagaattgatggcattaaagggcttgaatgttcaagttcacatttataattctaagcaagagttggcttctgctgaaaaaatttcctctaatgaagtcaaaaacggtgaaacgacagcagagaaggccccatctagtttaagcaattctgaaaaagctccttctgaaagtgaaaatacagaattacctctttccttgaatgacacgtctatctccgatttagaatttgccactttccatgttggaaggccaaatgttgaagaaatattgaatgaatctgttaaccattctggttctcttgccgtcgtatgttgcggaccacctattttcgtcgacaccgctagaaatcaaactgccaaagctgttatcagaaacccatctagaatgattgaatacttggaggaataccaagcctggtga

SEQ ID NO: 9771 - DNA, 660 bp, Saccharomyces cerevisiae
atgttaaagttaacaacaacatccgttactttccacgtactaagatatttccaacttggcttatctgtaactaacttgttgttagctagttttgccataatcacaaactataaagtggatcgaatccttagattgagcttagctgtttcaatcatatcttcagtttattttgggattgtgagatttttgcctgttctgttaatattcgtgatggaaattgttcagaccgtcctgtggtttaccgctttcgtaactctagcttcaaaatttggttctatgtcctgctcaagtatgccacggggtataaactttgattattcaggttcttgtaagattgctaaaatagatattttaccagaagccgttttattcatactatttctcgctaccacatatgcttcttatatcacagtcctatctcaagctaaggaaaatgggtcaagcacaagatctgttttgaaggcttgtgtgaaggcattacgtgataccgtggaccgcttggagaccagtctggaagagagtgagcctcttttagatcttgaagttcaggaagatgcgaggactgaaaccgaaagcattgaggattcaactgatagtgaggataatgctaacatcgaacaagagaaagtgattgatggttcaattgagcattcttcatga

SEQ ID NO: 9772 - DNA, 660 bp, Artificial Sequence
  Description of Artificial Sequence: Synthetic polynucleotide
atgttaaagttaacaacaacatccgttactttccacgtattaagatatttccaacttggcttatctgtaactaacttgttgttagctagttttgccataatcacaaactataaagtggatagaatccttagattgagcttagctgtttccatcatatcttctgtttattttgggattgtgagatttttgcctgttttattaatattcgtgatggaaattgttcagaccgtcttgtggtttaccgctttcgtaactttggcttccaaatttggttctatgtcctgcagcagtatgccaagaggtataaactttgattattctggttcttgtaagattgctaaaatagatattttaccagaagccgttttattcatattgtttctcgctaccacatatgcttcttatatcacagtcttgtctcaagctaaggaaaatgggtccagcacaagatctgttttgaaggcttgtgtgaaggcattacgtgataccgtggaccgcttggagaccagtttagaagagagtgagcctcttttagatcttgaagttcaggaagatgcgaggactgaaaccgaaagcattgaggattctactgatagtgaggataatgctaacatcgaacaagagaaagtgattgatggttccattgagcattcttcttga

SEQ ID NO: 9773 - DNA, 984 bp, Saccharomyces cerevisiae
atgtcaattgcacaagataggggtatcgttttcaagcttctatcaatttatcgagcagcggctggtatcttcatggcgttggcacaattaattgtcatattttttggatattgcgattttaaaattaaagggtatcgcattgcctcttacaatgcaccgacatttgcctccagtttcataattcttgcagtatgccttttattagttgtcgttctggaaaatcctgaggttaaagttacaaattcggaaaatagccttttcagtgctctgaaacaattttttagagtcgaaagaaaaaaactcatctcctgcttgattttactatggagcatgttcctatcgtcatttattatgagcgaagtagtttattttatgccactattcctgacgctccacgttaactgggacaccaagtttcaaggcatagcgtttatggtcgcatctatacttggtgtgactggaagctatttcgctccaaagttaataaacgtcgggtgctcctgcggcagagccaaagatggcggattagaagagtcagatacaactggaagtgagaccgttgaggtaaagaaaaaagattcgctgtacagcggtcaagtttttctgtccatctttgcattgtttgtttcattgctgggacaagcttttatgattggagcatccgaagccttgaagcataaatcaatgccacccacaaattctggtatatttttttcagctgggatgtcgattacattgttagggtacaactttttggcttcgagcattccagcccttttttccatgtacatcgaccccaaactcaaggtccagttgatgccttcaattggagcaatctctgggattggtaaactggtggcaccgattgtattagcagctctttatggcacaagattggggctttcaattgcggttggatttggtatgattttggtagctgtttcaattccaccgcttatttggctcaggaaaaaaaggtgttag

SEQ ID NO: 9774 - DNA, 984 bp, Artificial Sequence
  Description of Artificial Sequence: Synthetic polynucleotide
atgtctattgcacaagataggggtatcgttttcaagcttttatccatttatagagcagcggctggtatcttcatggcgttggcacaattaattgtcatattttttggatattgcgattttaaaattaaagggtatcgcattgcctcttacaatgcaccgacatttgcctccagtttcataattcttgcagtatgccttttattagttgtcgttttggaaaatcctgaggttaaagttacaaattctgaaaatagccttttcagtgctttgaaacaattttttagagtcgaaagaaaaaaactcatctcctgcttgattttattatggagcatgttcttgagttcttttattatgagcgaagtagtttattttatgccattattcttgacgctccacgttaactgggacaccaagtttcaaggcatagcgtttatggtcgcatctatacttggtgtgactggaagctatttcgctccaaagttaataaacgtcgggtgctcctgcggcagagccaaagatggcggattagaagagtctgatacaactggaagtgagaccgttgaggtaaagaaaaaagattctttgtacagcggtcaagtttttctttccatctttgcattgtttgtttctttgttgggacaagcttttatgattggagcatccgaagccttgaagcataaatctatgccacccacaaattctggtatatttttttctgctgggatgtctattacattgttagggtacaactttttggcttctagcattccagcccttttttccatgtacatcgaccccaaactcaaggtccagttgatgccttctattggagcaatctctgggattggtaaattagtggcaccgattgtattagcagctctttatggcacaagattggggctttctattgcggttggatttggtatgattttggtagctgtttctattccaccgcttatttggctcaggaaaaaaaggtgttga

SEQ ID NO: 9775 - DNA, 1824 bp, Saccharomyces cerevisiae
atggacagatctaaggacgctagaaagagatctattagtttggcctgtactgtgtgtaggaaacgaaagttgaagtgcgatgggaacaagccatgtggaagatgtataaggctaaatacaccaaaagaatgcatttataatattgataaaaggaaagacaagagaaaaatcaaaaacgggtcgaaggtttttttattcaagaataatactatcgataacgggaataactctatactagagaacaaaggactaaatgaagacctttcttctcatatatatgagaaagaagcgccaaaattcgattcagatattgatatatcaagatttggcacaaatgatgctgtgatttttaataatgacgggtgggacacttctcttccgatcgattttgatttcgatgagtttaacactgagacaacagatttcgatgactttttaaaactattaggcgataattcaccttcaaaggaacaaaaaagtctttcctattcacctactgctacaggcttaagcggtgtggttaaagaaactgagagcgaagataacgctcctacgaggtctcggctaatcgatgtcttgtttgagaacaagcttcactccgtaccaggaatatcaaaatggcatctatatgagctggaatcccaatacccaaatttggaatgtacagaaggaaatagtgatgaaaagtttttactttcaactgtattgtgcctggggtcgttgaccatacgaaaaagggaactattgaatcattcgaacatagacaatcgtccacttttgccggagaatagtatttcaaaactgaccactgatgcttttaagtactataatgctgcgaaaacgcttgttcccgacttgttatctcatcccacaatcgatggattttgcggcctcgttctaatggcaaatttcatgacgatgatgatatccttagagcaccaattatatttgagtataaatgctttacaacttgctgtggctttaaacttgaacaacaatacaaaatgcaaggaattacttgagtcgaacagcgacggaattggtgtgatcttgcttttttggaacatttggtgttcttcttgcatgttggcaacaattcatggaaaaaatccttttatcactttggaacaaattacaacacctctgccgtgtgaaatatccccccgcaataaaactaataaacttttgatagatttcatgcaaatcagaatcaagctagccactctacaaagtaagatttttcaacggctatatacttccagcaccgcaaacgaggtaccattcgtaaacttagaaagagaatttgaggaggtttcactccagattaccaggttaaaaggctttccgatattcgaagaacatcttttttacaggagcagagtcttaatgttagagctatcatgtttaagagctcaagcttcttttctattatatcgtccgtatctgatcactggagaatccttacaagcagtaaccatggcaaaatcaataattcacgaaatatggagtcaatacactaaacagtttcccgataacgaaaaggaaaggcatgaacgtttggattggaatttttgttatcctttaagaacagcgtcactgacattatgtatttcatgtattatactcctaaggtataagcaggtggtgcagttccttaaaggtactgaactatttgaatacattctagcattggaaatattgcaagatttagttcaggtacttcctattgaacaaaaccttattgatataatcaaatatccgatcagtccagtacagctgagtggtgatagctttgtcgaattttggggtcgcatactttactaa

SEQ ID NO: 9776 - DNA, 1824 bp, Artificial Sequence
  Description of Artificial Sequence: Synthetic polynucleotide
atggacagatctaaggacgctagaaagagatctattagtttggcctgtactgtgtgtaggaaaagaaagttgaagtgcgatgggaacaagccatgtggaagatgtataaggttgaatacaccaaaagaatgcatttataatattgataaaaggaaagacaagagaaaaatcaaaaacgggtccaaggtttttttattcaagaataatactatcgataacgggaataactctatattggagaacaaaggattgaatgaagacctttcttctcatatatatgagaaagaagcgccaaaattcgattctgatattgatatatctagatttggcacaaatgatgctgtgatttttaataatgacgggtgggacacttctcttccgatcgattttgatttcgatgagtttaacactgagacaacagatttcgatgactttttaaaattattaggcgataattctccttctaaggaacaaaaaagtctttcctattctcctactgctacaggcttaagcggtgtggttaaagaaactgagagcgaagataacgctcctacgaggtctagattgatcgatgtcttgtttgagaacaagcttcactccgtaccaggaatatccaaatggcatttatatgagttagaatcccaatacccaaatttggaatgtacagaaggaaatagtgatgaaaagtttttactttctactgtattgtgcttagggtctttgaccataagaaaaagggaattattgaatcattccaacatagacaatcgtccacttttgccggagaatagtatttccaaattgaccactgatgcttttaagtactataatgctgcgaaaacgcttgttcccgacttgttatctcatcccacaatcgatggattttgcggcctcgttttgatggcaaatttcatgacgatgatgatatccttagagcaccaattatatttgagtataaatgctttacaacttgctgtggctttaaacttgaacaacaatacaaaatgcaaggaattacttgagagcaacagcgacggaattggtgtgatcttgcttttttggaacatttggtgttcttcttgcatgttggcaacaattcatggaaaaaatccttttatcactttggaacaaattacaacacctttgccgtgtgaaatatccccccgcaataaaactaataaacttttgatagatttcatgcaaatcagaatcaagttggccactttacaaagtaagatttttcaaagattatatacttccagcaccgcaaacgaggtaccattcgtaaacttagaaagagaatttgaggaggtttctctccagattaccaggttaaaaggctttccgatattcgaagaacatcttttttacaggagcagagtcttaatgttagagttaagttgtttaagagctcaagcttcttttttattatatcgtccgtatttgatcactggagaatccttacaagcagtaaccatggcaaaatctataattcacgaaatatggagtcaatacactaaacagtttcccgataacgaaaaggaaaggcatgaacgtttggattggaatttttgttatcctttaagaacagcgtctttaacattatgtattagttgtattatactcttgaggtataagcaggtggtgcagttccttaaaggtactgaattatttgaatacattttggcattggaaatattgcaagatttagttcaggtacttcctattgaacaaaaccttattgatataatcaaatatccgatcagtccagtacagttgagtggtgatagctttgtcgaattttggggtcgcatactttactga

SEQ ID NO: 9777 - DNA, 873 bp, Saccharomyces cerevisiae
atgtcaaatatcattgcaagatttcacaagattcaagttcaagacggtgtaaaggtttggtaccgtgaggccggtgcagcaggtaaccccacaattttattgctacatgggttccctacatcttccaacatgttcaggaacctcattcccttactagctggacagtttcacatcattgctccggatcttcctgggttcggatttacggaaacgccagaaaactacaagttcagctttgattccctttgtgaaagtataggatatttgttagatactttgagtattgaaaaatttgccatgtatatatttgattatggatctccggtaggttttcggttagccttgaagtttccctccagaattactggcattgttactcaaaacggtaatgcttacgaagagggtctcgatgaccgcttttggggtccgttgaaggaatattggaagtcatatcaaagtgatccggtatttgttaaatcccttatcccgtaccttgaagatccagctaatgtcatatgccagtaccatgatggagtaccagctatcgaatctgttgatcccgccgcttatacgcttgatattgcgctaattcagcgtaccggccagaccgatattcaattgagattatttttcgattatcagaataatataaagttgtacccagcctttcaaaagttcttgagagattcaaagattcctgtgctagttgcatggggtgcgaatgatactatttttagcgttgccggggctgaagcttatcggaaagacgttgataatttaaaggttgtttactatgatactggccattttgcgcttgaaactcacgtagttgctattgccgaagaaatcatcagtatgtttgcagaaaattaa

SEQ ID NO: 9778 - DNA, 873 bp, Artificial Sequence
  Description of Artificial Sequence: Synthetic polynucleotide
atgagtaatatcattgcaagatttcacaagattcaagttcaagacggtgtaaaggtttggtaccgtgaggccggtgcagcaggtaaccccacaattttattgttgcatgggttccctacatcttccaacatgttcaggaacctcattcccttattagctggacagtttcacatcattgctccggatcttcctgggttcggatttacggaaacgccagaaaactacaagttcagctttgattccctttgtgaaagtataggatatttgttagatactttgagtattgaaaaatttgccatgtatatatttgattatggatctccggtaggttttagattagccttgaagtttccctccagaattactggcattgttactcaaaacggtaatgcttacgaagagggtctcgatgaccgcttttggggtccgttgaaggaatattggaagagttatcaaagtgatccggtatttgttaaatcccttatcccgtaccttgaagatccagctaatgtcatatgccagtaccatgatggagtaccagctatcgaatctgttgatcccgccgcttatacgcttgatattgcgttaattcagcgtaccggccagaccgatattcaattgagattatttttcgattatcagaataatataaagttgtacccagcctttcaaaagttcttgagagattctaagattcctgtgcttgttgcatggggtgcgaatgatactatttttagcgttgccggggctgaagcttatagaaaagacgttgataatttaaaggttgtttactatgatactggccattttgcgcttgaaactcacgtagttgctattgccgaagaaatcatcagtatgtttgcagaaaattga

SEQ ID NO: 9779 - DNA, 3351 bp, Saccharomyces cerevisiae
atgttaatgacaggttccgttggcgacggtagtgaattcgattgggaagaccaaaaaactttcatctctagagatggcggtttaacgtggagatttgttcataattcttctgggttatatgctactggtgacctgggaaatattattgtgtatatcccatatgatccagaggaagatggcgattttcaatctgaattttattattctttggaccaaggtagaacatggaatgaatatgagctgaccaatgccataagttctgtccatccctacaaattgataaatccaacaccagatggatctggctcaaaatttatttttaaaggaacgtttgccactaccgattccgaaaccaacagtataacttctttaaaaggtgtcgagtatataattgatttttcagcagcattcgactctagaacgtgtgaggaggaagattttgaagattgggatttggcggatgggaaatgtgttaatggcgccaaatacaagtatagaaggaggaaacaagacgcccagtgtttggtaaaaaaagcattcaaagatttgagtttagatgaaacgccttgtaatagttgtggtgaatccgactacgaatgttcgtttgaatttgttagggacgcaaacggcctgtgtataccagattataatctgattgccttttccaacatatgtgacaaatcgaaggataaatctgtgttagtagagccattacaattaatcaaaggtgatgaatgtaaaacacccatgaaaattgaacccgttgatattccgtgtgacgaaattccagaggagggttcgagtgacagggaaatagtgaccactgaaaacaaatttgacttcgaaattaaattttaccaatacttcgatacagttgccgacgaatctttggtcatgctgaattcgataggagacgcctatatatcccacgatggtggacaaacaataaaaaggtttgacactaacggcgaaaaaattgttgaagttgtgtttaacccatatttcaattcttcagcatatttgtttggctctaaaggtaacatattctcaacacacgatagaggacactcttttatgatagctaaattacctgaagccaggcaattaggtatgccactagattttagtgctaaagcacaggatacttttatttactatggtggcaagaattgtgaatcaatcttaagtccagaatgtcatgcagtagcatacctcaccaaagatggaggtgaaacttttacagaaatgcttgataatgcaattcattgtgagtttgcaggcacactctttgaatatccgtcaaatgaggagatggttatgtgccaagtaaaaaagaagtcttcagaaacaagaagcttggtttcttcgatagattttttccaaggtgataataaaattatctttgaaaacattatcggctacttgtccactggtggctatattattgttgccgtacctcatgaagacaatgagttgagggcatatgtaactattgatggtactgagtttgccgaggcaaaattcccgtatggtcaagatgttagtaagcaagaggcattcactattttaggatctgagaaaggatcgatatttttacatttagcaacaaacttagaatcaggacacgattttggaaaccttttgaaatccaactcgaatggtacttcttttgtcactttagagcatgccgttaatagaaacacattcggttatgtcgactttgaaaaagttcaaggtcttgaaggtattattattaccaacatcgtttcgaatagggaaaaggttggagagaacaaggaagacgaacaattgaagacgaaaatcacctttaatgacggttcagattggaactttttgaagcctccaaagaaggattcggaagggaaaaagtttccctgtgattctgtatcattagataaatgttctctacatttgcatggttacactgaacgtaaggatatcagggatacatattcctccggttccgcgttaggaatgatgtttggtgtcggaaatgttggcgataagcttctaccatatgaggagtgttccacttttttaaccactgatggaggagagacgtggactgaggttaaaaaaggcccccatcaatgggagtacggtgatcatggtggagtcttggttttggtccccgaaaacgcagaaactgattctatttcttactccaccgattttggtaaaacatggaaagattataaattctgtggcgacaaagtcctcgtaaaggatataatcaccgttcccagagattctgctttgaggtttttgctatttggagaagcaaaaaacatgggtagtggttcattcagaacgtatacaattgattttagaaacatcttcgagaggcaatgtgagtttgatattacgggtaaaaaaagggcagattttaagtactctcctctgggttccagaactggttgtctatttggtcatcaaaccgagtttttacgtaaaaccgatgaaaaatgttttattgggaatattccactttctgaattttcgaggaacgtcaaaaactgttcatgtacgaggcaagatttcgaatgtgactataatttttataaagccagtgatggtacttgtaaattagtcaaaggcttaagttcggcgaatggtgccgatatctgcaaaaaggaacccgacttaattgaatactatgattcctctggctatcgaaaaattcccttatcaacctgtaaaggtgggctgaaattggatgcacatttagcaccacatccttgtccgggaaaagaaaaggcattcagggaaaaatattctataaacaccggcgcttatgcgctggtttttgttacaattcttctcgttattttctttgccgcatggtttgtatacgatagaggtatcaggagaaatgggggattttcaagatttgaagaaataagattaggagacgatgggctgatagaaaacaataggaccgatagagttgtcaacatcattgtaagactaggattatgcatttctttaattaccaagtctgcatttcaacgcacgaaggcaggtgtagcacgcttttcttcaaaattaagggcaaggtttggcaacagaaaaggtcctacttactcttcgctgcttcagggtcagttttcagatgaatcagatggcttgcatgaagatgctaacgatttatccagtttcacaagtcaagacagtaattttgaaattgaacaagaagatgcttacagacccgaacaagagcacacgtcacagatagaccagcctgccactagcaatattccagacgcattgccagcacgtagtgctattcacaagcctgattcaactgctgtgcgcaacgaggacgagtaa

SEQ ID NO: 9780 - DNA, 3351 bp, Artificial Sequence
  Description of Artificial Sequence: Synthetic polynucleotide
atgttaatgacaggttccgttggcgacggtagtgaattcgattgggaagaccaaaaaactttcatctctagagatggcggtttaacgtggagatttgttcataattcttctgggttatatgctactggtgacttgggaaatattattgtgtatatcccatatgatccagaggaagatggcgattttcaatctgaattttattattctttggaccaaggtagaacatggaatgaatatgagttgaccaatgccataagttctgtccatccctacaaattgataaatccaacaccagatggatctggctctaaatttatttttaaaggaacgtttgccactaccgattccgaaaccaacagtataacttctttaaaaggtgtcgagtatataattgatttttctgcagcattcgactctagaacgtgtgaggaggaagattttgaagattgggatttggcggatgggaaatgtgttaatggcgccaaatacaagtatagaaggaggaaacaagacgcccagtgtttggtaaaaaaagcattcaaagatttgagtttagatgaaacgccttgtaatagttgtggtgaatccgactacgaatgttcctttgaatttgttagggacgcaaacggcctctgtataccagattataatttaattgccttttccaacatatgtgacaaatccaaggataaatctgtgttagtagagccattacaattaatcaaaggtgatgaatgtaaaacacccatgaaaattgaacccgttgatattccgtgtgacgaaattccagaggagggtagtagtgacagggaaatagtgaccactgaaaacaaatttgacttcgaaattaaattttaccaatacttcgatacagttgccgacgaatctttggtcatgttgaattctataggagacgcctatatatcccacgatggtggacaaacaataaaaaggtttgacactaacggcgaaaaaattgttgaagttgtgtttaacccatatttcaattcttctgcatatttgtttggctctaaaggtaacatattcagtacacacgatagaggacactcttttatgatagctaaattacctgaagccaggcaattaggtatgccattagattttagtgctaaagcacaggatacttttatttactatggtggcaagaattgtgaaagtatcttaagtccagaatgtcatgcagtagcatacctcaccaaagatggaggtgaaacttttacagaaatgcttgataatgcaattcattgtgagtttgcaggcacactctttgaatatccgtccaatgaggagatggttatgtgccaagtaaaaaagaagtcttctgaaacaagaagcttggtttcttctatagattttttccaaggtgataataaaattatctttgaaaacattatcggctacttgtccactggtggctatattattgttgccgtacctcatgaagacaatgagttgagggcatatgtaactattgatggtactgagtttgccgaggcaaaattcccgtatggtcaagatgttagtaagcaagaggcattcactattttaggatctgagaaaggatccatatttttacatttagcaacaaacttagaatctggacacgattttggaaaccttttgaaatccaacagtaatggtacttcttttgtcactttagagcatgccgttaatagaaacacattcggttatgtcgactttgaaaaagttcaaggtcttgaaggtattattattaccaacatcgtttctaatagggaaaaggttggagagaacaaggaagacgaacaattgaagacgaaaatcacctttaatgacggttctgattggaactttttgaagcctccaaagaaggattctgaagggaaaaagtttccctgtgattctgtatctttagataaatgttctttgcatttgcatggttacactgaacgtaaggatatcagggatacatattcctccggttccgcgttaggaatgatgtttggtgtcggaaatgttggcgataagcttttaccatatgaggagtgttccacttttttaaccactgatggaggagagacgtggactgaggttaaaaaaggcccccatcaatgggagtacggtgatcatggtggagtcttggttttggtccccgaaaacgcagaaactgattctatttcttactccaccgattttggtaaaacatggaaagattataaattctgtggcgacaaagtcctcgtaaaggatataatcaccgttcccagagattctgctttgaggtttttgttatttggagaagcaaaaaacatgggtagtggttctttcagaacgtatacaattgattttagaaacatcttcgagaggcaatgtgagtttgatattacgggtaaaaaaagggcagattttaagtactctcctttaggttccagaactggttgtttatttggtcatcaaaccgagtttttacgtaaaaccgatgaaaaatgttttattgggaatattccactttctgaatttagcaggaacgtcaaaaactgttcttgtacgaggcaagatttcgaatgtgactataatttttataaagccagtgatggtacttgtaaattagtcaaaggcttaagttctgcgaatggtgccgatatctgcaaaaaggaacccgacttaattgaatactatgattcctctggctatagaaaaattcccttatctacctgtaaaggtgggttgaaattggatgcacatttagcaccacatccttgtccgggaaaagaaaaggcattcagggaaaaatattctataaacaccggcgcttatgcgttggtttttgttacaattcttctcgttattttctttgccgcatggtttgtatacgatagaggtatcaggagaaatgggggattttccagatttgaagaaataagattaggagacgatgggttgatagaaaacaataggaccgatagagttgtcaacatcattgtaagattaggattatgcatttctttaattaccaagtctgcatttcaacgcacgaaggcaggtgtagcacgcttttcttctaaattaagggcaaggtttggcaacagaaaaggtcctacttactcttctttacttcagggtcagttttctgatgaaagtgatggcttgcatgaagatgctaacgatttatccagtttcacaagtcaagacagtaattttgaaattgaacaagaagatgcttacagacccgaacaagagcacacgagccagatagaccagcctgccactagcaatattccagacgcattgccagcacgtagtgctattcacaagcctgattctactgctgtgcgcaacgaggacgagtga

SEQ ID NO: 9781 - DNA, 1311 bp, Saccharomyces cerevisiae
atgatattactccaagtcatatgcacgatttggacatgtctctttattccgttactcaatgcagaggaattcgtccccaaagtaacggagactctttcagaatattcatttagtctagagagctttgacgattccaacagtttaatcagattagataatcaagtcgtgtggataagttccgattctggagaaaattgggaagcggtcaaagaaattgaagggcatattctcgaattaattgttgatcctttgcatggacaggacagggcttttgtttcgatacatttatcacccaaattttacgtcaccgatgatcgtggaaaatcatggagggctctgactatacccgtctctgaaaactgtcgtttgggtacttcttgctctatagctacccatccgacagataaaaagtaccttattgcagattgcccttgctttataaacgacaatggttatatccaaatacaaaatgaaacttactttaccaacgatggggaatccttttacaatatcgaaccttccttgaaaaagaaagaagatgaccatataacaagttcaagctgcaactttgtcaaatctagcaaggattctgatattgagggtaacgacgcttcgatactatgtttgttctcgaaccatggttacgatagcgatcgtcacttaagtgccgcatatacacaattagccttaagtactgatggaggtaaaactttcaaaaaatttgatgagtttaatgataaaattatttatcaatacaagatattaaaatcacatataatcgtttcgacacaagatgatagatacaatgaaatgtcacccatggacatctggatatccaatgatgcgtctacttttcaaaaggcacgtctacctgctcaagtacggcacgtccatatgtatggaatttatgaagattctattggaagaataatcattcctatatctacgatattcacagatgaaaaaaacgaccaaccagctccctcagaaattttaatatcagattctcaagggttgaaatttttacctgttgaatggacaataaatcctcactttggttatattgatattgcttctcctcatttcttagaaggaacaataattggctcgtttcatccttcctttgactactctcataacaaaggaaaatataataaaaagatagccagatatgaaactaaaatatctgttgataacggcctcacatggtcaaatttgaaagtggttgacgaggaaaatgcagattcattcccttgtgatatcactaggcctgaaagatgttcgctccagaaccctttttatagtatctaa

SEQ ID NO: 9782 - DNA, 1311 bp, Artificial Sequence
  Description of Artificial Sequence: Synthetic polynucleotide
atgatattactccaagtcatatgcacgatttggacatgtctctttattccgttactcaatgcagaggaattcgtccccaaagtaacggagactctttctgaatattcttttagtttggagagctttgacgattccaacagtttaatcagattagataatcaagtcgtgtggataagttccgattctggagaaaattgggaagcggtcaaagaaattgaagggcatattctcgaattaattgttgatcctttgcatggacaggacagggcttttgtttctatacatttatctcccaaattttacgtcaccgatgatcgtggaaaaagttggagggctttgactatacccgtctctgaaaactgtcgtttgggtacttcttgctctatagctacccatccgacagataaaaagtaccttattgcagattgcccttgctttataaacgacaatggttatatccaaatacaaaatgaaacttactttaccaacgatggggaatccttttacaatatcgaaccttccttgaaaaagaaagaagatgaccatataacaagtagtagctgcaactttgtcaaatctagcaaggattctgatattgagggtaacgacgcttctatattatgtttgttcagtaaccatggttacgatagcgatcgtcacttaagtgccgcatatacacaattagccttaagtactgatggaggtaaaactttcaaaaaatttgatgagtttaatgataaaattatttatcaatacaagatattaaaatctcatataatcgtttctacacaagatgatagatacaatgaaatgtctcccatggacatctggatatccaatgatgcgtctacttttcaaaaggcacgtttacctgctcaagtaagacacgtccatatgtatggaatttatgaagattctattggaagaataatcattcctatatctacgatattcacagatgaaaaaaacgaccaaccagctcccagtgaaattttaatatctgattctcaagggttgaaatttttacctgttgaatggacaataaatcctcactttggttatattgatattgcttctcctcatttcttagaaggaacaataattggctcttttcatccttcctttgactactctcataacaaaggaaaatataataaaaagatagccagatatgaaactaaaatatctgttgataacggcctcacatggtctaatttgaaagtggttgacgaggaaaatgcagattctttcccttgtgatatcactaggcctgaaagatgttctctccagaaccctttttatagtatctga

SEQ ID NO: 9783 - DNA, 3354 bp, Saccharomyces cerevisiae
atgcaattatatctgacacttctttttctattaagtttcgtcgaatgttcatatataagtttcatatcgaataatgcagacgaaatattggaaactgatttaattgaaactttatcttacgctactttgacagtaggtgagccttatgttgcacaatcggtggttgtaacaagagtatctgcagcttctcatagccctctctcagtttcgccaaaaaatagagtgagcgcatctccaattaattcacaagacagtgattctaatacaagaacagcagttcaactgtcattgtcgttatcaaactacgcaagccaagtatctcaaaaaataagcgcacaaaccaataatgatcctgtcactgtttcaaatatttacgcaaatgataattcgaaaagcaaaagttcagtacacaatttgagttcggtttccggcgtcgcctcagtcatgccaagtgcatcaacaatgcgtaaagtcaccacattattatctcaaactgcttcgacttcgacttcgactttattttcttcatctttatctatttcggggacacaattaaatggaactttattgacttctgtttcaaaaggtacaatcgatccactggtaactcaaatgccttcctattcttcccaagaaacaaaaattattccttcttcattgacctcgaataaaacgatatatactatttcagtaaggacaaatgcagctacagctaccggcgaagattccttcattgcttcaactcctgcttcctcgactttgttctatccatccaactcaacccaggatttagtccagacgctcgcatctacaacagcaagccctgcttacccatctaataggacacaaatcactctttctccatctgtatcactatattcgacaactagtccaatttacccttcaaacattacagaaaacggttcttcaccatcaccatcactatcatcgactgttagtccagtttatccatcgagttcaacaggaaacattcttttgtcatcactattttcaacagtagattcttcttcctctccggtttcttcgacattagataccatttatgtatcttcttcaatgcaagctaccatctcttcgtcctcatcttcgagacaaacaaaaacttcctcctcttctctgtcaacctcgaccagtagcaccgctaccacaacggagaactcttcaacaacgaccattgtcaatcttttcaatgctgtttcgacagatgaaccaccaactgtttttgacagatcaccaaatcctatgtcattggctgatggggtgtcaaacgatggtcccattcaaacaaacaagttttatacaaatttgattgttggtagtcaggaatcacctgcctttgtgtatccttattcattgtggaagtacacctcgagttcatatggttttgctgttcaacatacaacagtagatcaatatagctacggtggttatgacagttccggtaatgcagaatatttggtcaatcctttgggaattgctcatgttgttttctcagcttcgaattttgattcaagtatgactatgcaagttgatgaaatgaccttgtcttcaacaagggtagtgctatcagaatccaatgattcttcgaactacctggaaatacctttggttcaaggtatgggatttgcaactggtatatatcatggatctttaaatgccaagattggttccagcgtcggattcaataccattgtttctgaatcatcaagcaatttagctcagggtattctcaaatatcgtatcacccttttgaatggagtcacttggttatgttacgtgataggaccagacgatttaacctcaacggacttttcattggaggtgagctcagaatatgaaattaaagcaagcgctagtgttgatggtcttatcattcaattggccgtcgcaccttctgaaactgattacgaggtcttttatgatcaagccgcaggtatgtacgttactaatttcaagctgcagggtgtctctgacggttctacagctacctatgaattttcttataccacccaaggtgagtcggcatcaggtagcacaatgatttttgccttgccccatcatgaatcttcatttagtgatataatgcaagactactataccggcattcaactcgcttctacaactaagggtgtaatgaacggttatctaacaacgagcctacaattttccacatctctaaacagacaaatatcttggttaccatggtcttctcaacttggctcaaaccttttagagtattctaaagaacaattgcaattattagctgaagttgccaattccgaattacaggttagtatttccgaaagtataagcgggttaaacacatattatttgggtaaagttatcgataagtattcttacattctattaacggtctccgaaatcatccaagatgaagccagtactaagagtactttggaaaacatcaaatcggcctttgatattctgctacaaaatgaacagacgtatccactaatttacgacacaaagttcaacggtttggtcagttcaggagattggggttccaccagcacgcaatacgattttggtaacacttattacaatgaccatcatttccattatggttacattattcatgcagctgctgtcatcggctatgttgactctaaactgaatggtacttgggctgccgacaataaagattgggtcaattcattggtaagagatgtcgcaaatccatctgaaaaagatgaatactttgcacaatcgagaatgtttgattggttcaacggtcattcatgggcagctggactttatgaaaacggtaacggtaagaacgaagaaagtagtagtgaagattacaattttgcctatgctatgaagttatggggggccactatcggtgaccagtcaatggaattgaggggtgacttgatgattagtataatgaaggatgcaatgaacgactatttctattatcaaaatgacaacacagttgagcctgaagaaatcataggaaataaagtgagtggtattttattcgataatattatcgattatactacttattttggaacaaacacagaatatatccacggtattcatatgctacctatcacaccagtttcttctaatattcgttctgagactttcgtcgaagaagaatggcagactaaaatcgagccaattattgaatcgatagaaagcggctggacaggcatattgaagctgaatcaagcactcttcgacccagtagattcgtatgcatttttcagtgattcaacttttgattcatccacatatttggataacggaatgagtcgcacatgggcattagcattttcagggggactggccaactcaattgcttag

SEQ ID NO: 9784 - DNA, 3354 bp, Artificial Sequence
  Description of Artificial Sequence: Synthetic polynucleotide
atgcaattatatttgacacttctttttttattaagtttcgtcgaatgttcttatataagtttcatatccaataatgcagacgaaatattggaaactgatttaattgaaactttatcttacgctactttgacagtaggtgagccttatgttgcacaatctgtggttgtaacaagagtatctgcagcttctcatagccctctcagtgtttctccaaaaaatagagtgagcgcatctccaattaattctcaagacagtgattctaatacaagaacagcagttcaattatctttgtctttatctaactacgcaagccaagtatctcaaaaaataagcgcacaaaccaataatgatcctgtcactgtttctaatatttacgcaaatgataattctaaaagcaaaagttctgtacacaatttgagttctgtttccggcgtcgcctctgtcatgccaagtgcaagcacaatgcgtaaagtcaccacattattatctcaaactgcttccacttctacttctactttattttcttcttctttatctatttctgggacacaattaaatggaactttattgacttctgtttccaaaggtacaatcgatccattagtaactcaaatgccttcctattcttcccaagaaacaaaaattattccttcttctttgacctctaataaaacgatatatactattagtgtaaggacaaatgcagctacagctaccggcgaagattccttcattgcttccactcctgcttccagcactttgttctatccatccaactctacccaggatttagtccagacgctcgcatctacaacagcaagccctgcttacccatctaataggacacaaatcactctttctccatctgtatctttgtattctacaactagtccaatttacccttccaacattacagaaaacggttcttctccatctccatctttatcttctactgttagtccagtttatccatctagttctacaggaaacattcttttgagttctttattttctacagtagattcttcttcctctccggtttcttctacattagataccatttatgtatcttcttctatgcaagctaccatctcttcttcctcttcttctagacaaacaaaaacttcctcctcttctttatctacctccaccagtagcaccgctaccacaacggagaactcttctacaacgaccattgtcaatcttttcaatgctgtttctacagatgaaccaccaactgtttttgacagatctccaaatcctatgtctttggctgatggggtgtctaacgatggtcccattcaaacaaacaagttttatacaaatttgattgttggtagtcaggaatctcctgcctttgtgtatccttattctttgtggaagtacacctctagttcttatggttttgctgttcaacatacaacagtagatcaatatagctacggtggttatgacagttccggtaatgcagaatatttggtcaatcctttgggaattgctcatgttgttttcagtgcttctaattttgattctagtatgactatgcaagttgatgaaatgaccttgtcttctacaagggtagtgctttctgaatccaatgattcttccaactacttggaaatacctttggttcaaggtatgggatttgcaactggtatatatcatggatctttaaatgccaagattggttccagcgtcggattcaataccattgtttctgaatcttctagcaatttagctcagggtattctcaaatatcgtatcacccttttgaatggagtcacttggttatgttacgtgataggaccagacgatttaacctctacggacttttctttggaggtgagctctgaatatgaaattaaagcaagcgctagtgttgatggtcttatcattcaattggccgtcgcaccttctgaaactgattacgaggtcttttatgatcaagccgcaggtatgtacgttactaatttcaagttacagggtgtctctgacggttctacagctacctatgaattttcttataccacccaaggtgagtctgcatctggtagcacaatgatttttgccttgccccatcatgaatcttcttttagtgatataatgcaagactactataccggcattcaactcgcttctacaactaagggtgtaatgaacggttatttgacaacgagcttacaattttccacatctttgaacagacaaatatcttggttaccatggtcttctcaacttggctctaaccttttagagtattctaaagaacaattgcaattattagctgaagttgccaattccgaattacaggttagtatttccgaaagtataagcgggttaaacacatattatttgggtaaagttatcgataagtattcttacattttattaacggtctccgaaatcatccaagatgaagccagtactaagagtactttggaaaacatcaaaagtgcctttgatattttattacaaaatgaacagacgtatccattgatttacgacacaaagttcaacggtttggtcagtagtggagattggggttccaccagcacgcaatacgattttggtaacacttattacaatgaccatcatttccattatggttacattattcatgcagctgctgtcatcggctatgttgactctaaattgaatggtacttgggctgccgacaataaagattgggtcaattctttggtaagagatgtcgcaaatccatctgaaaaagatgaatactttgcacaatctagaatgtttgattggttcaacggtcattcttgggcagctggactttatgaaaacggtaacggtaagaacgaagaaagtagtagtgaagattacaattttgcctatgctatgaagttatggggggccactatcggtgaccagtccatggaattgaggggtgacttgatgattagtataatgaaggatgcaatgaacgactatttctattatcaaaatgacaacacagttgagcctgaagaaatcataggaaataaagtgagtggtattttattcgataatattatcgattatactacttattttggaacaaacacagaatatatccacggtattcatatgttgcctatcacaccagtttcttctaatattcgttctgagactttcgtcgaagaagaatggcagactaaaatcgagccaattattgaaagtatagaaagcggctggacaggcatattgaagttgaatcaagcactcttcgacccagtagattcttatgcatttttcagtgattctacttttgattcttccacatatttggataacggaatgagtcgcacatgggcattagcattttctgggggattggccaactctattgcttga

SEQ ID NO: 9785 - DNA, 819 bp, Saccharomyces cerevisiae
atgagaaacaggcagaatcaaaagaactggactaatttaagaggtctattgtccgttgaagagagagaaaaactagaaaatttacggcttgaactagtatgtatgcaagctgctaatagtattccacatgacccaccggaaatcagtagtctggagacggaattgatttgcttaacaacgaacacaaaagattgcaaaccagtgaggttccacagtgatttacttttaaagaagcacaaatacaatgaaattaagaaaatatttaaggaaattttggaaaacattgaagcatatcgcgatgagttcactaaaaatcaaacaaaaataaacttacttcttgccgatgacgcaagagctagcctgcgtaatagatcgctcgatttttctgatttaatgccttcgagtataattaaggacgtacaggttttagccaatatggaagccaatgttgttgtcatgaaaaatgcgttgaaaacgaagttggttggagagaaaagtgtgcctgttgcttcttctcctatatccagcataattcctcgaacttctaggaataaaaaaacctccccatcaaactatcaccattcggtactttcacatcggaaatcaaatgaatggaatcaggtcagttcaactgagtataagagaacactgttattgaatataaaatataatgatgattttaaagctaccatagtgccaagttttgaaagttgtttatgctcgaggtcatatttcctccgcgtaaaacttcattttgataaaggtgttggatctgctgaaattgatatcccagttcaagttaaaaactcttttatttga

SEQ ID NO: 9786 - DNA, 819 bp, Artificial Sequence
  Description of Artificial Sequence: Synthetic polynucleotide
atgagaaacaggcagaatcaaaagaactggactaatttaagaggtttattgtccgttgaagagagagaaaaattagaaaatttaagacttgaattggtatgtatgcaagctgctaatagtattccacatgacccaccggaaatcagtagtttggagacggaattgatttgcttaacaacgaacacaaaagattgcaaaccagtgaggttccacagtgatttacttttaaagaagcacaaatacaatgaaattaagaaaatatttaaggaaattttggaaaacattgaagcatatcgcgatgagttcactaaaaatcaaacaaaaataaacttacttcttgccgatgacgcaagagctagccttcgtaatagaagtctcgatttttctgatttaatgccttctagtataattaaggacgtacaggttttagccaatatggaagccaatgttgttgtcatgaaaaatgcgttgaaaacgaagttggttggagagaaaagtgtgcctgttgcttcttctcctatatccagcataattcctcgtacttctaggaataaaaaaacctccccatctaactatcaccattctgtactttctcatagaaaatctaatgaatggaatcaggtcagttctactgagtataagagaacattattattgaatataaaatataatgatgattttaaagctaccatagtgccaagttttgaaagttgtttatgctctaggagttatttcctccgcgtaaaacttcattttgataaaggtgttggatctgctgaaattgatatcccagttcaagttaaaaactcttttatttga

SEQ ID NO: 9787 - DNA, 1470 bp, Saccharomyces cerevisiae
atgcaagaatcaaaagaaccacaaaataaatttgaaggttgtcaaagaatatcttcatcttcatccacactctttggaggaacctccttcgaggaaccgagatgtggaacatcccaaggaaaggaagaagacgctttcgcatgcaataatggagatcactgctcgagcataacgaatgttcaggaagatgactttgtccttccagaactattgccgtcattcgaaatgtatgaaaatttgctcagcaatatacctcaatctagtttcgatacatactttccggagaatccacctttttatgaggttgcttcccgaaatcagagtattccttcggaaggtgagtctgggaatgatatgcggattcttaccggtgatatcgttggcccagataatcatgaagtgactgttgatggccgccggtttgcttccggccctgctgagtctcaaattcgtaattatgatgatactaaaggtatcccagttgagaatatatacgcattgcctaggattaaaacccccatagcgactgaattgtacgtcacaaagacggctccaaaatttggacagcttcctaaacacgagagcatgctaagggaatacacctctggggatataattcacggttatttcactgtagaaaacaaatcaaccaaacctataaaattcgatatgttttatttaactttggaaggtacgacaagttcaaaaacacagtcaccctttggaatccaaaaaacgacagaaagaattttgagaatggtagatatggcagcgagttggtcatataatcatgaagacgtgaacacgggggaagacctttgtggattttttgactccattgataaaacaagctttggattaccgaatagcaggatactaaatccaggtgataaacgtaagaaatttttcacttttaaaattccgaaccagttattagacgtaacctgtaagcacggtcacttctctcactctcttttgccccctacattagggtttgatagaccatcgagttctcatccagagctttctactctaaaattttcggagagtttaggttatggtcgtttgtcagaaagaggttcctcactatggttaaacgacagttctagtggcagcttaataaattactcaataaatgctatgatagtaggcaaagacgtagcttctgggcgtgtttgtttaatgagtgaaaaaaagtatagcataaggatagttccatttggctttcaaaacaatccaattagtagggagaagtgcctcaaagacttagaggatttcgatattgaaattgcaaacaggcttggaatgatcgaaaaagtcttttctaaaatagagcgagcgattcccattcataaggaggacatacaggaggcgaatcgctctgatcaactatcacccctaagaggtaagtatgaatggaacgcggtagctggaaatactgaaaacggaacacttaaaaagaaacactag

SEQ ID NO: 9788 - DNA, 1470 bp, Artificial Sequence
  Description of Artificial Sequence: Synthetic polynucleotide
atgcaagaaagtaaagaaccacaaaataaatttgaaggttgtcaaagaatatcttcttcttcttccacactctttggaggaacctccttcgaggaaccgagatgtggaacatcccaaggaaaggaagaagacgctttcgcatgcaataatggagatcactgcagtagcataacgaatgttcaggaagatgactttgtccttccagaattattgccgtccttcgaaatgtatgaaaatttgctcagcaatatacctcaatctagtttcgatacatactttccggagaatccacctttttatgaggttgcttccagaaatcagagtattccttctgaaggtgagtctgggaatgatatgagaattcttaccggtgatatcgttggcccagataatcatgaagtgactgttgatggccgcagatttgcttccggccctgctgagtctcaaattcgtaattatgatgatactaaaggtatcccagttgagaatatatacgcattgcctaggattaaaacccccatagcgactgaattgtacgtcacaaagacggctccaaaatttggacagcttcctaaacacgagagcatgttaagggaatacacctctggggatataattcacggttatttcactgtagaaaacaaatctaccaaacctataaaattcgatatgttttatttaactttggaaggtacgacaagttctaaaacacagtctccctttggaatccaaaaaacgacagaaagaattttgagaatggtagatatggcagcgagttggagttataatcatgaagacgtgaacacgggggaagacctttgtggattttttgactccattgataaaacaagctttggattaccgaatagcaggatattgaatccaggtgataaacgtaagaaatttttcacttttaaaattccgaaccagttattagacgtaacctgtaagcacggtcacttctctcactctcttttgccccctacattagggtttgatagaccatctagttctcatccagagctttctactttgaaattttctgagagtttaggttatggtcgtttgagtgaaagaggttcctctctttggttaaacgacagttctagtggcagcttaataaattactctataaatgctatgatagtaggcaaagacgtagcttctgggcgtgtttgtttaatgagtgaaaaaaagtatagcataaggatagttccatttggctttcaaaacaatccaattagtagggagaagtgcctcaaagacttagaggatttcgatattgaaattgcaaacaggcttggaatgatcgaaaaagtcttttctaaaatagagagagcgattcccattcataaggaggacatacaggaggcgaatcgctctgatcaattatctcccttgagaggtaagtatgaatggaacgcggtagctggaaatactgaaaacggaacacttaaaaagaaacactga

SEQ ID NO: 9789 - DNA, 4002 bp, Saccharomyces cerevisiae
atggaatgcgtttcagtagaaggtttggattcttcttttttggagggccaaacctttggcgatattttgtgtttaccatggacaattatcaagggtatccgtgagcggaagaatcgcaataagatgaagatcattttgaagaatgtcagtttgctggctaaatcaggagagatggtccttgtcctaggaagaccaggcgctggctgtacatcatttttaaagagcgctgctggtgagaccagtcagtttgcaggtggtgtaacaacaggacatatatcgtacgatggtatccctcagaaagaaatgatgcaacattacaagccagatgtaatctataatggtgagcaagatgttcatttcccacatttgacagtaaaacaaactctagattttgctatttcctgtaagatgcccgcaaaaagagtcaataatgtaacgaaagaagagtatattactgccaatagagaattctatgctaaaatttttggtttgacgcatactttcgataccaaagttggtaacgatttcatcagcggtgtatctggaggtgagcgtaaacgcgtttccattgctgaagcattagcagcgaaaggttcaatttactgctgggataatgctacaagaggtcttgactcttctaccgcgctagaatttgcacgagctattcgtactatgacaaatctgttaggtacaacggcccttgttacggtttaccaagccagtgaaaacatttatgaaacttttgataaagtcactgttctatacgctggaagacaaatattttgcggcaaaactactgaagcaaaagattattttgaaaacatgggttacttgtgtccaccgagacaatcgactgctgaatatttgaccgcaattactgatcctaatggtctgcacgaaataaagcctggctttgagtatcaagtacctcataccgctgatgaattcgaaaaatactggcttgattccccagaatatgcccgcctaaaaggtgaaattcagaagtacaaacatgaagtgaatactgaatggaccaaaaaaacatacaatgagtctatggcacaagaaaagtcgaaaggtacaagaaaaaaatcttattatacggtctcttattgggagcaaattagactttgcactattagaggttttctaaggatttacggtgataagtcatacaccgttatcaacacatgcgctgctatagcacaggcttttatcactgggtcattgttctaccaagcaccttcttcaactctaggggccttttctagaagtggcgttctgtttttttccctcttatattattctttgatgggtttagctaatattagtttcgagcacaggccaatattgcaaaaacacaaggtctattcactatatcatccctcagctgaagcgttagcaagtacgatttcttcttttccattcagaatgattggtctaacatttttcataatcatcctgtacttcttagccggtttgcatagaagcgccggtgctttttttactatgtatttgttattgacaatgtgttcagaagctattacaagtttgtttcagatggtttcatctttatgcgatacattgtcccaggccaactccattgccggtgttgtgatgttatctattgccatgtattcgacgtacatgatacaattaccttcaatgcatccatggtttaagtggatttcgtacattctacccattagatatgcatttgaatcgatgttaaatgcagaatttcatggaagacatatggattgtggtggcactttggttccttctggacctgggtttgaaaacatcttgccagaaaatcaagtgtgtgcttttgttggttcaaggcctggccaatcttgggtcctaggtgatgattatttgagggcccaatatcaatatgagtacaaaaatacttggagaaacttcggcatcatgtggtgtttcttaattggctacatcgtcttgagggcggttttcactgagtacaaaagtcctgtcaaaagtggtggtgatgctctggtcgtcaagaagggcacaaagaatgctatacaaagatcatggagcagcaaaaatgacgaagagaaccttaatgcctctatagcaacacaggatatgaaagagatagcttcaagtaacgacgatagcacaagtgcagactttgaaggtttggaatctaccggggtgtttatttggaaaaatgtttctttcacaattcctcattctagcggacaacgtaaacttctggacagcgtaagcggttactgtgttcctggtactttgacagcattaataggtgagtccggcgctggtaagaccacattattaaacactttggctcaaaggaacgtgggaacgattactggtgatatgttagttgatggtctcccaatggacgctagtttcaaaaggcgtaccggttatgttcaacagcaagatcttcatgttgctgaacttactgtcaaagaatcgctacaatttagtgctcgtatgcgtcggccacagtctattcctgacgctgaaaagatggaatatgttgaaaaaattatatctattcttgaaatgcaggagttctcagaagctcttgtcggcgaaattggttacggcttgaatgttgaacagagaaagaaactatcaattggcgttgagctagttggcaagccggatctgttattgtttttggacgaaccgacctctggcttggattcccaatccgcgtgggccgtcgtcaaaatgttaaaaagattagctctagcaggtcaatcaattttatgtactattcatcaaccatcagctactctttttgaacagtttgacagattattgcttttgggaaaaggcggtcaaacaatttattttggtgaaataggtaaaaattcaagttctgtcattaagtatttcgaaaagaacggagccaggaaatgtcaacaaaatgaaaatccggcagagtatattttagaagccataggagctggggccaccgcttctgttcaacagaactggcctgatatatggcaaaaatctcacgagtatgcaaacattaacgaaaaaataaatgacatgattaaggacttatcttctacaactttgcataaaacagctacaagggcctctaagtatgcaacatcgtattcctaccaattccatcatgtgctgaaaagatccagtttaacattttggagaaacttgaactacatcatggccaaaatgatgttattgatgatcagtggcttgttcattggttttacctttttccatgtgggtgtaaatgctattggattacaaaatagcttatttgcctgtttcatggctatcgttatatcagctcctgcaacaaaccaaatacaggagcgtgctaccgttgctaaggagctatatgaagttcgtgagtccaaatctaatatgtttcattggtctttacttttgattacccattatttaaatgaattgccttaccatttattgttttcaacaatttttttcgtttcatcatatttccctctgggtgtctttaccgaagcctctaggtcaagtgttttttatctgaactatgccatactttttcaactttactatattggtcttgctttaatgattctgtacatgtctccaaatctacaatctgccaatgttattgtaggttttatactttcgtttttgctctctttctgcggtgctgtccaacctgcctctttaatgcctggtttctggacattcatgtggaaactatccccttacacgtattttttgcaaaatttagttggattattgatgcatgacaaacccgtaagatgttcaaagaaagagttgtctcttttcaaccccccggtaggccaaacatgtggtgaatttaccaaaccgttttttgaatttgggactgggtatattgcaaatccagatgcaacagcagattgcgcctattgtcagtacaaagtaggtgatgaatacttggcgcgcataaatgctagctttagttacttatggagaaacttcggtttcatttag

SEQ ID NO: 9790 - DNA, 4002 bp, Artificial Sequence
  Description of Artificial Sequence: Synthetic polynucleotide
atggaatgcgtttctgtagaaggtttggattcttcttttttggagggccaaacctttggcgatattttgtgtttaccatggacaattatcaagggtatccgtgagagaaagaatcgcaataagatgaagatcattttgaagaatgtcagtttgttggctaaaagtggagagatggtccttgtccttggaagaccaggcgctggctgtacatcttttttaaagagcgctgctggtgagaccagtcagtttgcaggtggtgtaacaacaggacatatatcttacgatggtatccctcagaaagaaatgatgcaacattacaagccagatgtaatctataatggtgagcaagatgttcatttcccacatttgacagtaaaacaaactttagattttgctatttcctgtaagatgcccgcaaaaagagtcaataatgtaacgaaagaagagtatattactgccaatagagaattctatgctaaaatttttggtttgacgcatactttcgataccaaagttggtaacgatttcatcagcggtgtatctggaggtgagcgtaaacgcgtttccattgctgaagcattagcagcgaaaggttccatttactgctgggataatgctacaagaggtcttgactcttctaccgcgttagaatttgcaagagctattcgtactatgacaaatttattaggtacaacggcccttgttacggtttaccaagccagtgaaaacatttatgaaacttttgataaagtcactgttctttacgctggaagacaaatattttgcggcaaaactactgaagcaaaagattattttgaaaacatgggttacttgtgtccaccgagacaatctactgctgaatatttgaccgcaattactgatcctaatggtttacacgaaataaagcctggctttgagtatcaagtacctcataccgctgatgaattcgaaaaatactggcttgattccccagaatatgcccgcttaaaaggtgaaattcagaagtacaaacatgaagtgaatactgaatggaccaaaaaaacatacaatgagtctatggcacaagaaaagagtaaaggtacaagaaaaaaatcttattatacggtctcttattgggagcaaattagactttgcactattagaggttttttaaggatttacggtgataagtcctacaccgttatcaacacatgcgctgctatagcacaggcttttatcactgggtctttgttctaccaagcaccttcttctactttgggggccttttctagaagtggcgttttatttttttccctcttatattattctttgatgggtttagctaatattagtttcgagcacaggccaatattgcaaaaacacaaggtctattctttgtatcatccctctgctgaagcgttagcaagtacgatttcttcttttccattcagaatgattggtttaacatttttcataatcatcttgtacttcttagccggtttgcatagaagcgccggtgctttttttactatgtatttgttattgacaatgtgttctgaagctattacaagtttgtttcagatggtttcttctttatgcgatacattgtcccaggccaactccattgccggtgttgtgatgttatctattgccatgtattctacgtacatgatacaattaccttctatgcatccatggtttaagtggatttcttacattttgcccattagatatgcatttgaaagtatgttaaatgcagaatttcatggaagacatatggattgtggtggcactttggttccttctggacctgggtttgaaaacatcttgccagaaaatcaagtgtgtgcttttgttggttctaggcctggccaatcttgggtcttgggtgatgattatttgagggcccaatatcaatatgagtacaaaaatacttggagaaacttcggcatcatgtggtgtttcttaattggctacatcgtcttgagggcggttttcactgagtacaaaagtcctgtcaaaagtggtggtgatgctttggtcgtcaagaagggcacaaagaatgctatacaaagaagttggagcagcaaaaatgacgaagagaaccttaatgcctctatagcaacacaggatatgaaagagatagcttccagtaacgacgatagcacaagtgcagactttgaaggtttggaatctaccggggtgtttatttggaaaaatgtttctttcacaattcctcattctagcggacaacgtaaacttttggacagcgtaagcggttactgtgttcctggtactttgacagcattaataggtgagtccggcgctggtaagaccacattattaaacactttggctcaaaggaacgtgggaacgattactggtgatatgttagttgatggtctcccaatggacgctagtttcaaaaggcgtaccggttatgttcaacagcaagatcttcatgttgctgaacttactgtcaaagaatctttacaatttagtgctcgtatgcgtagaccacagtctattcctgacgctgaaaagatggaatatgttgaaaaaattatatctattcttgaaatgcaggagttctctgaagctcttgtcggcgaaattggttacggcttgaatgttgaacagagaaagaaattatccattggcgttgagttagttggcaagccggatttattattgtttttggacgaaccgacctctggcttggattcccaatccgcgtgggccgtcgtcaaaatgttaaaaagattagctttggcaggtcaatctattttatgtactattcatcaaccatctgctactctttttgaacagtttgacagattattgcttttgggaaaaggcggtcaaacaatttattttggtgaaataggtaaaaatagtagttctgtcattaagtatttcgaaaagaacggagccaggaaatgtcaacaaaatgaaaatccggcagagtatattttagaagccataggagctggggccaccgcttctgttcaacagaactggcctgatatatggcaaaaatctcacgagtatgcaaacattaacgaaaaaataaatgacatgattaaggacttatcttctacaactttgcataaaacagctacaagggcctctaagtatgcaacatcttattcctaccaattccatcatgtgttgaaaagatccagtttaacattttggagaaacttgaactacatcatggccaaaatgatgttattgatgatcagtggcttgttcattggttttacctttttccatgtgggtgtaaatgctattggattacaaaatagcttatttgcctgtttcatggctatcgttatatctgctcctgcaacaaaccaaatacaggagcgtgctaccgttgctaaggagttgtatgaagttcgtgagtccaaatctaatatgtttcattggtctttacttttgattacccattatttaaatgaattgccttaccatttattgttttctacaatttttttcgtttcttcttatttccctttaggtgtctttaccgaagcctctaggtctagtgttttttatttgaactatgccatactttttcaactttactatattggtcttgctttaatgattttatacatgtctccaaatttacaatctgccaatgttattgtaggttttatactttcttttttgctctctttctgcggtgctgtccaacctgcctctttaatgcctggtttctggacattcatgtggaaactttccccttacacgtattttttgcaaaatttagttggattattgatgcatgacaaacccgtaagatgttccaagaaagagttgtctcttttcaaccccccggtaggccaaacatgtggtgaatttaccaaaccgttttttgaatttgggactgggtatattgcaaatccagatgcaacagcagattgcgcctattgtcagtacaaagtaggtgatgaatacttggcgcgcataaatgctagctttagttacttatggagaaacttcggtttcatttga

SEQ ID NO: 9791 - DNA, 1029 bp, Saccharomyces cerevisiae
atgtcaaatagtaacggtgataataagtatggtgtcattacaattggtgatgagaaaaagttccaagctaccattgcgccacttggtgcaactttggtagacctgaaggtaaacggccaatcagtcgttcaaggttattcaaacgtacaagactatttaacagatggtaacatgatgggcgctacagttggtcgttatgccaaccgtatcgccaagggtgttttcagcctggatgatggtcctcacaagttaactgttaacaattgtggtaacacaaatcacagcagtatcagttccttaaatcttaagcagtacaaggcgtcccctgttgagaatccttccaagggcgtttacgttgttgaatttaaattgttggatgatcacacacagcccaaccctaacgagtttccaggtgacttggaagtcacagtgaagtacactttgaatgttgcagaaatgactttagacatggaataccaagcacagttagttcgtggtgatgctactccaattaatatgaccaaccactcgtattttaacttgaacaaagtcaagagtgagaagtccattcgtggtacagaagttaaggtctgctcgaacaaatcgcttgaagttacagagggggcattgcttccaactggtaagatcattgaaaggaacattgctacttttgattcaactaagcccaccgttttgcatgaagatactccggtctttgattgcactttcattattgacgctaacaaggatttgaagactacagattctgtgagtgtcaacaaattggttcctgtttttaaggcctatcatcccgaatctcacatcaaatttgaggtttcgacgacagaaccaaccgttcatttgtacaccggtgataatttatgtggcaaatttgtgccaaggtctggatttgccgttcagcaaggtagatacgttgatgctatcaaccgtgatgagtggagaggttgtgttcttctgaagcgcggcgaggtatacacttcaaagactcagtacaaattcgatatttag

SEQ ID NO: 9792 - DNA, 1029 bp, Artificial Sequence
  Description of Artificial Sequence: Synthetic polynucleotide
atgagtaatagtaacggtgataataagtatggtgtcattacaattggtgatgagaaaaagttccaagctaccattgcgccacttggtgcaactttggtagacttgaaggtaaacggccaatctgtcgttcaaggttattccaacgtacaagactatttaacagatggtaacatgatgggcgctacagttggtcgttatgccaaccgtatcgccaagggtgttttcagcttagatgatggtcctcacaagttaactgttaacaattgtggtaacacaaatcacagcagtatcagttccttaaatcttaagcagtacaaggcgtcccctgttgagaatccttccaagggcgtttacgttgttgaatttaaattgttggatgatcacacacagcccaaccctaacgagtttccaggtgacttggaagtcacagtgaagtacactttgaatgttgcagaaatgactttagacatggaataccaagcacagttagttcgtggtgatgctactccaattaatatgaccaaccactcctattttaacttgaacaaagtcaagagtgagaagtccattcgtggtacagaagttaaggtctgcagcaacaaatctcttgaagttacagagggggcattgcttccaactggtaagatcattgaaaggaacattgctacttttgattctactaagcccaccgttttgcatgaagatactccggtctttgattgcactttcattattgacgctaacaaggatttgaagactacagattctgtgagtgtcaacaaattggttcctgtttttaaggcctatcatcccgaatctcacatcaaatttgaggtttccacgacagaaccaaccgttcatttgtacaccggtgataatttatgtggcaaatttgtgccaaggtctggatttgccgttcagcaaggtagatacgttgatgctatcaaccgtgatgagtggagaggttgtgttcttttgaagcgcggcgaggtatacacttctaagactcagtacaaattcgatatttga

SEQ ID NO: 9793 - DNA, 1695 bp, Saccharomyces cerevisiae
atgcaatcatccactgaaagtgatagagatattcaggatggtcctgatgctgatattcacgtcgcaccacccgtggaaaaagagtggtcagatggatttgatgacaacgaagtcataaacggggataacgttgagccaccaaaaagagggctcataggttatcttgtcatttacttattgtgttatccaatatccttcgggggtttcctgcctggttgggatagtggtatcacagcaggtttcattaacatggacaactttaaaatgaacttcggttcttacaagcatagcactggtgaatattatttgagcaacgtgcgtatgggtcttcttgtggctatgttcagtattggatgtgccataggtggtcttatttttgcccgtcttgctgatactttaggtagaaggctggcaattgtaatcgtggtgttggtatatatggttggtgcaattattcagatcagttcgaatcacaaatggtaccaatacttcgttggtaagattatctatggtcttggtgctggtggctgttcggtgttgtgtccaatgcttttgtctgaaatagctcctacagatttgagaggtggacttgtctcattgtaccaacttaacatgaccttcggtattttcttgggttattgtagcgtttatggtacgagaaaatacgataacactgcacaatggagagtcccacttgggctttgctttttatggactttgattatcatcattggtatgttattggttccagagtccccaagatatcttattgaatgtgagagacacgaagaggcccgtgcttccattgccaaaatcaacaaggtttcaccagaggatccatgggtactcaaacaggctgatgaaatcaacgccggtgtccttgcccaaagagaactaggagaagcttcatggaaagaacttttctccgtcaaaactaaagtccttcaacgtttgatcacaggtattcttgtgcaaacctttttgcaacttactggtgaaaactactttttcttctacggaactaccattttcaaatcagtcggtcttactgatgggtttgagacgtcgatcgttctaggtacagtgaacttcttttccactattattgctgttatggtcgtagacaaaattggccgtcgtaaatgtcttttatttggtgcagctgggatgatggcttgtatggtcatatttgcaagtatcggggtgaaatgtctttaccctcatggccaggatggtccatcctcaaaaggtgcaggtaatgccatgattgtgttcacttgcttctatatattttgctttgcaacgacatgggctcctgttgcttatattgtggttgccgagtcgttcccttcgaaggtcaaatctagggccatgtcgatttcgactgcatgcaactggttgtggcaatttttgatcgggtttttcacaccattcattactgggtctatccacttctattatggttatgtgttcgtaggttgtttggttgcaatgtttctgtacgttttcttctttttaccagaaacgattggtctatctttggaggaaatccaattactatatgaagaaggtataaaaccatggaaatctgcatcttgggtcccaccttctaggagaggtattccttccgaagaaagtaagaccgagaagaaggattggaagaaatttttgaagttctcaaagggttctgattga

SEQ ID NO: 9794 - DNA, 1695 bp, Artificial Sequence
  Description of Artificial Sequence: Synthetic polynucleotide
atgcaatcttccactgaaagtgatagagatattcaggatggtcctgatgctgatattcacgtcgcaccacccgtggaaaaagagtggtctgatggatttgatgacaacgaagtcataaacggggataacgttgagccaccaaaaagagggctcataggttatcttgtcatttacttattgtgttatccaatatccttcgggggtttcttacctggttgggatagtggtatcacagcaggtttcattaacatggacaactttaaaatgaacttcggttcttacaagcatagcactggtgaatattatttgagcaacgtgcgtatgggtcttcttgtggctatgttcagtattggatgtgccataggtggtcttatttttgcccgtcttgctgatactttaggtagaaggttagcaattgtaatcgtggtgttggtatatatggttggtgcaattattcagatcagtagtaatcacaaatggtaccaatacttcgttggtaagattatctatggtcttggtgctggtggctgttctgtgttgtgtccaatgcttttgtctgaaatagctcctacagatttgagaggtggacttgtctctttgtaccaacttaacatgaccttcggtattttcttgggttattgtagcgtttatggtacgagaaaatacgataacactgcacaatggagagtcccacttgggctttgctttttatggactttgattatcatcattggtatgttattggttccagagtccccaagatatcttattgaatgtgagagacacgaagaggcccgtgcttccattgccaaaatcaacaaggtttctccagaggatccatgggtactcaaacaggctgatgaaatcaacgccggtgtccttgcccaaagagaattaggagaagcttcttggaaagaacttttctccgtcaaaactaaagtccttcaacgtttgatcacaggtattcttgtgcaaacctttttgcaacttactggtgaaaactactttttcttctacggaactaccattttcaaatctgtcggtcttactgatgggtttgagacgtccatcgttttaggtacagtgaacttcttttccactattattgctgttatggtcgtagacaaaattggccgtcgtaaatgtcttttatttggtgcagctgggatgatggcttgtatggtcatatttgcaagtatcggggtgaaatgtctttaccctcatggccaggatggtccatcctctaaaggtgcaggtaatgccatgattgtgttcacttgcttctatatattttgctttgcaacgacatgggctcctgttgcttatattgtggttgccgagagtttcccttctaaggtcaaatctagggccatgtctatttctactgcatgcaactggttgtggcaatttttgatcgggtttttcacaccattcattactgggtctatccacttctattatggttatgtgttcgtaggttgtttggttgcaatgtttttgtacgttttcttctttttaccagaaacgattggtctttctttggaggaaatccaattattatatgaagaaggtataaaaccatggaaatctgcatcttgggtcccaccttctaggagaggtattccttccgaagaaagtaagaccgagaagaaggattggaagaaatttttgaagttctccaagggttctgattga

SEQ ID NO: 9795 - DNA, 1509 bp, Saccharomyces cerevisiae
atgacaaaatcagacgaaacaacagctaccagcttgaatgccaaaactctaaagagttttgaatccactcttccaataccaacttatccaagagaaggtgttaaacaaggtattgttcatctgggagtcggtgcattccaccgttcccatttagctgttttcatgcaccgtctgatgcaggagcaccacttaaaggattggtccatatgtggtgttggtttaatgaaagcagatgcacttatgcgcgatgccatgaaggcccaagattgcctatacacccttgtggagcgtggtatcaaggacactaacgcttatatcgtcggttctattactgcttacatgtacgctcccgatgatccaagagctgttattgaaaagatggccaatccagacacacacattgtttctttgacggtcacagaaaacggttactaccacagtgaagcaacaaactccttaatgacagatgctcccgagattatcaatgatttgaaccacccagaaaagccagatactctgtatgggtatctatatgaggccctgttgttgcgttacaagagaggtcttaccccattcactattatgtcatgtgacaacatgccccaaaatggtgtcacagtaaagaccatgcttgttgcatttgccaagttaaagaaggatgagaaattcgccgcctggattgaagacaaggttacttctcctaacagcatggtggaccgtgtgaccccacgttgtaccgataaagagcgtaaatacgttgctgacacctggggaatcaaggatcaatgtcccgttgtcgcagaacctttcatccaatgggttcttgaagacaacttctccgatggccgtcctccatgggaacttgttggtgttcaggtcgtcaaggatgtcgattcctacgaattgatgaagttgcgtctacttaacggtggacattctgctatgggatatttgggatacttggcaggctacacctatatacatgaggttgtcaacgacccaactatcaacaagtatatccgtgttttgatgcgtgaggaagttatcccattattgcctaaagtgccaggtgttgatttcgaagagtacactgcatcagtgttggaaagattctccaatccagctattcaggacactgtcgcacgtatttgtttgatgggctctggtaagatgcctaagtatgttttgccatcaatttacgagcaattgcgtaaaccagatggtaagtacaagttattggcagtatgtgttgctggctggttccgttacctgactggtgtagacatgaatgggaagccattcgaaatcgaggatcctatggcaccaaccttgaaggcagccgcagttaagggtggtaaagatcctcacgaactgctcaacattgaggtgcttttcagtcctgagattcgtgacaacaaagaattcgttgcacagttgacccactccctagaaacagtttatgataaagggccaattgccgctattaaggaaattttagaccaagtgtga

SEQ ID NO: 9796 - DNA, 1509 bp, Artificial Sequence
  Description of Artificial Sequence: Synthetic polynucleotide
atgacaaaaagtgacgaaacaacagctaccagcttgaatgccaaaactttgaagagttttgaatccactcttccaataccaacttatccaagagaaggtgttaaacaaggtattgttcatttaggagtcggtgcattccaccgttcccatttagctgttttcatgcaccgtttaatgcaggagcaccacttaaaggattggtccatatgtggtgttggtttaatgaaagcagatgcacttatgcgcgatgccatgaaggcccaagattgcttatacacccttgtggagcgtggtatcaaggacactaacgcttatatcgtcggttctattactgcttacatgtacgctcccgatgatccaagagctgttattgaaaagatggccaatccagacacacacattgtttctttgacggtcacagaaaacggttactaccacagtgaagcaacaaactccttaatgacagatgctcccgagattatcaatgatttgaaccacccagaaaagccagatactttatatgggtatttgtatgaggccttattgttgcgttacaagagaggtcttaccccattcactattatgtcctgtgacaacatgccccaaaatggtgtcacagtaaagaccatgcttgttgcatttgccaagttaaagaaggatgagaaattcgccgcctggattgaagacaaggttacttctcctaacagcatggtggaccgtgtgaccccacgttgtaccgataaagagcgtaaatacgttgctgacacctggggaatcaaggatcaatgtcccgttgtcgcagaacctttcatccaatgggttcttgaagacaacttctccgatggccgtcctccatgggaacttgttggtgttcaggtcgtcaaggatgtcgattcctacgaattgatgaagttgcgtttacttaacggtggacattctgctatgggatatttgggatacttggcaggctacacctatatacatgaggttgtcaacgacccaactatcaacaagtatatccgtgttttgatgcgtgaggaagttatcccattattgcctaaagtgccaggtgttgatttcgaagagtacactgcatctgtgttggaaagattctccaatccagctattcaggacactgtcgcacgtatttgtttgatgggctctggtaagatgcctaagtatgttttgccatctatttacgagcaattgcgtaaaccagatggtaagtacaagttattggcagtatgtgttgctggctggttccgttacttgactggtgtagacatgaatgggaagccattcgaaatcgaggatcctatggcaccaaccttgaaggcagccgcagttaagggtggtaaagatcctcacgaattactcaacattgaggtgcttttcagtcctgagattcgtgacaacaaagaattcgttgcacagttgacccactccttagaaacagtttatgataaagggccaattgccgctattaaggaaattttagaccaagtgtga

SEQ ID NO: 9797 - DNA, 1137 bp, Saccharomyces cerevisiae
atgacaattaacacaaagaacatagttgttgttggtgctggtgtgtttggtgtgtctgtggcaaatcacttgtacagggaactgggtgggacatacgcaataaagctcgtcacagcatctaattatgtgtattttctaccctcagctgtccgtttgacggtttcaaaggattataccaagtcgatcctgccgttaaaaaatgttcttgatagtggtattgaagttatcaaagatacggctgccagctttgatgataaggaggtagttttggggtcagacagggccataaagtttgatatcttggttcttgcaactggctcaaagtgggctgatccaattggttcaacttataccttcggggataactataaagagtattttgaaagagaggcttctcgaatctcagatgcagatcacatactttttcttggcggtggctttgttaattgtgaactagctggtgaattgttattcaagtatttggaggagatcaggtctggcaaaaagcgtatttccattattcataattccgataagctactgccggactctgggttatacaacgataccctaagaaaaaatgtgacagactatctctcaaaaaatggtattacgttgtacttgaacacagtaggggcttctttagacacctcgccgaaacgtatttttctaggtgagggctcatctaaatatatagatgctgatttgatttacagaggcgttggtatttctccaaatgtgccggtcaacagtatttcagacctttgtgacaagaaagggttcattcaagttgaaaaaaacttcagggtaaaagctgttgaggcaggaaacgtttttgccattggtgatgtaacgaattttagatatcacggattggttaaaagagataattgggttgatgttttgacccgaaatgttataagttctttacaagaaggaacagaggctagtctcgttgatgcagattgtcttgagacaggacatgccccaagtggtgtctcccttgggccaaatgcagggtttggccaatttccactaccgttacttgggacgattaatattccatcgtttttaatttctagagcaaagtcgaagaatcttttctccgacaaaatggaacctttattcaaaaaatag

SEQ ID NO: 9798 - DNA, 1137 bp, Artificial Sequence
  Description of Artificial Sequence: Synthetic polynucleotide
atgacaattaacacaaagaacatagttgttgttggtgctggtgtgtttggtgtgtctgtggcaaatcacttgtacagggaattgggtgggacatacgcaataaagctcgtcacagcatctaattatgtgtattttttgccctctgctgtccgtttgacggtttccaaggattataccaagtctatcttaccgttaaaaaatgttcttgatagtggtattgaagttatcaaagatacggctgccagctttgatgataaggaggtagttttggggagtgacagggccataaagtttgatatcttggttcttgcaactggctccaagtgggctgatccaattggttctacttataccttcggggataactataaagagtattttgaaagagaggcttctagaatcagtgatgcagatcacatactttttcttggcggtggctttgttaattgtgaattggctggtgaattgttattcaagtatttggaggagatcaggtctggcaaaaagcgtatttccattattcataattccgataagttattaccggactctgggttatacaacgataccttgagaaaaaatgtgacagactatctctctaaaaatggtattacgttgtacttgaacacagtaggggcttctttagacacctctccgaaacgtatttttttaggtgagggctcttctaaatatatagatgctgatttgatttacagaggcgttggtatttctccaaatgtgccggtcaacagtatttctgacctttgtgacaagaaagggttcattcaagttgaaaaaaacttcagggtaaaagctgttgaggcaggaaacgtttttgccattggtgatgtaacgaattttagatatcacggattggttaaaagagataattgggttgatgttttgaccagaaatgttataagttctttacaagaaggaacagaggctagtctcgttgatgcagattgtcttgagacaggacatgccccaagtggtgtctcccttgggccaaatgcagggtttggccaatttccattaccgttacttgggacgattaatattccatcttttttaatttctagagcaaagtccaagaatcttttctccgacaaaatggaacctttattcaaaaaatga

SEQ ID NO: 9799 - DNA, 1125 bp, Saccharomyces cerevisiae
atgggggaagagattagacttttgtcctctaaaggtcttgagacccatagtagcttttgtttgcccgaggatattttcagaaaccgtttaacatggttgtgcagtgagattcgcaactcaggattttggatctggtcgctatcatggttaccgcttgccgtttggtgggggatggccagtacttggttttatccccttctgacttcagtagttctaatcctggcgctaattgctattttgccagtagttcaaatacagtacagtaaatatactttatcaaatcaactcacccagctttctaaagaaatcatcaaaagtgcaccaggtgcatactctgctgattgggacgctgttgcaatacatttcaattcctacttgtatgaaaacaaagcatggaaaactgcacattttttttttaatggtactgactgccaagaagcattcaggaaaaccattctagagccagctgttttgaggagacaaaacgaagatcctaggttcagttcaattgagattttggtcccttacaccgaagacgcggtgcaggtttattttacaaaagtaaacgcacagtggaggttgatccatggtaagaaggaatgcaaacttactatgttggaaaatgtcaagcttcctaaggaaacctatcgctgcaagctagcatggagttgccagagaatcaggatttctttctctccactagacttccttcctgatatgtctgacttctttatttgtgcaaatttatcaccagcatgcttggtatcttattggctaatagacattttctttagaatgatagatgattttcaaaacataaggcctaaatcgatgaaagttgatgataaaatgcagtacctatcagatattataaacgagcagggtgctagccctgaaaaatgggatacaattgcaaggaaaacgaatacacgattatttgaaaagagggtctggaaaaacgaagagtttttctttgatgggactgattgtcaggcattctttgaacggaactttagtagccttttgttctcaaaaaaatctgcgtcgcctagatcattaaacgttgaactttggaaatacattcaagaagcgcaattgagctgtaactatgagccgttaccataa

SEQ ID NO: 9800 - DNA, 1125 bp, Artificial Sequence
  Description of Artificial Sequence: Synthetic polynucleotide
atgggggaagagattagacttttgtcctctaaaggtcttgagacccatagtagcttttgtttgcccgaggatattttcagaaaccgtttaacatggttgtgcagtgagattcgcaactctggattttggatctggtctttatcttggttaccgcttgccgtttggtgggggatggccagtacttggttttatccccttttgacttctgtagttttgatcttagcgttaattgctattttgccagtagttcaaatacagtacagtaaatatactttatccaatcaactcacccagctttctaaagaaatcatcaaaagtgcaccaggtgcatactctgctgattgggacgctgttgcaatacatttcaattcctacttgtatgaaaacaaagcatggaaaactgcacattttttttttaatggtactgactgccaagaagcattcaggaaaaccattttagagccagctgttttgaggagacaaaacgaagatcctaggttcagttctattgagattttggtcccttacaccgaagacgcggtgcaggtttattttacaaaagtaaacgcacagtggaggttgatccatggtaagaaggaatgcaaacttactatgttggaaaatgtcaagcttcctaaggaaacctatcgctgcaagttagcatggagttgccagagaatcaggatttctttctctccattggacttccttcctgatatgtctgacttctttatttgtgcaaatttatctccagcatgcttggtatcttattggttgatagacattttctttagaatgatagatgattttcaaaacataaggcctaaatctatgaaagttgatgataaaatgcagtacctttctgatattataaacgagcagggtgctagccctgaaaaatgggatacaattgcaaggaaaacgaatacaagattatttgaaaagagggtctggaaaaacgaagagtttttctttgatgggactgattgtcaggcattctttgaaagaaactttagtagccttttgttctccaaaaaatctgcgtcccctagatctttaaacgttgaactttggaaatacattcaagaagcgcaattgagctgtaactatgagccgttaccatga

SEQ ID NO: 9801 - DNA, 93 bp, Saccharomyces cerevisiae
atgccaattataggggtgccgaggtgccttgaaaaccccttttgcgcgcctgcgaagtttccgctttcggtcaaaaagaaaatccgaatttag

SEQ ID NO: 9802 - DNA, 93 bp, Artificial Sequence
  Description of Artificial Sequence: Synthetic oligonucleotide
atgccaattataggggtgccgaggtgccttgaaaaccccttttgcgcgcctgcgaagtttccgctttctgtcaaaaagaaaatcagaatttga

SEQ ID NO: 9803 - DNA, 363 bp, Saccharomyces cerevisiae; identical to SEQ ID NO: 7075

SEQ ID NO: 9804 - DNA, 363 bp, Artificial Sequence; identical to SEQ ID NO: 7076
  Description of Artificial Sequence: Synthetic polynucleotide

SEQ ID NO: 9805 - DNA, 255 bp, Saccharomyces cerevisiae
atgcacggcacttgcctcagcggtctataccctgagccatttacccataactcccacgattatccacattttaatatctatatctcattcggcggccccaaatattgtataactgctcttaatacatacgttataccacttttgcaccatatactaaccactcaatttatacacacttatttcaatatacccacaaaatcaccaccaaaatcacctaaacataaaaattatttatctttcaactttacgaaataa

SEQ ID NO: 9806 - DNA, 255 bp, Artificial Sequence
  Description of Artificial Sequence: Synthetic polynucleotide
atgcacggcacttgcctcagcggtttataccctgagccatttacccataactcccacgattatccacattttaatatctatatctctttcggcggccccaaatattgtataactgctcttaatacatacgttataccacttttgcaccatatattgaccactcaatttatacacacttatttcaatatacccacaaaatctccaccaaaatctcctaaacataaaaattatttatctttcaactttacgaaatga

SEQ ID NO: 9807 - DNA, 156 bp, Saccharomyces cerevisiae
atgcacggcgcttgcctcagcggtctataccctttgccatttacccataaattccatgattatctacattttaatatctatatctcatttggcggcccaaaatattgtataactgcccttaatacatacgttatactattttacaccgtatactaa

SEQ ID NO: 9808 - DNA, 156 bp, Artificial Sequence
  Description of Artificial Sequence: Synthetic polynucleotide
atgcacggcgcttgcctcagcggtttataccctttgccatttacccataaattccatgattatttgcattttaatatctatatctcttttggcggcccaaaatattgtataactgcccttaatacatacgttatattgttttacaccgtatactga

SEQ ID NO: 9809 - DNA, 432 bp, Saccharomyces cerevisiae
atggctaggcatttcggtatggccctcgccccatgggatgtcatgggaggtggaagatttcagagtaaaaaagcaatggaggaacggaggaagaatggagagtgtattcgttctttcgttggcgcctccgaacaaacagatgcagaaatcaagattagtgaagcattagccaaggttgctgaggaacatggcactgagtctgttactgctattgctattgcctatgttcgctctaaggcgaaaaatgtttttccgtcggttgaaggaggaaaaattgaggatctcaaagagaacattaaggctctcagtatcgatctaacgccggacaatataaaatacttggaaaatgtagttccttttgacatcggatttcctaacacttttatcgtgttaaattccttgactcaaaaatatggtacgaataatgtttag

SEQ ID NO: 9810 - DNA, 432 bp, Artificial Sequence
  Description of Artificial Sequence: Synthetic polynucleotide
atggctaggcatttcggtatggccctcgccccatgggatgtcatgggaggtggaagatttcagagtaaaaaagcaatggaggaaagaaggaagaatggagagtgtattcgttctttcgttggcgcctccgaacaaacagatgcagaaatcaagattagtgaagcattagccaaggttgctgaggaacatggcactgagtctgttactgctattgctattgcctatgttcgctctaaggcgaaaaatgtttttccgtctgttgaaggaggaaaaattgaggatctcaaagagaacattaaggctctcagtatcgatttgacgccggacaatataaaatacttggaaaatgtagttccttttgacatcggatttcctaacacttttatcgtgttaaattccttgactcaaaaatatggtacgaataatgtttga

SEQ ID NO: 9811 - DNA, 183 bp, Saccharomyces cerevisiae
atgtttgctaagctttatcgcggtcttacttacgttaccaacaaaattctatctacattgctatcacatcattccatacattattgcataaattcctttaagccgactacattggcaattataattcttctacacccctgttgccgttgtaatgtttacattattagatgcatccaccattaa

SEQ ID NO: 9812 - DNA, 183 bp, Artificial Sequence
  Description of Artificial Sequence: Synthetic polynucleotide
atgtttgctaagctttatcgcggtcttacttacgttaccaacaaaattttatctacattgttatctcatcattccatacattattgcataaattcctttaagccgactacattggcaattataattcttttacacccctgttgccgttgtaatgtttacattattagatgcatccaccattga

SEQ ID NO: 9813 - DNA, 1941 bp, Saccharomyces cerevisiae
atgattggtgcctttaagaggaaccgtggaagttctcagtcttttgcgaaggaatgtcaaccttctacgttaaaagccaaccttgaagtggcaaaagaacttccattctcagatcgtcgcgatttcgaggatgccactcaaggttacatcggctccttatctgatgagcaaataatcggccctgacggcggtgtagtatggtgtatgaaatcttatggctttttggagcctgagacgcccgcaaatactgttaaccctagcttgtggagacaagcgcagctgaatgccattcatggcctatttaaaatcactgacaacgtttaccaggttagaggactagatatctctaatatgactataatcgaaggtaatacttctttgataatcattgatacgctttttaccacagagactgcccaagagtcgcttaaactttactatagacatcgtcctcagaaacctgtgcgtaccgtaatatatacgcatagccattcggaccactatggaggagttaaaggaattgtcaaggaagcagatgtgaaatccggagaggtgcaaataatagccccagttggcttcatggaaagtgttgtagcagaaaacattctggcagggaatgcgatgcatcgacgttcccaatatcagtttggtatgttactttctcccagtgttaagggtcatgttgattgtgggatagggaaagctgcctctcacggaacagttacactgattgcaccaactattattatagaagagcccgtcgaagaacggacaattgatggtgtagattttgtttttcagcttgcacctggatcggaagcgccttcggaaatgctcatttatatgccacaacagcgtgtgctcaacatggcagaagatgtgacacatcatatgcataacttgtatgctcttcgaggtgttgaagtacgcgacggcaaccaatgggctaaatacatcgatgcagctcgagttgctttcggtagcaaaacggacgttttaattgcccagcatcactggcccactacagggcaaatgcggatcaatgaattgctgaagaagcagcgggatatgtataaattcattcatgaccaaacacttcgattgcttaatcagggatataccagtagagatatcgccgaaactcttcgtatgccatccagtcttgagcaagaatggtcaacacgaggttactacggcactttgagtcacaatgtaaaggctgtgtatcaaaaatacctggggtggtatgatgcaaatccggctaacctaaaccctttgccacccgtagcctatgcaaagaaagcagtcgagtatatgggcggcgctgatgctgtattggcacgggcttataaagatttccagaaaggagagtttcgttgggttgcaagcgttgttaatcaattggttttcgctgacccaaataaccatcaagctcgtgagctctgtgctgacgcattggaacagctggggtatcaagcagaagccagcacgtggcgcaacgcttaccttgtaggcgccatggagttgcgccaaggtgtaccaaaaagacgaagtactggtaagcgcaacaatattgccgttttgaataacgaaatgttttttgactttcttgctgtgagattgaacgctacgaaagcagaaggtaaaattatcgttagtaattggtgtttcattaattcaaatgaacggttcgtgatcactctcgaaaactgtgccctgacctacattcagggctggcagacagatgcagatgcaacaattactctcaaaagaactacatttgaagctttattggccaatgaaattactatggttgattttttaagatcaaaagaagtcgaaatagagggtaatcgactcagaattgaagagctgttgaagttgtttgacgacttcgaccagtcctttcccgtcgttgagcctatggggggaagcacttga

SEQ ID NO: 9814 - DNA, 1941 bp, Artificial Sequence
  Description of Artificial Sequence: Synthetic polynucleotide
atgattggtgcctttaagaggaaccgtggaagttctcagtcttttgcgaaggaatgtcaaccttctacgttaaaagccaaccttgaagtggcaaaagaacttccattcagtgatcgtcgcgatttcgaggatgccactcaaggttacatcggctccttatctgatgagcaaataatcggccctgacggcggtgtagtatggtgtatgaaatcttatggctttttggagcctgagacgcccgcaaatactgttaaccctagcttgtggagacaagcgcagttgaatgccattcatggcttatttaaaatcactgacaacgtttaccaggttagaggattagatatctctaatatgactataatcgaaggtaatacttctttgataatcattgatacgctttttaccacagagactgcccaagagtctcttaaactttactatagacatcgtcctcagaaacctgtgcgtaccgtaatatatacgcatagccattctgaccactatggaggagttaaaggaattgtcaaggaagcagatgtgaaatccggagaggtgcaaataatagccccagttggcttcatggaaagtgttgtagcagaaaacattttggcagggaatgcgatgcatcgtcgttcccaatatcagtttggtatgttactttctcccagtgttaagggtcatgttgattgtgggatagggaaagctgcctctcacggaacagttacattaattgcaccaactattattatagaagagcccgtcgaagaaagaacaattgatggtgtagattttgtttttcagcttgcacctggatctgaagcgccttctgaaatgctcatttatatgccacaacagcgtgtgctcaacatggcagaagatgtgacacatcatatgcataacttgtatgctcttcgtggtgttgaagtacgcgacggcaaccaatgggctaaatacatcgatgcagctcgtgttgctttcggtagcaaaacggacgttttaattgcccagcatcactggcccactacagggcaaatgagaatcaatgaattgttgaagaagcagagagatatgtataaattcattcatgaccaaacacttagattgcttaatcagggatataccagtagagatatcgccgaaactcttcgtatgccatccagtcttgagcaagaatggtctacaagaggttactacggcactttgagtcacaatgtaaaggctgtgtatcaaaaatacttggggtggtatgatgcaaatccggctaacttgaaccctttgccacccgtagcctatgcaaagaaagcagtcgagtatatgggcggcgctgatgctgtattggcaagagcttataaagatttccagaaaggagagtttcgttgggttgcaagcgttgttaatcaattggttttcgctgacccaaataaccatcaagctcgtgagctctgtgctgacgcattggaacagttagggtatcaagcagaagccagcacgtggcgcaacgcttaccttgtaggcgccatggagttgcgccaaggtgtaccaaaaagaagaagtactggtaagcgcaacaatattgccgttttgaataacgaaatgttttttgactttcttgctgtgagattgaacgctacgaaagcagaaggtaaaattatcgttagtaattggtgtttcattaatagtaatgaaagattcgtgatcactctcgaaaactgtgccttgacctacattcagggctggcagacagatgcagatgcaacaattactctcaaaagaactacatttgaagctttattggccaatgaaattactatggttgattttttaagaagtaaagaagtcgaaatagagggtaatagactcagaattgaagagttattgaagttgtttgacgacttcgaccagtcctttcccgtcgttgagcctatggggggaagcacttga

SEQ ID NO: 9815 - DNA, 510 bp, Saccharomyces cerevisiae
atgatagcgtggtccctagtggctacgttgcaatgcaaaatgacagggaagagttctttctatacatgtagagcacttatgggcctatttgaaggtggttttgtggctgatttggttctctggatgtcgtacttctacagctcttcagaattgtcaataagactgtcgttcttctgggtgacactatctctaacacaaatcatcacttcaattgtggccttcggggtttttcacatgagagggataggtggcatggcagggtggcaatggctttttttgatagaaagaattttcactttagtcatcggtatcagtgcatacttcttgatggtaccctccgtagttcaaacgaagaaaccttggagcaagaaaggatggttcactgagagggaagaaaaaatcatcgtaaacaagattctgagagatgatccgacaaaaggggatatgaacaataggcaaggtatgtcacttaaaatgttatggcaggggataacagattactatatatag

SEQ ID NO: 9816 - DNA, 510 bp, Artificial Sequence
  Description of Artificial Sequence: Synthetic polynucleotide
atgatagcgtggtccttagtggctacgttgcaatgcaaaatgacagggaagagttctttctatacatgtagagcacttatgggcttatttgaaggtggttttgtggctgatttggttctctggatgagttacttctacagctcttctgaattgagcataagattatctttcttctgggtgacattatctttaacacaaatcatcacttctattgtggccttcggggtttttcacatgagagggataggtggcatggcagggtggcaatggctttttttgatagaaagaattttcactttagtcatcggtatcagtgcatacttcttgatggtaccctccgtagttcaaacgaagaaaccttggagcaagaaaggatggttcactgagagggaagaaaaaatcatcgtaaacaagattttaagagatgatccgacaaaaggggatatgaacaataggcaaggtatgtctcttaaaatgttatggcaggggataacagattactatatatga

SEQ ID NO: 9817 - DNA, 648 bp, Saccharomyces cerevisiae
atgggccttttggcttatatccctacgaacgttttggccacatacctgactttggtattgagaagtatcggtttcacaacctttcaagccaacctgctagctattcctaactttgttcttcatattctcctgctgtttggtttaacatggtcgacagaaaaatgtaataacaggctaggtttgagtctgttacaaccgttgtacactgttcctcttcttgcagttcttcgcttttggaaaggtacaatgtttaataaatggggaacttatgcaattattaccttaatattagataatccgtatatccatgcaatttgtgtatccttgtgttctagaaactcccaatcagttaaaacaagaacagtatctacttgcttgtacaatatgttcgtgcaagcaggtctcatcatatcctcaaacatttatgcgaaaagcgatgccccactctatcgtaagggaaatggagttctttttggtttggcactttttatgtttccaatattaattggtagcaaattgatttatgtctatatcaacaagcagagggataagaggtggaatgcaatgtcagaagaggaaaaagaccactatctaagtactactagtgatgctggttcacgtagactcgattttagattctatcactga

SEQ ID NO: 9818 - DNA, 648 bp, Artificial Sequence
  Description of Artificial Sequence: Synthetic polynucleotide
atgggccttttggcttatatccctacgaacgttttggccacatacttgactttggtattgagaagtatcggtttcacaacctttcaagccaacttattagctattcctaactttgttcttcatattctcttactttttggtttaacatggtctacagaaaaatgtaataacaggcttggtttgagtttgttacaaccgttgtacactgttcctcttcttgcagttcttcgcttttggaaaggtacaatgtttaataaatggggaacttatgcaattattaccttaatattagataatccgtatatccatgcaatttgtgtatccttgtgttctagaaactcccaatctgttaaaacaagaacagtatctacttgcttgtacaatatgttcgtgcaagcaggtctcatcatatccagtaacatttatgcgaaaagcgatgccccactctatcgtaagggaaatggagttctttttggtttggcactttttatgtttccaatattaattggtagcaaattgatttatgtctatatcaacaagcagagggataagaggtggaatgcaatgtctgaagaggaaaaagaccactatttgagtactactagtgatgctggttctcgtagactcgattttagattctatcactga

SEQ ID NO: 9819 - DNA, 363 bp, Saccharomyces cerevisiae
atggtcaaattaacttcaatcgctgctggtgtcgccgccatcgctgctggtgcttccgcaaccaccactctagctcaatctgacgaaagagtcaacttggtggaattgggtgtctacgtctctgatatcagagctcacttggcccaatactacatgttccaagccgcccacccaactgaaacctacccagtcgaagttgctgaagccgttttcaactacggtgacttcaccaccatgttgactggtatttccccagaccaagtcaccagaatgatcaccggtgtcccatggtactccaccagattaaagccagctatctccaaggctctatccaaagatggtatctacactatcgcaaactag

SEQ ID NO: 9820 - DNA, 363 bp, Artificial Sequence
  Description of Artificial Sequence: Synthetic polynucleotide
atggtcaaattaacttctatcgctgctggtgtcgccgccatcgctgctggtgcttccgcaaccaccactttggctcaatctgacgaaagagtcaacttggtggaattgggtgtctacgtctctgatatcagagctcacttggcccaatactacatgttccaagccgcccacccaactgaaacctacccagtcgaagttgctgaagccgttttcaactacggtgacttcaccaccatgttgactggtatttccccagaccaagtcaccagaatgatcaccggtgtcccatggtactccaccagattaaagccagctatctccaaggctttgtccaaagatggtatctacactatcgcaaactga

SEQ ID NO: 9821 - DNA, 342 bp, Saccharomyces cerevisiae
atggaaaatatagcattcatttgtcttcagagctgcacaagaggtatatacggctgccaattttatagcgctacattggaaaattatcataacatatcatttccaatatttctattgcagaccaccttatttaatcactgtatctctttaaactggtctaaagctgtgtttaatcgtattaagaggcgaaagtacatgatggaactgaaaaagcactgttacaattaccaggtgagtaggataggaaatcggaaaaaaaatgggtgcttctttctaaaaatggccaacaacagagttttctcagtcaaaaatagcccaagattattgctcttctttatataa

SEQ ID NO: 9822 - DNA, 342 bp, Artificial Sequence
  Description of Artificial Sequence: Synthetic polynucleotide
atggaaaatatagcattcatttgtcttcagagctgcacaagaggtatatacggctgccaattttatagcgctacattggaaaattatcataacatatcctttccaatatttttattgcagaccaccttatttaatcactgtatctctttaaactggtctaaagctgtgtttaatcgtattaagaggcgtaagtacatgatggaattgaaaaagcactgttacaattaccaggtgagtaggataggaaatagaaaaaaaaatgggtgcttctttttgaaaatggccaacaacagagttttctctgtcaaaaatagcccaagattattgctcttctttatatga

SEQ ID NO: 9823 - DNA, 273 bp, Saccharomyces cerevisiae
atgcaatactgtgaactcgatttatcagggcagtggctggatacagtatattgtgaagagaatttctccgactttgtctttataaagtttctaaatccttcacagtttgaagagaagatatattgttatactttacatatcaccaaaaggacactagaaaataagagattacttttgtattatgaagatgaattcaaaaaacatggtcacgatattaatgagcttgttggcgacggtataatcttgcgttcatgctggaaccctcgacagtaa

SEQ ID NO: 9824 - DNA, 273 bp, Artificial Sequence
  Description of Artificial Sequence: Synthetic polynucleotide
atgcaatactgtgaactcgatttaagtgggcagtggcttgatacagtatattgtgaagagaatttctccgactttgtctttataaagtttttgaatccttctcagtttgaagagaagatatattgttatactttacatatcaccaaaaggacattagaaaataagagattacttttgtattatgaagatgaattcaaaaaacatggtcacgatattaatgagcttgttggcgacggtataatcttgcgttcttgctggaaccctcgtcagtga

SEQ ID NO: 9825 - DNA, 516 bp, Saccharomyces cerevisiae
atggttcccttatttggtttattttgcattttttctcaattgtactcattatgctccgcatatgttgatatcaccagcggttaccaagtatttttcaacttgccaactaatatgacaaacaatcaaatatgctggctattccaagcatcttactatgatatttattctgataaaagtggtagaacacttagaacgggacggtttgaacccggcgatcagcaatctttgatttatagggataccttagttgagttggaggctattacagattcttatgagtacagtaacctagatctatcgacttataacggacctgagccatataattctgagactgattattgtacagatataatggatttggtaatgcgtgtatatgatgaagaaggacattatgttcatccagttgcgaataactcaacaaatgcttgcgctcatccaactcctcctacgttaaacaatctattgataagtaattattctgacggaagaaattataaagagtcttctatataa

SEQ ID NO: 9826 - DNA, 516 bp, Artificial Sequence
  Description of Artificial Sequence: Synthetic polynucleotide
atggttcccttatttggtttattttgcattttttctcaattgtactctttatgctccgcatatgttgatatcaccagcggttaccaagtatttttcaacttgccaactaatatgacaaacaatcaaatatgctggcttttccaagcatcttactatgatatttattctgataaaagtggtagaacacttagaacgggaagatttgaacccggcgatcagcaatctttgatttatagggataccttagttgagttggaggctattacagattcttatgagtacagtaaccttgatttatctacttataacggacctgagccatataattctgagactgattattgtacagatataatggatttggtaatgcgtgtatatgatgaagaaggacattatgttcatccagttgcgaataactccacaaatgcttgcgctcatccaactcctcctacgttaaacaatttattgataagtaattattctgacggaagaaattataaagagtcttctatatga

SEQ ID NO: 9827 - DNA, 1821 bp, Saccharomyces cerevisiae
atgctggaaactgatcactctaggaatgacaatttagacgataaaagcactgtctgctacagcgaaaagacagatagcaatgttgagaagtctaccacgtctggcttgcgccgtatagacgctgtcaacaaggtcttgtctgactacagctctttcacagcttttggagttacgtttagttcactcaagaccgccctactggtggctctgtttttgcagggttactgtactggactcggagggcagatttcgcaatcaatacaaacctatgccgctaacagttttggaaagcattctcaagtaggatcgatcaataccgtcaaatcaatagtagcctctgttgtcgcagtgccatacgcacgtatatctgatcggtttggacgtatagaatgctggatttttgcgcttgtgctctatactattggagaaattatttctgctgctactccaacgttttccggactttttgcaggtattgttatacaacagttcggttattctggatttcgtcttcttgctacagcactgactggtgatctgtctggattgagagatcgtacatttgcgatgaacatatttctgattcccgtgattataaacacatgggtaagtggaaatattgttagctcagttgctggtaatgttgcaccatataaatggcgttggggctatggaattttttgcatcattgtgcccatctccaccctaatattggtccttccctatgtgtatgctcagtacatttcctggcgcagcggtaagttaccaccattaaaattgaaagaaaaaggacagaccctgcgtcaaacgctctggaaatttgcggatgacataaacttaattggagtcattcttttcactgctttcttagttttagtattattacctctcacaatagctggtggagccacctccaaatggagagagggtcacattattgcaatgattgtggttggtggctgcttaggttttatctttctaatttgggaattaaaatttgctaagaatccatttatcccacgagtatatctaggtgatccaaccatctacgttgcattgctaatggaatttgtatggcgtctaggtttgcagattgagttagagtatttggtcaccgtgttaatggtagcattcggagaatcaacattaagtgcgcagcggatagctcagctttacaattttctacagtcatgcactaatattgttgtcggcattatgctgcatttctatcctcatccgaaagtctttgtagtcgctgggtcgcttcttggtgtcatcggaatgggtcttttgtacaaatacagggtggtatatgacgggatttcgggtcttattggcgctgagattgtggtcggtatagctggtggtatgatacgttttcctatgtggacgctagtgcacgcttcaaccacccacaatgagatggcaactgtcactgggttactaatgtccgtttatcaaatcggagacgcagtaggtgcttccatcgctggtgctatatggactcagcgtctggcaaaggagttgatacagcgactcggctctagtttagggatggcaatctacaaatcaccactcaattatctaaaaaaataccctattggatcagaggttcgtgttcagatgatagaatcctattcgaagattcaacgcttattgataattgtgtccatttcgtttgcggctttcaatgctgttctctgttttttcttgcgtggctttactgtaaacaagaagcaaagtctttccgcagaagaacgagagaaagagaagctcaaaatcaaacaacaatcatggctccgtcgtgtaattggatattga

SEQ ID NO: 9828 - DNA, 1821 bp, Artificial Sequence
  Description of Artificial Sequence: Synthetic polynucleotide
atgttggaaactgatcactctaggaatgacaatttagacgataaaagcactgtctgctacagcgaaaagacagatagcaatgttgagaagtctaccacgtctggcttgcgccgtatagacgctgtcaacaaggtcttgtctgactacagctctttcacagcttttggagttacgtttagtagcctcaagaccgccttattggtggctttgtttttgcagggttactgtactggactcggagggcagatttctcaaagtatacaaacctatgccgctaacagttttggaaagcattctcaagtaggatctatcaataccgtcaaatctatagtagcctctgttgtcgcagtgccatacgcacgtatatctgatagatttggacgtatagaatgctggatttttgcgcttgtgctctatactattggagaaattatttctgctgctactccaacgttttccggactttttgcaggtattgttatacaacagttcggttattctggatttcgtcttcttgctacagcattgactggtgatttatctggattgagagatcgtacatttgcgatgaacatatttttgattcccgtgattataaacacatgggtaagtggaaatattgttagctctgttgctggtaatgttgcaccatataaatggcgttggggctatggaattttttgcatcattgtgcccatctccaccttaatattggtccttccctatgtgtatgctcagtacatttcctggcgcagcggtaagttaccaccattaaaattgaaagaaaaaggacagaccttacgtcaaacgctctggaaatttgcggatgacataaacttaattggagtcattcttttcactgctttcttagttttagtattattacctctcacaatagctggtggagccacctccaaatggagagagggtcacattattgcaatgattgtggttggtggctgcttaggttttatctttttgatttgggaattaaaatttgctaagaatccatttatcccaagagtatatttgggtgatccaaccatctacgttgcattgttgatggaatttgtatggcgtttgggtttgcagattgagttagagtatttggtcaccgtgttaatggtagcattcggagaatctacattaagtgcgcagaggatagctcagctttacaattttttgcagagttgcactaatattgttgtcggcattatgttgcatttctatcctcatccgaaagtctttgtagtcgctgggtctcttcttggtgtcatcggaatgggtcttttgtacaaatacagggtggtatatgacgggatttctggtcttattggcgctgagattgtggtcggtatagctggtggtatgatacgttttcctatgtggacgttagtgcacgctagcaccacccacaatgagatggcaactgtcactgggttattgatgtccgtttatcaaatcggagacgcagtaggtgcttccatcgctggtgctatatggactcagcgtttagcaaaggagttgatacagcgtctcggctctagtttagggatggcaatctacaaatctccactcaattatttgaaaaaataccctattggatctgaggttcgtgttcagatgatagaatcctattccaagattcaacgcttattgataattgtgtccatttcctttgcggctttcaatgctgttctctgttttttcttgcgtggctttactgtaaacaagaagcaaagtctttccgcagaagaaagagagaaagagaagctcaaaatcaaacaacaaagttggctccgtcgtgtaattggatattga

SEQ ID NO: 9829 - DNA, 1770 bp, Saccharomyces cerevisiae
atgactatttcttctgcacatccagaaacagaacccaagtggtggaaagaggccacaatctatcaaatttatcccgcaagtttcaaagactccaacaacgatgggtggggtgatatgaagggtattgcctccaagttggagtatatcaaagagcttggtgccgatgccatttggatctcaccattctacgactcgccacaagatgatatgggttacgatattgccaactacgaaaaggtctggccaacctacggtacgaacgaggactgctttgccttgatcgaaaagacacataagcttggtatgaaatttatcaccgacttagtcatcaaccattgctcgagcgaacatgaatggttcaaagagagcagatcctcaaaaaccaatccaaaacgtgactggttcttctggagacctcctaagggttatgacgccgaaggcaagccaattcctccaaacaattggaggtcttacttcggtggttctgcatggacgttcgatgaaaagacacaagagttttacttgcgtttgttttgctccacccaacctgatttgaattgggagaatgaggactgtagaaaggcaatctacgaaagtgccgttggatactggttagaccatggtgtagacggctttagaattgatgtgggaagcttgtactccaaggttgctggtctaccagacgctcctgtgattgacgaaaactcaaagtggcaacccagtgatcctttcacaatgaacggaccacgtatccatgagtttcatcaagaaatgaacaagttcatcagaaacagagtgaaggatggcagagaaattatgacagttggtgaaatgcaacatgctactgatgaaaccaagaggttgtatacaagtgcatcaagacacgaacttagtgagttattcaacttttcccacactgatgtcgggacttcgcccaagttccgtcaaaatttgatcccatatgaactaaaggattggaaggttgcccttgctgaacttttcagatacgttaacggaactgattgttggtcaacaatttatctggaaaatcacgaccaacctcgttcaattaccagatttggtgacgattctcctaagaaccgtgttatttctggtaagttgttgtctgtgttgttggtgtcactgagcggtactctatatgtgtaccaaggacaggaactgggtgaaatcaatttcaagaactggcctatcgaaaaatacgaggatgtcgaagttagaaataactatgatgcgatcaaggaagagcatggagaaaactcgaaggagatgaagaggtttttggaagcaattgcccttatttccagagaccatgctagaacacctatgcaatggtctcgtgaggagccaaatgctggtttttctggtcctaatgctaaaccatggttttacttgaacgagtctttcagggaaggaattaacgctgaagacgaatccaaggatcccaactcggttttgaacttctggaaggaggccttgagatttagaaaggcacacaaggatattactgtatatggatatgattttgagtttattgatttggacaataagaaactgttcagcttcacaaagaaatacgacaacaaaacattgtttgctgctttgaacttcagctctgattcgattgacttcacgattccaaacaatagctcgtcgtttaagttggaattcggaaactacccaagaagcgaagttgatgcgtcttccagaacattgaagccatgggagggcagaatttacatatctgaatga

SEQ ID NO: 9830 - DNA, 1770 bp, Artificial Sequence
  Description of Artificial Sequence: Synthetic polynucleotide
atgactatttcttctgcacatccagaaacagaacccaagtggtggaaagaggccacaatctatcaaatttatcccgcaagtttcaaagactccaacaacgatgggtggggtgatatgaagggtattgcctccaagttggagtatatcaaagagcttggtgccgatgccatttggatctctccattctacgactctccacaagatgatatgggttacgatattgccaactacgaaaaggtctggccaacctacggtacgaacgaggactgctttgccttgatcgaaaagacacataagcttggtatgaaatttatcaccgacttagtcatcaaccattgcagtagcgaacatgaatggttcaaagagagcagatcctctaaaaccaatccaaaacgtgactggttcttctggagacctcctaagggttatgacgccgaaggcaagccaattcctccaaacaattggaggtcttacttcggtggttctgcatggacgttcgatgaaaagacacaagagttttacttgcgtttgttttgctccacccaacctgatttgaattgggagaatgaggactgtagaaaggcaatctacgaaagtgccgttggatactggttagaccatggtgtagacggctttagaattgatgtgggaagcttgtactccaaggttgctggtttgccagacgctcctgtgattgacgaaaactccaagtggcaacccagtgatcctttcacaatgaacggaccacgtatccatgagtttcatcaagaaatgaacaagttcatcagaaacagagtgaaggatggcagagaaattatgacagttggtgaaatgcaacatgctactgatgaaaccaagaggttgtatacaagtgcatctagacacgaacttagtgagttattcaacttttcccacactgatgtcgggacttctcccaagttccgtcaaaatttgatcccatatgaattgaaggattggaaggttgcccttgctgaacttttcagatacgttaacggaactgattgttggtctacaatttatttggaaaatcacgaccaacctcgttctattaccagatttggtgacgattctcctaagaaccgtgttatttctggtaagttgttgtctgtgttgttggtgtctttaagcggtactttatatgtgtaccaaggacaggaattgggtgaaatcaatttcaagaactggcctatcgaaaaatacgaggatgtcgaagttagaaataactatgatgcgatcaaggaagagcatggagaaaactccaaggagatgaagaggtttttggaagcaattgcccttatttccagagaccatgctagaacacctatgcaatggtctcgtgaggagccaaatgctggtttttctggtcctaatgctaaaccatggttttacttgaacgagtctttcagggaaggaattaacgctgaagacgaatccaaggatcccaactctgttttgaacttctggaaggaggccttgagatttagaaaggcacacaaggatattactgtatatggatatgattttgagtttattgatttggacaataagaaattattcagcttcacaaagaaatacgacaacaaaacattgtttgctgctttgaacttcagctctgattctattgacttcacgattccaaacaatagctcctcttttaagttggaattcggaaactacccaagaagcgaagttgatgcgtcttccagaacattgaagccatgggagggcagaatttacatatctgaatga

SEQ ID NO: 9831 - DNA, 1704 bp, Saccharomyces cerevisiae
atgtcaggtgttaataatacatccgcaaatgagttatctactaccatgtctaactctaactcagcagtaggcgctccctctgttaagactgaacacggtgactctaaaaattcccttaacctagatgccaatgagccacctattgacttacctcaaaaacccctctctgcgtataccaccgtcgcaatcctgtgtttgatgattgcatttggcggcttcatctttggttgggataccggtaccatttctggttttgttaacctttctgatttcatcagaaggttcggtcaaaaaaatgacaagggaacctactacttatcgaaagtaagaatgggtttgatcgtctcaatattcaacattggctgcgccataggcggaattgtcttgtcaaaagtcggtgatatatatggtcgtcgtattggattgattacagttactgccatttacgttgtaggcatcctaatccaaataacttccataaacaagtggtaccaatacttcattggaagaattatttctggcctaggagtgggaggcattgctgtcctttccccaatgttgatatctgaagttgctcccaaacatatcagaggaactctggtccaattgtaccagctgatgggtacgatgggtatttttctaggatactgtaccaattacggtaccaagaactatcacaacgccactcaatggagagtcggccttggtctttgctttgcctgggctacattcatggttagtggaatgatgtttgtaccagaatcaccacgttacctgattgaggttggtaaagatgaggaagcgaaacgttcactatcgaaatccaacaaagtctcagttgacgatccagccttgctagttgaatatgacactataaaggcaggaattgaacttgaaaagctggcaggtaacgcatcatggtctgaactactctccactaaaacaaaggtctttcagcgtgttctcatgggagtgatgatccaatcgctgcagcaattaaccggtgacaactacttcttttactacggtaccaccatcttcaaatctgtcggtctaaaggactcctttcagacttcgatcattatcggtgtggttaattttttctcttcattcatagcggtatacaccattgagaggtttggacgccgtacgtgtctattgtggggtgctgcttctatgctatgctgctttgctgtgtttgcctccgtcggtgtgacaaagttgtggcctcaaggaagcagtcaccaagacattacttctcagggcgccggtaactgtatgattgtgtttactatgttcttcattttttcgttcgccaccacttgggcaggcggctgttacgttattgtctcagagacgtttcctcttagggtcaaatcaagaggaatggcaatcgcaacagctgcaaactggatgtggggtttcctgattagtttctttaccccattcattaccggggcaatcaacttttactacggttacgtattcttaggctgtctggtttttgcatacttttatgtctttttctttgtcccagaaacaaaaggcctgacactggaggaggtgaatactatgtggctggaaggtgtgccagcatggaaatcggcctcatgggtgccaccggagagaagaaccgcagattacgatgctgatgcaatagatcatgacaatagaccaatttacaagaggttcttttccagctga

SEQ ID NO: 9832 - DNA, 1704 bp, Artificial Sequence
  Description of Artificial Sequence: Synthetic polynucleotide
atgagtggtgttaataatacatccgcaaatgagttatctactaccatgtctaactctaactctgcagtaggcgctccctctgttaagactgaacacggtgactctaaaaattcccttaaccttgatgccaatgagccacctattgacttacctcaaaaacccctctctgcgtataccaccgtcgcaatcttgtgtttgatgattgcatttggcggcttcatctttggttgggataccggtaccatttctggttttgttaacctttctgatttcatcagaaggttcggtcaaaaaaatgacaagggaacctactacttatccaaagtaagaatgggtttgatcgtcagtatattcaacattggctgcgccataggcggaattgtcttgagtaaagtcggtgatatatatggtcgtcgtattggattgattacagttactgccatttacgttgtaggcatcttaatccaaataacttccataaacaagtggtaccaatacttcattggaagaattatttctggcttgggagtgggaggcattgctgtcctttccccaatgttgatatctgaagttgctcccaaacatatcagaggaactttggtccaattgtaccagttgatgggtacgatgggtatttttttgggatactgtaccaattacggtaccaagaactatcacaacgccactcaatggagagtcggccttggtctttgctttgcctgggctacattcatggttagtggaatgatgtttgtaccagaatctccacgttacttgattgaggttggtaaagatgaggaagcgaaacgttctttatccaaatccaacaaagtctctgttgacgatccagccttgttggttgaatatgacactataaaggcaggaattgaacttgaaaagttagcaggtaacgcatcttggtctgaattactctccactaaaacaaaggtctttcagcgtgttctcatgggagtgatgatccaaagtttacagcaattaaccggtgacaactacttcttttactacggtaccaccatcttcaaatctgtcggtttgaaggactcctttcagacttctatcattatcggtgtggttaattttttctcttctttcatagcggtatacaccattgagaggtttggacgccgtacgtgtttgttgtggggtgctgcttctatgttgtgctgctttgctgtgtttgcctccgtcggtgtgacaaagttgtggcctcaaggaagcagtcaccaagacattacttctcagggcgccggtaactgtatgattgtgtttactatgttcttcattttttctttcgccaccacttgggcaggcggctgttacgttattgtcagtgagacgtttcctcttagggtcaaatctagaggaatggcaatcgcaacagctgcaaactggatgtggggtttcttgattagtttctttaccccattcattaccggggcaatcaacttttactacggttacgtattcttaggctgtttggtttttgcatacttttatgtctttttctttgtcccagaaacaaaaggcttaacattagaggaggtgaatactatgtggttagaaggtgtgccagcatggaaaagtgccagttgggtgccaccggagagaagaaccgcagattacgatgctgatgcaatagatcatgacaatagaccaatttacaagaggttcttttccagctga

SEQ ID NO: 9833 - DNA, 135 bp, Saccharomyces cerevisiae
atgttttatggaagcttcaataaatgcgtgactggctatagttgtcggatggcaatccattattatgtataccgtattattaagagtgcaactaggcccgactataaatctaacactcagatccttgtactgtaa

SEQ ID NO: 9834 - DNA, 135 bp, Artificial Sequence
  Description of Artificial Sequence: Synthetic polynucleotide
atgttttatggaagcttcaataaatgcgtgactggctatagttgtagaatggcaatccattattatgtataccgtattattaagagtgcaactaggcccgactataaatctaacactcagatccttgtattatga

SEQ ID NO: 9835 - DNA, 2904 bp, Saccharomyces cerevisiae
atgttcaatcgctttaataaacttcaagccgctttggctttggtcctttactcccaaagtgcattgggccaatattataccaacagttcctcaatcgctagtaacagctccaccgccgtttcgtcaacttcatcaggttccgtttccatcagtagttctattgagttgacctcatctacttctgatgtctcgagctctctcactgagttaacgtcatcctccaccgaagtctcgagctccattgctccatcaacctcgtcctctgaagtctcgagctctattacttcatcaggctcttcagtctccggctcatcttctattacttcatcaggctcatcagtctccagttcatcttctgccactgaatcaggctcatccgcctccggttcatcctccgccactgaatcgggctcatcagtctccggttcatctacttccattacatcaggctcatcctccgccactgaatcgggctcatcagtctccggttcaacttctgccactgaatcaggctcatccgcctccggttcatcttctgccactgaatcaggctcatccgcctccggttcatcttctgccacagaatcaggctcatcagtctccggttcatcttctgccacagaatcaggctcatcagtctccggttcatcttctgccacagaatcaggctccgcttcttcggttcctagctcatccggttctgtcacagaatcaggctcatcctcatcagcatctgaatcatctatcacacaatctggtaccgcttccggttcatcagcctccagcacgtccggttctgttacacaatctggttcctccgtttccggttcatcagcttcttctgctccaggtatctcgagttcaattcctcaatcaacctcatcggcttccactgcctctggttctatcacctccggtaccttaagttctattacctcttcggcttctagtgcaactgcaactgcttccaactctctttcttccagcgatggtactatttatttgccttctacaaccatcagtggtgacatcacactcaccggttcagtcattgcaactgaagctgtcgaagtcgctgcaggtggtaagttgaccctacttgatggtgacaaatacgttttctctgctgatttcataatccatggtggcgttttcgtagaaaagtctaagccaacttacccaggtaccgaattcgacatttctggtgaaaactttgatgtatctggtacctttaacgctgaagagcctgctgcttcttccgcatctgcctactccttcactccaggctctttcgataacagtggtgatatttctttgagtctatcagagtccacaaagggcgaagtcacattctctccctactctaactctggtgctttctctttctcaaatgctattctcaatggtggttccgtctctggtttgcagcgtagagctgaatcaggttctgtcaacaacggtgagataaatcttgagaatggcagtacctacgtcgttgtcgaaccagtttctggaagtggtacaatcaacatcatctctggcaacctttacttgcactatccagacacctttactggccaaactgttgtattcaagggtgaaggtgttcttgccgttgacccaaccgaaaccaacactactcctatccctgtggttggatacactggtgaaaaccaaatcgccattacagcagatgtcactgctctttcttacgacagtgctactggtgttttaactgcaacacaaggcaactcacaattctccttctctattggtactgggttctccagttctggcttcaacgtctccgaaggaacatttgctggtgcctatgcttattatctaaattacggaggtgttgttgcttccagcgctacaccctcatccacatctaccacatcaggggctaccaactctacttccggttccacttcattcggtgcttccgtaactggttcaaccgcttccacttcattcggtgcttccgtgactggttcaacggcttccaccttgatttccggctccccatctgtttataccacaacattaacatatgcaacaaccacaagcacagtagttgtctcctgttcagaaacaactgattcgaacggtaacgtctataccattaccacaaccgtaccatgttcatctaccaccgccactatcacttcttgcgatgagaccggatgtcatgtaactacgtctaccggtaccgtcgccactgaaaccgtttcttccaaatcatacaccactgttaccgtcacccactgtgacaacaatggctgtaacaccaagactgtcacttctgaatgtcctgaagaaacttcagcaactactacttctccaaaatcatacactactgttaccgttactcactgtgacgacaacggctgtaacactaagactgtcacctctgaggcccctgaagccacaaccactactgtttctccaaagacatacactaccgctactgttactcagtgcgatgacaatggatgtagcaccaagactgtcacttctgaagctcctaaagaaacttcagaaacttcagaaaccagtgctgcccctaagacatacactactgccactgttactcaatgtgatgacaatggttgtaacgtcaagataatcacctctcaaatacctgaagctacttcaaccgtcaccgcaactagtgcttctccaaagtcatacactactgtcacttctgagggttctaaagcaacctcattgactactgccatttccaaggcttctagtgcaatttccacatactccaaatctgcagctccaataaagacctctactggtatcattgtccagtccgagggtattgccgcaggtttgaatgccaatactttgaatgcattggtcggtattttcgttcttgctttctttaactaa

SEQ ID NO: 9836 - DNA, 2904 bp, Artificial Sequence
  Description of Artificial Sequence: Synthetic polynucleotide
atgttcaatcgctttaataaacttcaagccgctttggctttggtcctttactcccaaagtgcattgggccaatattataccaacagttcctctatcgctagtaacagctccaccgccgtttcttctacttcttctggttccgtttccatcagtagttctattgagttgacctcttctacttctgatgtctccagctctctcactgagttaacgtcttcctccaccgaagtctccagctccattgctccatctacctcttcctctgaagtctccagctctattacttcttctggctcttctgtctccggctcttcttctattacttcttctggctcttctgtctccagttcttcttctgccactgaaagtggcagctccgcctccggttcttcctccgccactgaaagtggctcttctgtctccggttcttctacttccattacaagtggcagctcctccgccactgaaagtggctcttctgtctccggttctacttctgccactgaaagtggcagctccgcctccggttcttcttctgccactgaaagtggcagctccgcctccggttcttcttctgccacagaaagtggctcttctgtctccggttcttcttctgccacagaaagtggctcttctgtctccggttcttcttctgccacagaaagtggctccgcttcttctgttcctagctcttccggttctgtcacagaaagtggcagctcctcttctgcatctgaaagctctatcacacaatctggtaccgcttccggttcttctgcctccagcacgtccggttctgttacacaatctggttcctccgtttccggttcttctgcttcttctgctccaggtatctccagttctattcctcaatccacctcttctgcttccactgcctctggttctatcacctccggtaccttaagttctattacctcttctgcttctagtgcaactgcaactgcttccaactctctttcttccagcgatggtactatttatttgccttctacaaccatcagtggtgacatcacactcaccggttctgtcattgcaactgaagctgtcgaagtcgctgcaggtggtaagttgaccttacttgatggtgacaaatacgttttctctgctgatttcataatccatggtggcgttttcgtagaaaagtctaagccaacttacccaggtaccgaattcgacatttctggtgaaaactttgatgtatctggtacctttaacgctgaagagcctgctgcttcttccgcatctgcctactccttcactccaggctctttcgataacagtggtgatatttctttgagtttatctgagtccacaaagggcgaagtcacattctctccctactctaactctggtgctttctctttcagtaatgctattctcaatggtggttccgtctctggtttgcagcgtagagctgaaagtggttctgtcaacaacggtgagataaatcttgagaatggcagtacctacgtcgttgtcgaaccagtttctggaagtggtacaatcaacatcatctctggcaacctttacttgcactatccagacacctttactggccaaactgttgtattcaagggtgaaggtgttcttgccgttgacccaaccgaaaccaacactactcctatccctgtggttggatacactggtgaaaaccaaatcgccattacagcagatgtcactgctctttcttacgacagtgctactggtgttttaactgcaacacaaggcaactctcaattctccttctctattggtactgggttctccagttctggcttcaacgtctccgaaggaacatttgctggtgcctatgcttattatttgaattacggaggtgttgttgcttccagcgctacaccctcttccacatctaccacatctggggctaccaactctacttccggttccacttctttcggtgcttccgtaactggttctaccgcttccacttctttcggtgcttccgtgactggttctacggcttccaccttgatttccggctccccatctgtttataccacaacattaacatatgcaacaaccacaagcacagtagttgtctcctgttctgaaacaactgattccaacggtaacgtctataccattaccacaaccgtaccatgttcttctaccaccgccactatcacttcttgcgatgagaccggatgtcatgtaactacgtctaccggtaccgtcgccactgaaaccgtttcttccaaatcttacaccactgttaccgtcacccactgtgacaacaatggctgtaacaccaagactgtcacttctgaatgtcctgaagaaacttctgcaactactacttctccaaaatcttacactactgttaccgttactcactgtgacgacaacggctgtaacactaagactgtcacctctgaggcccctgaagccacaaccactactgtttctccaaagacatacactaccgctactgttactcagtgcgatgacaatggatgtagcaccaagactgtcacttctgaagctcctaaagaaacttctgaaacttctgaaaccagtgctgcccctaagacatacactactgccactgttactcaatgtgatgacaatggttgtaacgtcaagataatcacctctcaaatacctgaagctacttctaccgtcaccgcaactagtgcttctccaaagtcctacactactgtcacttctgagggttctaaagcaacctctttgactactgccatttccaaggcttctagtgcaatttccacatactccaaatctgcagctccaataaagacctctactggtatcattgtccagtccgagggtattgccgcaggtttgaatgccaatactttgaatgcattggtcggtattttcgttcttgctttctttaactga

SEQ ID NO: 9837 - DNA, 750 bp, Saccharomyces cerevisiae
atgaagttctcttccggcaaatctatcatctttgcaactattgcttctctagctttgagtgctcctgtcacttacgacaccaactctactgctgagttacaatctccttcatctcaagaaattctgggttggagtcacgcaacttttcctaccatttaccaaacctgtaatgagacgaacgcaagaatgttgaatgcagcttttaaggataccgctgaaatcaccgcttatggtaaagatagacttttgaactatggtgtcgatgacgtttactacaaaagatggtttggtaatggtagtattttcaccgtcatgggtgtctttgagcaattgatggaggcttccaagggtgccatgctcatgagatgtgatgatattgatggcttgtgtgcagctaatccaaactattacgctggtcatcaccgtcaatctgctccagctgaaactgttatttgtgattacttctacacttccaaaaagccactatcaacaatttgtttcgaaggtactattgtcgatgtcggtccaaaacattatgcaggtattgatatgttacatcgttacttgcacgtccctaccatgagtatggatggatatgttggcgagtacgcggaaactcttgaagaagttgtggactacacccagaacaatgctacttacgcagttagaaacaccgacaactatctttactatctcgctgacgtttacagtgcttctgttatacctggtggctgtctaggtaacttgtaa

SEQ ID NO: 9838 - DNA, 750 bp, Artificial Sequence
  Description of Artificial Sequence: Synthetic polynucleotide
atgaagttctcttccggcaaatctatcatctttgcaactattgcttctttggctttgagtgctcctgtcacttacgacaccaactctactgctgagttacaatctccttcttctcaagaaattttgggttggagtcacgcaacttttcctaccatttaccaaacctgtaatgagacgaacgcaagaatgttgaatgcagcttttaaggataccgctgaaatcaccgcttatggtaaagatagacttttgaactatggtgtcgatgacgtttactacaaaagatggtttggtaatggtagtattttcaccgtcatgggtgtctttgagcaattgatggaggcttccaagggtgccatgctcatgagatgtgatgatattgatggcttgtgtgcagctaatccaaactattacgctggtcatcaccgtcaatctgctccagctgaaactgttatttgtgattacttctacacttccaaaaagccattatctacaatttgtttcgaaggtactattgtcgatgtcggtccaaaacattatgcaggtattgatatgttacatcgttacttgcacgtccctaccatgagtatggatggatatgttggcgagtacgcggaaactcttgaagaagttgtggactacacccagaacaatgctacttacgcagttagaaacaccgacaactatctttactatctcgctgacgtttacagtgcttctgttatacctggtggctgtttaggtaacttgtga

SEQ ID NO: 9839 - DNA, 1863 bp, Saccharomyces cerevisiae
atgattgaagaaagagatttggttttaagcaatggtatccattgtattgctgacatccactccgaactatacgccaggttaaaaaaagaatcgcaggcagcgacaccatgggtgtaccaaaaacaatacggaaaattcgtcacttactttgtcgctgtgataatttttttgtctttgataaaaaagctggcatttatgtattatgattccagtgaggaatttcttccagaaaagaagaactcgccgactaccccttctgtattccttgctcgaataatgacgaaacttgtcgcattcaacagatacatttgctacaggaaatttcccacgttgatattttcttatttaggtattccgacatctgtgggtacttttttagtagtaatggctaccactttatacacacttctatactgctttgttcctcatccattctacagaccttgtgcaggatttggttcgccgcctttgtctgttcgtgcaggcataatggcaatatctttggttccgtttgtattctcactttccgggaagatcaacgttataggttggttggttgggctttcgtatgaaaaaatcaacatataccaccaatgggcatccattctttgtttattctttagctgggttcatgtcattcccttcctacgtcaagcacgacatgagggaggatatgaaagaatgcatcaacggtggaaggcatccgacatgtggaggagtggtgtcccacccatcttatttttgaatctgctatggttatcttcgctgcctattgctagaagacatttttatgagatttttttgcaacttcattggattttagctgttggattttacattagtttgttctatcatgtatatcccgaattgaattcccatatgtatctggttgctacaattgtggtttggtttgcacaactgttttacagactagctgtgaagggttatttaagacctggtagaagtttcatggcctcgaccattgcaaatgtcagcatagtcggcgaaggatgcgtagaattgatcgtcaaagatgtggaaatggcctattccccaggtcaacacatattcgtgagaactattgataagggcatcatttccaaccatccattttctatctttccgagtgcaaagtatcccggaggaataaaaatgctgattagagcccagaaagggttttctaaaaggctatacgaaagtaatgacgacatgaagaaaattcttattgatgggccttatggtggaatcgagagagatattagaagttttaccaatgtctacttgatttgctctggttcaggtatatctacatgcttacctttcctgcaaaaatatggccccatactccataagacaaacttagaagttattacattggactgggtggtaagacatagggaggatatatcatggattagagatgaaatgtgtaccctctcaaataatttgcgccagttatttttagatgggaaaattgtggttagaatttacgtctgctcggacagtaccgtccctggtattattaaaactttccctcaaacaatagacaccgccagtgaccaatctgatttagctaaaagagaaaaagataccgaattcggccaggatgatactgagtcaaattcaactttcgacaaatccaataacgaatataaaggtctcatcaccattattccttccaaacctgatttgaatcaggtcattaatgattaccaaattgggttcaggaactgcttcatttgttcaggttctgacagcctaaggtataccgtcggaaattccgtggcaggtttacaggccaaggttttttctaacaaaaatgtcgaagagtgctatttacacagcgagagttttggctactag

SEQ ID NO: 9840 - DNA, 1863 bp, Artificial Sequence
  Description of Artificial Sequence: Synthetic polynucleotide
atgattgaagaaagagatttggttttaagcaatggtatccattgtattgctgacatccactccgaattatacgccaggttaaaaaaagaatctcaggcagcgacaccatgggtgtaccaaaaacaatacggaaaattcgtcacttactttgtcgctgtgataatttttttgtctttgataaaaaagttagcatttatgtattatgattccagtgaggaatttcttccagaaaagaagaactctccgactaccccttctgtattccttgctagaataatgacgaaacttgtcgcattcaacagatacatttgctacaggaaatttcccacgttgatattttcttatttaggtattccgacatctgtgggtacttttttagtagtaatggctaccactttatacacacttttatactgctttgttcctcatccattctacagaccttgtgcaggatttggttctccgcctttgtctgttcgtgcaggcataatggcaatatctttggttccgtttgtattctctctttccgggaagatcaacgttataggttggttggttgggctttcctatgaaaaaatcaacatataccaccaatgggcatccattctttgtttattctttagctgggttcatgtcattcccttcttgcgtcaagcaagacatgagggaggatatgaaagaatgcatcaaagatggaaggcatccgacatgtggaggagtggtgtcccacccatcttatttttgaatttattatggttatcttctttgcctattgctagaagacatttttatgagatttttttgcaacttcattggattttagctgttggattttacattagtttgttctatcatgtatatcccgaattgaattcccatatgtatttggttgctacaattgtggtttggtttgcacaattattttacagattggctgtgaagggttatttaagacctggtagaagtttcatggccagcaccattgcaaatgtcagcatagtcggcgaaggatgcgtagaattgatcgtcaaagatgtggaaatggcctattccccaggtcaacacatattcgtgagaactattgataagggcatcatttccaaccatccattttctatctttccgagtgcaaagtatcccggaggaataaaaatgttgattagagcccagaaagggttttctaaaaggttgtacgaaagtaatgacgacatgaagaaaattcttattgatgggccttatggtggaatcgagagagatattagaagttttaccaatgtctacttgatttgctctggttctggtatatctacatgcttacctttcttacaaaaatatggccccatactccataagacaaacttagaagttattacattggactgggtggtaagacatagggaggatatatcttggattagagatgaaatgtgtaccctctctaataatttgcgccagttatttttagatgggaaaattgtggttagaatttacgtctgctctgacagtaccgtccctggtattattaaaactttccctcaaacaatagacaccgccagtgaccaatctgatttagctaaaagagaaaaagataccgaattcggccaggatgatactgagagcaattctactttcgacaaatccaataacgaatataaaggtctcatcaccattattccttccaaacctgatttgaatcaggtcattaatgattaccaaattgggttcaggaactgcttcatttgttctggttctgacagcttgaggtataccgtcggaaattccgtggcaggtttacaggccaaggttttttctaacaaaaatgtcgaagagtgctatttacacagcgagagttttggctactga

SEQ ID NO: 9841 - DNA, 1029 bp, Saccharomyces cerevisiae
atgtcagttttcgtttcaggtgctaacgggttcattgcccaacacattgtcgatctcctgttgaaggaagactataaggtcatcggttctgccagaagtcaagaaaaggccgagaatttaacggaggcctttggtaacaacccaaaattctccatggaagttgtcccagacatatctaagctggacgcatttgaccatgttttccaaaagcacggcaaggatatcaagatagttctacatacggcctctccattctgctttgatatcactgacagtgaacgcgatttattaattcctgctgtgaacggtgttaagggaattctccactcaattaaaaaatacgccgctgattctgtagaacgtgtagttctcacctcttcttatgcagctgtgttcgatatggcaaaagaaaacgataagtctttaacatttaacgaagaatcctggaacccagctacctgggagagttgccaaagtgacccagttaacgcctactgtggttctaagaagtttgctgaaaaagcagcttgggaatttctagaggagaatagagactctgtaaaattcgaattaactgccgttaacccagtttacgtttttggtccgcaaatgtttgacaaagatgtgaaaaaacacttgaacacatcttgcgaactcgtcaacagcttgatgcatttatcaccagaggacaagataccggaactatttggtggatacattgatgttcgtgatgttgcaaaggctcatttagttgccttccaaaagagggaaacaattggtcaaagactaatcgtatcggaggccagatttactatgcaggatgttctcgatatccttaacgaagacttccctgttctaaaaggcaatattccagtggggaaaccaggttctggtgctacccataacacccttggtgctactcttgataataaaaagagtaagaaattgttaggtttcaagttcaggaacttgaaagagaccattgacgacactgcctcccaaattttaaaatttgagggcagaatataa

SEQ ID NO: 9842 - DNA, 1029 bp, Artificial Sequence
  Description of Artificial Sequence: Synthetic polynucleotide
atgtctgttttcgtttctggtgctaacgggttcattgcccaacacattgtcgatctcttattgaaggaagactataaggtcatcggttctgccagaagtcaagaaaaggccgagaatttaacggaggcctttggtaacaacccaaaattctccatggaagttgtcccagacatatctaagttggacgcatttgaccatgttttccaaaagcacggcaaggatatcaagatagttttgcatacggcctctccattctgctttgatatcactgacagtgaacgcgatttattaattcctgctgtgaacggtgttaagggaattctccactctattaaaaaatacgccgctgattctgtagaacgtgtagttctcacctcttcttatgcagctgtgttcgatatggcaaaagaaaacgataagtctttaacatttaacgaagaatcctggaacccagctacctgggagagttgccaaagtgacccagttaacgcctactgtggttctaagaagtttgctgaaaaagcagcttgggaatttttggaggagaatagagactctgtaaaattcgaattaactgccgttaacccagtttacgtttttggtccgcaaatgtttgacaaagatgtgaaaaaacacttgaacacatcttgcgaactcgtcaacagcttgatgcatttatctccagaggacaagataccggaattatttggtggatacattgatgttcgtgatgttgcaaaggctcatttagttgccttccaaaagagggaaacaattggtcaaagattgatcgtatctgaggccagatttactatgcaggatgttctcgatatccttaacgaagacttccctgttttgaaaggcaatattccagtggggaaaccaggttctggtgctacccataacacccttggtgctactcttgataataaaaagagtaagaaattgttaggtttcaagttcaggaacttgaaagagaccattgacgacactgcctcccaaattttaaaatttgagggcagaatatga

SEQ ID NO: 9843 - DNA, 696 bp, Saccharomyces cerevisiae
atgaccggagcagcaactgcagcagaaaactctgccacacagttagaattctatagaaaagctttgaatttcaacgttattgggagatacgatccaaaaataaagcaactactttttcacacaccacatgcgtcactgtataaatgggacttcaagaaggacgaatggaataaactagaatatcaaggtgttttggccatatatttgagagacgtctcgcaaaatacaaatcttctacccgtctccccacaagaagtagatatttttgattcacaaaatggtagtaataacattcaagtaaacaatggttctgacaatagcaacaggaatagcagtggaaatgggaactcttataaaagtaatgattcgctaacatataattgcggcaaaactttaagtggaaaggacatatacaattatggattgatcatattaaaccgaattaatcctgacaatttttctatgggcattgttcccaatagtgtcgtaaataaaagaaaagtatttaatgcagaagaggatacacttaacccactagagtgcatgggggtagaggtgaaagatgaattggtcattattaagaacttgaagcatgaggtctatggtatatggattcatacagttagtgatagacaaaatatctacgaactaataaaatatcttctggaaaatgagccaaaagattcttttgcttga

SEQ ID NO: 9844 - DNA, 696 bp, Artificial Sequence
  Description of Artificial Sequence: Synthetic polynucleotide
atgaccggagcagcaactgcagcagaaaactctgccacacagttagaattctatagaaaagctttgaatttcaacgttattgggagatacgatccaaaaataaagcaattactttttcacacaccacatgcgtctttgtataaatgggacttcaagaaggacgaatggaataaattagaatatcaaggtgttttggccatatatttgagagacgtctctcaaaatacaaatcttttgcccgtctccccacaagaagtagatatttttgattctcaaaatggtagtaataacattcaagtaaacaatggttctgacaatagcaacaggaatagcagtggaaatgggaactcttataaaagtaatgattctttaacatataattgcggcaaaactttaagtggaaaggacatatacaattatggattgatcatattaaacagaattaatcctgacaatttttctatgggcattgttcccaatagtgtcgtaaataaaagaaaagtatttaatgcagaagaggatacacttaacccattggagtgcatgggggtagaggtgaaagatgaattggtcattattaagaacttgaagcatgaggtctatggtatatggattcatacagttagtgatagacaaaatatctacgaattgataaaatatcttttagaaaatgagccaaaagattcttttgcttga

SEQ ID NO: 9845 - DNA, 1815 bp, Saccharomyces cerevisiae
atgagtgccaatagcccgacaggaaacgatccccatgtatttggtattcctgtgaacgcaacaccatccaatatgggttcgccaggcagtccagttaatgtaccacctcctatgaacccagcggtagcaaatgtaaatcatcctgttatgaggacaaacagtaatagtaatgccaatgaaggtactaggactttaaccagggagcaaatacagcaattgcagcaaagacaacgattattactacagcaaagactactcgaacaacagagaaaacagcaagcactccaaaactatgaggctcagttttatcaaatgcttatgaccttaaacaaaagacctaaaagactttacaattttgtggaagatgcagactcaattttgaaaaaatatgagcaatatttacacagttttgaatttcatatttatgagaataattataagatttgcgctcctgcaaatagcaggttacaacagcagcaaaagcaacccgagctgactagtgacggtttaatattaaccaaaaataacgaaactttgaaagaatttttagagtacgtcgcaagaggaaggattcctgatgctattatggaagtcttaagggactgtaatatccaattttacgaaggaaatcttattttacaggtttatgaccatactaatacagttgatgtcacccccaaagagaacaagcctaatttgaacagctcttcttccccttcaaataataatagcacacaggacaattccaagattcaacaaccatccgaacctaatagtggtgtggcaaatacaggcgcaaacacagcaaataagaaggcatccttcaaacgacctagagtatatcgaacattgttgaagcctaatgatttgacgacgtattatgacatgatgtcttatgcagataatgccaggttttctgatagcatttatcaacagtttgaatctgaaattttaacacttaccaagaggaacttgtcactaagtgtgccattaaatccatatgagcaccgagacatgttggaggaaacagctttttcagaacctcattgggatagtgaaaaaaaatccttcattcacgaacatcgtgctgagtctacgagagaaggcacgaagggcgttgtagggcatatcgaagaacgcgatgaatttccgcaacatagttcaaattatgaacagttgatgttgatcatgaatgaacgcacaacaacgataaccaactccacgtttgctgtttcgttaaccaagaatgcgatggagattgctagctccagttccaacggggtacgtggagcttcgtcctcaacttcgaattccgcatcaaatacaaggaataacagtttggctaatggcaatcaagtagctttggcagcggcagcggctgcggctgcagtgggatctaccatgggtaacgataataatcaatttagcaggctgaaatttattgaacaatggagaataaataaagaaaaaagaaaacagcaggctttaagtgcaaacatcaatccaacccccttcaacgctagaatatcgatgacagcaccattgactccacagcaacagctacttcaaagacaacagcaggccttggagcaacaacagaatggtggagccatgaaaaacgcaaataaacggagtggtaacaatgccaccagtaacaataataataataataataatttagataaaccaaaggttaagcgacctagaaaaaatgcaaaaaaaagcgagagcggtacaccagctcctaaaaagaaaagaatgactaagaagaaacagagcgcaagtagcacgccctcttctactacaatgtcataa

SEQ ID NO: 9846 - DNA, 1815 bp, Artificial Sequence
  Description of Artificial Sequence: Synthetic polynucleotide
atgagtgccaatagcccgacaggaaacgatccccatgtatttggtattcctgtgaacgcaacaccatccaatatgggttctccaggcagtccagttaatgtaccacctcctatgaacccagcggtagcaaatgtaaatcatcctgttatgaggacaaacagtaatagtaatgccaatgaaggtactaggactttaaccagggagcaaatacagcaattgcagcaaagacaaagattattattgcagcaaagattactcgaacaacagagaaaacagcaagcactccaaaactatgaggctcagttttatcaaatgcttatgaccttaaacaaaagacctaaaagactttacaattttgtggaagatgcagacagtattttgaaaaaatatgagcaatatttacacagttttgaatttcatatttatgagaataattataagatttgcgctcctgcaaatagcaggttacaacagcagcaaaagcaacccgagttaactagtgacggtttaatattaaccaaaaataacgaaactttgaaagaatttttagagtacgtcgcaagaggaaggattcctgatgctattatggaagtcttaagggactgtaatatccaattttacgaaggaaatcttattttacaggtttatgaccatactaatacagttgatgtcacccccaaagagaacaagcctaatttgaacagctcttcttccccttccaataataatagcacacaggacaattccaagattcaacaaccatccgaacctaatagtggtgtggcaaatacaggcgcaaacacagcaaataagaaggcatccttcaaaagacctagagtatatagaacattgttgaagcctaatgatttgacgacgtattatgacatgatgtcttatgcagataatgccaggttttctgatagcatttatcaacagtttgaatctgaaattttaacacttaccaagaggaacttgtccttgagtgtgccattaaatccatatgagcacagagacatgttggaggaaacagctttttctgaacctcattgggatagtgaaaaaaaatccttcattcacgaacatcgtgctgagtctacgagagaaggcacgaagggcgttgtagggcatatcgaagaacgcgatgaatttccgcaacatagtagtaattatgaacagttgatgttgatcatgaatgaacgcacaacaacgataaccaactccacgtttgctgtttctttaaccaagaatgcgatggagattgctagctccagttccaacggggtacgtggagcttcttccagcacttccaattccgcatctaatacaaggaataacagtttggctaatggcaatcaagtagctttggcagcggcagcggctgcggctgcagtgggatctaccatgggtaacgataataatcaatttagcaggttgaaatttattgaacaatggagaataaataaagaaaaaagaaaacagcaggctttaagtgcaaacatcaatccaacccccttcaacgctagaatatccatgacagcaccattgactccacagcaacagttacttcaaagacaacagcaggccttggagcaacaacagaatggtggagccatgaaaaacgcaaataaaagaagtggtaacaatgccaccagtaacaataataataataataataatttagataaaccaaaggttaagagacctagaaaaaatgcaaaaaaaagcgagagcggtacaccagctcctaaaaagaaaagaatgactaagaagaaacagagcgcaagtagcacgccctcttctactacaatgtcttga

SEQ ID NO: 9847 - DNA, 711 bp, Saccharomyces cerevisiae
atggtctgtgatacactggtatatcatccctccgtgacgagattcgtcaaatttctagatggctcagctggcagagaaaaggttctcagattactgcagtatttagcaagatttttagcagtacagaactcatctctcttggccaggcaattacaagctcaatttaccacagtcagaaaatttctgaggtttctgaagcctttaaaccacttgcaggcagctgctaaattctacgataacaagttggccagcgacaacgtcgttagagtctgcaatgttttgaaaaacatcttctttgctgcatatttgtcgttagatcaagtcaatcttttgagaattttgaaagtgattcctgtaaccgttcttaccggtaagaaaatacctcgctggtccaattggtgttggctgttcggcctcctaagtggtctggctatggatcttcgtaagatccaaacatctcatgcccagattgctgcgtttgtcaaggcaaaatcacaaagccaaggcgatgagcatgaggatcacaagaaggtactagggaaggcataccaagacaggtacaccgcgttaagaagactattctgggatgctgcagattcgttcatcgtcctcaacaacctagggtacttgtctagcaacgaagagtatgttgcgctatccggtgttgtcacatctatccttggtatgcaagacatgtggaaagctacatag

SEQ ID NO: 9848 - DNA, 711 bp, Artificial Sequence
  Description of Artificial Sequence: Synthetic polynucleotide
atggtctgtgatacattggtatatcatccctccgtgacgagattcgtcaaatttttggatggctctgctggcagagaaaaggttctcagattattgcagtatttagcaagatttttagcagtacagaactcttctctcttggccaggcaattacaagctcaatttaccacagtcagaaaatttttaaggtttttgaagcctttaaaccacttgcaggcagctgctaaattctacgataacaagttggccagcgacaacgtcgttagagtctgcaatgttttgaaaaacatcttctttgctgcatatttgtctttagatcaagtcaatcttttgagaattttgaaagtgattcctgtaaccgttcttaccggtaagaaaatacctcgctggtccaattggtgttggcttttcggcctcttgagtggtttagctatggatcttcgtaagatccaaacatctcatgcccagattgctgcgtttgtcaaggcaaaatctcaaagccaaggcgatgagcatgaggatcacaagaaggtattagggaaggcataccaagacaggtacaccgcgttaagaagattattctgggatgctgcagattctttcatcgtcctcaacaacttggggtacttgtctagcaacgaagagtatgttgcgctttccggtgttgtcacatctatccttggtatgcaagacatgtggaaagctacatga

SEQ ID NO: 9849 - DNA, 585 bp, Saccharomyces cerevisiae
atgggttactatgacattgatgatgtcctagcagatgggacagagtttccttgtaaatttcaatatgatattcctggtcttggttatttggaaaacaacccaggacgacccataacgaaaaacactaaactaagcctgccactatggttagcaagaatccttgcaattgtgggtggtgacgaagccttggtagatgaagaacctgtaccttttgtggaactcctgccaccagatatgttttctacgaaagttatgaacgctataaagaccgatccggtggctctggacttgcattccataaattcgcatttcttcagtctagccataaaatggataatgttgtttagcgaaaaagaactggccaatgtcgttagtgagctacttttgcaacgtgcccaagaacttaatcatcatgctagtagtttatcgattgatctcaatgcagactcgaccggaaaaaattcagcgaacactaatatagcaactagcacatttttactgaaactagaagaaatggagaaggagatatataaaaagtctcatgaatcttataaggacacgaaaaggtggatgtttaaaaaataa

SEQ ID NO: 9850 - DNA, 585 bp, Artificial Sequence
  Description of Artificial Sequence: Synthetic polynucleotide
atgggttactatgacattgatgatgtcttggcagatgggacagagtttccttgtaaatttcaatatgatattcctggtcttggttatttggaaaacaacccaggaaggcccataacgaaaaacactaaattaagcttgccattatggttagcaagaatccttgcaattgtgggtggtgacgaagccttggtagatgaagaacctgtaccttttgtggaactcttaccaccagatatgttttctacgaaagttatgaacgctataaagaccgatccggtggctttggacttgcattccataaattctcatttcttcagtttggccataaaatggataatgttgtttagcgaaaaagaattggccaatgtcgttagtgagttgcttttgcaacgtgcccaagaacttaatcatcatgctagtagtttatccattgatctcaatgcagactctaccggaaaaaattctgcgaacactaatatagcaactagcacatttttattgaaattagaagaaatggagaaggagatatataaaaagtctcatgaatcttataaggacacgaaaaggtggatgtttaaaaaatga

SEQ ID NO: 9851 - DNA, 3234 bp, Saccharomyces cerevisiae
atgacaaacgcaatgaaggtggaaggctacccttctatggaatggccaacgtccttagatattccattaaaggcttcagaagaattggtcggtatcgatttagaaaccgacttgccggatgatccaacagatttaaagactcttttagttgaggaaaattctgaaaaagaacattggttgaccattgcacttgcttattgcaaccacggaaaaacaaacgaaggtattaagctaattgaaatggccttggatgttttccaaaactctgaaagggcttcactacacacttttctgacctgggcacatttaaatctagcaaagggacaatcgctgagtgtggaaacgaaagagcatgaactgacacaggctgaattaaacctaaaggatgctattgggttcgaccccacatggattggaaatatgctagccacggtcgagttatactaccagcgcggtcattatgacaaggctttggaaacatccgacctttttgtaaagagtattcatgctgaagaccacaggtctggtaggcaatccaaacccaattgcttgtttttacttttaagagcgaaattgctttatcagaagaaaaattatatggccagtctgaaaatttttcaagaattgctggtcatcaaccctgttttgcaaccagatcctcgtattggaattggtctgtgtttttggcaattaaaggattctaagatggctatcaaatcgtggcagagagccttacaactaaatccaaaaaatacgagtgcctccattttagtattattgggtgaatttcgcgaatctttcaccaattctacaaacgataaaacattcaaggaggcttttacaaaggcattgagtgacttgaacaacattttctccgaaaaccagcataatcctgttttattgacgttattacaaacgtactactacttcaaaggtgattatcaaactgttttggatatttatcaccataggattttaaaaatgagtccgatgatagccaaaattgttctatctgaatcttcattttggtgtggtagagcgcattatgcattaggtgattatcgtaaatcattcatcatgtttcaagaaagtttaaagaaaaatgaagataacctgctcgcgaaattagggctgggtcaaacccaaattaaaaataacttgttggaggaaagtatcatcactttcgagaatctttacaagacaaatgaaagtttacaagaattaaactatatcttgggtatgctttatgcaggcaaggcctttgatgccaagacagccaaaaacacttcagcaaaagaacaaagcaacttaaatgaaaaagctctaaagtatttggagagatacctaaaattaacgcttgccacaaagaaccaattagttatatctagagcttacctagttatctctcagctgtatgaattacaaaaccaatataaaacttcattggattatctttccaaagctttggaggaaatggaattcattaaaaaggaaattccgttggaagtgctcaataatttggcatgttaccacttcattaacggtgactttataaaggctgatgatctctttaagcaagcaaaggcaaaagtgagtgataaagatgaaagtgtcaatattacacttgaatataacatagcaagaactaatgagaaaaacgactgtgaaaaatcagaatctatatattcccaggtgacgtctttacatccagcttacattgcggcaagaataagaaatctatatctcaagtttgcacaatctaagatagaagattcagatatgagtacagaaatgaataagctattagatttgaacaagtctgatctggagattcgttcattttatggttggtacttgaaaaacagcaaggaaagaaaaaacaatgaaaagagtacgacccataacaaggaaactttggtaaagtataattctcacgatgcatatgccttaatttctctagctaatctatatgtgacaattgccagagacggtaaaaagtccaggaatccaaaggaacaggaaaaatcaaagcattcttatttgaaagccatccagttgtatcaaaaagttctacaagttgatccatttaatattttcgctgctcaaggtcttgccataatttttgcagaaagcaaaagattgggaccagctctagaaattttaaggaaggtaagagattctttagacaatgaagatgttcaactgaaccttgcccattgttatctggaaatgcgtgaatatggtaaggcgatcgaaaattatgaattagttctaaaaaaatttgacaatgaaaagacaagaccacatattttgaacctattaggtagagcttggtacgcacgtgccattaaggaaaggtctgtgaatttttatcaaaaagccttggaaaatgccaaaactgctttggatcttttcgtgaaggagtcttctaagagcaagttcattcatagtgttaagtttaatatagctttgttgcattttcaaatagcagagacattaagaagatcaaatcccaaatttaggacggttcaacaaatcaaggattccctggaaggcttaaaagaaggtttagaactatttagagaattgaacgacctaaaagaattcaatatgattcctaaggaagaactagaacaacgtatacaattgggtgaaactactatgaaaagtgcattagaacgttccttgaatgagcaagaagaatttgagaaggaacaaagcgccaaaattgatgaagcacgtaaaattctggaagaaaatgaattaaaagagcaaggatggatgaagcaggaggaggaagccaggcgtttgaagttagaaaaacaggcagaggagtataggaaactacaagatgaggcacaaaagttaatccaggagcgagaagccatggccataagtgaacataatgttaaagatgattcagatctgtctgataaagacaatgaatatgacgaagaaaagccaagacaaaaaagaaagaggtcaacaaaaactaaaaatagcggtgaatctaagagaaggaaagctgctaaaaaaactctttccgacagcgacgaggatgacgatgatgtggtgaaaaagccttctcacaataagggcaaaaaatctcaactatcgaatgaatttattgaagatagtgatgaggaagaagctcaaatgagcggttcggaacaaaataaaaacgatgacaacgacgaaaacaatgataatgatgataacgacggattgttctaa

SEQ ID NO: 9852 - DNA, 3234 bp, Artificial Sequence
  Description of Artificial Sequence: Synthetic polynucleotide
atgacaaacgcaatgaaggtggaaggctacccttctatggaatggccaacgtccttagatattccattaaaggcttctgaagaattggtcggtatcgatttagaaaccgacttgccggatgatccaacagatttaaagactcttttagttgaggaaaattctgaaaaagaacattggttgaccattgcacttgcttattgcaaccacggaaaaacaaacgaaggtattaagttgattgaaatggccttggatgttttccaaaactctgaaagggcttctttacacacttttttaacctgggcacatttaaatttggcaaagggacaaagtttaagtgtggaaacgaaagagcatgaattaacacaggctgaattaaacttgaaggatgctattgggttcgaccccacatggattggaaatatgttggccacggtcgagttatactaccagcgcggtcattatgacaaggctttggaaacatccgacctttttgtaaagagtattcatgctgaagaccacaggtctggtaggcaatccaaacccaattgcttgtttttacttttaagagcgaaattgctttatcagaagaaaaattatatggccagtttgaaaatttttcaagaattgttggtcatcaaccctgttttgcaaccagatcctcgtattggaattggtttgtgtttttggcaattaaaggattctaagatggctatcaaaagttggcagagagccttacaattgaatccaaaaaatacgagtgcctccattttagtattattgggtgaatttcgcgaatctttcaccaattctacaaacgataaaacattcaaggaggcttttacaaaggcattgagtgacttgaacaacattttctccgaaaaccagcataatcctgttttattgacgttattacaaacgtactactacttcaaaggtgattatcaaactgttttggatatttatcaccataggattttaaaaatgagtccgatgatagccaaaattgttttatctgaatcttctttttggtgtggtagagcgcattatgcattaggtgattatcgtaaatctttcatcatgtttcaagaaagtttaaagaaaaatgaagataacttactcgcgaaattagggttaggtcaaacccaaattaaaaataacttgttggaggaaagtatcatcactttcgagaatctttacaagacaaatgaaagtttacaagaattaaactatatcttgggtatgctttatgcaggcaaggcctttgatgccaagacagccaaaaacacttctgcaaaagaacaaagcaacttaaatgaaaaagctttgaagtatttggagagatacttgaaattaacgcttgccacaaagaaccaattagttatatctagagcttacttggttatctctcagttatatgaattacaaaaccaatataaaacttctttggattatctttccaaagctttggaggaaatggaattcattaaaaaggaaattccgttggaagtgctcaataatttggcatgttaccacttcattaacggtgactttataaaggctgatgatctctttaagcaagcaaaggcaaaagtgagtgataaagatgaaagtgtcaatattacacttgaatataacatagcaagaactaatgagaaaaacgactgtgaaaaaagtgaatctatatattcccaggtgacgtctttacatccagcttacattgcggcaagaataagaaatttatatctcaagtttgcacaatctaagatagaagattctgatatgagtacagaaatgaataagcttttagatttgaacaagtctgatttagagattcgttctttttatggttggtacttgaaaaacagcaaggaaagaaaaaacaatgaaaagagtacgacccataacaaggaaactttggtaaagtataattctcacgatgcatatgccttaatttctttggctaatttatatgtgacaattgccagagacggtaaaaagtccaggaatccaaaggaacaggaaaaatccaagcattcttatttgaaagccatccagttgtatcaaaaagttttgcaagttgatccatttaatattttcgctgctcaaggtcttgccataatttttgcagaaagcaaaagattgggaccagctttggaaattttaaggaaggtaagagattctttagacaatgaagatgttcaattgaaccttgcccattgttatttggaaatgcgtgaatatggtaaggcgatcgaaaattatgaattagttttgaaaaaatttgacaatgaaaagacaagaccacatattttgaacttattaggtagagcttggtacgcacgtgccattaaggaaaggtctgtgaatttttatcaaaaagccttggaaaatgccaaaactgctttggatcttttcgtgaaggagtcttctaagagcaagttcattcatagtgttaagtttaatatagctttgttgcattttcaaatagcagagacattaagaagatctaatcccaaatttaggacggttcaacaaatcaaggattccttagaaggcttaaaagaaggtttagaattatttagagaattgaacgacttgaaagaattcaatatgattcctaaggaagaattggaacaacgtatacaattgggtgaaactactatgaaaagtgcattagaacgttccttgaatgagcaagaagaatttgagaaggaacaaagcgccaaaattgatgaagcacgtaaaattttggaagaaaatgaattaaaagagcaaggatggatgaagcaggaggaggaagccaggcgtttgaagttagaaaaacaggcagaggagtataggaaattacaagatgaggcacaaaagttaatccaggagagagaagccatggccataagtgaacataatgttaaagatgattctgatttatctgataaagacaatgaatatgacgaagaaaagccaagacaaaaaagaaagaggtctacaaaaactaaaaatagcggtgaatctaagagaaggaaagctgctaaaaaaactctttccgacagcgacgaggatgacgatgatgtggtgaaaaagccttctcacaataagggcaaaaaatctcaattatccaatgaatttattgaagatagtgatgaggaagaagctcaaatgagcggttctgaacaaaataaaaacgatgacaacgacgaaaacaatgataatgatgataacgacggattgttctga

SEQ ID NO: 9853 - DNA, 1455 bp, Saccharomyces cerevisiae
atggatagtgtaattcaaaaaagaatttttgtcggaaatattttccataatgcagatgattgttattcagaactactagatcgatttggaaaatttggtgattgccaagattttcagtttgaaaaacacaaccactttgcatttatcgatataaggtttaatgatgaggcagattttaacaagctaagaaagagctttaataatgttaagtttaaagggaacattttgaaggttgatgaagcaaagccgaattgggaaagcacctgggcggtacaacatgcaaaggaccttaaagaagatattatactaaatgctaaaatgaaaaaaaagaattggcaacattataagaaaatggaaaatgtagcgaaaagttggaaagatcataaggaagttattgctggcagaatgagggaggcgccgagaaaaaggagtcaattgaggaacattacattcaggatcaatgtcaatggttcattgaaagtttacaaatgctataagactaaattatggggttatgaaaggaacaaagaattgaatgaccttgtgtacaagtttacaaataatttctggaaaaacggatacaaccacattgtcgatagattggattacagtcgtgctgttaaaactgttcgattcaaaaatgggctgaaacagttaacagtgtcaaaagatgaaaacgtttgcagtggagagatggacagcgatgagaatatgtcagaagaggagaaggagaaaaataatgttattcttaatgacctattaaaggactttgacttcgataagccaatgacgttgaatgattcggacgaggaacttctgacagagcaacgtaaaggagaggaagaagaagaagaagaagaagaaaaagaagtaaacgctcccgaatacgagaatgttaataagacgaaggaccagagcaccctaccacaagaaaaaccagaggaaaggaaagaacaggacgagggcgacgggcaggaggataatgaatttattccgactttcaccaaggaaattggtcaaggtacaataagcaacactgagacgttaagaaacctattcaaccccaacgaggcagaacctgtatcacaattcaaattgattgaagattctgataatgatattgatcatgcgaaagatgttgatgtgaaccaactggaggaagaagtaagtaaatcatctgacaccctaggtttgacatcggctcccgtaccacatgtatctagagataaagataacaaaaatttcttgtttttccctcatttgcaatcgccatttttagtaggacaaacacagttgagtaaagtaagggctcctggaagagaaacaatgctatcgaactgggatgaggagttctgggctaacagaggtaattggacccgtgatatgaggcgcaaaatgaaagatgcattgaagcaccgtaagaggaaacaatcaaagagcgggcttcttctatag

SEQ ID NO: 9854 - DNA, 1455 bp, Artificial Sequence
  Description of Artificial Sequence: Synthetic polynucleotide
atggatagtgtaattcaaaaaagaatttttgtcggaaatattttccataatgcagatgattgttattctgaattattagatagatttggaaaatttggtgattgccaagattttcagtttgaaaaacacaaccactttgcatttatcgatataaggtttaatgatgaggcagattttaacaagttgagaaagagctttaataatgttaagtttaaagggaacattttgaaggttgatgaagcaaagccgaattgggaaagcacctgggcggtacaacatgcaaaggaccttaaagaagatattatattgaatgctaaaatgaaaaaaaagaattggcaacattataagaaaatggaaaatgtagcgaaaagttggaaagatcataaggaagttattgctggcagaatgagggaggcgccgagaaaaaggagtcaattgaggaacattacattcaggatcaatgtcaatggttctttgaaagtttacaaatgctataagactaaattatggggttatgaaaggaacaaagaattgaatgaccttgtgtacaagtttacaaataatttctggaaaaacggatacaaccacattgtcgatagattggattacagtcgtgctgttaaaactgttagattcaaaaatgggttgaaacagttaacagtgtctaaagatgaaaacgtttgcagtggagagatggacagcgatgagaatatgtctgaagaggagaaggagaaaaataatgttattcttaatgacttattaaaggactttgacttcgataagccaatgacgttgaatgattctgacgaggaacttttaacagagcaacgtaaaggagaggaagaagaagaagaagaagaagaaaaagaagtaaacgctcccgaatacgagaatgttaataagacgaaggaccagagcaccttgccacaagaaaaaccagaggaaaggaaagaacaggacgagggcgacgggcaggaggataatgaatttattccgactttcaccaaggaaattggtcaaggtacaataagcaacactgagacgttaagaaacttgttcaaccccaacgaggcagaacctgtatctcaattcaaattgattgaagattctgataatgatattgatcatgcgaaagatgttgatgtgaaccaattggaggaagaagtaagtaaatcttctgacaccttgggtttgacatctgctcccgtaccacatgtatctagagataaagataacaaaaatttcttgtttttccctcatttgcaatctccatttttagtaggacaaacacagttgagtaaagtaagggctcctggaagagaaacaatgctttccaactgggatgaggagttctgggctaacagaggtaattggacccgtgatatgaggcgcaaaatgaaagatgcattgaagcaccgtaagaggaaacaatccaagagcgggcttcttttgtga

SEQ ID NO: 9855 - DNA, 510 bp, Saccharomyces cerevisiae
atggcagttaaaggattaggcaaaccagatcaagtttatgacggttccaaaatcagggtcggtatcattcatgcccgttggaaccgtgtcattattgacgctcttgtgaaaggtgctattgaaagaatggcttcccttggtgtcgaggaaaataacataataattgaaactgttcctggatcctatgaattaccttgggggacaaaaaggtttgttgacagacaagcgaagttgggaaagccgctagatgttgtaattcctattggtgtacttatcaaaggtagtacaatgcactttgaatacatttcagattccaccactcacgcattgatgaacttacaagaaaaagtcgacatgcccgtcatttttggcctcttaacttgcatgactgaagaacaagccctggccagagctggcatcgatgaagcgcactccatgcacaaccatggtgaagattggggtgctgcagcagtggaaatggctgttaagttcggtaaaaatgctttttga

SEQ ID NO: 9856 - DNA, 510 bp, Artificial Sequence
  Description of Artificial Sequence: Synthetic polynucleotide
atggcagttaaaggattaggcaaaccagatcaagtttatgacggttccaaaatcagggtcggtatcattcatgcccgttggaaccgtgtcattattgacgctcttgtgaaaggtgctattgaaagaatggcttcccttggtgtcgaggaaaataacataataattgaaactgttcctggatcctatgaattaccttgggggacaaaaaggtttgttgacagacaagcgaagttgggaaagccgttagatgttgtaattcctattggtgtacttatcaaaggtagtacaatgcactttgaatacatttctgattccaccactcacgcattgatgaacttacaagaaaaagtcgacatgcccgtcatttttggcctcttaacttgcatgactgaagaacaagccttggccagagctggcatcgatgaagcgcactccatgcacaaccatggtgaagattggggtgctgcagcagtggaaatggctgttaagttcggtaaaaatgctttttga

SEQ ID NO: 9857 - DNA, 723 bp, Saccharomyces cerevisiae
atgtctacgttcatattccctggtgatagctttcctgtagaccctactacacctgttaaactgggccctggcatatattgtgaccccaatactcaagaaatacgacctgttaatacaggtgttttgcatgtttccgctaagggtaagagtggtgttcagaccgcatatatagactattctagtaagagatacattccatctgtaaacgattttgtaatcggtgtcattatagggacattttcagatagctataaggtttcgttgcaaaatttctcctccagtgtttcactatcgtatatggcttttcccaatgcttcaaagaaaaacaggccaactttgcaagtgggagatctagtgtatgcgagagtttgtaccgcagaaaaggaactagaagccgaaatagaatgttttgactcaactacaggacgcgatgctggtttcgggatattggaagatggtatgatcattgacgtgaatttgaatttcgcacgccagttgcttttcaataatgacttcccgttattaaaagtgttggctgcacataccaagtttgaagtcgccattggtctcaatgggaagatctgggttaagtgcgaggaattatctaacactttagcttgttatagaaccataatggagtgttgtcaaaaaaacgacacggcagcgttcaaggatatagcaaaaagacagtttaaagaaatacttacggtcaaggaggagtag

SEQ ID NO: 9858 - DNA, 723 bp, Artificial Sequence
  Description of Artificial Sequence: Synthetic polynucleotide
atgtctacgttcatattccctggtgatagctttcctgtagaccctactacacctgttaaattgggccctggcatatattgtgaccccaatactcaagaaataaggcctgttaatacaggtgttttgcatgtttccgctaagggtaagagtggtgttcagaccgcatatatagactattctagtaagagatacattccatctgtaaacgattttgtaatcggtgtcattatagggacattttctgatagctataaggtttctttgcaaaatttctcctccagtgtttctttatcttatatggcttttcccaatgcttccaagaaaaacaggccaactttgcaagtgggagatttggtgtatgcgagagtttgtaccgcagaaaaggaattggaagccgaaatagaatgttttgactctactacaggacgcgatgctggtttcgggatattggaagatggtatgatcattgacgtgaatttgaatttcgcacgccagttgcttttcaataatgacttcccgttattaaaagtgttggctgcacataccaagtttgaagtcgccattggtctcaatgggaagatctgggttaagtgcgaggaattatctaacactttagcttgttatagaaccataatggagtgttgtcaaaaaaacgacacggcagcgttcaaggatatagcaaaaagacagtttaaagaaatacttacggtcaaggaggagtga

SEQ ID NO: 9859 - DNA, 2088 bp, Saccharomyces cerevisiae
atgaagaatctgaccactataaagcaaacgaacaagaatgtcaaacaagaaagacgtaaaaagtacgctgatttggcgattcaaggcacaaataactcctcaattgcttctaaaagatcggtagagttattgtatttgccaaaactgagttcggctaataatttccaaatggataagaataataaactgttggaatattttaaattctttgttcctaagaaaattaaaagatctccctgtattaacagaggttattggttgaggttatttgccatcaggtcaagattgaactccatcattgaacaaacgccacaggataaaaagatagttgttgttaaccttggttgtgggtacgatccattaccatttcaactattagacaccaataacatacaaagtcaacaatatcatgaccgagtttcctttattgatattgattactctgatttattgaaaattaaaattgagttgatcaaaactatacccgagctttcgaaaattattggtctttctgaagataaagattatgttgatgatagtaatgttgattttttgactactccaaagtatctcgcccgaccatgcgacttgaacgattctaagatgttcagcacattgctaaatgagtgtcaattatacgatccaaacgttgtcaaagtatttgttgctgaagtatcactggcgtatatgaagccggagcgttctgatagtataatcgaggcaacttctaagatggagaatagtcattttattattcttgagcagttgattccaaagggaccttttgaacccttttctaagcagatgctagctcatttcaagagaaatgattctccgttacagtctgtattaaagtataatactatcgagtcacaggttcaacgattcaataagttaggtttcgcttacgttaacgtgggtgatatgtttcaactgtgggaaagcgcagatgaggcaaccaagaaggaacttttaaaggtagagccttttgatgaactagaggagttccatttattttgtcatcattatgttttatgccacgctacgaactataaagaattcgcatttactcaagggtttttgtttgacagatcaatatctgagataaacctaactgtggatgaagactatcagcttctagaatgcgagtgccccatcaatagaaaatttggcgatgtagatgtcgctggaaatgatgtgttttacatgggaggtagtaacccatacagagtaaacgaaatattacagttgagtatacactacgacaaaatagacatgaagaatattgaagtaagcagcagcgaggttcctgtagcaagaatgtgtcacacttttacaactatttctagaaataaccagctactgcttattggaggtagaaaggcaccacaccaaggtctctctgataattggatatttgatatgaaaacaagagagtggtcgatgatcaagagtttatcacacacgagattcagacatagtgcatgtagcttaccggatggaaacgtcctgatccttggtggggttacagaaggacctgccatgctgctatacaatgtcaccgaagaaatcttcaaagacgtaactccaaaagatgaattcttccaaaattcgctagtatcagcgggtctagaatttgatccggtttccaaacaaggcataatattgggtggtggatttatggatcaaacaactgtctcggacaaggcaattattttcaaatatgatgcggaaaatgctactgaaccaattacggtgattaagaagctccagcaccccttatttcaacgttatggatcccagataaaatacattactccaagaaagctattaatagtcggtggaacaagtccttccgggctatttgaccggaccaactctataatcagccttgatccgctgagtgagacgctaacatcaattcccatatcaagacgcatatgggaagatcactcactaatgcttgctggatttagtttggtgtccacttctatgggcaccatacatatcattggaggcggtgccacttgctacggctttggatcagtgactaatgtaggtcttaagctcatagcaatcgcgaaataa

SEQ ID NO: 9860 - DNA, 2088 bp, Artificial Sequence
  Description of Artificial Sequence: Synthetic polynucleotide
atgaagaatttgaccactataaagcaaacgaacaagaatgtcaaacaagaaagacgtaaaaagtacgctgatttggcgattcaaggcacaaataactccagtattgcttctaaaagatctgtagagttattgtatttgccaaaattaagttctgctaataatttccaaatggataagaataataaacttttggaatattttaaattctttgttcctaagaaaattaaaagatctccctgtattaacagaggttattggttgaggttatttgccatcaggagcagattgaactccatcattgaacaaacgccacaggataaaaagatagttgttgttaaccttggttgtgggtacgatccattaccatttcaattattagacaccaataacatacaaagtcaacaatatcatgacagagtttcctttattgatattgattactctgatttattgaaaattaaaattgagttgatcaaaactatacccgagctttctaaaattattggtctttctgaagataaagattatgttgatgatagtaatgttgattttttgactactccaaagtatctcgccagaccatgcgacttgaacgattctaagatgttcagcacattgttgaatgagtgtcaattatacgatccaaacgttgtcaaagtatttgttgctgaagtatctttagcgtatatgaagccggagcgttctgatagtataatcgaggcaacttctaagatggagaatagtcattttattattcttgagcagttgattccaaagggaccttttgaacccttttctaagcagatgttggctcatttcaagagaaatgattctccgttacagtctgtattaaagtataatactatcgagagccaggttcaaagattcaataagttaggtttcgcttacgttaacgtgggtgatatgtttcaattatgggaaagcgcagatgaggcaaccaagaaggaacttttaaaggtagagccttttgatgaattagaggagttccatttattttgtcatcattatgttttatgccacgctacgaactataaagaattcgcatttactcaagggtttttgtttgacagaagtatatctgagataaacttgactgtggatgaagactatcagcttttagaatgcgagtgccccatcaatagaaaatttggcgatgtagatgtcgctggaaatgatgtgttttacatgggaggtagtaacccatacagagtaaacgaaatattacagttgagtatacactacgacaaaatagacatgaagaatattgaagtaagcagcagcgaggttcctgtagcaagaatgtgtcacacttttacaactatttctagaaataaccagttattacttattggaggtagaaaggcaccacaccaaggtctctctgataattggatatttgatatgaaaacaagagagtggtctatgatcaagagtttatcccacacgagattcagacatagtgcatgtagcttaccggatggaaacgtcttgatccttggtggggttacagaaggacctgccatgttattgtacaatgtcaccgaagaaatcttcaaagacgtaactccaaaagatgaattcttccaaaattctttagtatctgcgggtttggaatttgatccggtttccaaacaaggcataatattgggtggtggatttatggatcaaacaactgtctctgacaaggcaattattttcaaatatgatgcggaaaatgctactgaaccaattacggtgattaagaagctccagcaccccttatttcaacgttatggatcccagataaaatacattactccaagaaagcttttaatagtcggtggaacaagtccttccgggttgtttgacagaaccaactctataatcagccttgatccgttaagtgagacgttgacatccattcccatatctagacgcatatgggaagatcactctttgatgcttgctggatttagtttggtgtccacttctatgggcaccatacatatcattggaggcggtgccacttgctacggctttggatctgtgactaatgtaggtcttaagctcatagcaatcgcgaaatga

SEQ ID NO: 9861 - DNA, 1272 bp, Saccharomyces cerevisiae
atgtttaaaagatatttatccagtacgtcatcaagaagatttacaagcattttagaggaaaaggcctttcaagtgaccacttactctagacctgaagatctatgtataactagaggtaaaaatgcaaagctgtatgatgacgtgaatggtaaagaatatatcgatttcaccgcaggtattgcggtgaccgcattaggccatgcaaatcctaaagtggcagaaattctgcaccatcaggctaacaaactggttcattcctccaacctttacttcactaaggaatgtttggatttaagtgaaaagattgttgaaaagaccaagcaattcggtggtcaacacgacgcctcaagagtatttttatgtaattctggtacggaagcaaatgaagctgctttgaagtttgcaaagaaacatggtataatgaaaaatcctagcaagcaaggcattgttgcatttgagaactcttttcatggccgtactatgggcgctttatctgtcacttggaatagtaaatatagaactccttttggggatttggttccccatgtctcattcttaaatttgaatgacgaaatgaccaaactacaaagttatatcgagaccaaaaaggacgagattgctggtttaattgtcgagcccatacaaggtgaaggtggggtttttcccgtagaagttgaaaagctaaccggattgaagaaaatatgtcaagataatgatgtgattgtcattcatgatgaaattcaatgcggtttgggccgttcaggtaaactatgggctcatgcttatttaccaagtgaggctcatccggatatttttacatctgccaaagcattgggaaatggcttccccatcgctgccaccatcgtcaatgaaaaagttaataatgctttgagagttggtgaccacggcaccacgtatggtggtaatccgctggcctgttctgtaagcaactatgttttggataccatagcagacgaagcttttttgaaacaagtctctaagaagagtgatatcttacaaaagcgcttgcgcgaaattcaagccaaatatccaaatcaaataaagactatcagaggaaaaggtttgatgcttggtgctgagttcgtcgaaccacccaccgaggtcatcaaaaaggccagagaattgggacttttgatcattaccgctggtaagagtaccgttagatttgttcccgcattaacgattgaagacgaactaatcgaagaagggatggatgcttttgaaaaggctattgaagcggtttacgcttaa

SEQ ID NO: 9862 - DNA, 1272 bp, Artificial Sequence
  Description of Artificial Sequence: Synthetic polynucleotide
atgtttaaaagatatttatccagtacgtcttctagaagatttacaagcattttagaggaaaaggcctttcaagtgaccacttactctagacctgaagatttatgtataactagaggtaaaaatgcaaagctttatgatgacgtgaatggtaaagaatatatcgatttcaccgcaggtattgcggtgaccgcattaggccatgcaaatcctaaagtggcagaaattttacaccatcaggctaacaaattggttcattcctccaacctttacttcactaaggaatgtttggatttaagtgaaaagattgttgaaaagaccaagcaattcggtggtcaacacgacgcctctagagtatttttatgtaattctggtacggaagcaaatgaagctgctttgaagtttgcaaagaaacatggtataatgaaaaatcctagcaagcaaggcattgttgcatttgagaactcttttcatggccgtactatgggcgctttatctgtcacttggaatagtaaatatagaactccttttggggatttggttccccatgtctctttcttaaatttgaatgacgaaatgaccaaattacaaagttatatcgagaccaaaaaggacgagattgctggtttaattgtcgagcccatacaaggtgaaggtggggtttttcccgtagaagttgaaaagttgaccggattgaagaaaatatgtcaagataatgatgtgattgtcattcatgatgaaattcaatgcggtttgggccgttctggtaaattatgggctcatgcttatttaccaagtgaggctcatccggatatttttacatctgccaaagcattgggaaatggcttccccatcgctgccaccatcgtcaatgaaaaagttaataatgctttgagagttggtgaccacggcaccacgtatggtggtaatccgttagcctgttctgtaagcaactatgttttggataccatagcagacgaagcttttttgaaacaagtctctaagaagagtgatatcttacaaaagcgcttgcgcgaaattcaagccaaatatccaaatcaaataaagactatcagaggaaaaggtttgatgcttggtgctgagttcgtcgaaccacccaccgaggtcatcaaaaaggccagagaattgggacttttgatcattaccgctggtaagagtaccgttagatttgttcccgcattaacgattgaagacgaattgatcgaagaagggatggatgcttttgaaaaggctattgaagcggtttacgcttga

SEQ ID NO: 9863 - DNA, 642 bp, Saccharomyces cerevisiae
atgtccgttgaagaagttagcaagaagtttgaagaaaacgtttcagtcgatgataccacagctactccaaagactgttttaagtgacagtgctcacttcgatgtcaagcacccattgaacaccaaatggactttatggtacacaaagccagccgtcgataaatctgagtcgtggtctgatctattacgtcccgtcacttcattccaaactgttgaagaattttgggctatcattcaaaatattcctgagccacacgaactaccattgaaatcagattaccacgtcttccgtaatgacgttagacctgaatgggaagatgaagccaatgctaaaggtggtaaatggtctttccaacttagaggaaaaggtgctgatattgatgaattatggctaagaactttactagcagttattggtgaaacaattgatgaagacgactcccaaattaacggtgtcgttttaagcattagaaaaggtggtaacaagtttgccttatggactaaatctgaagacaaagaaccactattgagaattggtggtaaattcaagcaagttttaaaattaaccgatgacgggcatttggaattctttccacattccagtgccaatggtagacaccctcaaccatcaatcaccttgtaa

SEQ ID NO: 9864 - DNA, 642 bp, Artificial Sequence
  Description of Artificial Sequence: Synthetic polynucleotide
atgtccgttgaagaagttagcaagaagtttgaagaaaacgtttctgtcgatgataccacagctactccaaagactgttttaagtgacagtgctcacttcgatgtcaagcacccattgaacaccaaatggactttatggtacacaaagccagccgtcgataaatctgagagttggtctgatttattacgtcccgtcacttctttccaaactgttgaagaattttgggctatcattcaaaatattcctgagccacacgaattaccattgaaatctgattaccacgtcttccgtaatgacgttagacctgaatgggaagatgaagccaatgctaaaggtggtaaatggtctttccaacttagaggaaaaggtgctgatattgatgaattatggttgagaactttattggcagttattggtgaaacaattgatgaagacgactcccaaattaacggtgtcgttttaagcattagaaaaggtggtaacaagtttgccttatggactaaatctgaagacaaagaaccattgttgagaattggtggtaaattcaagcaagttttaaaattaaccgatgacgggcatttggaattctttccacattccagtgccaatggtagacaccctcaaccatccatcaccttgtga

SEQ ID NO: 9865 - DNA, 4026 bp, Saccharomyces cerevisiae
atgagcttatcaccacacgtagaaaatgcttccattcccaaggggagtaccccgataccaaaaaacagaaacgttagttctataggcaagggcgagtttcttggatcttcgtcaagcaacaattcttcttttcgaatgaatcattactcaaatagtggacaaccttccgtgttagattctatacggcgacctaatctaactccaactttttcttacagtaatggggtttatatgcctgaaagtcacagaactagttcattcaacgatagttatttgccatatgataagaatccttacgcaaaaacaaccggaagcatgagcaataaatcgaacatgaaaatcaaaacaaagaaaaatgcaatcaacacaaatacaagaaagtcgtctggactcatttacaccaccaaagtggataaagaattatctagtatagacaaagtgaatgatccaaacattaacggtcttgtttgtgcaggtaaaactcatttggggctctataaattctcgccctcagatagatctatcaaatgcgttcatgatttcataacacctaatagcaacacctcaacaaggggaacgacatcccttttgcccaagctgagcaaaagaacaagacagaacaaatttagtaccattgcggatgttaagactggatttaataattacaagaactgtattgcagtgtgcaacaattctacggcgatatcgatatatgatctcaataagagttcctcgatagacaatcccttgataacatccttatgcgaacacactagatctatcaatagttttgacttcaacatggtcgaatcaaacctaataataagtggtggacaagatagttgtgtaaaaatatgggatttacgttccaataaatctaaaagctcaaatagatctgacattagtataaataccgcatctgactcaatcagagatgtaaaatggatgcccggttacaattttgcatctaagaacgatcaaggttcatcaacgtatggtaatttaaaaagcggttacaaatttgcttctattcacgattcgggatacttgctaaagtttgatcttcgacaacctgcccaatacgaaaaaaaattaaatgctcacacaggacccggtctttgtttaaattggcatcccaatcaagaatacattgctacaggtggtagagacggtaaatgctgcctctggtttgttggcgacaatgccaatgccgccgaaaatacagtcctcaattacgggaactctccctcgttacatgcccccaatacgtccttgaacaatagcggctcgctggcatttcccaaactaacaattaatacgggctatccagtcactaaattgaagttcaagcctgcttatagtagtaatatatataattcattactaggaatatcgtcaatgggtgacgaagctgaagttcgcatctattccttggcaagaaagtacattccaaaacatgttctcctatcagaaacgccttctttaggattagtatggtgggacgaaaacttgatctttaatatcgataaggggacccgtataaatggctgggacattaacaaagaaccaacagtgctcgaaaatttgagcaaaaatacaacaacttggagagatttggatggtaacggtttactttcagttgaccaagagataggctcatatgaggtggtagaaccggagcttcaacctacctcaagtaccacatgcaagaagcatccaggtacaataaaaaacccgaagaatggcaatccagagaaccagggaataattggagggataaaaaaaggatttagccatactggattaacaagttttacgccagagaggccgcctactttaaaagcaggcccaacgtttagcacaaaaagcttaacattagcatctggagcatcttcttttaacagctcttccgcatcattgacatccctgacgccacaaactgaaaatagagaagaaatcgccattgaaccgccttgtatcatcactttggatataccgcagatcttcaataacataagattaaccaaaatcgcacattcaagaaaaaagaacgtcatttccgaaagttcttctatgaaaaattctccagtagaaaagttcaaatatttggcgagacagctcaagttttcgtatattcgagagcataatgtttcagacagtgcagacactgcatataaaaatgatatagagaacattgacgtcgttaaaaacgcaaccgaaacacatggtgataatactactactaccaataataatgatgatggtgatgatgatgatgatgatgatgatgatgacaaaataatcgaaagtcaccttttgaaaaaatacaattttccagaaaataatacatgggctaccttaatgaatgaaaaagtaaataacaaaaaatccaaaagaaattccagtagttcgagggagtttgacgagaaggatgtcagatcaagtatatcttccatttctgcaagtaggcaaagtcatgacagagctaggaagatcgacaagaacgtggaagcagaactgcaagaaaaaatacaaacactggtagatttgatatctattgcaacgcataacgcatctgtttatctatccatagatgatctaaccaacttcaaaatctggatcttgataagagattcattgttatgggacttgaagtggatgacctcctcccaaatttcatcagataacgcatctaatatggatgccaatgaaagctccgatttcgaagctggagaaaatctgaaaacaggaaaagagttcccagaggaggatggtgcagggacaagtggggctgagtcgttagttgaagaaaggccgcaggcatttcgtgctaactctgatgaaccaagtgatgccgaaaagaaacctgtttctaagctcaaagagcagctcaaaaacacggaaataatcccctatgcgcagccaaatgaggattcagatgaagttttaactaagctaaaagagctacagaaccaacgcttggagtcaaggactaaaatgggagaaacagtgagtgacgatgtgattatagaggaagacgaacatgaacatcaagaagaagaacagcctcatgactcaccgactaagtcagcacaatttcacgcgtctcctatcgcgaaaagtataccaatattgcagaaacgtgagcaccgcaagtcattcatagatactttcatgttgcattctcccaacggttacaatggagatacggacataggtaacgaagatgacaatatatctcctaggtttacttacaacagcgtaagcccacgcagtaaggtttcgtcgctacaaagctatgccacaacaacctcgcaactagaaacttttaaaaagctttcttcccatacagcaccaataatcggatcgcccagacatgcgccatcacggccagatagcattggtagggaacaactgtcttcttcattgacgaaaaagcttgccaaatgcaagaaaattatcgctgacccaccctgggacacgaaaaaactcatcaaacaactctacaatcaagctactgagactgggaacgtcgtattgacggtgaatattttatttcttttccaaacgatataccaaataacagaaatcgacattgcaaaggacgcaatcgctcacttcttgttattattacatcgatacgaactcttcggcattgctgcagacgtcttaaaatactgcccattcgaagatatcatgggttctgagggtgaccaatcttccattcggttgttttgcgaacgctgtggtgagttaatcactaacgaaagttctaaagaaaagctcagagcggaagctcagcagacgggcaataagaagatcatggacaagtttggatactggtattgtgactcttgtaagaagaagaatacatcttgtgttctatgtgaaagaccattaaagaaactgaccatggtcatcctcccctgtggacacgaaggtcacttccagtgcatacaagaatggtttctcgatgagaatgaacaagaatgtcccggcggttgccccggtgttgcattcatctag

SEQ ID NO: 9866 - DNA, 4026 bp, Artificial Sequence
  Description of Artificial Sequence: Synthetic polynucleotide
atgagcttatctccacacgtagaaaatgcttccattcccaaggggagtaccccgataccaaaaaacagaaacgttagttctataggcaagggcgagtttcttggatcttcttctagcaacaattcttcttttagaatgaatcattactctaatagtggacaaccttccgtgttagattctataagaagacctaatttaactccaactttttcttacagtaatggggtttatatgcctgaaagtcacagaactagttctttcaacgatagttatttgccatatgataagaatccttacgcaaaaacaaccggaagcatgagcaataaaagtaacatgaaaatcaaaacaaagaaaaatgcaatcaacacaaatacaagaaagtcttctggactcatttacaccaccaaagtggataaagaattatctagtatagacaaagtgaatgatccaaacattaacggtcttgtttgtgcaggtaaaactcatttggggctctataaattctctccctctgatagatctatcaaatgcgttcatgatttcataacacctaatagcaacacctctacaaggggaacgacatcccttttgcccaagttgagcaaaagaacaagacagaacaaatttagtaccattgcggatgttaagactggatttaataattacaagaactgtattgcagtgtgcaacaattctacggcgatatccatatatgatctcaataagagttcctccatagacaatcccttgataacatccttatgcgaacacactagatctatcaatagttttgacttcaacatggtcgaatctaacttgataataagtggtggacaagatagttgtgtaaaaatatgggatttacgttccaataaatctaaaagcagtaatagatctgacattagtataaataccgcatctgactctatcagagatgtaaaatggatgcccggttacaattttgcatctaagaacgatcaaggttcttctacgtatggtaatttaaaaagcggttacaaatttgcttctattcacgattctggatacttgttgaagtttgatcttagacaacctgcccaatacgaaaaaaaattaaatgctcacacaggacccggtctttgtttaaattggcatcccaatcaagaatacattgctacaggtggtagagacggtaaatgctgcctctggtttgttggcgacaatgccaatgccgccgaaaatacagtcctcaattacgggaactctccctctttacatgcccccaatacgtccttgaacaatagcggctctttggcatttcccaaattaacaattaatacgggctatccagtcactaaattgaagttcaagcctgcttatagtagtaatatatataattctttattaggaatatcttctatgggtgacgaagctgaagttcgcatctattccttggcaagaaagtacattccaaaacatgttctcttgagtgaaacgccttctttaggattagtatggtgggacgaaaacttgatctttaatatcgataaggggacccgtataaatggctgggacattaacaaagaaccaacagtgctcgaaaatttgagcaaaaatacaacaacttggagagatttggatggtaacggtttactttctgttgaccaagagataggctcctatgaggtggtagaaccggagcttcaacctacctctagtaccacatgcaagaagcatccaggtacaataaaaaacccgaagaatggcaatccagagaaccagggaataattggagggataaaaaaaggatttagccatactggattaacaagttttacgccagagaggccgcctactttaaaagcaggcccaacgtttagcacaaaaagcttaacattagcatctggagcatcttcttttaacagctcttccgcaagtttgacatccttgacgccacaaactgaaaatagagaagaaatcgccattgaaccgccttgtatcatcactttggatataccgcagatcttcaataacataagattaaccaaaatcgcacattccagaaaaaagaacgtcatttccgaaagttcttctatgaaaaattctccagtagaaaagttcaaatatttggcgagacagctcaagttttcttatattagagagcataatgtttctgacagtgcagacactgcatataaaaatgatatagagaacattgacgtcgttaaaaacgcaaccgaaacacatggtgataatactactactaccaataataatgatgatggtgatgatgatgatgatgatgatgatgatgacaaaataatcgaaagtcaccttttgaaaaaatacaattttccagaaaataatacatgggctaccttaatgaatgaaaaagtaaataacaaaaaatccaaaagaaattccagtagttctagggagtttgacgagaaggatgtcagaagtagtatatcttccatttctgcaagtaggcaaagtcatgacagagctaggaagatcgacaagaacgtggaagcagaattacaagaaaaaatacaaacattggtagatttgatatctattgcaacgcataacgcatctgtttatttatccatagatgatttgaccaacttcaaaatctggatcttgataagagattctttgttatgggacttgaagtggatgacctcctcccaaatttcttctgataacgcatctaatatggatgccaatgaaagctccgatttcgaagctggagaaaatttgaaaacaggaaaagagttcccagaggaggatggtgcagggacaagtggggctgagtctttagttgaagaaaggccgcaggcatttcgtgctaactctgatgaaccaagtgatgccgaaaagaaacctgtttctaagctcaaagagcagctcaaaaacacggaaataatcccctatgcgcagccaaatgaggattctgatgaagttttaactaagttgaaagagttacagaaccaacgcttggagtccaggactaaaatgggagaaacagtgagtgacgatgtgattatagaggaagacgaacatgaacatcaagaagaagaacagcctcatgactctccgactaagtctgcacaatttcacgcgtctcctatcgcgaaaagtataccaatattgcagaaacgtgagcaccgcaagagtttcatagatactttcatgttgcattctcccaacggttacaatggagatacggacataggtaacgaagatgacaatatatctcctaggtttacttacaacagcgtaagcccacgcagtaaggtttcttctttacaaagctatgccacaacaacctctcaattggaaacttttaaaaagctttcttcccatacagcaccaataatcggaagtcccagacatgcgccaagcagaccagatagcattggtagggaacaattatcttcttctttgacgaaaaagcttgccaaatgcaagaaaattatcgctgacccaccctgggacacgaaaaaactcatcaaacaactctacaatcaagctactgagactgggaacgtcgtattgacggtgaatattttatttcttttccaaacgatataccaaataacagaaatcgacattgcaaaggacgcaatcgctcacttcttgttattattacatcgttacgaactcttcggcattgctgcagacgtcttaaaatactgcccattcgaagatatcatgggttctgagggtgaccaatcttccattagattgttttgcgaacgctgtggtgagttaatcactaacgaaagttctaaagaaaagctcagagcggaagctcagcagacgggcaataagaagatcatggacaagtttggatactggtattgtgactcttgtaagaagaagaatacatcttgtgttttatgtgaaagaccattaaagaaattgaccatggtcatcctcccctgtggacacgaaggtcacttccagtgcatacaagaatggtttctcgatgagaatgaacaagaatgtcccggcggttgccccggtgttgcattcatctga

SEQ ID NO: 9867 - DNA, 1494 bp, Saccharomyces cerevisiae
atggatgcttcctcggttccaccaaaggtagatgattatggaatgtatacaactgaaatttcacatcataacccaatagagttgaaaaatctgctatcatcatcagactccagaagaaattctcaagatgaagatagtctacctaacaatacaaacttaatcaaagaaattgactggcagggcgagaaagttaaaacatatccactaaactatcaaactgtaccactagtaaagctgcaggtgatagcatgcttgattatgttcgtagtctttggtatgaacgatcaaacagtaggtgcactacttcctacgctaattgaatactatcatatatcgcgggtagatgtctcaaacgtatttatagtccaattatgtggttatgtgatggcgtctttatcaaaagagagattgaataagcactttggtatgagaggtggtatgcttctagcagctggtttgtgtatagtatttcttatcattttagcaactgcaccttctagtttctatgtttgtatgttttgtggccttcctcttggtttagggatcggcatcttagattctaccggtaatgttttaatgggcagtcttttagtccataagaatgaactcatgggtatcatgcatggtctttacggggcagcagctatggttactcctcccttagtttcatattttgttgaatggggtcattggtctctttttttccttattcctctgttcttttctataataggcatgattgtaatcttcccagcttttaaatttgaaactgcaagtaaatacgactacctctgctctgtggaaaacaaagaaagcaacaatgatgtggaagaagcgggtgataactcgctgatggaatctaccaaggcgagcccaggattttttgaacttttaagaaatcctgctattttcttgtactcattgtatttgttcctttacttaggtgctgaaattacaactggttcatggttctttagttatttattggaaactaaatcaagtaataaggttgctatgtcatacatagcggcatcgttttggacaggtttgactgtaggcaggttgtgtctaggatttgttactgaaagattcttcgaaaacgagtataaagcaagcaaagcgtacgcttttttaactctatcttcatacaccttatttgtgcttgttgggttgatcaattcaagctcagttttctatttcgtcgtgttattttttgttgttttttgttgtggtacgtttatcggaccattattcccaaacgcaagtatagttgcattacaagtattgcccaaaagactacatgtgagcggggttggggttgccgtcgccgttggtggttgtggtggtgcagccattccatatttggctggagttattgcacacacagtgggaatccagtatatcccactattgtgttggattatggttgcgttatttacattggaatggacattgtatcctaaattcataaaagggcatgaagaatatttttag

SEQ ID NO: 9868 - DNA, 1494 bp, Artificial Sequence
  Description of Artificial Sequence: Synthetic polynucleotide
atggatgcttcctctgttccaccaaaggtagatgattatggaatgtatacaactgaaatttctcatcataacccaatagagttgaaaaatttattatcttcttctgactccagaagaaattctcaagatgaagatagtttacctaacaatacaaacttaatcaaagaaattgactggcagggcgagaaagttaaaacatatccattgaactatcaaactgtaccattagtaaagttacaggtgatagcatgcttgattatgttcgtagtctttggtatgaacgatcaaacagtaggtgcattacttcctacgttgattgaatactatcatatatccagagtagatgtctccaacgtatttatagtccaattatgtggttatgtgatggcgtctttatccaaagagagattgaataagcactttggtatgagaggtggtatgcttttagcagctggtttgtgtatagtatttcttatcattttagcaactgcaccttctagtttctatgtttgtatgttttgtggccttcctcttggtttagggatcggcatcttagattctaccggtaatgttttaatgggcagtcttttagtccataagaatgaactcatgggtatcatgcatggtctttacggggcagcagctatggttactcctcccttagtttcttattttgttgaatggggtcattggtctctttttttccttattcctcttttcttttctataataggcatgattgtaatcttcccagcttttaaatttgaaactgcaagtaaatacgactacctctgctctgtggaaaacaaagaaagcaacaatgatgtggaagaagcgggtgataactctttgatggaatctaccaaggcgagcccaggattttttgaacttttaagaaatcctgctattttcttgtactctttgtatttgttcctttacttaggtgctgaaattacaactggttcttggttctttagttatttattggaaactaaatctagtaataaggttgctatgagttacatagcggcaagtttttggacaggtttgactgtaggcaggttgtgtttaggatttgttactgaaagattcttcgaaaacgagtataaagcaagcaaagcgtacgcttttttaactttatcttcctacaccttatttgtgcttgttgggttgatcaatagtagctctgttttctatttcgtcgtgttattttttgttgttttttgttgtggtacgtttatcggaccattattcccaaacgcaagtatagttgcattacaagtattgcccaaaagattacatgtgagcggggttggggttgccgtcgccgttggtggttgtggtggtgcagccattccatatttggctggagttattgcacacacagtgggaatccagtatatcccattgttgtgttggattatggttgcgttatttacattggaatggacattgtatcctaaattcataaaagggcatgaagaatatttttga

SEQ ID NO: 9869 - DNA, 1194 bp, Saccharomyces cerevisiae
atgggtggttcttccgattcagactctcacgatggatatttgacttccgaatataattcctcgaattctcttttttcacttaacaccggtaacagctattcaagcgcatctctcgacagagccactttagattgtcaagattctgtttttttcgataatcacaaaagttcactgctgtctacagaggtcccaaggtttatttctaacgacccgttacacttacccattacactgaattacaaaagagacaatgcagaccctacgtatacaaatggaaaagttaacaagtttatgattgttttgattgggctaccagctactgggaagtctaccatttcttctcatttaattcaatgtttgaagaacaatccgctaactaattcattacgctgtaaagtttttaatgctggtaagataagaaggcaaatcagttgtgctaccatttcaaagcctttgcttttgtcgaatacatcttcggaagacttatttaatccgaaaaataacgataaaaaggaaacgtatgccaggatcactttgcaaaagttgtttcacgaaatcaacaacgatgaatgtgacgtgggaatcttcgacgccacaaattcgaccatcgaaagaagaagatttatatttgaggaggtttgttcgttcaatacagatgagctttctagtttcaatttggtgcccataatcttacaggtgtcatgttttaacagaagctttatcaaatacaatatccacaataaatcgtttaatgaagactacttagacaaaccttatgaacttgccatcaaagattttgcaaagagattaaaacattactattcgcagtttacacctttctcccttgatgagttcaatcaaatccatcgatatatcagccaacatgaagaaatcgatacgagcttatttttcttcaatgttattaatgcgggcgtcgttgagccacattctttaaatcaaagtcattacccttcaacctgcggcaagcaaattagggacaccattatggttattgaaaatttcatcaatcactattctcagatgtttggttttgaatacatcgaagctgttaaattgttttttgaaagttttggaaatagctcagaggaaactttaactacactagactctgttgttaatgataaattttttgatgatttgcagagcctaattgaaagcaacggatttgcttga

SEQ ID NO: 9870 - DNA, 1194 bp, Artificial Sequence
  Description of Artificial Sequence: Synthetic polynucleotide
atgggtggttcttccgattctgactctcacgatggatatttgacttccgaatataattcctctaattctcttttttcccttaacaccggtaacagctattctagcgcatctctcgacagagccactttagattgtcaagattctgtttttttcgataatcacaaaagttctttattatctacagaggtcccaaggtttatttctaacgacccgttacacttacccattacattaaattacaaaagagacaatgcagaccctacgtatacaaatggaaaagttaacaagtttatgattgttttgattgggttaccagctactgggaagtctaccatttcttctcatttaattcaatgtttgaagaacaatccgttgactaattctttacgctgtaaagtttttaatgctggtaagataagaaggcaaatcagttgtgctaccatttccaagcctttgcttttgagcaatacatcttctgaagacttatttaatccgaaaaataacgataaaaaggaaacgtatgccaggatcactttgcaaaagttgtttcacgaaatcaacaacgatgaatgtgacgtgggaatcttcgacgccacaaattctaccatcgaaagaagaagatttatatttgaggaggtttgttctttcaatacagatgagctttctagtttcaatttggtgcccataatcttacaggtgagctgttttaacagaagctttatcaaatacaatatccacaataaaagttttaatgaagactacttagacaaaccttatgaacttgccatcaaagattttgcaaagagattaaaacattactattctcagtttacacctttctcccttgatgagttcaatcaaatccatcgttatatcagccaacatgaagaaatcgatacgagcttatttttcttcaatgttattaatgcgggcgtcgttgagccacattctttaaatcaaagtcattacccttctacctgcggcaagcaaattagggacaccattatggttattgaaaatttcatcaatcactattctcagatgtttggttttgaatacatcgaagctgttaaattgttttttgaaagttttggaaatagctctgaggaaactttaactacattagactctgttgttaatgataaattttttgatgatttgcagagcttaattgaaagcaacggatttgcttga

SEQ ID NO: 9871 - DNA, 669 bp, Saccharomyces cerevisiae
atgtccaatgatcctggtaatgaggttagctccttgtacccacctccacccccatacgtgaagtttttcacacagtccaatctggaaaaattaccaaaatacaaagaaaagaaggccgcaagtgcgaagcagacggctccaaataacagtaacggcggcagtgaagaggagattacatgtgcgctagattacctaatcccaccccccatgcccaaaaatcagcagtaccgagcgtttgggagtatatggcaggtgaaggaccaactgcccgatttagagagcatgggactcacccaactttataagaaatccacagaaaacgaaagcacaaattatcaatacaaaatccaagagctacgcaaactattgaaatccctcctgctaaattacttggaactcatcggcgtattgagcataaatccggatatgtatgagcgcaaagtggagaacataaggaccattcttgtcaatattcaccacctacttaatgagtacagaccccatcagtcccgagagtcccttattatgctattggaagaacaattagaatacaagcgcggggaaattcgcgagatcgagcaagtatgcaaacaggtacacgacaaactcaccagcatacaggacaccttaagaaccggatcacaatctcctccatcgtcgtcccaatga

SEQ ID NO: 9872 - DNA, 669 bp, Artificial Sequence
  Description of Artificial Sequence: Synthetic polynucleotide
atgtccaatgatcctggtaatgaggttagctccttgtacccacctccacccccatacgtgaagtttttcacacagtccaatttggaaaaattaccaaaatacaaagaaaagaaggccgcaagtgcgaagcagacggctccaaataacagtaacggcggcagtgaagaggagattacatgtgcgttggattacttgatcccaccccccatgcccaaaaatcagcagtacagggcgtttgggagtatatggcaggtgaaggaccaattgcccgatttagagagcatgggactcacccaactttataagaaatccacagaaaacgaaagcacaaattatcaatacaaaatccaagagttacgcaaacttttgaaatccctccttttgaattacttggaactcatcggcgtattgagcataaatccggatatgtatgagcgcaaagtggagaacataaggaccattcttgtcaatattcaccacttacttaatgagtacagaccccatcagtccagagagtcccttattatgcttttggaagaacaattagaatacaagcgcggggaaattcgcgagatcgagcaagtatgcaaacaggtacacgacaaactcaccagcatacaggacaccttaagaaccggatctcaatctcctccatcttcttcccaatga

SEQ ID NO: 9873 - DNA, 366 bp, Saccharomyces cerevisiae
atgagcaacgaagttgacaggatggatgttgatgaagatgaatcgcaaaatattgcgcaaagctcaaaccaaagtgcgccagtggaaaccaaaaagaagagatttgaaattaagaaatggaccgcagtggcgttttggtcatgggatatagctgttgacaactgtgctatttgcaggaaccatataatggaaccatgcattgaatgccagccaaaggccatgacggacactgataatgaatgtgtagcagcctggggtgtctgtaatcacgctttccatttgcactgtattaataaatggatcaagacaagagacgcatgcccattagataaccaaccttggcagttagcaagatgcggtaggtga

SEQ ID NO: 9874 - DNA, 366 bp, Artificial Sequence
  Description of Artificial Sequence: Synthetic polynucleotide
atgagcaacgaagttgacaggatggatgttgatgaagatgaatctcaaaatattgcgcaaagcagtaaccaaagtgcgccagtggaaaccaaaaagaagagatttgaaattaagaaatggaccgcagtggcgttttggtcctgggatatagctgttgacaactgtgctatttgcaggaaccatataatggaaccatgcattgaatgccagccaaaggccatgacggacactgataatgaatgtgtagcagcctggggtgtctgtaatcacgctttccatttgcactgtattaataaatggatcaagacaagagacgcatgcccattagataaccaaccttggcagttagcaagatgcggtaggtga

SEQ ID NO: 9875 - DNA, 1416 bp, Saccharomyces cerevisiae
atgatggttttttcgagcacctttatttttctaattttggagttagttgtactgtgtgaagcttcagtccacaccattcaaattaaggacaagcatttcgttgacacagtgactggaaaaccattcttcatcaaaggtgtggattatcagccaggaggctcttccgacgttagtgaaaagcaggatccgttatccaatccagatgcatgcgctcgtgatattttattatttcaagaattgggaataaacacagtaagaatttattctataaacccggacctgaaccatgatgcgtgcatgactatgctcgcaatggcaggtatctatcttatattggatgtcaattccccattgcaaaaccagcacttaaacagatatgaaccttggactacctataatgaagtttatttagaacacgttttcaaggttgtcgaacaattttctcattacaataatactttaggattttttgctgggaatgaaattgtaaacgacaaaagatcagcacaatattctcctgcctatgtcaaggagttgattggaactatgaagaattacataagcgcacactcgcccagaacaattccggtaggttactctgctgcagatgacctgaactatagggtatcactgtccgaatatttggagtgtaaagatgatgataagccagagaatagcgttgatttttacggagttaactcctaccaatggtgtggccaacaaactatgcaaacttcagggtacgatacattggtggatgcttacaggagctattccaagccagtttttttttcagaatttggatgcaataaagtattgccaaggcaattccaggaaataggttatttgttttctgaggagatgtattcagtattctgtggaggtctggtttacgaattttcacaggaggataataattatgggttagttgaatatcaagaagatgattcagtacagctcttagcagattttgagaagcttaaatcgcactaccaaaacattgagtttccttctatgaagactttaaaggaaactgttcagatggaggagacgccatcatgtgcggaagattatgaaaatttgaagattgaatctaaaattgctaaaaatttaggaagttctttgataaaaaaaggcgtgaaagttgaaaaaggcaaatacatagatattcacgaggatcagctgtccaccaatgtcacgattttagacaagcatggtgacagatggaatgggcccaaaaagattgaaattaggcaaagcctgacattggcagacctggaaggagaagaacaagaagacgcagatgaagacaaagatgatttaaaacgaaaacaccggaattctgcctctatttccggcccattgttacctcttgggttgtgtttgcttttttttacttttagtttatttttttag

SEQ ID NO: 9876 - DNA, 1416 bp, Artificial Sequence
  Description of Artificial Sequence: Synthetic polynucleotide
atgatggttttttctagcacctttatttttttgattttggagttagttgtattatgtgaagcttctgtccacaccattcaaattaaggacaagcatttcgttgacacagtgactggaaaaccattcttcatcaaaggtgtggattatcagccaggaggctcttccgacgttagtgaaaagcaggatccgttatccaatccagatgcatgcgctcgtgatattttattatttcaagaattgggaataaacacagtaagaatttattctataaacccggacttgaaccatgatgcgtgcatgactatgctcgcaatggcaggtatctatcttatattggatgtcaattccccattgcaaaaccagcacttaaacagatatgaaccttggactacctataatgaagtttatttagaacacgttttcaaggttgtcgaacaattttctcattacaataatactttaggattttttgctgggaatgaaattgtaaacgacaaaagaagtgcacaatattctcctgcctatgtcaaggagttgattggaactatgaagaattacataagcgcacactcccccagaacaattccggtaggttactctgctgcagatgacttgaactatagggtatctttatccgaatatttggagtgtaaagatgatgataagccagagaatagcgttgatttttacggagttaactcctaccaatggtgtggccaacaaactatgcaaacttctgggtacgatacattggtggatgcttacaggagctattccaagccagtttttttttctgaatttggatgcaataaagtattgccaaggcaattccaggaaataggttatttgttttctgaggagatgtattctgtattctgtggaggtttagtttacgaattttcccaggaggataataattatgggttagttgaatatcaagaagatgattctgtacagctcttagcagattttgagaagcttaaatctcactaccaaaacattgagtttccttctatgaagactttaaaggaaactgttcagatggaggagacgccaagttgtgcggaagattatgaaaatttgaagattgaatctaaaattgctaaaaatttaggaagttctttgataaaaaaaggcgtgaaagttgaaaaaggcaaatacatagatattcacgaggatcagttgtccaccaatgtcacgattttagacaagcatggtgacagatggaatgggcccaaaaagattgaaattaggcaaagcttaacattggcagacttggaaggagaagaacaagaagacgcagatgaagacaaagatgatttaaaaagaaaacacagaaattctgcctctatttccggcccattgttacctcttgggttgtgtttgcttttttttacttttagtttatttttttga

SEQ ID NO: 9877 - DNA, 327 bp, Saccharomyces cerevisiae
atgaatactaataagatagcacaagacgaagtccaagataaggttttgcaaagagcagaactagcacattctgtatggaacttaaggttcaacctcagtaaagttgccaaacggattcgcatggaaacaaaggtatttccagagataaagataaatgacgcgcaatcacagttagagcgatctaggtgtagaatatttagccctgacctggaggaagaacatgtgcccttgattcaaggctttaaatgtttggattcaccccctcccgttccaccaagctcatcgcagggggaggatgaagagaacacggtagattcgcaatactag

SEQ ID NO: 9878 - DNA, 327 bp, Artificial Sequence
  Description of Artificial Sequence: Synthetic polynucleotide
atgaatactaataagatagcacaagacgaagtccaagataaggttttgcaaagagcagaattggcacattctgtatggaacttaaggttcaacctcagtaaagttgccaaaagaattcgcatggaaacaaaggtatttccagagataaagataaatgacgcgcaatctcagttagagagatctaggtgtagaatatttagccctgacttggaggaagaacatgtgcccttgattcaaggctttaaatgtttggattctccccctcccgttccaccaagctcctctcagggggaggatgaagagaacacggtagattctcaatactga

SEQ ID NO: 9879 - DNA, 2580 bp, Saccharomyces cerevisiae
atgtcatcatcctcaagttcatcagagtcatcgcctaatttatcgcggtcaaactcactggctaacacgatggtttccatgaaaacagaagaccatacgggattgtacgaccataggcagcaccctgactcactgccggtccgtcaccaacctccaacattgaagaacaaggaaattgctaagtccactaaaccttctattcctaaggagcagaagagtgcaacgagatacaacagccatgtggatgtgggaagcgtacccagtaggggccgcatggattttgaagatgaagggcagggtatggatgaaacggttgctcatcatcaattgagggcatctgccattttaacttctaacgcgaggccttccagactagcccactccatgccacatcaaaggcagctttatgtggaaagtaatatacacacaccaccaaaggatgtaggtgtaaagagagactatactatgtcatcttctactgcatcatcaggtaacaaatccaagctgagcgcatcttcctcggcaagtcctattacgaaggttagaaaatcttcgctggtcagtcctgttcttgagatcccacacgaatcgaaatctgatacacactccaagctggctaaacccaagaagaggacatattctaccacatctgcgcattcatctatcaatcccgcagttttactgacgaaaagcacatcccaaaaatcggatgcagatgatgatacattggaaagaaaaccagtacgtatgaatactagagcttcttttgatagtgacgtatcacaggcgtcgagagattctcaagagacggaagaagatgtttgtttccctatgccaccacaattgcataccagagttaacggtatagatttcgatgaactggaagagtacgctcagtttgcaaacgcggagaagagtcaatttttggcaagtctgcaagtgcccaacgaacagaagtacagtaacgtttctcaggatatcgggtttaccagctctacttccacttcgggatcatcagctgccctaaaatatacaccaagagtttcgcagactggtgaaaagagcgagagtaccaatgaaacagaaatccatgaaaagaaggaagacgagcatgagaaaatcaagcctagtttacaccctggtatatctttcggtaaaaataaagttgaaggggaagagaatgaaaacattccatccaatgacccggcgtattgctcttaccagggtacagactttcaaattcctaatagattttcttttttctgttccgaatctgatgaaaccgttcatgctagtgatatcccttccttagtgtctgagggacaaacattctatgaattattcaggggaggtgagccaacatggtggttagattgtagttgtccaactgatgatgaaatgcgttgcatagcaaaggcgtttggtatccatccattgactgcagaagatatcagaatgcaagaaacacgtgaaaaggtggaacttttcaaatcgtattacttcgtttgtttccatacctttgaaaatgataaagaatcagaggatttcctggaacctattaacgtttacattgttgtctgtaggtcaggtgttttaacattccattttggcccaatatctcattgtgctaatgtcagaaggcgtgtaagacagttacgtgactatgtcaatgtcaattcagattggttatgttatgctttaatcgatgacattactgatagtttcgctcctgtaattcaatctattgaatatgaagcagatgcaatcgaagattctgtgttcatggctcgtgacatggattttgcagcaatgttacaaagaattggtgaaagtaggcgtaagacaatgacgttgatgagacttcttagtggtaaggctgatgttatcaaaatgtttgccaaaagatgccaagatgaagctaatggtattggaccggcactaacatctcaaataaatattgctaacttacaggcaaggcaggataacgccagtcatatcaaaaataatagttcgacaactgtaccaaataattatgcgcccaccacatcacaaccgaggggggatatcgccctatacttgggtgatattcaagatcatttgttgacaatgtttcaaaatttgctggcgtacgaaaaaattttttctagatcccatacaaactacttagctcaactgcaagtggaatcatttaattctaataataaagtgacagaaatgttgggtaaagtcaccatgataggtacaatgctagttccattaaatgttatcactggtcttttcggtatgaatgttaaagttccgggggagaattccagtatcgcgtggtggtttgggatattgggtgtgctgcttttgctggccgtccttggttggttcttggccagctattggattaaaagaatagaccctcctgcaacacttaacgaggccgctgaaagtggagccaaatcggttatttcgagcttcttgccaaaaagaaacaagagattcaatgatcgttccaaaaatataaatgtaagagccggtccttcaaacaaatcagttgcaagtcttcctagtagatatagccgctacgactga

SEQ ID NO: 9880 - DNA, 2580 bp, Artificial Sequence
  Description of Artificial Sequence: Synthetic polynucleotide
atgtcttcttcctccagttcttctgagagtagccctaatttatccagatctaactctttggctaacacgatggtttccatgaaaacagaagaccatacgggattgtacgaccataggcagcaccctgactctttaccggtccgtcaccaacctccaacattgaagaacaaggaaattgctaagtccactaaaccttctattcctaaggagcagaagagtgcaacgagatacaacagccatgtggatgtgggaagcgtacccagtaggggccgcatggattttgaagatgaagggcagggtatggatgaaacggttgctcatcatcaattgagggcatctgccattttaacttctaacgcgaggccttccagattggcccactccatgccacatcaaaggcagctttatgtggaaagtaatatacacacaccaccaaaggatgtaggtgtaaagagagactatactatgtcttcttctactgcatcttctggtaacaaatccaagttgagcgcatcttcctctgcaagtcctattacgaaggttagaaaatcttctttggtcagtcctgttcttgagatcccacacgaaagtaaatctgatacacactccaagttggctaaacccaagaagaggacatattctaccacatctgcgcattcttctatcaatcccgcagttttattgacgaaaagcacatcccaaaaatctgatgcagatgatgatacattggaaagaaaaccagtacgtatgaatactagagcttcttttgatagtgacgtatctcaggcgtccagagattctcaagagacggaagaagatgtttgtttccctatgccaccacaattgcataccagagttaacggtatagatttcgatgaattggaagagtacgctcagtttgcaaacgcggagaagagtcaatttttggcaagtttacaagtgcccaacgaacagaagtacagtaacgtttctcaggatatcgggtttaccagctctacttccacttctggaagttctgctgccttgaaatatacaccaagagtttctcagactggtgaaaagagcgagagtaccaatgaaacagaaatccatgaaaagaaggaagacgagcatgagaaaatcaagcctagtttacaccctggtatatctttcggtaaaaataaagttgaaggggaagagaatgaaaacattccatccaatgacccggcgtattgctcttaccagggtacagactttcaaattcctaatagattttcttttttctgttccgaatctgatgaaaccgttcatgctagtgatatcccttccttagtgtctgagggacaaacattctatgaattattcaggggaggtgagccaacatggtggttagattgtagttgtccaactgatgatgaaatgcgttgcatagcaaaggcgtttggtatccatccattgactgcagaagatatcagaatgcaagaaacacgtgaaaaggtggaacttttcaaaagttattacttcgtttgtttccatacctttgaaaatgataaagaaagtgaggatttcttggaacctattaacgtttacattgttgtctgtaggtctggtgttttaacattccattttggcccaatatctcattgtgctaatgtcagaaggcgtgtaagacagttacgtgactatgtcaatgtcaattctgattggttatgttatgctttaatcgatgacattactgatagtttcgctcctgtaattcaatctattgaatatgaagcagatgcaatcgaagattctgtgttcatggctcgtgacatggattttgcagcaatgttacaaagaattggtgaaagtaggcgtaagacaatgacgttgatgagacttcttagtggtaaggctgatgttatcaaaatgtttgccaaaagatgccaagatgaagctaatggtattggaccggcattaacatctcaaataaatattgctaacttacaggcaaggcaggataacgccagtcatatcaaaaataatagttctacaactgtaccaaataattatgcgcccaccacatctcaaccgaggggggatatcgccctttacttgggtgatattcaagatcatttgttgacaatgtttcaaaatttgttagcgtacgaaaaaattttttctagatcccatacaaactacttagctcaattacaagtggaaagttttaattctaataataaagtgacagaaatgttgggtaaagtcaccatgataggtacaatgcttgttccattaaatgttatcactggtcttttcggtatgaatgttaaagttccgggggagaattccagtatcgcgtggtggtttgggatattgggtgtgttgcttttgttagccgtccttggttggttcttggccagctattggattaaaagaatagaccctcctgcaacacttaacgaggccgctgaaagtggagccaaatctgttatttctagcttcttgccaaaaagaaacaagagattcaatgatcgttccaaaaatataaatgtaagagccggtccttccaacaaatctgttgcaagtcttcctagtagatatagccgctacgactga

SEQ ID NO: 9881 - DNA, 555 bp, Saccharomyces cerevisiae
atggaggcagatgatcatgttagcttatttcgcttccccttcaagattcccacctttcgtggtataagaaaaggtggggtctatctttcaggtgctctctatgctctaggcttttggatatttctagacgcagtgctctattctagatattccaatgcatcagatgttcatgttacgttcattgactggattccttttctttgcagcacactgggaacattgattgtgaattctattgaaaagaatagattattgcagggagctttatcgtcagatggtggtgccttcggtagtggtgtaggcgatttagattcaagcatggcatggcaagctcgaaccgttttattttttggctttgctttattagctggtgggctatcaggctccattgtcgtgttgatcatcaaatttttagtcaaggattacaatacctatccaactttggggatgggagtaaacaatgtgttggggaatgtatgcatattattgagttgcgttgttttatggatagcccaaaatgttgaagatgaatattcatattctttgacgctctaa

SEQ ID NO: 9882 - DNA, 555 bp, Artificial Sequence
  Description of Artificial Sequence: Synthetic polynucleotide
atggaggcagatgatcatgttagcttatttcgcttccccttcaagattcccacctttcgtggtataagaaaaggtggggtctatctttctggtgctctctatgctttgggcttttggatatttttggacgcagtgctctattctagatattccaatgcatctgatgttcatgttacgttcattgactggattccttttctttgcagcacattaggaacattgattgtgaattctattgaaaagaatagattattgcagggagctttatcttctgatggtggtgccttcggtagtggtgtaggcgatttagattctagcatggcatggcaagctagaaccgttttattttttggctttgctttattagctggtgggctttctggctccattgtcgtgttgatcatcaaatttttagtcaaggattacaatacctatccaactttggggatgggagtaaacaatgtgttggggaatgtatgcatattattgagttgcgttgttttatggatagcccaaaatgttgaagatgaatattcttattctttgacgctctga

SEQ ID NO: 9883 - DNA, 1128 bp, Saccharomyces cerevisiae
atgcttaaagtgaataacgttttcgggagcaaccccaatagaatgacaaaattggaggatgaacactactttatcgatgacatcgtatcgattaaaaacagacaaaagagcaaaatgtacgtcagggaagggaaacggataggccacggctcgtttggaactgtgacacagtccattctgtcgagcaatagtattgaatggctaggaccttatgccataaaaagagtagtgaaatctcccaaagtacaatctttggaattggagatcttacagaatatcagacatccaaatctggttactttagagttcttcttcgagagccactgtactaccaaggacggtgggcacttatatcagaaaaactttgttatggaatacattcctcaaaccttaagttctgaaattcatgaatattttgacaatggttctaagatgcctacaaaacatatcaagctgtacacattccaaatacttcgagcacttctgaccttacattccatgagtatatgccatggcgatctgaaaccgagcaatatattgattataccaagtagcggtattgctaaagtgtgtgactttggctcggcacagcgactggatgataatacagaattgaagacctatttttgctcgaggttttatagagcacctgaacttctcctaaattcgaaggattatacaactcaaatagatatatggtcgcttggttgtataataggcgaaatgataaaaggccagccactttttaaaggcgatagcgctaactcacaactggaggagatagctaaactattaggccgctttcctaaaagttctataaaaaattctcaagagttacaggatagcttaaatgaccaaaaattcaagaagtttatgcattggtttccctctatagaattttttgatgtggaattcttgctaaaggtgttgacgtatgatgccactgaaaggtgcgatgctagacaattgatggctcacgaattttttgacgcgttaagaaatgaaacctattttttgccaagaggttcgagtatgccggttcacctaccagacctctttaattttagtgcatcggagaaaagggctcttggagagtattacaacttgattgtgccatctctggattag

SEQ ID NO: 9884 - DNA, 1128 bp, Artificial Sequence
  Description of Artificial Sequence: Synthetic polynucleotide
atgcttaaagtgaataacgttttcgggagcaaccccaatagaatgacaaaattggaggatgaacactactttatcgatgacatcgtatctattaaaaacagacaaaagagcaaaatgtacgtcagggaagggaaaagaataggccacggctcttttggaactgtgacacagtccattttatccagcaatagtattgaatggttaggaccttatgccataaaaagagtagtgaaatctcccaaagtacaatctttggaattggagatcttacagaatatcagacatccaaatttggttactttagagttcttcttcgagagccactgtactaccaaggacggtgggcacttatatcagaaaaactttgttatggaatacattcctcaaaccttaagttctgaaattcatgaatattttgacaatggttctaagatgcctacaaaacatatcaagttgtacacattccaaatacttcgtgcacttttaaccttacattccatgagtatatgccatggcgatttgaaaccgagcaatatattgattataccaagtagcggtattgctaaagtgtgtgactttggcagtgcacagagattagatgataatacagaattgaagacctatttttgctctaggttttatagagcacctgaacttctcttgaattctaaggattatacaactcaaatagatatatggagtcttggttgtataataggcgaaatgataaaaggccagccactttttaaaggcgatagcgctaactctcaattggaggagatagctaaattattaggccgctttcctaaaagttctataaaaaattctcaagagttacaggatagcttaaatgaccaaaaattcaagaagtttatgcattggtttccctctatagaattttttgatgtggaattcttgttgaaggtgttgacgtatgatgccactgaaaggtgcgatgctagacaattgatggctcacgaattttttgacgcgttaagaaatgaaacctattttttgccaagaggtagtagtatgccggttcacttgccagacctctttaattttagtgcaagtgagaaaagggctcttggagagtattacaacttgattgtgccatctttagattga

SEQ ID NO: 9885 - DNA, 429 bp, Saccharomyces cerevisiae
atggctccatctgctaaggctactgccgctaagaaagctgtcgttaagggtactaatggtaagaaggctttgaaggtcagaacttctgctaccttcagactaccaaagaccttgaagttggctagagctccaaaatatgcttccaaggctgttccacattacaacagattggactcatacaaggtcattgagcaaccaatcacttctgaaaccgctatgaagaaggttgaagatggtaacattttggttttccaagtttccatgaaagctaacaaataccaaatcaagaaggccgtcaaggaattatacgaagttgacgtattgaaggttaacactttggttagaccaaacggtaccaagaaggcttacgttagattgactgctgactacgatgctttggacattgctaacagaatcggttacatttaa

SEQ ID NO: 9886 - DNA, 429 bp, Artificial Sequence
  Description of Artificial Sequence: Synthetic polynucleotide
atggctccatctgctaaggctactgccgctaagaaagctgtcgttaagggtactaatggtaagaaggctttgaaggtcagaacttctgctaccttcagattaccaaagaccttgaagttggctagagctccaaaatatgcttccaaggctgttccacattacaacagattggactcttacaaggtcattgagcaaccaatcacttctgaaaccgctatgaagaaggttgaagatggtaacattttggttttccaagtttccatgaaagctaacaaataccaaatcaagaaggccgtcaaggaattatacgaagttgacgtattgaaggttaacactttggttagaccaaacggtaccaagaaggcttacgttagattgactgctgactacgatgctttggacattgctaacagaatcggttacatttga

SEQ ID NO: 9887 - DNA, 1134 bp, Saccharomyces cerevisiae
atgcctcactcagttacaccatccatagaacaagattcgttaaaaattgccattttaggtgctgccggtggtatcgggcagtcgttatcgctgcttttgaaagctcagttgcaataccagttaaaggagagcaaccggagcgttacccacattcatctggctctttacgatgtcaaccaagaagccatcaacggtgttaccgccgacttgtctcatatagacacccccatttccgtgtcgagccactctcctgcaggtggcattgagaactgtttgcataacgcttctattgttgtcattcctgcaggtgttccaagaaaacctggcatgactcgtgatgacttatttaacgtgaatgctggtatcattagccagctcggtgattctattgcagaatgttgtgatctttccaaggtcttcgttcttgtcatttccaaccctgttaattctttagtcccagtgatggtttctaacattcttaagaaccatcctcagtctagaaattccggcattgaaagaaggatcatgggtgtcaccaagctcgacattgtcagagcgtccacttttctacgtgagataaacattgagtcagggctaactcctcgtgttaactccatgcctgacgtccctgtaattggcgggcattctggcgagactattattccgttgttttcacagtcaaacttcctatcgagattaaatgaggatcaattgaaatatttaatacatagagtccaatacggtggtgatgaagtggtcaaggccaagaacggtaaaggtagtgctaccttatcgatggcccatgccggttataagtgtgttgtccaatttgtttctttgttattgggtaacattgagcagatccatggaacctactatgtgccattaaaagatgcgaacaacttccccattgctcctggggcagatcaattattgcctctggtggacggtgcagactactttgccataccattaactattactacaaagggtgtttcctatgtggattatgacatcgttaataggatgaacgacatggaacgcaaccaaatgttgccaatttgcgtctcccagttaaagaaaaatatcgataagggcttggaattcgttgcatcgagatctgcatcatcttaa

SEQ ID NO: 9888 - DNA, 1134 bp, Artificial Sequence
  Description of Artificial Sequence: Synthetic polynucleotide
atgcctcactctgttacaccatccatagaacaagattctttaaaaattgccattttaggtgctgccggtggtatcgggcagtctttatctttacttttgaaagctcagttgcaataccagttaaaggagagcaacagaagcgttacccacattcatttggctctttacgatgtcaaccaagaagccatcaacggtgttaccgccgacttgtctcatatagacacccccatttccgtgagtagccactctcctgcaggtggcattgagaactgtttgcataacgcttctattgttgtcattcctgcaggtgttccaagaaaacctggcatgactcgtgatgacttatttaacgtgaatgctggtatcattagccagctcggtgattctattgcagaatgttgtgatctttccaaggtcttcgttcttgtcatttccaaccctgttaattctttagtcccagtgatggtttctaacattcttaagaaccatcctcagtctagaaattccggcattgaaagaaggatcatgggtgtcaccaagctcgacattgtcagagcgtccacttttttacgtgagataaacattgagagtgggttgactcctcgtgttaactccatgcctgacgtccctgtaattggcgggcattctggcgagactattattccgttgttttcccagtccaacttcttgtccagattaaatgaggatcaattgaaatatttaatacatagagtccaatacggtggtgatgaagtggtcaaggccaagaacggtaaaggtagtgctaccttatctatggcccatgccggttataagtgtgttgtccaatttgtttctttgttattgggtaacattgagcagatccatggaacctactatgtgccattaaaagatgcgaacaacttccccattgctcctggggcagatcaattattgcctttagtggacggtgcagactactttgccataccattaactattactacaaagggtgtttcctatgtggattatgacatcgttaataggatgaacgacatggaacgcaaccaaatgttgccaatttgcgtctcccagttaaagaaaaatatcgataagggcttggaattcgttgcatctagatctgcatcttcttga

SEQ ID NO: 9889 - DNA, 1431 bp, Saccharomyces cerevisiae
atgttacaagataataatgggcccgctgttaagagggcgaaaccctcagaaaggttgcaatgtgaatatttcatggaaaaaaagaaacgaagatgtgggatgaccaggagttctcagaacttgtattgttcagagcatctgaatttgatgaaaaaggcggctaattctcaagtgcataataagaatggcagtgaagcagagaaagaaagagaaagagtaccttgtccgctggatcctaaccatacggtttgggcagatcaattaaaaaagcatttgaaaaaatgcaacaagaccaaactaagccatttaaacgatgataagccatactatgaaccgggctataacggagagaatggactgttatcgtcgtctgttaaaatagatattactgcggaacatttggtacaatctattgaattgctgtataaggtgtttgagggagaatccatggacgagctgcctttgagacaactgaacaataagcttatgtctctaaaacgattccctcaattgccttcgaatactaaacatgctgtacaacagtcttcactgatcgaaaacttagtggacgctggcgcatttgagaggccagaaagtttaaacttcattgagtttggatgtggcagggccgaattctcgcgctatgtcagtctgtaccttttaacacaattgacaagccttccagcggagcactcgggttcaaactcgaacgagttcgtgttgattgacagagcaactaataggatgaagttcgataaaaagataaaagacgatttttcagaaataaagtcaaactcaccttccaaacctattagctgccccagcatcaaaaggataaagatcgacattagggacttgaagatggatccgattttaaaatcgacacctggggacgatatacaatacgtgtgcatctcaaaacacctttgtggtgtagctacagatctaactttgaggtgtataggcaacagctcaattttacatggcgacgataacaacggatgcaaccccaaactaaaggcaatttgtattgccatgtgctgcaggcatgtctgtgactacggcgactatgtcaaccgcagttacgttacatcacttgttgaaaagtatagggcccatggctccatcttgacgtacgaaacctttttccgcgttttaactaaactctgttcatggggtacctgcggaaggaaaccaggtacggctattacagatatagtaaacgttgtcgaatcgtttgaaggggctgagccatatacaataaccattaaagagagagaaaatattggattaatggctaggcgtgtaatcgacgagggcaggttggtatatgtgaaagaaaagtttacagagtttaatgcggagctgataaggtacgtagaatccgatgtttctttagagaacgttgctatgttagtttataagaaatag

SEQ ID NO: 9890 - DNA, 1431 bp, Artificial Sequence
  Description of Artificial Sequence: Synthetic polynucleotide
atgttacaagataataatgggcccgctgttaagagggcgaaacccagtgaaaggttgcaatgtgaatatttcatggaaaaaaagaaaagaagatgtgggatgaccaggagttctcagaacttgtattgttctgagcatttgaatttgatgaaaaaggcggctaattctcaagtgcataataagaatggcagtgaagcagagaaagaaagagaaagagtaccttgtccgttagatcctaaccatacggtttgggcagatcaattaaaaaagcatttgaaaaaatgcaacaagaccaaattaagccatttaaacgatgataagccatactatgaaccgggctataacggagagaatggattattatcttcttctgttaaaatagatattactgcggaacatttggtacaatctattgaattgttatataaggtgtttgagggagaatccatggacgagcttcctttgagacaattgaacaataagcttatgtctttgaaaagattccctcaattgccttccaatactaaacatgctgtacaacagtcttctttgatcgaaaacttagtggacgctggcgcatttgagaggccagaaagtttaaacttcattgagtttggatgtggcagggccgaattcagtcgctatgtcagtttataccttttaacacaattgacaagccttccagcggagcactctggttccaactccaacgagttcgtgttgattgacagagcaactaataggatgaagttcgataaaaagataaaagacgatttttctgaaataaagtctaactctccttccaaacctattagctgccccagcatcaaaaggataaagatcgacattagggacttgaagatggatccgattttaaaatctacacctggggacgatatacaatacgtgtgcatctccaaacacctttgtggtgtagctacagatttgactttgaggtgtataggcaacagctctattttacatggcgacgataacaacggatgcaaccccaaattgaaggcaatttgtattgccatgtgctgcaggcatgtctgtgactacggcgactatgtcaaccgcagttacgttacatctcttgttgaaaagtatagggcccatggctccatcttgacgtacgaaacctttttccgcgttttaactaaactctgttcttggggtacctgcggaaggaaaccaggtacggctattacagatatagtaaacgttgtcgaaagttttgaaggggctgagccatatacaataaccattaaagagagagaaaatattggattaatggctaggcgtgtaatcgacgagggcaggttggtatatgtgaaagaaaagtttacagagtttaatgcggagttgataaggtacgtagaatccgatgtttctttagagaacgttgctatgttagtttataagaaatga

SEQ ID NO: 9891 - DNA, 1302 bp, Saccharomyces cerevisiae
atgaagaaatatctgctgtatatggtacaagttcatttgaactttagaagagcagaactggaatcgttagcagacctatataatctttccatagacttttcgcagtacgatgccaatagccctttctttattgtagagctggaaaatgatcagcaagcaaaggattggattaagaggtctattttaaccagaggtatttatgagtattgggggcagggtacaacgctcgatgagctgcataaagatattcagcgtcagtctaactttgaacaggatctgcaattgaaattcaaacattccacttttaagttcgaattcgaatgctataaaggcaacagtaaagctaagagggtagagcagattgaaactttccgttaccttggctttgaaggaaagattgatatgaaacatcctcaagaggttttcactgttatagaagagtacacaccaatatcggaaaacgttggtggtaagacccccaccaggatttattttggtaggcaggttcagatgagcaataggagtgccatggagaaatatgatttgaagaaaagaccttataaaggtacaactagcttcgaagcagaattatcgttggtcagcgccaatatagctcaagtgaaaccgggaactataatgtacgacccgtttgcaggtacaggatcctttttggtagctggtgggcattttggttctttagtgattggttcggatatagatggcagaatgattcgtggtaagggtgctcaagtgaacatttcggccaacttcaaaaaatatggcgagagttctcaattcctcgacgtgttgaccatggactttacaaataacgcattaagaaacaatcttgtcattgatactattttgtgtgatcctccatatggtatcagagaaagcataaaagtcctaggtgctaaggatccagaaagatttctaggcaaggaagatatggaaattgacggtgaaaaggcatatttgcgtcgcgattatattccaaccaaaaaaccgtatgctctagattcattactggatgatcttttacaatactcttccgaaagattaccgattggcggaagattagccttctggatgcccactgcaaacgacgccaatattgaaactattgtcccaatgcacgaaaatctagagctaaaatacaactgcgttcaagaattcaataaatggtcaaggagactactggtttatattaataggggtagcactttcaatggatcaagtaatcatggcataaaacgttcaaaagataatttcagggagcggtacttcaataattttaactga
